United States Patent Application Publication US 2018/0126003 A1 - sequence listing, part 154

SEQ ID NO: 270345 - DNA, 2619 bp, Artificial Sequence
  derived and/or modified sequence
atgggggattcggatgacgagtacgataggcgacgcagagataaatttagaagggagcgatctgactatgaccggagccgagaaagagacgaaaggcgcagaggggacgactggaatgacagggaatgggatagggggcgtgagcggaggagtcggggagagtatcgtgattatgacagaaaccgcagggaaagattctcgccaccgaggcatgaactaagtcctccccagaagcgaatgcgacgggactgggacgaacactcctctgacccatatcactcaggctacgagatgccttacgcaggtgggggaggagggcctacatatgggccaccccaaccctggggtcatcctgacgtccatatcatgcagcaccatgtgctgccaatacaagccagactggggagcatcgccgagattgatctcggcgtgccaccgcctgtgatgaaaacctttaaggagttcttgctgtccctggatgactcagttgacgaaaccgaagccgttaaaaggtataatgattacaagctggactttcgccgtcagcaaatgcaagatttctttctggcccataaagacgaggagtggttcaggtcaaagtaccacccagatgaagttggaaagagacgacaggaagccaggggggctctccagaatcgcctgcgggtgtttctcagtctcatggagaccggctggtttgataatctgctgctggatatcgataaggcggacgcaattgtaaaaatgctggatgctgctgtcattaagatggaagggggtacagagaatgatcttcggatcctggagcaggaggaggaggaggagcaggccggaaagcctggcgagccttctaagaaggaggagggacgagcaggtgcagggttaggtgacggcgaaagaaagactaatgataaggacgagaaaaaagaggacggaaagcaagccgagaatgatagcagcaacgatgacaagaccaagaaatcggaaggcgatggagataaagaagaaaagaaagaagatagtgagaaggaggccaagaagtcctccaagaagcggaatagaaagcacagcggagacgactcttttgacgagggatccgtttctgagagcgaaagcgaatccgaaagtggacaggcggaggaagaaaaggaggaagcagaggaagctctgaaggaaaaggagaagcccaaggaggaggagtgggagaaacccaaggacgccgctggactggaatgtaagccacgtccccttcacaagacatgttctctctttatgagaaacatcgcgcctaacattagccgagccgaaatcatctctctgtgtaaaagatacccaggattcatgagagtagccctgtcggaaccacagccagagcgacgtttttttagacggggatgggttactttcgatcgttctgtgaacatcaaagaaatttgttggaatttgcaaaatatccggctgcgggagtgtgaactgtccccgggagtgaaccgcgatctcaccagacgagtgcgcaacatcaatggaattacacagcataaacagatcgtgagaaacgatataaaactggctgccaaacttatacacacccttgacgacagaacccaactctgggcctcagagccagggacccctcccctcccaacgtccctgccatcacagaaccccatcctgaagaacataaccgattatctgatagaagaggtcagtgccgaggaggaggaactgttggggagttctggaggcgctcctcccgaggaacctcccaaagagggaaatcccgctgaaattaatgtggagagggatgagaaattaatcaaggtattggacaaattgctgctgtacctgaggattgtgcatagcctggactactataatacttgcgaatatcccaatgaggatgagatgcccaaccggtgcggcatcatccatgtgaggggacccatgcctccaaataggatctctcatggcgaggtcttggaatggcagaagactttcgaagaaaaactcacccccctcttaagcgtgagggagagtctctctgaggaagaggcccagaaaatgggcaggaaagacccggagcaagaggtggaaaaattcgtaacgtcaaacacacaggaactgggtaaagacaaatggctgtgccctctgtcgggaaagaagtttaagggtccagaattcgttcggaagcatatttttaataagcatgcagaaaaaattgaggaggtgaagaaagaggtagcgttcttcaacaactttttaacagatgccaagcgacctgctttgcccgaaatcaaaccggcacagcctcccggaccggcacaatctctgaccccaggactaccctacccccaccagactccccagggcctcatgccatacggtcagccaaggccacctatcctgggctatggagccggagctgtgagacccgcagtgccaacagggggtcctccatacccacatgctccatacggtgcgggtagaggaaactacgatgcctttcggggacaggggggttatcctggtaagcccaggaatagaatggtccggggtgacccgagggcgatcgttgagtacagagacctcgacgcccctgacgacgtagattttttctag

SEQ ID NO: 270346 - DNA, 2954 bp, Artificial Sequence
  derived and/or modified sequence
gggtgacgcaggcgcagcgcgggctgcgcgcgctactgcccatccccggttgtcccacttttgttcgcctctcttcggccctctactcaagagctccgtctccgtctcgccctcctcgaagtcctcgtcgcgcgcccgcgacccaggtcgccctgaaatctagcccgtccgagcgcgagtccaacgccgcggccgcaccaaggccccctcagaccgtgccatgggtgacagtgatgacgagtacgatcgaaggcgcagggacaagttcagaagagagcgcagcgactacgaccgttcccgcgagagagatgaaagacgtcgaggggacgattggaatgacagagagtgggaccgtggccgtgagcgccgtagtcggggtgaatatcgggactatgaccggaatcggcgagagcgcttctcgccacctcgccacgaactcagcccgccacagaagcgcatgaggagagactgggatgagcacagctctgacccataccacagtggctatgagatgccctatgctggggggggtgggggcccaacttatggcccccctcagccctggggccaccctgacgtccacatcatgcagcaccatgtcctgcctatccaggccaggctgggcagcattgcagagattgacctgggtgtgccgccgcccgtgatgaagaccttcaaggagtttctcctctccctggatgactcggtggatgagacggaggccgtcaagcgctataatgactacaagctggatttccggaggcaacagatgcaggatttcttcctggcgcacaaagatgaggagtggtttcggtctaagtaccacccagatgaggtggggaagcgtcggcaggaggcccggggggccctgcaaaaccgactgagggtcttcctgtccctcatggagactggctggtttgataaccttctcctggacatagacaaagctgatgccattgtcaagatgctggatgcagccgtgattaagatggaaggaggcacggagaatgatcttcgcatcctggagcaggaggaggaggaggagcaggcaggaaagcctggggagcccagcaagaaagaagaaggacgggctggagcaggcctaggggacggggagcgcaaaaccaacgacaaggatgagaagaaggaagacggcaagcaggctgagaatgacagttctaatgatgacaaaacaaagaagtcggagggtgatggggacaaggaagagaagaaagaagactccgagaaggaagccaaaaagagtagcaagaagcggaaccggaagcacagtggtgacgacagctttgacgagggcagcgtgtcagagtctgagtcggagtcagagagcggccaggctgaggaggagaaggaggaggccgaagaagcgctcaaggagaaggagaagcccaaggaagaagaatgggagaagcccaaggacgccgcggggctggagtgcaagccgcggccgctgcataagacctgctccctcttcatgcgcaacatcgcgcccaacatctcccgggccgagatcatctccctttgtaaaaggtacccaggctttatgcgggtggcgctctcagagccccagccagagaggaggtttttccgtcgtggctgggtgaccttcgaccgcagtgttaacattaaagagatctgttggaacctgcagaacatccgtctccgggagtgtgagctgagccctggtgtgaacagggacctgacccggcgcgttcgcaacatcaacggcatcacccagcacaagcagattgtgcgcaacgacatcaagctggcggccaagctgatccacacgctggatgacaggacacagctttgggcctcagaaccagggacgcctcccctgcccacgagcctgccctcgcaaaacccgatcttgaagaatatcaccgactacctgatcgaggaagtaagcgccgaggaggaggagctgctggggagcagcgggggcgctcctcctgaggagcctcctaaggaagggaacccggcagagatcaacgtggagcgggatgagaagttgattaaggtcttggacaagctcctcctttacctgcgcatcgtgcattccttggattattacaacacctgtgagtaccccaacgaggacgagatgcccaatcgctgtgggatcatccacgttcgggggcccatgccacccaaccgcatcagtcacggggaagtgctggagtggcagaagacttttgaggagaagctcacgccgttgctgagtgtgcgggagtcactctcagaggaagaggcccagaagatggggcgcaaagacccagagcaggaagtggagaagttcgtcacctccaacacgcaggaactgggcaaggataagtggctgtgtcctctcagtggcaagaaattcaagggtcctgagtttgtgcgcaaacatatcttcaacaagcatgcagagaaaattgaggaagtgaaaaaggaagtcgcgttttttaacaacttcctcactgatgctaagcgcccagctctgcctgagatcaagccagcccagccacctggccccgcccagagtttgaccccaggactcccctacccacaccagactccccagggcctgatgccctatggtcagccccggcccccgatcttgggctatggagctggtgctgtccgccctgcagtccccacaggaggccctccatacccccatgccccgtatggtgctggtcgagggaactatgatgccttccgaggccagggaggttatcctgggaaacctcgcaacaggatggttcgtggagacccaagggccattgtggaatatcgggacctggatgccccagacgatgttgatttcttttgagccgtcccccgttcctcagtcctgtatcatccatacttgtactaccttgtcctatgaagctctgagaattttttgtacgatcagccttactgctaataaaagcacttccacaggg

SEQ ID NO: 270347 - protein, 871 aa, Artificial Sequence
  derived and/or modified sequence
MGDSDDEYDRRRRDKFRRERSDYDRSRERDERRRGDDWNDREWDRGRERRSRGEYRDYDRNRRERFSPPRHELSPPQKRMRRDWDEHSSDPYHSGYEMPYAGGGGGPTYGPPQPWGHPDVHIMQHHVLPIQARLGSIAEIDLGVPPPVMKTFKEFLLSLDDSVDETEAVKRYNDYKLDFRRQQMQDFFLAHKDEEWFRSKYHPDEVGKRRQEARGALQNRLRVFLSLMETGWFDNLLLDIDKADAIVKMLDAAVIKMEGGTENDLRILEQEEEEEQAGKPGEPSKKEEGRAGAGLGDGERKTNDKDEKKEDGKQAENDSSNDDKTKKSEGDGDKEEKKEDSEKEAKKSSKKRNRKHSGDDSFDEGSVSESESESESGQAEEEKEEAEALKEKEKPKEEEWEKPKDAAGLECKPRPLHKTCSLFMRNIAPNISRAEIISLCKRYPGFMRVALSEPQPERRFFRRGWVTFDRSVNIKEICWNLQNIRLRECELSPGVNRDLTRRVRNINGITQHKQIVRNDIKLAAKLIHTLDDRTQLWASEPGTPPLPTSLPSQNPILKNITDYLIEEVSAEEEELLGSSGGAPPEEPPKEGNPAEINVERDEKLIKVLDKLLLYLRIVHSLDYYNTCEYPNEDEMPNRCGIIHVRGPMPPNRISHGEVLEWQKTFEEKLTPLLSVRESLSEEEAQKMGRKDPEQEVEKFVTSNTQELGKDKWLCPLSGKKFKGPEFVRKHIFNKHAEKIEEVKKEVAFFNNFLTDAKRPALPEIKPAQPPGPAQSLTPGLPYPHQTPQGLMPYGQPRPPILGYGAGAVRPAVPTGGPPYPHAPYGAGRGNYDAFRGQGGYPGKPRNRMVRGDPRAIVEYRDLDAPDDVDFF

SEQ ID NO: 270348 - protein, 110 aa, Artificial Sequence
  derived and/or modified sequence
MSTALTHTTVAMRCPMGGGGGPTYGPPQPWGHPDVHIMQHHVLPIQARLGSIAEIDLGVPPPVMKTFKEFLLSLDDSVDETEAVKRYNDYKLDFRRQQMQDFFLAHKDEE

SEQ ID NO: 270349 - DNA, 2616 bp, Artificial Sequence
  derived and/or modified sequence
atgggcgacagcgacgacgagtacgacagaagaagaagagacaagttcagaagagagagaagcgactacgacagaagcagagagagagacgagagaagaagaggcgacgactggaacgacagagagtgggacagaggcagagagagaagaagcagaggcgagtacagagactacgacagaaacagaagagagagattcagcccccccagacacgagctgagccccccccagaagagaatgagaagagactgggacgagcacagcagcgacccctaccacagcggctacgagatgccctacgccggcggcggcggcggccccacctacggccccccccagccctggggccaccccgacgtgcacatcatgcagcaccacgtgctgcccatccaggccagactgggcagcatcgccgagatcgacctgggcgtgcccccccccgtgatgaagaccttcaaggagttcctgctgagcctggacgacagcgtggacgagaccgaggccgtgaagagatacaacgactacaagctggacttcagaagacagcagatgcaggacttcttcctggcccacaaggacgaggagtggttcagaagcaagtaccaccccgacgaggtgggcaagagaagacaggaggccagaggcgccctgcagaacagactgagagtgttcctgagcctgatggagaccggctggttcgacaacctgctgctggacatcgacaaggccgacgccatcgtgaagatgctggacgccgccgtgatcaagatggagggcggcaccgagaacgacctgagaatcctggagcaggaggaggaggaggagcaggccggcaagcccggcgagcccagcaagaaggaggagggcagagccggcgccggcctgggcgacggcgagagaaagaccaacgacaaggacgagaagaaggaggacggcaagcaggccgagaacgacagcagcaacgacgacaagaccaagaagagcgagggcgacggcgacaaggaggagaagaaggaggacagcgagaaggaggccaagaagagcagcaagaagagaaacagaaagcacagcggcgacgacagcttcgacgagggcagcgtgagcgagagcgagagcgagagcgagagcggccaggccgaggaggagaaggaggaggccgaggccctgaaggagaaggagaagcccaaggaggaggagtgggagaagcccaaggacgccgccggcctggagtgcaagcccagacccctgcacaagacctgcagcctgttcatgagaaacatcgcccccaacatcagcagagccgagatcatcagcctgtgcaagagataccccggcttcatgagagtggccctgagcgagccccagcccgagagaagattcttcagaagaggctgggtgaccttcgacagaagcgtgaacatcaaggagatctgctggaacctgcagaacatcagactgagagagtgcgagctgagccccggcgtgaacagagacctgaccagaagagtgagaaacatcaacggcatcacccagcacaagcagatcgtgagaaacgacatcaagctggccgccaagctgatccacaccctggacgacagaacccagctgtgggccagcgagcccggcaccccccccctgcccaccagcctgcccagccagaaccccatcctgaagaacatcaccgactacctgatcgaggaggtgagcgccgaggaggaggagctgctgggcagcagcggcggcgccccccccgaggagccccccaaggagggcaaccccgccgagatcaacgtggagagagacgagaagctgatcaaggtgctggacaagctgctgctgtacctgagaatcgtgcacagcctggactactacaacacctgcgagtaccccaacgaggacgagatgcccaacagatgcggcatcatccacgtgagaggccccatgccccccaacagaatcagccacggcgaggtgctggagtggcagaagaccttcgaggagaagctgacccccctgctgagcgtgagagagagcctgagcgaggaggaggcccagaagatgggcagaaaggaccccgagcaggaggtggagaagttcgtgaccagcaacacccaggagctgggcaaggacaagtggctgtgccccctgagcggcaagaagttcaagggccccgagttcgtgagaaagcacatcttcaacaagcacgccgagaagatcgaggaggtgaagaaggaggtggccttcttcaacaacttcctgaccgacgccaagagacccgccctgcccgagatcaagcccgcccagccccccggccccgcccagagcctgacccccggcctgccctacccccaccagaccccccagggcctgatgccctacggccagcccagaccccccatcctgggctacggcgccggcgccgtgagacccgccgtgcccaccggcggccccccctacccccacgccccctacggcgccggcagaggcaactacgacgccttcagaggccagggcggctaccccggcaagcccagaaacagaatggtgagaggcgaccccagagccatcgtggagtacagagacctggacgcccccgacgacgtggacttcttctag

SEQ ID NO: 270350 - DNA, 2616 bp, Artificial Sequence
  derived and/or modified sequence
atgggagacagcgacgatgagtatgacagacgaaggagggacaaattccgccgggagagatcagattacgatcgctcccgagagagggatgagcggaggcgtggcgacgattggaacgatcgggagtgggacagaggacgcgagagacgaagcaggggtgagtatagggactatgatcgaaaccggcgggaacgcttcagtccccctcgacacgagctgagccctccccaaaaacggatgaggagggactgggatgagcacagcagtgacccctatcactccgggtatgagatgccttacgcaggggggggaggggggcctacgtacggtccacctcagccttgggggcatccggatgtccacatcatgcagcaccatgttctgccaatccaggccagactgggctccattgcggaaattgacttaggcgtgccaccccctgtaatgaaaacttttaaagaatttctcctaagcttggatgacagcgtagacgaaactgaggccgttaaacgatataacgactataagctggattttcgcagacagcagatgcaagacttttttctggcccataaggacgaggaatggtttcgcagtaaatatcaccctgatgaggttgggaagagacggcaggaagctagaggtgccctgcagaatagattacgggttttcctgtctcttatggagaccggctggtttgacaacctcctgttagacattgacaaggccgacgctatcgtgaagatgcttgatgccgctgtgattaagatggagggcggaaccgagaacgatctccgtatcctggagcaggaggaggaggaagagcaggcaggaaaacctggtgagccatccaagaaggaagagggcagggcgggagcaggactcggggacggggagcgcaagacaaacgacaaagatgagaagaaggaggacggaaagcaagctgagaatgacagtagcaatgatgacaagaccaaaaagagcgaaggtgacggcgacaaggaagaaaaaaaggaagattctgaaaaggaagctaaaaaatcgtccaagaaacggaataggaagcattctggcgatgattcttttgatgagggtagcgtgagcgagagcgagtctgagtccgagtctggccaggccgaagaggagaaagaagaagccgaagccctaaaggaaaaggagaagccgaaggaggaggagtgggaaaagcccaaagatgccgccggcctggagtgcaaaccaagacctcttcataaaacatgctccttgttcatgcggaacatcgccccgaacatcagtcgcgccgagatcatctcactatgcaagcggtacccaggttttatgcgggtggctctcagcgaacctcaacctgagcgtcgcttcttccgcaggggatgggtgacctttgatcgctcggtgaacatcaaggagatttgttggaatctgcagaatatacgtctcagggagtgtgaactaagccccggagtaaatagggatctcacgagacgtgttcggaatataaatggcatcacgcaacataagcagattgtccgaaacgatatcaaacttgccgccaaacttatccatactctagatgatcggactcagttatgggcctccgaacccggcactccccctctgcctacttctctcccgagccaaaatcctatactgaagaacattaccgattacctaatagaggaggtctctgcagaggaagaagagttactgggaagctctggcggtgctccccctgaggagccccccaaggaggggaatcccgctgaaatcaacgtggagcgggatgagaagttgatcaaggtattggataagttgctcctatacctgcgcatagttcactcactggattactataacacctgtgaataccctaatgaggacgagatgcctaacaggtgcggcattattcatgtgcgaggcccaatgccgccaaatagaatttcccacggggaggttctggaatggcagaaaacatttgaagagaaactgactcccctgttgagcgtgcgcgagtccctatccgaagaagaggctcaaaagatggggcgtaaggaccctgaacaggaggtcgagaagtttgtgacctcaaatacccaggaactcggcaaagacaagtggctgtgcccactttctggtaaaaagttcaagggccccgagtttgtgcggaagcatatattcaataagcatgcggagaaaattgaagaggtcaaaaaagaggttgctttttttaacaactttcttacggacgcgaaaagacctgcactaccagaaatcaaacctgctcagcccccaggccccgcacagtctttgactccaggcctgccttatccccatcagaccccccagggcctgatgccatatggacagccacgaccacccatcttggggtatggtgcgggagcggtaagacccgcggtaccaactggtggaccgccctatcctcatgcgccatacggcgcaggtcgtggaaactacgacgctttccgcggccagggggggtatcctggcaagccacggaatcgcatggtgagaggcgatccacgagcgatcgtcgagtaccgggatcttgacgcgcctgatgatgttgacttcttctag

SEQ ID NO: 270351 - DNA, 2616 bp, Artificial Sequence
  derived and/or modified sequence
atgggagacagtgatgatgaatatgacagaagaagaagagacaagttcagaagagagaggagtgactatgacaggagccgggagagagatgagaggagaagaggagatgactggaatgaccgggagtgggaccggggccgggagaggaggagcagaggagagtacagagattatgacaggaacagaagagagcgcttcagcccccccaggcatgagctgagccccccccagaagaggatgagaagagactgggatgagcacagcagtgacccctaccacagcggctatgagatgccctatgccggcggcggcggcggccccacctacggccccccccagccctggggccacccagatgtgcacatcatgcagcaccacgtgctgcccatccaggcccggctgggcagcattgctgagattgacctgggcgtgcccccacctgtgatgaagaccttcaaggagttcctgctgagcctggatgacagcgtggatgaaacagaggccgtgaagcgctacaatgactacaagctggacttccggcggcagcagatgcaggacttcttcctggcccacaaggatgaggagtggttccgcagcaagtaccacccagatgaggtgggcaagaggcggcaggaggcccggggggccctgcagaaccggctgcgggtcttcctgagcctgatggagaccggctggtttgacaacctgctgctggacatcgacaaggcagatgccatcgtgaagatgctggatgctgctgtgatcaagatggagggcggcacagaaaatgacctgcgcatcctggagcaggaggaggaggaggagcaggccggcaagccaggagagcccagcaagaaggaggagggccgggccggggccggcctgggagatggagagaggaagaccaatgacaaggatgagaagaaggaggatggcaagcaggccgagaatgacagcagcaatgatgacaagaccaagaagtcagaaggagatggagacaaggaggagaagaaggaggacagcgagaaggaggccaagaagagcagcaagaagaggaacaggaagcacagcggagatgacagctttgatgagggctctgtgtctgagagcgagagcgagagcgagagcggccaggccgaggaggagaaggaggaggccgaggccctgaaggagaaggagaagcccaaggaggaggagtgggagaagcccaaggatgctgctggcctggagtgcaagccccggcccctgcacaagacctgcagcctcttcatgagaaatattgcccccaacatcagcagagctgagatcatcagcctgtgcaagcgctacccaggcttcatgagggtggccctgtctgagccccagcctgagcggcgcttcttccggcggggctgggtgacctttgacagatctgtgaacatcaaggagatctgctggaacctgcagaacatccggctgcgggagtgtgagctgagccctggggtgaacagagacctgaccaggagagtgaggaacatcaatggcatcacccagcacaagcagatcgtgagaaatgacatcaagctggccgccaagctgatccacaccctggatgacaggacccagctgtgggccagcgagcccggcaccccacccctgcccaccagcctgcccagccagaaccccatcctgaagaacatcacagactacctgattgaggaggtgtctgctgaggaggaggagctgctgggcagcagtggaggagcccctcctgaggagccccccaaggagggcaacccagctgagatcaacgtggagagagatgagaagctgatcaaggtgctggacaagctgctgctgtacctgagaattgtgcacagcctggactactacaacacctgtgagtacccaaatgaagatgagatgcccaacagatgtggcatcatccacgtgcggggccccatgccacccaaccgcatcagccatggagaggtgctggagtggcagaagacctttgaggagaagctgacccccctgctgtctgtgcgggagagcctgtctgaggaggaggcccagaagatgggcaggaaggaccctgagcaggaggtggagaagtttgtgaccagcaacacccaggagctgggcaaggacaagtggctgtgccccctgagcggcaagaagttcaagggccctgagtttgtgaggaagcacatcttcaacaagcacgccgagaagattgaggaggtgaagaaggaggtggccttcttcaacaacttcctgacagatgccaagaggcctgccctgcctgagatcaagccagcccagcccccaggccctgcccagagcctgaccccaggcctgccctacccccaccagaccccccagggcctgatgccctacggccagccccggccccccatcctgggctatggagctggagctgtgcggcctgctgtgcccaccggcggccccccctacccccacgccccctacggggccggccggggcaactatgatgccttccggggccagggcggctacccaggcaagcccaggaacaggatggtgcggggggacccccgggccatcgtggagtacagagacctggatgccccagatgatgtggacttcttctag

SEQ ID NO: 270352 - DNA, 2616 bp, Artificial Sequence
  derived and/or modified sequence
atgggcgacagcgacgacgagtacgaccggcggcggcgggacaagttcaggagggaaaggagcgactatgatcggagcagagagagagacgagaggcgaaggggggatgactggaatgaccgggagtgggacaggggccgggaacgccgctccaggggtgagtatcgcgattatgataggaacagacgggagagattctcccccccccgccacgaactgagccccccacagaaacgaatgaggagagattgggacgaacatagttccgatccttaccacagcggatatgagatgccttacgctggcggggggggaggccccacctacggccctcctcagccatggggtcaccccgacgtgcatatcatgcaacaccacgtccttcccatccaggcgagactgggaagcatcgccgagattgatttgggggtgccgcctcctgtcatgaaaacctttaaggaattccttctgagtctcgacgacagcgtggatgagaccgaagcagtgaagaggtacaatgactacaagttagatttcagacggcagcagatgcaggatttttttctagcacataaagacgaggagtggttccgttctaaatatcaccccgatgaagtgggtaagcggcgtcaagaagcgagaggcgcactgcagaacaggcttagagtgttccttagtctcatggagacaggctggtttgacaatctgctgctggatatagataaagccgacgccatcgtaaagatgttggatgcagctgtgataaagatggaaggaggaacagagaacgatcttaggattttggagcaggaagaagaggaggagcaggcgggtaagccaggggagccctctaaaaaggaagagggaagagccggcgctggactgggggacggtgagaggaagaccaatgataaggatgaaaaaaaggaggacggaaagcaggccgagaacgactcgtcgaatgacgacaagacaaagaagtctgagggtgatggtgataaagaggagaagaaagaagattctgagaaggaggccaaaaagtccagcaagaagagaaaccgcaagcactctggcgacgattcattcgatgaaggatccgtcagtgagtccgagtccgaatctgaaagtgggcaggcagaagaagaaaaagaggaagcagaggctctgaaggagaaagagaagcccaaggaggaggagtgggaaaaaccaaaggacgcagcaggactagagtgcaaaccgagacctctgcacaagacatgcagtctgttcatgcggaatattgccccaaacattagcagggccgaaatcatatctctctgcaagcggtaccctggcttcatgcgcgtggcactatctgaacctcagcccgaacggcgtttttttcgccgcggttgggtcacattcgaccgctccgtcaacattaaagaaatctgctggaatctacaaaatatccgactgcgagaatgtgagctttctccaggcgtaaacagggatctgacccgtcgtgtgagaaatattaatgggattacccagcataagcagatcgtgcggaatgatataaagttagccgccaagctgatccataccctcgatgaccgcactcagctttgggcctcagagcccggcaccccccccttgcccacgtccctgccaagccagaatccaatactgaagaacattacggactacctgatagaggaggtatcagcagaggaagaagaactgctgggctcttctggaggggcacctcccgaggagccaccaaaggagggaaaccccgccgaaattaacgttgaacgcgacgagaaactcatcaaagtgttggacaaactccttttgtacttgcgcatcgtccacagcctagactattacaacacctgcgagtaccctaatgaggacgagatgcctaataggtgcggcatcatacatgtaagggggcccatgccaccgaataggatttctcatggagaagtgctggagtggcaaaaaacctttgaggagaagctgaccccactcttgagcgtccgcgagtctctgagtgaagaggaggctcagaagatgggccgtaaagaccctgaacaggaggttgaaaagtttgttacgtctaatactcaggaactgggtaaggacaagtggttgtgtcccctctccggaaaaaaatttaaagggcccgagttcgtcaggaaacatatcttcaacaagcacgccgaaaagatcgaagaagttaagaaagaggtagcctttttcaacaactttctgacggatgcgaagcgccctgctctcccagaaattaaacccgctcagcccccaggccctgctcaaagcttaacacctggcttgccttacccacaccagactccgcaaggactgatgccgtatggccaacctagaccccccatcctgggctacggggcgggcgcagtaagacccgcagtgcccaccggcggcccgccgtaccctcacgcaccttatggggccgggcgcgggaactatgatgctttccgcgggcagggcggatatcctgggaagccccgcaatcggatggtcagaggtgaccctagggctatcgttgaatatcgggatctcgatgcaccagacgatgtggattttttttag

SEQ ID NO: 270353 - DNA, 2616 bp, Artificial Sequence
  derived and/or modified sequence
atgggcgattccgatgacgaatacgataggcgcaggagagacaaattccgtcgagaacggtccgactatgacaggtctagagaacgggacgagcgacgaaggggtgatgattggaatgatagagaatgggataggggcagggaacgccgtagtagaggtgagtatagagactacgacagaaatagacgggagcgcttttcaccaccgaggcacgaactgagtcctccccagaagcggatgaggagagattgggatgaacactcctccgacccttatcattctggatacgagatgccctatgccggaggtggtggaggccctacttacggtcccccacagccttggggtcacccagacgttcatatcatgcagcaccacgttcttcctatccaggcacgattggggagtatcgccgaaatcgacctcggagtcccaccacccgttatgaaaactttcaaggagttcctgttaagtctcgatgactcggtcgatgagacagaggcggtgaagagatacaacgattacaagctggatttccgaaggcaacagatgcaggactttttcctggcccataaagacgaggaatggttccgatcaaaataccatccagatgaggttgggaagaggcgccaggaggccagaggcgctctgcaaaaccgactccgagtctttctatctctcatggaaaccggctggtttgataacctgttgcttgatatcgacaaggccgatgctattgtcaagatgctggacgccgcagtcataaagatggaaggagggacggagaacgaccttaggatcttggaacaggaagaggaagaggagcaggccggaaagccaggggagccctctaagaaggaggagggccgtgctggggcaggattgggtgatggggaacgcaagacaaacgataaggatgagaagaaggaggatgggaagcaggccgagaatgacagctccaatgacgacaagactaaaaaatctgaaggggatggcgataaggaggaaaagaaggaggacagcgaaaaagaagctaagaagagctcgaagaaacgcaaccgcaaacattccggcgacgactccttcgatgaaggctctgtttctgaatcagaatcggagagtgagtcaggtcaggcagaggaagaaaaggaagaggcagaggcgttaaaggaaaaagagaagcccaaggaggaagagtgggaaaagccaaaagatgccgcagggttggaatgtaaaccacggccattacacaagacttgtagcctatttatgcgaaacatcgcaccaaatatctcaagggcagaaataattagtctatgtaagcgctatcccggattcatgagagtggcactgtccgagccgcagcccgaacgaagattctttaggcgaggatgggttacattcgataggtctgtcaatatcaaagaaatttgttggaacctccagaacattaggcttcgagagtgtgaactaagtcccggtgtcaaccgcgacctcacacgacgggtgcggaacatcaatggtataactcaacataaacagatagtgaggaacgacatcaagctggctgcaaagctcattcatactctcgacgatcgcactcagttgtgggcaagcgaaccgggtacacccccattaccaacctctctcccatcacaaaacccaatcctaaagaatatcactgattacctgattgaagaagtctccgctgaggaagaggagcttctgggctctagtggcggagctcctcctgaagaaccacccaaggaaggcaatccagccgagataaatgtggaaagggacgaaaagctgataaaggttttagacaagctgttgctatatctacgcatcgtccactccctggattattacaacacatgcgaataccccaacgaggacgagatgcctaacagatgcggcatcattcatgtgaggggcccaatgcccccaaataggatctctcacggagaagtcctggaatggcagaaaaccttcgaggaaaagttaactcccctgctgagcgtgagagaatcattgagtgaggaggaggcacagaaaatgggcaggaaagaccccgaacaggaggtcgaaaagtttgtaacaagcaacacacaagagctgggtaaggacaaatggctgtgccctttatccggtaagaagttcaagggaccagagtttgtgcgcaagcacatctttaataagcacgccgaaaaaattgaggaggtcaagaaggaagtcgctttctttaacaatttcctaacagacgcaaagagaccagcattacccgaaatcaagccggctcagccaccgggtccagcgcaatcattaacgcctggattgccctacccgcatcagacaccacaagggctgatgccctatggacagcccaggcctccaatccttggctacggagccggtgccgttaggcctgccgttcccaccggagggcctccatacccacatgctccctatggggctggcagaggcaactatgacgcttttagaggacaaggcggatacccgggaaaacctaggaacaggatggttcggggtgaccccagggccatcgtcgaatacagagacctcgacgccccagacgatgtcgactttttctag

SEQ ID NO: 270354 - DNA, 2892 bp, Artificial Sequence
  derived and/or modified sequence
tttgttcgcctctcttcggccctctactcaagagctccgtctccgtctcgccctcctcgaagtcctcgtcgcgcgcccgcgacccaggtcgccctgaaatctagcccgtccgagcgcgagtccaacgccgcggccgcaccaaggccccctcagaccgtgccatgggtgacagtgatgacgagtacgatcgaaggcgcagggacaagttcagaagagagcgcagcgactacgaccgttcccgcgagagagatgaaagacgtcgaggggacgattggaatgacagagagtgggaccgtggccgtgagcgccgtagtcggggtgaatatcgggactatgaccggaatcggcgagagcgcttctcgccacctcgccacgaactcagcccgccacagaagcgcatgaggagagactgggatgagcacagctctgacccataccacagtggctatgagatgccctatgctggggggggtgggggcccaacttatggcccccctcagccctggggccaccctgacgtccacatcatgcagcaccatgtcctgcctatccaggccaggctgggcagcattgcagagattgacctgggtgtgccgccgcccgtgatgaagaccttcaaggagtttctcctctccctggatgactcggtggatgagacggaggccgtcaagcgctataatgactacaagctggatttccggaggcaacagatgcaggatttcttcctggcgcacaaagatgaggagtggtttcggtctaagtaccacccagatgaggtggggaagcgtcggcaggaggcccggggggccctgcaaaaccgactgagggtcttcctgtccctcatggagactggctggtttgataaccttctcctggacatagacaaagctgatgccattgtcaagatgctggatgcagccgtgattaagatggaaggaggcacggagaatgatcttcgcatcctggagcaggaggaggaggaggagcaggcaggaaagcctggggagcccagcaagaaagaagaaggacgggctggagcaggcctaggggacggggagcgcaaaaccaacgacaaggatgagaagaaggaagacggcaagcaggctgagaatgacagttctaatgatgacaaaacaaagaagtcggagggtgatggggacaaggaagagaagaaagaagactccgagaaggaagccaaaaagagtagcaagaagcggaaccggaagcacagtggtgacgacagctttgacgagggcagcgtgtcagagtctgagtcggagtcagagagcggccaggctgaggaggagaaggaggaggccgaagcgctcaaggagaaggagaagcccaaggaagaagaatgggagaagcccaaggacgccgcggggctggagtgcaagccgcggccgctgcataagacctgctccctcttcatgcgcaacatcgcgcccaacatctcccgggccgagatcatctccctttgtaaaaggtacccaggctttatgcgggtggcgctctcagagccccagccagagaggaggtttttccgtcgtggctgggtgaccttcgaccgcagtgttaacattaaagagatctgttggaacctgcagaacatccgtctccgggagtgtgagctgagccctggtgtgaacagggacctgacccggcgcgttcgcaacatcaacggcatcacccagcacaagcagattgtgcgcaacgacatcaagctggcggccaagctgatccacacgctggatgacaggacacagctttgggcctcagaaccagggacgcctcccctgcccacgagcctgccctcgcaaaacccgatcttgaagaatatcaccgactacctgatcgaggaagtaagcgccgaggaggaggagctgctggggagcagcgggggcgctcctcctgaggagcctcctaaggaagggaacccggcagagatcaacgtggagcgggatgagaagttgattaaggtcttggacaagctcctcctttacctgcgcatcgtgcattccttggattattacaacacctgtgagtaccccaacgaggacgagatgcccaatcgctgtgggatcatccacgttcgggggcccatgccacccaaccgcatcagtcacggggaagtgctggagtggcagaagacttttgaggagaagctcacgccgttgctgagtgtgcgggagtcactctcagaggaagaggcccagaagatggggcgcaaagacccagagcaggaagtggagaagttcgtcacctccaacacgcaggaactgggcaaggataagtggctgtgtcctctcagtggcaagaaattcaagggtcctgagtttgtgcgcaaacatatcttcaacaagcatgcagagaaaattgaggaagtgaaaaaggaagtcgcgttttttaacaacttcctcactgatgctaagcgcccagctctgcctgagatcaagccagcccagccacctggccccgcccagagtttgaccccaggactcccctacccacaccagactccccagggcctgatgccctatggtcagccccggcccccgatcttgggctatggagctggtgctgtccgccctgcagtccccacaggaggccctccatacccccatgccccgtatggtgctggtcgagggaactatgatgccttccgaggccagggaggttatcctgggaaacctcgcaacaggatggttcgtggagacccaagggccattgtggaatatcgggacctggatgccccagacgatgttgatttcttttgagccgtcccccgttcctcagtcctgtatcatccatacttgtactaccttgtcctatgaagctctgagaattttttgtacgatcagccttactgctaataaaagcacttccacaggg

SEQ ID NO: 270355 - DNA, 483 bp, Artificial Sequence
  derived and/or modified sequence
atgagcctcgtcgctggactccgcaacggggcgttgctgctcactggaggaaagggctccggtaagagtacactggctaaggccatatgcaaggaggcattcgacaaactggacgcgcacgtagaaagagtggactgcaaggctctgagaggcaagcgcttagaaaatatccagaagacactggaggttgccttttccgaagctgtgtggatgcagccgtcagttgtcttgcttgatgatctcgatctgattgctggcctccccgctgtccctgagcacgagcatagtcctgacgctgtgcaatctcagcgactcgctcacgcgctaaatgatatgattaaagaatttatcagtatgggcagcttagtggcccttattgccaccagccaaagccagcagtccctgcacccgctgctggtcagcgctcagggggtgcacatctttcagtgcgtccagcacattcagccccctaatcaaaattag

SEQ ID NO: 270356 - DNA, 483 bp, Artificial Sequence
  derived and/or modified sequence
atgagcctggtggccggcctgagaaatggagccctgctgctgactggaggcaagggcagcggcaagagcaccctggccaaggccatctgcaaggaggcctttgacaagctggatgcccacgtggagcgggtggactgcaaggccctgcggggcaagaggctggagaacatccagaagaccctggaggtggccttcagcgaggccgtgtggatgcagcccagcgtggtgctgctggatgacctggacctgattgctggcctgcctgctgtgcctgagcacgagcacagcccagatgctgtgcagagccagaggctggcccacgccctgaatgacatgatcaaggagttcatctccatgggcagcctggtggccctgattgccaccagccagagccagcagagcctgcaccccctgctggtgtctgcccagggcgtgcacatcttccagtgtgtgcagcacatccagccccccaaccagaactag

SEQ ID NO: 270357 - DNA, 483 bp, Artificial Sequence
  derived and/or modified sequence
atgagcctggtggccggcctgcggaacggcgccctgctgctgaccggcggaaagggatctggaaaaagcacgctagccaaggccatctgcaaggaggcttttgataaactggatgcccatgtcgaaagggtagattgcaaggccctccgggggaagcgcctggaaaacatccagaagacactagaggttgcattctctgaggccgtctggatgcaaccgtctgtcgtgctgttggacgatctcgaccttatcgccgggctgcctgcagtccctgaacatgaacacagcccagacgccgtacaatcacagcgcctggcccacgcactgaatgacatgatcaaggagtttatatctatgggttccctcgtagcgctcattgccacctcccagtcccagcaatccctgcatccgctgctggtgagtgcccaaggggtgcatatctttcagtgcgtccaacatatacaaccgccaaatcaaaattag

SEQ ID NO: 270358 - DNA, 483 bp, Artificial Sequence
  derived and/or modified sequence
atgtctctggtggcagggctgaggaatggggcattgctcttgactggaggcaaaggcagtggaaaaagcactcttgcaaaggccatctgtaaggaagcatttgataaactcgacgctcacgttgagagggttgactgcaaagcgctgagaggaaagcggctggagaatattcagaaaactcttgaagtcgccttctctgaggcggtatggatgcagccatctgttgtgttgctggacgatttagacctcatcgcgggactgccagccgtgcccgagcacgaacactcacctgacgctgtccagtcccagcgactcgctcatgcactgaacgacatgataaaagaatttatctctatgggttctcttgtggccctcatcgccacctctcagtcccagcagtcactccatccactgcttgtatctgcacagggcgtacatattttccagtgcgtgcaacacattcagccccctaatcagaattag

SEQ ID NO: 270359 - DNA, 483 bp, Artificial Sequence
  derived and/or modified sequence
atgagcctggtggccggcctgagaaacggcgccctgctgctgaccggcggcaagggcagcggcaagagcaccctggccaaggccatctgcaaggaggccttcgacaagctggacgcccacgtggagagagtggactgcaaggccctgagaggcaagagactggagaacatccagaagaccctggaggtggccttcagcgaggccgtgtggatgcagcccagcgtggtgctgctggacgacctggacctgatcgccggcctgcccgccgtgcccgagcacgagcacagccccgacgccgtgcagagccagagactggcccacgccctgaacgacatgatcaaggagttcatcagcatgggcagcctggtggccctgatcgccaccagccagagccagcagagcctgcaccccctgctggtgagcgcccagggcgtgcacatcttccagtgcgtgcagcacatccagccccccaaccagaactag

SEQ ID NO: 270360 - protein, 127 aa, Artificial Sequence
  derived and/or modified sequence
MNAPPAFESFLLFEGEKKITINKDTKVPNACLFTINKEDHTLGNIIKSQLLKDPQVLFAGYKVPHPLEHKIIIRVQTTPDYSPQEAFTNAITDLISELSLLEERFRVRAGPGGADGVAIKDKQEGIE

SEQ ID NO: 270361 - DNA, 384 bp, Artificial Sequence
  derived and/or modified sequence
atgaacgcaccacctgcattcgaaagcttcctgctgttcgagggtgagaagaaaatcacaattaacaaagatactaaagttcctaatgcatgtttgtttaccatcaacaaggaagaccatacactcggaaatataatcaagtctcagctgctcaaggaccctcaggtcttgtttgctggatacaaggtcccccaccccttggaacacaagattatcatacgcgtgcagactactcctgattacagccctcaggaggcttttacaaacgcaattactgatctgattagcgaactctccctcctggaagagaggttcagagtcagagcaggtcccgggggagccgatggggtcgctatcaaagacaagcaggagggtatagaatag

SEQ ID NO: 270362 - DNA, 384 bp, Artificial Sequence
  derived and/or modified sequence
atgaatgcccccccagcctttgagagcttcctgctgtttgaaggagagaagaagatcaccatcaacaaggacaccaaggtgcccaatgcctgcctcttcaccatcaacaaggaggaccacaccctgggcaacatcatcaagagccagctgctgaaggacccccaggtgctgtttgctggctacaaggtgccccaccccctggagcacaagatcatcatccgggtgcagaccaccccagactacagcccccaggaggccttcaccaatgccatcacagacctgatcagcgagctgagcctgctggaggagcgcttccgggtgcgggccggccctggaggagcagatggagtggccatcaaggacaagcaggagggcatcgagtag

SEQ ID NO: 270363 - DNA, 384 bp, Artificial Sequence
  derived and/or modified sequence
atgaacgccccccccgccttcgagagcttcctgctgttcgagggcgaaaaaaaaatcaccattaacaaggatacaaaggtgccaaatgcatgtctcttcacaattaacaaagaggatcataccttgggcaacatcatcaagtcgcagcttctgaaagatcctcaagtgctttttgccggctacaaggtgccacatcccttggagcacaagattatcatcagagttcagactacccccgactattcaccacaggaggccttcaccaacgccatcaccgacctgatctctgaactgtcgctcctagaggagaggttcagggttcgcgccggccctgggggcgccgacggagtggcgatcaaagacaaacaggagggcatcgagtag

SEQ ID NO: 270364 - DNA, 609 bp, Artificial Sequence
  derived and/or modified sequence
ggcggacccttggggtctggacgcaacggcggcgggagcatgaacgcccctccagccttcgagtcgttcttgctcttcgagggcgagaagaagatcaccattaacaaggacaccaaggtacccaatgcctgtttattcaccatcaacaaagaagaccacacactgggaaacatcattaaatcacaactcctaaaagacccgcaagtgctatttgctggctacaaagtcccccaccccttggagcacaagatcatcatccgagtgcagaccacgccggactacagcccccaggaagcctttaccaacgccatcaccgacctcatcagtgagctgtccctgctggaggagcgctttcgggtgagggcggggcctggaggggcagacggggtggccataaaagacaagcaggaaggaattgagtaggggccagagggggctctgctcggcctgtgagccccgttcctacctgtgcctgaccctccgctccaggtaccacaccgaggagagcggccggtcccagccatggcccgccttgtggccacccctcaccctgacaccgacgtgtcctgtacatagattaggttttatattcctaataaagtatagcgg

SEQ ID NO: 270365 - DNA, 384 bp, Artificial Sequence
  derived and/or modified sequence
atgaacgcccctcctgcctttgagtcatttctgctcttcgaaggcgagaagaagatcactatcaataaggacactaaggtgcccaatgcatgtctgtttacaattaataaggaggatcacaccctgggtaatataataaagagccagttgctgaaggaccctcaggtactgttcgctggctataaggtaccgcacccgttagagcataaaatcatcattcgggtgcaaactacccccgattattccccccaggaagcttttactaatgccattacagacctgatttcagaactgtctctactggaggagagatttcgagtccgggcaggccctggcggtgctgatggcgtggcaataaaagacaagcaggaagggatcgaatag

SEQ ID NO: 270366 - DNA, 384 bp, Artificial Sequence
  derived and/or modified sequence
atgaacgccccccccgccttcgagagcttcctgctgttcgagggcgagaagaagatcaccatcaacaaggacaccaaggtgcccaacgcctgcctgttcaccatcaacaaggaggaccacaccctgggcaacatcatcaagagccagctgctgaaggacccccaggtgctgttcgccggctacaaggtgccccaccccctggagcacaagatcatcatcagagtgcagaccacccccgactacagcccccaggaggccttcaccaacgccatcaccgacctgatcagcgagctgagcctgctggaggagagattcagagtgagagccggccccggcggcgccgacggcgtggccatcaaggacaagcaggagggcatcgagtag

SEQ ID NO: 270367 - DNA, 1410 bp, Artificial Sequence
  derived and/or modified sequence
atgatgaccaccctgcagaacaaggaggagtgcggcaagggccccaagagaatcttcgccccccccgcccagaagagctacagcctgctgccctgcagccccaacagccccaaggaggagacccccggcatcagcagccccgagaccgaggccagaatcagcctgcccaaggccagcctgaagaagaaggaggagaaggccaccatgaagaacgtgcccagcagagagcaggagaagaagagaaaggcccagatcaacaagcaggccgagaagaaggagaaggagaagagcagcctgaccaacgccgagttcgaggagatcgtgcagatcgtgctgcagaagagcctgcaggagtgcctgggcggcatgggcagcggcctggacttcgccgagaccagctgcgcccagcccgtggtgagcacccagagcgacaaggagcccggcatcaccgccagcgccaccgacaccgacaacgccaacggcgaggaggtgccccacacccaggagatcagcgtgagctgggagggcgaggccgcccccgagatcagaaccagcaagctgggccagcccgaccccgcccccagcaagaagaagagcaacagactgaccctgagcaagagaaagaaggaggcccaggacgagaaggtggagaagacccagggcggccacgagcacagacaggaggacagactgaagaagaccgtgcaggaccacagccagatcagagaccagcagaagggcgagatcagcggcttcggccagtgcctggtgtgggtgcagtgcagcttccccaactgcggcaagtggagaagactgtgcggcaacatcgaccccagcgtgctgcccgacaactggagctgcgaccagaacaccgccgacgtgcagtacaacagatgcgacatccccgaggagacctggaccggcctggagagcgacgtggcctacgccagctacatccccggcagcatcatctgggccaagcagtacggctacccctggtggcccggcatgatcgagagcgaccccgacctgggcgagtacttcctgttcaccagccacctggacagcctgcccagcaagtaccacgtgaccttcttcggcgagaccgtgagcagagcctggatccccgtgaacatgctgaagaacttccaggagctgagcctggagctgagcgtgatgaagaagagaagaaacgactgcagccagaagctgggcgtggccctgatgatggcccaggaggccgagcagatcagcatccaggagagagtgaacctgttcggcttctggagcagattcaacggcagcaacagcaacggcgagagaaaggacctgcagctgagcggcctgaacagccccggcagctgcctggagaacggcaaggagagaagacccagagagttcagattctag

SEQ ID NO: 270368 - DNA, 1410 bp, Artificial Sequence
  derived and/or modified sequence
atgatgacgacattacagaataaggaggaatgcggaaagggccccaagcgcatttttgctccccccgcccagaaaagttactctttgcttccatgttcacctaacagccccaaagaggagacccccggcatatccagtccggagacagaggcgagaatctccctccccaaggcctctcttaagaaaaaagaagaaaaagcaactatgaagaacgtcccatcgagggaacaggagaagaagcgaaaggctcaaattaacaaacaggccgagaagaaggagaaggaaaagtcctcgttgacgaatgctgagttcgaagagatcgtccagatcgtcctgcagaagagcctccaggaatgcctgggcggcatgggctccgggcttgatttcgctgagacgtcctgtgcccagcctgtggtcagtacccaaagcgacaaggaacccggaattacggcctctgcaactgacaccgataatgccaacggagaagaagtacctcatactcaggaaatcagcgtctcctgggaaggcgaggcagctcctgagatccggaccagtaaactaggccagcctgatcccgccccatcaaagaaaaagagcaaccgtctcacgctcagtaaacgcaagaaggaggcccaggacgaaaaagttgaaaagacacagggtggccacgagcaccggcaggaagaccggctaaaaaaaaccgtccaggaccatagccaaatccgcgatcagcaaaaaggcgagatttcaggattcggccagtgtctggtgtgggtgcagtgtagcttccctaactgcggtaagtggcgcaggctctgtgggaacattgatccctccgtgctgcctgataattggagctgtgatcagaacaccgccgatgtgcagtacaatcgttgcgatattcctgaagagacttggacaggactggaaagcgatgtggcttacgcctcttacattcccgggtcaatcatctgggcaaagcagtatggatatccatggtggccaggaatgattgagtctgatccagatttaggggagtattttttattcacctcacacttagactcccttccgtcgaaatatcacgtaaccttctttggcgaaacagtcagtcgcgcctggatccctgtcaacatgctgaagaactttcaggaactgtctctcgagctgtctgtaatgaagaaacggagaaacgactgctctcagaagctcggggtggctttaatgatggcccaggaggctgaacagatctccatccaggagcgagtgaacctctttggcttctggagtcgttttaacgggagtaacagcaatggcgagagaaaggaccttcagctgtccggcctgaacagcccgggaagttgtctcgaaaacggcaaggagagaaggcccagggagtttcgattttag

SEQ ID NO: 270369 - DNA, 1410 bp, Artificial Sequence
  derived and/or modified sequence
atgatgaccaccctgcagaacaaggaggagtgtgggaagggccccaagaggatctttgcccccccagcccagaagagctacagcctgctgccctgcagccccaacagccccaaggaggagaccccaggcatcagcagccctgagacagaggcccgcatcagcctgcccaaggccagcctgaagaagaaggaggagaaggccaccatgaagaatgtgcccagccgggagcaggagaagaagaggaaggcccagatcaacaagcaggccgagaagaaggagaaggagaagagcagcctgaccaatgctgagtttgaggagatcgtgcagatcgtgctgcagaagagcctgcaggagtgcctgggcggcatgggcagcggcctggactttgctgagaccagctgtgcccagcctgtggtgtccacccagagcgacaaggagcccggcatcacagccagcgccacagacacagacaatgccaacggggaggaggtgccccacacccaggagatctctgtgtcctgggagggggaggccgcccctgagatccgcaccagcaagctgggccagcctgaccctgcccccagcaagaagaagagcaaccggctgaccctgagcaagaggaagaaggaggcccaggatgagaaggtggagaagacccagggcggccacgagcaccggcaggaggaccggctgaagaagacagtgcaggaccacagccagatccgggaccagcagaagggggagatcagcggcttcggccagtgcctggtgtgggtgcagtgcagcttccccaactgtgggaagtggaggcggctgtgtggcaacatcgaccccagcgtgctgcctgacaactggagctgtgaccagaacacagcagatgtgcagtacaacagatgtgacatccctgaggagacctggacaggcctggagagtgatgtggcctatgccagctacatccctggcagcatcatctgggccaagcagtatggctacccctggtggccaggcatgattgaaagtgaccctgacctgggggagtacttcctgttcaccagccacctggacagcctgcccagcaagtaccacgtgaccttcttcggggagaccgtgtcccgggcctggatccctgtgaacatgctgaagaacttccaggagctgagcctggagctgtctgtgatgaagaagagaagaaatgactgcagccagaagctgggcgtggccctgatgatggcccaggaggccgagcagatcagcatccaggagcgggtgaacctgtttggcttctggagccgcttcaacggcagcaacagcaatggagagaggaaggacctgcagctgagcggcctgaacagccctggcagctgcctggagaatggcaaggagcggcggccccgggagttccgcttctag

SEQ ID NO: 270370 - DNA, 1410 bp, Artificial Sequence
  derived and/or modified sequence
atgatgaccaccctgcagaacaaggaggagtgcggcaagggccccaagcggatctttgctcccccagcccaaaagagctactctttgttgccttgctctcccaattcccccaaggaggaaacaccaggaatctcttcgccagaaactgaggccaggatctccttacccaaagcatcgctcaaaaagaaggaagagaaggcgaccatgaagaatgtcccttcccgcgaacaggaaaagaagcgcaaggcccagataaataagcaggctgaaaaaaaagagaaggaaaaatcaagcctgaccaatgctgagttcgaggaaattgtgcagatagtcctccagaaatctctccaagaatgcctgggtggaatgggctctggattagacttcgctgaaacctcttgtgcccagccagtggtcagtacccaatctgataaggaacccggaataactgctagtgccacagatacggacaacgccaatggagaagaagttccccacacccaggagatttctgtgtcctgggaaggggaagctgcacctgaaattcgaacttcgaaactgggccagcctgacccggcaccttccaagaagaagtccaatcgcttaaccttgtcgaaaaggaaaaaggaggcccaggatgaaaaggtcgagaagacacaggggggtcatgagcataggcaagaagatagactgaaaaaaactgtgcaggatcattcacagattcgggatcagcaaaaaggagagattagtggattcggccagtgtctcgtctgggtgcaatgtagctttcctaactgtgggaagtggcggcggttgtgtggaaatattgacccctccgtactcccagacaactggtcatgcgaccagaacaccgccgacgttcagtacaatcgttgcgacatcccagaggagacttggactggtctggagagcgatgtggcatatgcgtcttacattccggggtctatcatctgggctaagcaatatgggtacccgtggtggccgggcatgatcgaaagcgatcccgacctgggggaatattttctatttacatcacacctcgactcgctcccttctaagtatcacgttacttttttcggggaaacggtttcacgcgcatggatccctgttaatatgctcaagaatttccaggaactcagtttggaactgtccgttatgaagaaacgacgtaatgactgctcccagaaattgggagtcgccttgatgatggctcaggaagccgagcagatctcaatccaggagcgagtgaacctgttcggtttttggagccgtttcaatgggtcaaattccaacggcgagaggaaagatctccagctgtcggggctcaacagtccagggtcttgcctcgagaacgggaaggagaggagacctagggagttccgattttag

SEQ ID NO: 270371 - DNA, 1410 bp, Artificial Sequence
  derived and/or modified sequence
atgatgaccactttgcagaataaagaagaatgtgggaaaggcccaaagcgcattttcgcaccacctgcacagaaaagctactcgctgctcccttgctctcccaactcaccaaaagaagaaactcccggtatcagctccccagagaccgaagcccgaatttcacttcctaaagccagcctaaaaaagaaggaggagaaagcaactatgaaaaacgttccctctagagagcaggaaaagaagcgcaaggctcagattaacaagcaggccgagaaaaaagagaaggagaagtcatctttgacaaacgccgagtttgaggagatagtgcagatcgtgcttcagaaaagccttcaggaatgcctggggggaatgggcagcggactcgatttcgcagaaacatcctgcgcccagcctgtagtgtccacccaatctgacaaagagccagggatcaccgcctcagcaactgataccgacaacgctaatggcgaagaggtcccacacactcaggagatttctgtctcatgggagggcgaagctgctccagaaataagaacatctaagttggggcagccagatcccgcaccgtctaaaaagaaaagcaatcgactgacattaagtaagagaaaaaaggaggctcaggatgaaaaagtggagaaaacccagggaggacatgaacatcgccaggaagaccggctcaaaaagactgtgcaggatcactcccaaattagagaccagcaaaagggggagatctctggttttggacagtgcctggtgtgggttcagtgtagttttcccaattgcgggaaatggcgaaggctgtgtggtaacattgatccctccgtgcttcccgacaactggtcatgtgaccagaataccgccgatgtgcagtacaaccggtgcgacattcctgaggaaacctggactggcctggagagcgatgtcgcatatgcctcttacatcccaggcagtatcatttgggcaaagcagtacggctatccttggtggcccggaatgattgagagcgacccagacctcggcgagtacttccttttcacctcgcatctagactccctgccgtcgaagtaccacgtgactttctttggagaaacggtgtctcgcgcatggatccctgtcaatatgctgaagaatttccaagagctgagcctggagctttctgtaatgaaaaagcggagaaacgattgcagtcagaaactgggcgtagctctgatgatggcacaggaggccgagcaaatcagcatccaggaacgagtgaacctgtttggcttctggagtcgtttcaatgggtccaactcaaatggagagcggaaagacctgcaactttccggccttaactcgccgggttcctgtctggaaaacgggaaggaacggaggccaagggaattccgtttttag

SEQ ID NO: 270372 - DNA, 1658 bp, Artificial Sequence
  derived and/or modified sequence
cgccgttttcccggggagatgcgccgcccggtctccctgccagcggagtgctgggccgaggacagggcggcaggggtgacagtggggtccaggagagtctcaaaatcctaagctttcagtatttgttattgtgaaagaagttaattcacctgaaacagaggaggggcaacctgagttatcagaaagtgacttcctggccttcccttctttactgatcagaggcacacaaagcgtagtttctaagctgaatgatgacaacgttgcagaataaagaagaatgtggaaagggaccaaagagaatctttgccccacctgcacaaaaatcttacagcctgttaccttgtagccctaactcccctaaggaggagaccccggggatcagttccccagagacagaggccaggataagcctgccaaaggccagtttaaagaagaaagaggaaaaagcaaccatgaagaatgttccaagcagggaacaggagaaaaaaagaaaggcacaaatcaacaagcaagcagagaagaaagaaaaggaaaaatcaagtcttaccaatgcagaatttgaggagattgtccagattgttctgcagaagtcccttcaggagtgcttgggagggatgggatctggccttgattttgcagagacttcttgtgcccagcccgtagtatctacccaatcagacaaggagccaggaattactgcttctgctactgatactgataatgctaatggagaggaggtaccacatactcaagagatttcagtgtcttgggaaggtgaagctgcccctgagataaggacatctaagttaggccagccagatcctgcaccctctaagaagaaatccaatagactcaccttaagcaaaagaaagaaggaagctcaagatgagaaggtggagaaaactcaaggtggacatgagcacagacaggaagaccgactaaagaaaacagttcaggatcattctcagatcagggaccagcaaaaaggagagataagtggttttggtcaatgtctggtctgggtccagtgttccttcccaaactgtgggaaatggaggcggctgtgtgggaacattgacccctcagttctcccagataattggtcctgtgatcagaacacagcagatgtgcagtataatcgctgtgatattcctgaggagacctggacagggcttgagagtgatgtggcctatgcctcctacatcccaggatccatcatctgggccaagcaatacggttacccctggtggccaggcatgatagaatctgatcctgacttaggggaatattttctttttacttcccatcttgattccctgccgtctaagtaccatgtgacgttttttggagaaacagtttctcgtgcatggatcccagtcaacatgctaaagaacttccaggagctgtccctggagctatcagtcatgaaaaagcgcagaaatgactgcagccagaaactgggggtggccctgatgatggctcaagaggcagaacagatcagcattcaggaacgggttaacttgtttggtttctggagccgattcaacggatctaacagtaatggggaaagaaaagacttacagctctctggtttgaacagcccaggatcctgcttagagaatgggaaggaaagaaggccaagggaattcagattctga

SEQ ID NO: 270373 - DNA, 1461 bp, Artificial Sequence
  derived and/or modified sequence
cacttcggcgtgcactggcacagcctggtgttcaccggcatcctgggcgtgcactggcacttcggcaccaccgccagactgctggccctggcccagctggtgctgctggccggcaagctgaacaccctggccgccgtggtgaccgtgttctacctggtggcctacgccgccgtggacctgagctgcctgagcctggagtgggccagcgcccccaacttcagacccaccttcagcctgttcagctggcacacctgcctgctgggcgtggccagctgcctgctgatgatgttcctgatcagccccggcgccgccggcggcagcctgctgctgatgggcctgctggccgccctgctgaccgccagaggcggccccagcagctggggctacgtgagccaggccctgctgttccaccaggtgagaaagtacctgctgagactggacgtgagaaaggaccacgtgaagttctggagaccccagctgctgctgctggtgggcaaccccagaggcgccctgcccctgctgagactggccaaccagctgaagaagggcggcctgtacgtgctgggccacgtgaccctgggcgacctggacagcctgcccagcgaccccgtgcagccccagtacggcgcctggctgagcctggtggacagagcccaggtgaaggccttcgtggacctgaccctgagccccagcgtgagacagggcgcccagcacctgctgagaatcagcggcctgggcggcatgaagcccaacaccctggtgctgggcttctacgacgacgcccccccccaggaccacttcctgaccgaccccgccttcagcgagcccgccgacagcaccagagagggcagcagccccgccctgagcaccctgttccccccccccagagcccccggcagccccagagccctgaacccccaggactacgtggccaccgtggccgacgccctgaagatgaacaagaacgtggtgctggccagagccagcggcgccctgccccccgagagactgagcagaggcagcggcggcaccagccagctgcaccacgtggacgtgtggcccctgaacctgctgagacccagaggcggccccggctacgtggacgtgtgcggcctgttcctgctgcagatggccaccatcctgggcatggtgcccgcctggcacagcgccagactgagaatcttcctgtgcctgggccccagagaggcccccggcgccgccgagggcagactgagagccctgctgagccagctgagaatcagagccgaggtgcaggaggtggtgtggggcgagggcgccggcgccggcgagcccgaggccgaggaggagggcgacttcgtgaacagcggcagaggcgacgccgaggccgaggccctggccagaagcgccaacgccctggtgagagcccagcagggcagacacagaagaagagccggctgggccggcggctggggctgctag

SEQ ID NO: 270374 - DNA, 1461 bp, Artificial Sequence
  derived and/or modified sequence
cactttggagttcactggcacagcctggtttttaccggaatcctgggggtgcactggcattttggaacaacagcccgcttactagccctcgctcagctggtgttgctagccgggaagcttaacacactggcagccgtggtcacagtgttttaccttgtcgcctacgcggcggtggacctgtcctgtctctccttagaatgggctagtgcgcccaatttcagacctactttctccctgttcagctggcacacctgcctcttgggtgtggcctcttgcctcttgatgatgtttttgatctccccgggagctgccgggggtagcctgctgctaatggggttactggctgctctgctgaccgcgagaggcggcccctctagctgggggtacgtaagccaggctttactctttcatcaagtgagaaaataccttttgcgacttgacgtgcgcaaggaccacgtgaaattctggcgaccccagttgctgctgctggttggaaatccccggggcgcgctgccgcttttgcgtctagccaaccagttgaagaaggggggtctttacgtcttgggacacgtgactctgggcgacctcgacagcctccctagtgatcctgtgcaaccccaatatggcgcatggttaagcctggtcgatagagcccaggttaaagcattcgtggatttgaccttgtctcccagcgtgcggcaaggagctcagcacctgcttcgcatctcaggattaggggggatgaaaccaaacacactggtactagggttttacgatgacgcacctccacaggaccacttcttgacagatcctgcattctccgagcccgccgacagcacccgggaaggaagttctccagcgctaagcactttgtttccaccccctcgagctcccgggtctccgcgcgctcttaatcctcaggactacgtagctacagtggctgacgctctgaagatgaacaagaacgtcgtgctggcacgagctagcggcgctcttcctccggagagactgtcacgggggtccgggggaacaagccagcttcaccacgtcgacgtatggcccctaaacctgttacggcctcgaggaggaccagggtatgtggatgtttgtggacttttcctcctgcagatggctactattctggggatggtccccgcctggcattccgcccggcttcgaatatttttgtgtttaggaccgcgcgaagcgcctggggccgcagagggaaggctgcgcgcactcctatcccagctcagaatacgggccgaagttcaggaggtcgtgtggggtgagggcgcgggtgctggagagcctgaggccgaggaagagggcgacttcgtgaacagcggacgtggcgatgcagaagctgaggccttggccaggagtgccaacgcgctcgtccgggcacagcagggacgccatcgaagaagggccggctgggcaggggggtggggatgttag

SEQ ID NO: 270375 - DNA, 1461 bp, Artificial Sequence
  derived and/or modified sequence
cactttggagtgcactggcacagcctggtgttcaccggcatcctgggcgtgcactggcacttcggcaccacagcccggctgctggccctggcccagctggtgctgctggccggcaagctgaacaccctggccgctgtggtgaccgtcttctacctggtggcctatgctgctgtggacctgagctgcctgagcctggagtgggccagcgcccccaacttccggcccaccttcagcctcttctcctggcacacctgcctgctgggcgtggccagctgcctgctgatgatgttcctgatcagccctggagctgctgggggcagcctgctgctgatgggcctgctggccgccctgctgacagcccggggcggccccagctcctggggctacgtgtcccaggccctgctcttccaccaggtgaggaagtacctgctgcggctggatgtgaggaaggaccacgtgaagttctggaggccccagctgctgctgctggtgggcaaccccaggggggccctgcccctgctgcggctggccaaccagctgaagaagggcggcctgtatgtgctgggccacgtgaccctgggggacctggacagcctgcccagcgaccctgtgcagccccagtacggggcctggctgagcctggtggaccgggcccaggtgaaggcctttgtggacctgaccctgagccccagcgtgcggcagggcgcccagcacctgctgcgcatcagcggcctgggcggcatgaagcccaacaccctggtgctgggcttctatgatgatgccccaccccaggaccacttcctgacagatcctgccttcagcgagcctgctgacagcacccgggagggcagcagccctgccctgagcaccctcttccccccaccccgggcccctggcagcccccgggccctgaacccccaggactatgtggccaccgtggctgatgccctgaagatgaacaagaatgtggtgctggcccgggccagcggggccctgcccccagagcggctgagccggggcagcggcggcaccagccagctgcaccacgtggatgtgtggcccctgaacctgctgcggccccggggcggccctggctacgtggatgtgtgtggcctcttcctgctgcagatggccaccatcctgggcatggtgcctgcctggcacagcgcccggctgcgcatcttcctgtgcctgggcccccgggaggcccctggagctgctgagggccgcctgcgggccctgctgagccagctgcgcatccgggcagaggtgcaggaggtggtgtggggcgagggcgctggggccggggagcctgaggccgaggaggagggggactttgtgaacagcggcagaggagatgctgaggccgaggccctggcccggagcgccaatgccctggtgcgggcccagcagggccgccacagaagaagagctggctgggccggcggctggggctgctag

SEQ ID NO: 270376 - DNA, 1461 bp, Artificial Sequence
  derived and/or modified sequence
cacttcggcgtgcactggcacagcctggtgttcaccggcatcctgggcgtgcattggcacttcggaaccacagcgcgtctactggccctggcacaactggtgcttctcgcggggaagctcaatacactggctgcggttgtcacagtgttctacttggtggcttacgctgctgtggacttatcctgcctttccctcgaatgggcctccgccccaaactttcgccccaccttctccctgttttcatggcacacatgcttgctgggcgtcgccagttgtttactgatgatgttcctgattagtcctggagctgccgggggttcattactcctcatgggcctcttggcagccctgcttacagctaggggaggaccaagttcatgggggtacgtttcgcaggccctccttttccatcaggtacgcaagtatttacttcgtctcgacgtcaggaaagatcatgtcaaattctggcggcctcagctgctgctactggtgggaaatcctagaggagcgttgcccctcctgagattagctaaccagctgaagaaaggaggactctacgtcctgggacacgtcaccctcggcgaccttgactctctgccctctgacccagttcagcctcagtacggcgcgtggctcagcctggtggaccgggcccaggttaaggcatttgtggaccttaccctctcaccctctgtgagacagggcgctcaacatcttctacgtatctcaggtctgggaggaatgaagccgaacactctggtcctcggtttctacgatgatgcccccccccaggatcattttcttaccgatcctgccttttccgaaccggccgattccactcgtgaaggtagctcacctgcattatcaacgctgttcccccctccaagggccccaggctcgccacgcgcactgaatccccaggattatgtggctaccgtggctgacgccctgaaaatgaataagaacgtggtgctggcacgcgcctccggagcgctgcctcctgaacgcctaagcagaggatctgggggtaccagccaactacatcacgtcgatgtgtggcccctgaatctgctaaggccacggggcggacctggctatgtggacgtgtgcggacttttcctgcttcagatggccaccatcttgggaatggtaccagcatggcactccgctcggctacgcattttcctttgcctcggtccccgggaagctcccggagccgctgagggtcggctccgtgcgcttcttagtcagctgcgtataagagctgaagtccaagaagtagtttggggtgagggggccggggccggtgaaccagaagccgaagaggagggggactttgttaattcagggagaggtgacgctgaggcggaggccctcgccaggtccgctaatgcactggtacgcgcccagcaagggagacacagacgcagggctggatgggccggcggctggggctgttag

SEQ ID NO: 270377 - DNA, 1461 bp, Artificial Sequence
  derived and/or modified sequence
cactttggcgtccactggcattcacttgtgttcactggaattctgggagtgcactggcacttcgggaccactgccagacttctcgcgctggcccaactggttctcctcgccggaaagttgaataccctggcagccgtagtaacagtgttctacctggtggcatatgccgcagttgacctatcttgtctgagtctagagtgggcctcagcgccaaattttcgcccaacctttagcttgttcagctggcatacatgtctcctgggcgtggcctcctgtctgctgatgatgttccttattagtccaggagccgctggcggtagtctgttgttaatgggcctgctcgcggcactgctgacagctcgtggcggtccgtcatcctgggggtacgtgtctcaggcgctgctgttccaccaggtcaggaagtacctcctccgccttgacgtcagaaaggatcacgtaaaattctggaggcctcaactgctgctgctagttggaaaccctcggggagcgctgccactcctgcgcctggctaaccagctcaagaagggtggtctgtacgtccttggtcacgtgacccttggagatctcgattctctgccgtcagatccagttcagccacagtacggcgcatggctttcactggtcgacagagcccaagttaaggcctttgttgatctgaccctcagtccgagcgtgcggcaaggagctcagcacctgctacggatcagcggcctgggagggatgaagcccaacacccttgtgcttggattctatgacgatgctcctccccaggatcactttcttaccgatcccgctttctcagaacctgcagatagtacgcgagaagggagcagccccgctctttctacactctttcctcctccccgagcccctggttccccccgtgccctgaatccccaagactacgtggcaacggttgctgatgctttaaaaatgaacaaaaatgtcgttttagcgagagcatctggagctttgccaccagagcgacttagcagggggagcggaggaacatcccagcttcaccacgtggacgtgtggcctctgaatctgctgcgtccgaggggcggtccagggtatgttgatgtgtgtggcctcttcttgttacagatggcaacaatactgggcatggtgcccgcttggcactcagctaggttaagaatttttctttgcctgggaccgcgtgaggctccaggcgctgcagagggtagactgcgggcacttttgtcacagctgcgtatcagggcagaggtgcaggaggttgtctggggcgagggcgctggagccggagaaccagaagccgaggaggagggagatttcgttaacagcggtcggggagatgccgaagctgaagcactagcccgtagcgccaacgccttggtgcgtgctcagcaggggagacaccggagaagggcaggttgggccggtgggtggggttgctag

SEQ ID NO: 270378 - DNA, 2025 bp, Artificial Sequence
  derived and/or modified sequence
cactttggggtacactggcattctttggtgttcactggcattttgggggtgcactggcactttggaacaacggcacgcctcttggcccttgcccagctggtgctcctggctgggaagctgaacacactggctgctgtggtcactgtcttctacctggtggcctatgctgccgtggacctgtcctgcctgagcctggagtgggcctcggcccccaacttccgccccaccttcagcctgttctcctggcacacctgcctgctgggggtggcctcctgcctgctcatgatgttcctcatcagtcctggcgcggctggtggctccctgctcctcatgggtctgctggctgccctgctcaccgcgcgaggaggccccagtagctggggctatgtcagccaggccttgcttttccaccaggtgcgtaagtatctgcttcggctggacgtccggaaggatcacgtgaagttctggcggccccagctgctgctcctggtggggaacccccggggcgccctgcctctgctgcggttggccaaccagcttaagaagggggggctgtatgtgctgggccacgtcaccctgggagacctcgactccctgccctcggaccctgtacagccgcagtatggggcatggctcagcctggtggaccgtgcccaggtgaaggcttttgtggatctaaccctctcaccctccgtgcgccagggggctcagcatctgctgcgaatctccggcctcggtggcatgaagcccaacacgttggtcctaggtttctacgatgacgctccaccgcaggaccatttcctgacggacccggctttctctgagcctgcagacagcaccagggagggcagttccccagctctgagcaccctgttccctcctccccgggctcctgggagcccccgggccctcaatccccaggactatgtggccacggtggccgacgccctcaagatgaacaagaatgtggtgctggcccgggccagcggggccttgccccctgagcggctgagccgggggtctgggggcacctctcagctgcaccatgtggacgtgtggcccctcaacctgctgcggccccggggtgggcccggctatgtggatgtctgcggcctcttcctgctgcagatggcaaccatcttgggcatggtgcccgcttggcatagcgcccggctccggatcttcctgtgcctggggcctcgggaggcgcctggggcggccgaggggcggctgcgggcactgctgagccaactgaggatccgggctgaggtgcaggaggtggtgtggggcgagggggccggggctggggaacccgaggcggaggaggaaggggactttgtgaacagtgggcggggagacgcagaggcagaggccctggcacgcagcgccaacgccctggttcgggcccagcaggggcggcacaggaggagggccgggtgggccggagggtggggatgctgagggccccatcacagccctcaccttcctgtacttgcctcggccgccagccgatcccgcccgatacccccgctacctggcgctactggagactctaacccgagacctgggccccacgctgctggttcatggggtcactccagtcacctgcactgatctgtgatgcccctgcctccagggctaggtagagagggcccaggcaggcggcctatcctgatccttggaggaggaggaagaggaggccactgtggcccgtggccctgcccttgggacgtggagcccaggggaggtttgaaggggatcctgggcttgggcatcacgcccacctcctttggcagagggaccccagcacactaactctgggtggctgtccccaccgtgcaggggagggagtccgcagcctcccttcactggtgccttgatgctaggggccaggcctcctctgtgactctgggctacctcagtttccccattttggccagactcaccggcccactggggtggtgatgttttcgttctgttttatttttctaactctgctgaccatgaataaaagaccaaaacact

SEQ ID NO: 270379 - protein, 785 aa, Artificial Sequence
  derived and/or modified sequence
MASKVTDAIVWYQKKEFLSVATTAPGPQQVLPGYCQCSLKDQGLFIQCLIGAYDQQIWEKSVEQREIKFIKLGLRNKPKKTAHVKPDLIDVDLVRGSAFAKAKPESPWTSLTRKGIVRVVFFPFFFRWWLQVTSKVIFFWLLVLYLLQVAAIVLFCSTSSPHSIPLTEVIGPIWLMLLLGTVHCQIVSTRTPKPPLSTGGKRRRKLRKAAHLEVHREGDGSSTTDNTQEGAVQNHGTSTSHSVGTVFRDLWHAAFFLSGSKKAKNSIDKSTETDNGYVSLDGKKTVKSGEDGIQNHEPQCETIRPEETAWNTGTLRNGPSKDTQRTITNVSDEVSSEEGPETGYSLRRHVDRTSEGVLRNRKSHHYKKHYPNEDAPKSGTSCSSRCSSSRQDSESARPESETEDVLWEDLLHCAECHSSCTSETDVENHQINPCVKKEYRDDPFHQSHLPWLHSSHPGLEKISAIVWEGNDCKKADMSVLEISGMIMNRVNSHIPGIGYQIFGNAVSLILGLTPFVFRLSQATDLEQLTAHSASELYVIAFGSNEDVIVLSMVIISFVVRVSLVWIFFFLLCVAERTYKQRLLFAKLFGHLTSARRARKSEVPHFRLKKVQNIKMWLSLRSYLKRRGPQRSVDVIVSSAFLLTISVVFICCAQLLHVHEIFLDCHYNWELVIWCISLTLFLLRFVTLGSETSKKYSNTSILLTEQINLYLKMEKKPNKKEELTLVNNVLKLATKLLKELDSPFRLYGLTMNPLLYNITQVVILSAVSGVISDLLGFNLKLWKIKS

SEQ ID NO: 270380 - protein, 751 aa, Artificial Sequence
  derived and/or modified sequence
MASKVTDAIVWYQKKIGAYDQQIWEKSVEQREIKFIKLGLRNKPKKTAHVKPDLIDVDLVRGSAFAKAKPESPWTSLTRKGIVRVVFFPFFFRWWLQVTSKVIFFWLLVLYLLQVAAIVLFCSTSSPHSIPLTEVIGPIWLMLLLGTVHCQIVSTRTPKPPLSTGGKRRRKLRKAAHLEVHREGDGSSTTDNTQEGAVQNHGTSTSHSVGTVFRDLWHAAFFLSGSKKAKNSIDKSTETDNGYVSLDGKKTVKSGEDGIQNHEPQCETIRPEETAWNTGTLRNGPSKDTQRTITNVSDEVSSEEGPETGYSLRRHVDRTSEGVLRNRKSHHYKKHYPNEDAPKSGTSCSSRCSSSRQDSESARPESETEDVLWEDLLHCAECHSSCTSETDVENHQINPCVKKEYRDDPFHQSHLPWLHSSHPGLEKISAIVWEGNDCKKADMSVLEISGMIMNRVNSHIPGIGYQIFGNAVSLILGLTPFVFRLSQATDLEQLTAHSASELYVIAFGSNEDVIVLSMVIISFVVRVSLVWIFFFLLCVAERTYKQRLLFAKLFGHLTSARRARKSEVPHFRLKKVQNIKMWLSLRSYLKRRGPQRSVDVIVSSAFLLTISVVFICCAQLLHVHEIFLDCHYNWELVIWCISLTLFLLRFVTLGSETSKKYSNTSILLTEQINLYLKMEKKPNKKEELTLVNNVLKLATKLLKELDSPFRLYGLTMNPLLYNITQVVILSAVSGVISDLLGFNLKLWKIKS

SEQ ID NO: 270381 - protein, 751 aa, Artificial Sequence
  derived and/or modified sequence
MASKVTDAIVWYQKKIGAYDQQIWEKSVEQREIKFIKYGLRNKPKKTAHVKPDLIDVDLVRGSAFAKAKPESPWTSLTRKGIVRVVFFPFFFRWWLQVTSKVIFFWLLVLYLLQVAAIVLFCSTSSPHSIPLTEVIGPIWLMLLLGTVHCQIVSTRTPKPPLSTGGKRRRKLRKAAHLEVHREGDGSSTTDNTQEGAVQNHGTSTSHSVGTVFRDLWHAAFFLSGSKKAKNSIDKSTETDNGYVSLDGKKTVKSGEDGIQNHEPQCETIRPEETAWNTGTLRNGPSKDTQRTITNVSDEVSSEEGPETGYSLRRHVDRTSEGVLRNRKSHHYKKHYPNEDAPKSGTSCSSRCSSSRQDSESARPESETEDVLWEDLLHCAECHSSCTSETDVENHQINPCVKKEYRDDPFHQSHLPWLHSSHPGLEKISAIVWEGNDCKKADMSVLEISGMIMNRVNSHIPGIGYQIFGNAVSLILGLTPFVFRLSQATDLEQLTAHSASELYVIAFGSNEDVIVLSMVIISFVVRVSLVWIFFFLLCVAERTYKQRLLFAKLFGHLTSARRARKSEVPHFRLKKVQNIKMWLSLRSYLKRRGPQRSVDVIVSSAFLLTISVVFICCAQLLHVHEIFLDCHYNWELVIWCISLTLFLLRFVTLGSETSKKYSNTSILLTEQINLYLKMEKKPNKKEELTLVNNVLKLATKLLKELDSPFRLYGLTMNPLLYNITQVVILSAVSGVISDLLGFNLKLWKIKS

SEQ ID NO: 270382 - DNA, 2358 bp, Artificial Sequence
  derived and/or modified sequence
atggccagcaaggtgaccgacgccatcgtgtggtaccagaagaaggagttcctgagcgtggccaccaccgcccccggcccccagcaggtgctgcccggctactgccagtgcagcctgaaggaccagggcctgttcatccagtgcctgatcggcgcctacgaccagcagatctgggagaagagcgtggagcagagagagatcaagttcatcaagctgggcctgagaaacaagcccaagaagaccgcccacgtgaagcccgacctgatcgacgtggacctggtgagaggcagcgccttcgccaaggccaagcccgagagcccctggaccagcctgaccagaaagggcatcgtgagagtggtgttcttccccttcttcttcagatggtggctgcaggtgaccagcaaggtgatcttcttctggctgctggtgctgtacctgctgcaggtggccgccatcgtgctgttctgcagcaccagcagcccccacagcatccccctgaccgaggtgatcggccccatctggctgatgctgctgctgggcaccgtgcactgccagatcgtgagcaccagaacccccaagccccccctgagcaccggcggcaagagaagaagaaagctgagaaaggccgcccacctggaggtgcacagagagggcgacggcagcagcaccaccgacaacacccaggagggcgccgtgcagaaccacggcaccagcaccagccacagcgtgggcaccgtgttcagagacctgtggcacgccgccttcttcctgagcggcagcaagaaggccaagaacagcatcgacaagagcaccgagaccgacaacggctacgtgagcctggacggcaagaagaccgtgaagagcggcgaggacggcatccagaaccacgagccccagtgcgagaccatcagacccgaggagaccgcctggaacaccggcaccctgagaaacggccccagcaaggacacccagagaaccatcaccaacgtgagcgacgaggtgagcagcgaggagggccccgagaccggctacagcctgagaagacacgtggacagaaccagcgagggcgtgctgagaaacagaaagagccaccactacaagaagcactaccccaacgaggacgcccccaagagcggcaccagctgcagcagcagatgcagcagcagcagacaggacagcgagagcgccagacccgagagcgagaccgaggacgtgctgtgggaggacctgctgcactgcgccgagtgccacagcagctgcaccagcgagaccgacgtggagaaccaccagatcaacccctgcgtgaagaaggagtacagagacgaccccttccaccagagccacctgccctggctgcacagcagccaccccggcctggagaagatcagcgccatcgtgtgggagggcaacgactgcaagaaggccgacatgagcgtgctggagatcagcggcatgatcatgaacagagtgaacagccacatccccggcatcggctaccagatcttcggcaacgccgtgagcctgatcctgggcctgacccccttcgtgttcagactgagccaggccaccgacctggagcagctgaccgcccacagcgccagcgagctgtacgtgatcgccttcggcagcaacgaggacgtgatcgtgctgagcatggtgatcatcagcttcgtggtgagagtgagcctggtgtggatcttcttcttcctgctgtgcgtggccgagagaacctacaagcagagactgctgttcgccaagctgttcggccacctgaccagcgccagaagagccagaaagagcgaggtgccccacttcagactgaagaaggtgcagaacatcaagatgtggctgagcctgagaagctacctgaagagaagaggcccccagagaagcgtggacgtgatcgtgagcagcgccttcctgctgaccatcagcgtggtgttcatctgctgcgcccagctgctgcacgtgcacgagatcttcctggactgccactacaactgggagctggtgatctggtgcatcagcctgaccctgttcctgctgagattcgtgaccctgggcagcgagaccagcaagaagtacagcaacaccagcatcctgctgaccgagcagatcaacctgtacctgaagatggagaagaagcccaacaagaaggaggagctgaccctggtgaacaacgtgctgaagctggccaccaagctgctgaaggagctggacagccccttcagactgtacggcctgaccatgaaccccctgctgtacaacatcacccaggtggtgatcctgagcgccgtgagcggcgtgatcagcgacctgctgggcttcaacctgaagctgtggaagatcaagagctag

SEQ ID NO: 270383 - DNA, 2256 bp, Artificial Sequence
  derived and/or modified sequence
atggccagcaaggtgaccgacgccatcgtgtggtaccagaagaagatcggcgcctacgaccagcagatctgggagaagagcgtggagcagagagagatcaagttcatcaagctgggcctgagaaacaagcccaagaagaccgcccacgtgaagcccgacctgatcgacgtggacctggtgagaggcagcgccttcgccaaggccaagcccgagagcccctggaccagcctgaccagaaagggcatcgtgagagtggtgttcttccccttcttcttcagatggtggctgcaggtgaccagcaaggtgatcttcttctggctgctggtgctgtacctgctgcaggtggccgccatcgtgctgttctgcagcaccagcagcccccacagcatccccctgaccgaggtgatcggccccatctggctgatgctgctgctgggcaccgtgcactgccagatcgtgagcaccagaacccccaagccccccctgagcaccggcggcaagagaagaagaaagctgagaaaggccgcccacctggaggtgcacagagagggcgacggcagcagcaccaccgacaacacccaggagggcgccgtgcagaaccacggcaccagcaccagccacagcgtgggcaccgtgttcagagacctgtggcacgccgccttcttcctgagcggcagcaagaaggccaagaacagcatcgacaagagcaccgagaccgacaacggctacgtgagcctggacggcaagaagaccgtgaagagcggcgaggacggcatccagaaccacgagccccagtgcgagaccatcagacccgaggagaccgcctggaacaccggcaccctgagaaacggccccagcaaggacacccagagaaccatcaccaacgtgagcgacgaggtgagcagcgaggagggccccgagaccggctacagcctgagaagacacgtggacagaaccagcgagggcgtgctgagaaacagaaagagccaccactacaagaagcactaccccaacgaggacgcccccaagagcggcaccagctgcagcagcagatgcagcagcagcagacaggacagcgagagcgccagacccgagagcgagaccgaggacgtgctgtgggaggacctgctgcactgcgccgagtgccacagcagctgcaccagcgagaccgacgtggagaaccaccagatcaacccctgcgtgaagaaggagtacagagacgaccccttccaccagagccacctgccctggctgcacagcagccaccccggcctggagaagatcagcgccatcgtgtgggagggcaacgactgcaagaaggccgacatgagcgtgctggagatcagcggcatgatcatgaacagagtgaacagccacatccccggcatcggctaccagatcttcggcaacgccgtgagcctgatcctgggcctgacccccttcgtgttcagactgagccaggccaccgacctggagcagctgaccgcccacagcgccagcgagctgtacgtgatcgccttcggcagcaacgaggacgtgatcgtgctgagcatggtgatcatcagcttcgtggtgagagtgagcctggtgtggatcttcttcttcctgctgtgcgtggccgagagaacctacaagcagagactgctgttcgccaagctgttcggccacctgaccagcgccagaagagccagaaagagcgaggtgccccacttcagactgaagaaggtgcagaacatcaagatgtggctgagcctgagaagctacctgaagagaagaggcccccagagaagcgtggacgtgatcgtgagcagcgccttcctgctgaccatcagcgtggtgttcatctgctgcgcccagctgctgcacgtgcacgagatcttcctggactgccactacaactgggagctggtgatctggtgcatcagcctgaccctgttcctgctgagattcgtgaccctgggcagcgagaccagcaagaagtacagcaacaccagcatcctgctgaccgagcagatcaacctgtacctgaagatggagaagaagcccaacaagaaggaggagctgaccctggtgaacaacgtgctgaagctggccaccaagctgctgaaggagctggacagccccttcagactgtacggcctgaccatgaaccccctgctgtacaacatcacccaggtggtgatcctgagcgccgtgagcggcgtgatcagcgacctgctgggcttcaacctgaagctgtggaagatcaagagctag

SEQ ID NO: 270384 - DNA, 2256 bp, Artificial Sequence
  derived and/or modified sequence
atggccagcaaggtgaccgacgccatcgtgtggtaccagaagaagatcggcgcctacgaccagcagatctgggagaagagcgtggagcagagagagatcaagttcatcaagtacggcctgagaaacaagcccaagaagaccgcccacgtgaagcccgacctgatcgacgtggacctggtgagaggcagcgccttcgccaaggccaagcccgagagcccctggaccagcctgaccagaaagggcatcgtgagagtggtgttcttccccttcttcttcagatggtggctgcaggtgaccagcaaggtgatcttcttctggctgctggtgctgtacctgctgcaggtggccgccatcgtgctgttctgcagcaccagcagcccccacagcatccccctgaccgaggtgatcggccccatctggctgatgctgctgctgggcaccgtgcactgccagatcgtgagcaccagaacccccaagccccccctgagcaccggcggcaagagaagaagaaagctgagaaaggccgcccacctggaggtgcacagagagggcgacggcagcagcaccaccgacaacacccaggagggcgccgtgcagaaccacggcaccagcaccagccacagcgtgggcaccgtgttcagagacctgtggcacgccgccttcttcctgagcggcagcaagaaggccaagaacagcatcgacaagagcaccgagaccgacaacggctacgtgagcctggacggcaagaagaccgtgaagagcggcgaggacggcatccagaaccacgagccccagtgcgagaccatcagacccgaggagaccgcctggaacaccggcaccctgagaaacggccccagcaaggacacccagagaaccatcaccaacgtgagcgacgaggtgagcagcgaggagggccccgagaccggctacagcctgagaagacacgtggacagaaccagcgagggcgtgctgagaaacagaaagagccaccactacaagaagcactaccccaacgaggacgcccccaagagcggcaccagctgcagcagcagatgcagcagcagcagacaggacagcgagagcgccagacccgagagcgagaccgaggacgtgctgtgggaggacctgctgcactgcgccgagtgccacagcagctgcaccagcgagaccgacgtggagaaccaccagatcaacccctgcgtgaagaaggagtacagagacgaccccttccaccagagccacctgccctggctgcacagcagccaccccggcctggagaagatcagcgccatcgtgtgggagggcaacgactgcaagaaggccgacatgagcgtgctggagatcagcggcatgatcatgaacagagtgaacagccacatccccggcatcggctaccagatcttcggcaacgccgtgagcctgatcctgggcctgacccccttcgtgttcagactgagccaggccaccgacctggagcagctgaccgcccacagcgccagcgagctgtacgtgatcgccttcggcagcaacgaggacgtgatcgtgctgagcatggtgatcatcagcttcgtggtgagagtgagcctggtgtggatcttcttcttcctgctgtgcgtggccgagagaacctacaagcagagactgctgttcgccaagctgttcggccacctgaccagcgccagaagagccagaaagagcgaggtgccccacttcagactgaagaaggtgcagaacatcaagatgtggctgagcctgagaagctacctgaagagaagaggcccccagagaagcgtggacgtgatcgtgagcagcgccttcctgctgaccatcagcgtggtgttcatctgctgcgcccagctgctgcacgtgcacgagatcttcctggactgccactacaactgggagctggtgatctggtgcatcagcctgaccctgttcctgctgagattcgtgaccctgggcagcgagaccagcaagaagtacagcaacaccagcatcctgctgaccgagcagatcaacctgtacctgaagatggagaagaagcccaacaagaaggaggagctgaccctggtgaacaacgtgctgaagctggccaccaagctgctgaaggagctggacagccccttcagactgtacggcctgaccatgaaccccctgctgtacaacatcacccaggtggtgatcctgagcgccgtgagcggcgtgatcagcgacctgctgggcttcaacctgaagctgtggaagatcaagagctag

SEQ ID NO: 270385 - DNA, 2358 bp, Artificial Sequence
  derived and/or modified sequence
atggcaagcaaggtcacagatgccatagtgtggtatcaaaaaaaggagtttctttctgttgccacgacagcacctggccctcagcaggtgctccccggttactgccaatgtagtcttaaggaccaaggacttttcattcaatgcctgatcggagcttatgatcagcagatttgggagaagagcgtagagcagcgggagatcaagtttataaaactcggcttacgcaacaagcctaagaagaccgcccacgtcaaaccagacctgatcgacgttgacctcgtccgcggctccgcctttgccaaggccaagcctgagtccccgtggacaagcctcactaggaagggcattgtgcgtgtggtcttcttccccttttttttcagatggtggcttcaggtgacttcaaaggtcatatttttttggctgctcgttctgtatcttctgcaggtggccgcaattgttctgttttgttcgaccagtagcccgcactctattccactcacggaagtaatcgggccaatctggctgatgctcttgctgggtacggtgcattgccagattgtcagtactaggacacccaagcccccactgagcactggcggaaaacggcgcaggaagctgcggaaagctgcccatctggaggtgcatcgcgagggggacggttcctctacaaccgataatacccaagagggggcggtgcagaatcacggcactagtacctcccatagcgtgggaactgtgttcagggacctgtggcacgccgccttcttcctgtcaggtagcaaaaaagccaagaatagcatcgacaagagtactgaaacagataatgggtacgtgagtctggacggcaagaagaccgtgaagagtggggaggacggcattcagaaccatgaaccacagtgtgaaactatcagacctgaagaaactgcctggaacactggcaccctgcgaaacgggccgagcaaggatacccagcgcactatcactaacgttagcgatgaagtctcctctgaggaaggcccagaaacaggatactccctgaggagacacgtggatagaacctccgaaggtgtcctgaggaacagaaagagccaccattacaagaagcactatcctaatgaagatgcccctaaaagcggcaccagctgctccagtaggtgctcaagcagccgtcaagattcagaatccgccaggcccgaaagtgagactgaggacgtgctctgggaggacctcctacactgtgcggaatgtcatagttcttgcacaagcgaaactgacgtggaaaaccaccagatcaacccatgtgtgaagaaagagtaccgtgatgaccccttccaccagagtcatcttccatggttgcactcgtctcatccagggctggaaaagataagtgcaatcgtgtgggaaggtaatgattgtaagaaagctgatatgtctgtactggaaatctcagggatgattatgaatagggtaaactctcatattccaggaatcgggtatcagatcttcggaaatgctgttagcctgatcttaggcttaacgcccttcgtcttccgcttgtctcaggcaacggatctcgagcagctcactgcacattcggccagcgagttatatgttatcgctttcggaagcaatgaggacgtgatcgtgctgagcatggtgattatatcattcgttgtgcgagtttctttggtctggatcttttttttcctcttatgtgtggccgagcgcacctacaagcaacggctgctgttcgccaagctgtttggtcatctgacctcagcacgaagggcacgcaaaagcgaggtaccccacttcagactcaaaaaagtccagaacatcaagatgtggctgagccttagaagctatctcaagcgccgaggcccccagcgatccgtggacgtgattgtttccagcgcctttttgttaacaatctcagttgttttcatttgctgcgcacagttgctgcacgttcatgaaatctttctggactgccactacaattgggaactggttatatggtgcattagcctcacactgttcctgttacggtttgtgactctaggctccgaaacaagcaaaaagtacagcaatacctccatcctactcaccgaacagatcaatctgtacctgaagatggagaagaaaccaaacaagaaggaggagctgactcttgtgaacaatgtgttgaagctcgctacaaagctcctgaaggaattggattccccattccggctgtatggtcttactatgaaccccctgctgtacaatattacgcaagtggtgatccttagcgcagtttcgggagtgattagcgacctgctcggtttcaacctcaaactgtggaagatcaagagctag

SEQ ID NO: 270386 - DNA, 2256 bp, Artificial Sequence
  derived and/or modified sequence
atggcatctaaggtgactgacgctatagtgtggtaccagaagaaaatcggcgcttacgaccagcagatctgggagaagagcgtggaacagagggagatcaaatttattaaactagggcttcgcaacaaacctaaaaaaacagcccatgtgaagccggatttaatcgatgtagatctggtcagggggagcgctttcgctaaggctaagcctgaatccccatggacctcattgactagaaagggcatagtccgcgtggtgttcttccctttcttctttaggtggtggctgcaagttacaagtaaggtgatctttttttggcttctcgtactttacctgctgcaggtggccgctatcgttctcttctgctccacttccagcccacactcaatcccattaaccgaagtgataggcccgatctggctgatgttgctgctcggaactgttcactgccaaattgtgagcacgaggaccccgaagccgcccctctcgactgggggaaagaggcggagaaagcttagaaaagcagctcatctggaggtccatcgagaaggggacggcagctcgactacagataacactcaggagggagcagttcagaatcacgggacgtctacctcacactcagtgggaacagtgtttagagatctgtggcacgcggccttttttctgtccggtagcaaaaaggccaagaactccattgacaagtctactgaaacagacaatggctatgtgagcctcgacggaaagaagacagtgaagtcaggcgaggacggaattcagaaccacgaaccgcagtgtgaaaccataaggcccgaggagaccgcctggaatactggcactctgcgaaacggtcccagtaaagacacgcagcgtactataactaacgtcagtgatgaagttagttccgaagagggcccagagaccgggtacagcctcagaaggcacgtcgatcgaacttcggagggtgtgttgcgcaaccggaagagccaccactacaagaagcactaccctaatgaggacgctccgaagagtggtacatcctgctccagcaggtgctcctcatcacgccaggactccgaaagcgcacggcccgagagtgagacggaagacgtgctgtgggaggacctcctgcactgcgcagagtgccatagctcctgtacaagcgaaacagacgtagagaatcatcagattaatccttgcgtcaagaaggagtatagggacgatcctttccaccagagccatctgccttggttacattcttcccacccaggcttagaaaagatttctgctatcgtgtgggagggcaacgactgtaaaaaggcagacatgagtgtgttagagatttcgggtatgattatgaatagggtgaactctcacatcccgggcatagggtaccagatctttggcaacgctgtgtcactgattcttggactgaccccatttgtgtttagactctcacaggccacagatcttgagcaactcaccgcccatagcgcaagcgagctctacgtaatcgcttttggtagtaacgaggacgtcatcgttctgagcatggtcattatctcctttgtggtacgggtgtccttggtatggatcttcttcttcctactgtgtgtggccgagcgcacttataaacagcgcttgctgttcgccaagctgttcggccatctcacctccgctcggagggcaaggaaaagtgaggtccctcacttcaggcttaaaaaggttcagaacatcaagatgtggttgtccttgcgctcctatctcaaaagaagaggcccgcagcggagcgtcgatgtaatagtgagtagtgccttcctcctcacgataagtgtggtgtttatctgctgtgcccagctgttacacgtccacgagatattcctggactgtcattacaactgggaactcgtaatatggtgcatttctctaacattgttcttgttacggttcgtaacactcggctcagaaacatcgaaaaaatacagcaacaccagcatactgctgactgagcagatcaatctctatttgaaaatggagaaaaagcccaacaaaaaagaagaactgaccctggtgaacaacgtgctgaagctcgccacaaaactgcttaaggagctggacagccccttcaggctgtatggactcaccatgaacccactgctgtacaatattactcaggtggttattctgagtgcagtgtctggcgtgatcagcgacttactaggttttaacctcaagttatggaagattaaatcctag

SEQ ID NO: 270387 - DNA, 2256 bp, Artificial Sequence
  derived and/or modified sequence
atggctagcaaagtgacagacgccatcgtgtggtaccaaaaaaagatcggcgcatatgaccagcagatttgggaaaaatccgtcgagcaacgcgaaataaaattcataaaactggggttgcgtaataagccaaaaaaaaccgcacatgtgaagccggatttgatagacgtggatctggttcgaggctcagcattcgccaaagccaagccggagtctccgtggacatcattgacaagaaaaggcattgtcagagtcgtgttttttccgttttttttcaggtggtggcttcaagtgacttccaaggtgatatttttttggctcttagtcttgtacctgcttcaggtggcagctatcgttctcttctgtagtaccagctctccacattctataccactgaccgaagtcatcggaccaatttggctgatgctgctgctcggcacagttcactgtcagattgtcagtaccaggacgccaaagcctcccctatctaccggggggaagcgccggagaaaactcagaaaagcggcacacctggaggtgcatagagagggagacggtagttccaccaccgataatactcaagagggcgctgtacagaatcacggcacaagtacaagtcacagtgtcggaaccgtatttagagatctgtggcacgccgcctttttcctgtccgggtccaagaaggcgaaaaattcaattgataagtccaccgagacagacaatggttacgtgtccctcgacggtaaaaagactgtcaagtctggggaggatgggatccagaaccatgagccgcaatgtgaaactatccggcctgaggagactgcgtggaacactggcacgctacggaacgggccctctaaagacacacagcgaaccattacaaatgttagtgacgaagtctctagcgaagaggggcccgagacagggtactccctgagacgacatgtggataggacttccgaaggagtactgaggaaccgtaaaagccaccactataaaaagcactatcccaatgaagatgcccctaaatccgggacgagctgcagttccaggtgctcatccagtcggcaggattctgagagcgccagacccgaatcagaaacggaggacgttttgtgggaggatttactccactgtgctgagtgccattcctcctgtacgtcagagactgatgtcgaaaatcaccagattaatccatgtgtcaagaaggaatacagagatgacccattccaccagtcccatcttccttggctgcatagttctcatcctggtctggagaaaatttcagcgatcgtatgggaggggaatgattgtaagaaggccgacatgagcgtgctggagattagcggaatgatcatgaacagagtgaattctcacattcccggaatcgggtaccagatcttcggaaatgccgtgagcctcatcctcggcctcacaccattcgtgtttcgcctgtcccaggccactgatcttgagcaattgaccgcccattctgcttccgaactttacgttattgcattcggctcaaatgaagacgttattgtgctgtccatggttatcatctctttcgtcgttagggttagtctcgtttggatcttctttttcctgctgtgtgtcgccgagcgcacatacaaacagcgattgttgtttgcaaagctgtttggccatttaaccagtgccagacgagcacgcaagagtgaagtgccacatttcaggttgaagaaggtgcaaaacattaaaatgtggctatcactgaggtcttatctcaagagacgcggacctcaacgctccgtggatgtgatagtgagttctgcctttctccttacaatatctgttgtgtttatttgctgcgctcagctgctgcacgttcatgagatcttcctggactgtcattacaactgggaattagtgatctggtgtatttcccttacactctttctgcttagattcgttaccctcgggagtgagacatccaagaagtactctaacacgagcattctactgaccgagcagataaacctgtacctcaaaatggaaaaaaaaccaaacaaaaaagaggagctgactctcgtcaataatgtgctcaaactcgccacaaaactgctcaaggagcttgattcacctttcaggctgtatggtctgactatgaaccctctgctctataatattacacaggtggtgattctgagcgctgtttcaggcgtcatttctgacttgttgggatttaatcttaagctgtggaaaataaagagctag

SEQ ID NO: 270388 - DNA, 2256 bp, Artificial Sequence
  derived and/or modified sequence
atggccagcaaagttacagacgctattgtctggtaccagaagaagattggagcttatgatcaacagatttgggagaaaagcgtggagcaacgggagataaaatttattaagtacggcctgcgcaataagcctaagaaaacagcccatgtgaagcctgatcttatcgacgtggacctggtccgaggatccgccttcgctaaagccaagcctgagtccccgtggaccagcctgactcgtaaggggattgtgcgagtagtcttttttccattcttctttaggtggtggctacaagtgacctcaaaggtgatttttttttggctgctggtcctgtacctgctccaggttgccgcgatcgtgctcttttgcagcactagttccccgcacagcattccactcacagaagtcattggcccaatatggcttatgctactactaggcaccgtgcactgtcagattgtcagcactagaactccaaagccacccttgtcaactggaggaaagcgccgccgcaagttaagaaaagccgcccatctcgaagtccaccgtgagggcgacggctcgtccacaactgataacacccaggagggggcagtacagaaccatgggacgagcacttctcatagcgttggtacagtgtttagggacctttggcacgcggctttttttctgagtggctctaagaaggctaaaaactcaatcgataagtctactgagacggataacgggtatgtatctttagacggtaaaaaaactgtcaaatctggggaagatggaatccaaaatcacgaacctcaatgcgagaccattcgacccgaggaaactgcgtggaacacaggaaccctgcgtaacggccctagtaaggatacgcagcggacaatcaccaatgtgtccgatgaggttagcagtgaggagggccctgagacaggctattcattacgaaggcacgtggaccggacctctgagggggtcttgcggaaccgcaagtcacaccattataagaaacattatccaaacgaggacgctccgaagagcggcacatcttgctcgagcagatgtagctcttctcgtcaggattctgagtcagcacgcccagaatctgagacagaggacgtgctctgggaggacctgctacactgtgcagagtgccattcaagttgcacctccgagacagacgtcgaaaatcaccaaatcaacccatgcgttaagaaagagtatcgggatgacccttttcaccagtcacatctgccctggctgcatagcagccatccagggctggaaaagatctcggccatcgtgtgggagggaaacgactgcaaaaaggcagacatgtccgtgctcgaaataagtggaatgataatgaatcgggtgaactcccatatcccaggaattgggtaccagatttttgggaacgcggtaagcctgatcctgggccttacaccatttgtattccggctaagccaggcgactgacctcgaacaacttaccgctcatagcgcgagtgaactgtacgtgattgcgttcggatccaatgaggatgtgattgtcttatccatggtgattatttcctttgtggtgcgggtcagcctcgtctggatcttcttcttccttttgtgcgtggcagaacgcacttataagcagcggctgctgttcgcgaagctctttggtcacctgacatctgctagacgagccagaaaatctgaagttccgcattttagactgaaaaaagttcagaatattaaaatgtggttgtctctgcgtagctatcttaaacgcagaggcccccagagatccgttgacgtgatagtcagctcagctttcttgctgacaatctctgtagtcttcatctgctgtgctcagctccttcacgttcatgaaattttcctggactgccactacaactgggagcttgtgatatggtgcataagtttgactctattcctccttcggttcgtcaccctaggatcagaaacatcaaaaaagtacagcaatacatctatacttctcacggagcagattaatctttatttgaaaatggagaaaaaaccaaataagaaagaagagcttacactcgtcaacaatgtcctgaaactggccactaagctgctcaaagaattagacagccccttcagattgtacgggctgactatgaatcctctcctgtacaatatcacgcaggtggtgatcctatctgccgttagcggtgtgatatcagacttgctcggcttcaacctgaaactctggaagataaaaagttag

SEQ ID NO: 270389 - DNA, 2358 bp, Artificial Sequence
  derived and/or modified sequence
atggccagcaaggtgacagatgccatcgtgtggtaccagaagaaggagttcctgtctgtggccaccacagcccctggcccccagcaggtgctgcccggctactgccagtgcagcctgaaggaccagggcctcttcatccagtgcctgattggagcctatgaccagcagatctgggagaagtctgtggagcagcgggagatcaagttcatcaagctgggcctgaggaacaagcccaagaagacagcccacgtgaagccagacctgattgatgtggacctggtgcggggcagcgcctttgccaaggccaagccagagagcccctggaccagcctgaccaggaagggcatcgtgcgggtggtgttcttccccttcttcttccgctggtggctgcaggtgaccagcaaggtgatcttcttctggctgctggtgctgtacctgctgcaggtggccgccatcgtgctcttctgcagcaccagcagcccccacagcatccccctgacagaggtgattggccccatctggctgatgctgctgctgggcaccgtgcactgccagatcgtgtccaccaggacccccaagccacccctgagcactggaggcaagagaagaaggaagctgaggaaggccgcccacctggaggtgcaccgggagggagatggcagcagcaccacagacaacacccaggagggcgctgtgcagaaccacggcaccagcaccagccacagcgtgggcaccgtcttccgggacctgtggcatgctgccttcttcctgagcggcagcaagaaggccaagaacagcattgacaagagcacagaaacagacaatggctacgtgtccctggatggcaagaagacagtgaagagcggggaggatggcatccagaaccacgagccccagtgtgagaccatccggcctgaggagacagcctggaacacaggcaccctgagaaatggccccagcaaggacacccagaggaccatcaccaacgtgtctgatgaggtgagcagcgaggagggccctgagaccggctacagcctgcggagacatgtggacaggaccagcgagggcgtgctgaggaacaggaagagccaccactacaagaagcactacccaaatgaagatgcccccaagagcggcaccagctgcagcagccgctgcagcagcagccggcaggacagcgagagcgcccggcctgagagcgagacagaagatgtgctgtgggaggacctgctgcactgtgccgagtgccacagcagctgcaccagcgagacagatgtggagaaccaccagatcaacccctgtgtgaagaaggagtacagagatgaccccttccaccagagccacctgccctggctgcacagcagccaccctggcctggagaagatcagcgccatcgtgtgggagggcaatgactgcaagaaggctgacatgtctgtgctggagatcagcggcatgatcatgaacagagtgaacagccacatccctggcatcggctaccagatctttggaaatgctgtgtccctcatcctgggcctgaccccatttgtgttccggctgagccaggccacagacctggagcagctgacagcccacagcgccagcgagctgtatgtgattgccttcggcagcaatgaagatgtgattgtgctgtccatggtgatcatcagctttgtggtgcgggtgtccctggtgtggatcttcttcttcctgctgtgtgtggccgagaggacctacaagcagaggctgctgtttgccaagctgtttggccacctgaccagcgcccggcgggccaggaagtctgaggtgccccacttccggctgaagaaggtgcagaacatcaagatgtggctgagcctgcggagctacctgaagagaagaggcccccagaggtctgtggatgtgattgtgagcagcgccttcctgctgaccatctctgtggtgttcatctgctgtgcccagctgctgcacgtgcatgagatcttcctggactgccactacaactgggagctggtgatctggtgcatcagcctgaccctcttcctgctgcgctttgtgaccctgggcagcgagaccagcaagaagtacagcaacaccagcatcctgctgacagagcagatcaacctgtacctgaagatggagaagaagcccaacaagaaggaggagctgaccctggtgaacaacgtgctgaagctggccaccaagctgctgaaggagctggacagccccttccggctgtatggcctgaccatgaaccccctgctgtacaacatcacccaggtggtgatcctgtctgctgtgtctggagtcatcagtgacctgctgggcttcaacctgaagctgtggaagatcaagagctag

SEQ ID NO: 270390 - DNA, 2256 bp, Artificial Sequence
  derived and/or modified sequence
atggccagcaaggtgacagatgccatcgtgtggtaccagaagaagatcggggcctatgaccagcagatctgggagaagtctgtggagcagcgggagatcaagttcatcaagctgggcctgaggaacaagcccaagaagacagcccacgtgaagccagacctgattgatgtggacctggtgcggggcagcgcctttgccaaggccaagccagagagcccctggaccagcctgaccaggaagggcatcgtgcgggtggtgttcttccccttcttcttccgctggtggctgcaggtgaccagcaaggtgatcttcttctggctgctggtgctgtacctgctgcaggtggccgccatcgtgctcttctgcagcaccagcagcccccacagcatccccctgacagaggtgattggccccatctggctgatgctgctgctgggcaccgtgcactgccagatcgtgtccaccaggacccccaagccacccctgagcactggaggcaagagaagaaggaagctgaggaaggccgcccacctggaggtgcaccgggagggagatggcagcagcaccacagacaacacccaggagggcgctgtgcagaaccacggcaccagcaccagccacagcgtgggcaccgtcttccgggacctgtggcatgctgccttcttcctgagcggcagcaagaaggccaagaacagcattgacaagagcacagaaacagacaatggctacgtgtccctggatggcaagaagacagtgaagagcggggaggatggcatccagaaccacgagccccagtgtgagaccatccggcctgaggagacagcctggaacacaggcaccctgagaaatggccccagcaaggacacccagaggaccatcaccaacgtgtctgatgaggtgagcagcgaggagggccctgagaccggctacagcctgcggagacatgtggacaggaccagcgagggcgtgctgaggaacaggaagagccaccactacaagaagcactacccaaatgaagatgcccccaagagcggcaccagctgcagcagccgctgcagcagcagccggcaggacagcgagagcgcccggcctgagagcgagacagaagatgtgctgtgggaggacctgctgcactgtgccgagtgccacagcagctgcaccagcgagacagatgtggagaaccaccagatcaacccctgtgtgaagaaggagtacagagatgaccccttccaccagagccacctgccctggctgcacagcagccaccctggcctggagaagatcagcgccatcgtgtgggagggcaatgactgcaagaaggctgacatgtctgtgctggagatcagcggcatgatcatgaacagagtgaacagccacatccctggcatcggctaccagatctttggaaatgctgtgtccctcatcctgggcctgaccccatttgtgttccggctgagccaggccacagacctggagcagctgacagcccacagcgccagcgagctgtatgtgattgccttcggcagcaatgaagatgtgattgtgctgtccatggtgatcatcagctttgtggtgcgggtgtccctggtgtggatcttcttcttcctgctgtgtgtggccgagaggacctacaagcagaggctgctgtttgccaagctgtttggccacctgaccagcgcccggcgggccaggaagtctgaggtgccccacttccggctgaagaaggtgcagaacatcaagatgtggctgagcctgcggagctacctgaagagaagaggcccccagaggtctgtggatgtgattgtgagcagcgccttcctgctgaccatctctgtggtgttcatctgctgtgcccagctgctgcacgtgcatgagatcttcctggactgccactacaactgggagctggtgatctggtgcatcagcctgaccctcttcctgctgcgctttgtgaccctgggcagcgagaccagcaagaagtacagcaacaccagcatcctgctgacagagcagatcaacctgtacctgaagatggagaagaagcccaacaagaaggaggagctgaccctggtgaacaacgtgctgaagctggccaccaagctgctgaaggagctggacagccccttccggctgtatggcctgaccatgaaccccctgctgtacaacatcacccaggtggtgatcctgtctgctgtgtctggagtcatcagtgacctgctgggcttcaacctgaagctgtggaagatcaagagctag

SEQ ID NO: 270391 - DNA, 2256 bp, Artificial Sequence
  derived and/or modified sequence
atggccagcaaggtgacagatgccatcgtgtggtaccagaagaagatcggggcctatgaccagcagatctgggagaagtctgtggagcagcgggagatcaagttcatcaagtatggcctgaggaacaagcccaagaagacagcccacgtgaagccagacctgattgatgtggacctggtgcggggcagcgcctttgccaaggccaagccagagagcccctggaccagcctgaccaggaagggcatcgtgcgggtggtgttcttccccttcttcttccgctggtggctgcaggtgaccagcaaggtgatcttcttctggctgctggtgctgtacctgctgcaggtggccgccatcgtgctcttctgcagcaccagcagcccccacagcatccccctgacagaggtgattggccccatctggctgatgctgctgctgggcaccgtgcactgccagatcgtgtccaccaggacccccaagccacccctgagcactggaggcaagagaagaaggaagctgaggaaggccgcccacctggaggtgcaccgggagggagatggcagcagcaccacagacaacacccaggagggcgctgtgcagaaccacggcaccagcaccagccacagcgtgggcaccgtcttccgggacctgtggcatgctgccttcttcctgagcggcagcaagaaggccaagaacagcattgacaagagcacagaaacagacaatggctacgtgtccctggatggcaagaagacagtgaagagcggggaggatggcatccagaaccacgagccccagtgtgagaccatccggcctgaggagacagcctggaacacaggcaccctgagaaatggccccagcaaggacacccagaggaccatcaccaacgtgtctgatgaggtgagcagcgaggagggccctgagaccggctacagcctgcggagacatgtggacaggaccagcgagggcgtgctgaggaacaggaagagccaccactacaagaagcactacccaaatgaagatgcccccaagagcggcaccagctgcagcagccgctgcagcagcagccggcaggacagcgagagcgcccggcctgagagcgagacagaagatgtgctgtgggaggacctgctgcactgtgccgagtgccacagcagctgcaccagcgagacagatgtggagaaccaccagatcaacccctgtgtgaagaaggagtacagagatgaccccttccaccagagccacctgccctggctgcacagcagccaccctggcctggagaagatcagcgccatcgtgtgggagggcaatgactgcaagaaggctgacatgtctgtgctggagatcagcggcatgatcatgaacagagtgaacagccacatccctggcatcggctaccagatctttggaaatgctgtgtccctcatcctgggcctgaccccatttgtgttccggctgagccaggccacagacctggagcagctgacagcccacagcgccagcgagctgtatgtgattgccttcggcagcaatgaagatgtgattgtgctgtccatggtgatcatcagctttgtggtgcgggtgtccctggtgtggatcttcttcttcctgctgtgtgtggccgagaggacctacaagcagaggctgctgtttgccaagctgtttggccacctgaccagcgcccggcgggccaggaagtctgaggtgccccacttccggctgaagaaggtgcagaacatcaagatgtggctgagcctgcggagctacctgaagagaagaggcccccagaggtctgtggatgtgattgtgagcagcgccttcctgctgaccatctctgtggtgttcatctgctgtgcccagctgctgcacgtgcatgagatcttcctggactgccactacaactgggagctggtgatctggtgcatcagcctgaccctcttcctgctgcgctttgtgaccctgggcagcgagaccagcaagaagtacagcaacaccagcatcctgctgacagagcagatcaacctgtacctgaagatggagaagaagcccaacaagaaggaggagctgaccctggtgaacaacgtgctgaagctggccaccaagctgctgaaggagctggacagccccttccggctgtatggcctgaccatgaaccccctgctgtacaacatcacccaggtggtgatcctgtctgctgtgtctggagtcatcagtgacctgctgggcttcaacctgaagctgtggaagatcaagagctag

SEQ ID NO: 270392 - DNA, 2358 bp, Artificial Sequence
  derived and/or modified sequence
atggccagcaaggtgaccgacgccatcgtgtggtaccagaagaaggagtttttgtcagttgccacaaccgccccgggacctcagcaggtacttccaggctattgtcagtgttctctgaaggatcagggtttgttcatccagtgtctgatcggcgcgtatgaccagcagatctgggagaaaagcgtggagcagagagaaatcaagtttattaagctgggcctcaggaacaaaccgaaaaagacagcccatgtaaagccagacctaatcgacgtggatctcgttaggggctccgcctttgctaaggccaagcctgagagcccctggactagcctgacaagaaagggaatagtgcgggttgtcttctttcctttctttttccgttggtggctacaggtaacatccaaggttatatttttttggctgcttgtgttatatttgttgcaggtggccgcgatcgtgctcttctgttcaacttccagtcctcattccattccgctgacagaagtcattgggcctatttggttgatgcttctgcttgggacggtccattgtcaaatagtgagcactagaacccctaagccccctctcagtaccggaggcaagaggcgcaggaagctgaggaaggccgcccacctggaggtgcaccgggaaggggatgggagctcaacaactgataatacccaggagggggccgtgcaaaatcacgggacttcaacgtctcactcagttgggactgtttttagagacctgtggcatgctgctttctttctgtccggatcgaagaaggccaagaacagtattgataagagcactgaaacagataacgggtatgtgtctctcgacgggaaaaagactgtgaagagtggggaggacggtattcagaaccacgagccacagtgcgaaactataaggccagaggagaccgcttggaacaccggaaccttgcgtaatgggcccagcaaagacacacagaggactataactaacgtttctgatgaggtgtctagtgaagaggggccggagacaggctacagcctgaggcgccatgtggacaggacatcggaaggtgtgctgagaaatcgcaagtcacaccactataagaaacactatcctaatgaggacgctcctaagagcggcacatcatgcagtagcaggtgctcctccagcagacaggactcagagtccgcgcgacctgagagcgaaactgaggacgttctgtgggaggacctgctgcactgcgctgagtgtcacagctcatgcacaagcgagacagatgtggaaaaccatcaaatcaacccctgcgtgaaaaaggaatatcgtgatgaccccttccaccagagccatctgccatggcttcacagtagccacccgggactggagaagatctcagccatcgtgtgggaggggaatgactgtaagaaagctgatatgagtgtgttggagatctcaggaatgatcatgaacagggttaatagccacatacccgggattggataccagatctttggcaatgcagtgtcccttatactgggactgacaccttttgtgttcaggctctcacaggccactgatctggagcagctcacagcccactctgctagtgagctatacgtgatagcttttggtagcaacgaggacgtgatcgtcctttctatggtgatcataagcttcgtggtaagagtgagcctggtgtggatattttttttcttgctttgtgtcgcggagcgcacctacaaacagagactgttgttcgccaaactgttcggacacctcacgagtgctaggcgcgcaagaaagtctgaggtgccccactttaggctgaagaaagtccagaatattaaaatgtggctcagccttcgttcgtacctgaagaggcgcggaccccagaggagtgttgacgtcatcgtgtcatccgccttcttactgactatctcggtcgtgttcatttgttgcgcccagctcttgcacgtgcatgaaatattcttggattgtcattacaactgggaacttgtgatctggtgtatctccttgacattgtttcttctcagatttgtgaccctaggatccgaaacctctaagaaatacagcaacacctccatcctgttaacggaacagatcaatctgtatctgaagatggagaagaagcccaataagaaagaagaactcaccttggttaacaacgtgcttaaacttgccaccaaactgctgaaggagctggactcccctttccgactgtatgggcttactatgaacccactcttatataacattactcaagttgtgatactcagcgccgtaagtggagtcattagtgacctcctcggttttaatctgaagttatggaagatcaagagttag

SEQ ID NO: 270393 - DNA, 2256 bp, Artificial Sequence
  derived and/or modified sequence
atggccagcaaggtgaccgacgccatcgtgtggtaccagaagaagatcggggcttatgatcagcagatctgggaaaagtctgtggagcaaagggagatcaaatttattaaactgggcctccgcaataaacctaaaaaaacagcccatgtgaagccagatctgattgacgtggatctggtgagaggctcggcctttgccaaagccaaacctgagtctccatggacttcacttaccaggaagggcatcgtgagggtggtatttttcccctttttctttagatggtggctccaggtgacttccaaagtaattttcttttggttgctggtgttgtatttgctccaggtcgccgctattgtgctattttgctcaacaagcagtcctcattcaatcccgctcaccgaggtaatcggccccatctggctcatgctgctccttggtacagttcattgccaaatagtttccacacgaacccccaagccacctctgtctacagggggcaaacgacggaggaagctgcgcaaagcagcccacctggaggttcaccgggagggagacggctcgagtacaacagacaatactcaggagggagccgtacagaaccacggtacttcaacgagtcattccgtgggcacggtgtttagagatctctggcacgccgccttctttctttcagggtctaagaaggcaaaaaattccattgacaaaagtaccgagaccgacaacggatatgtctccctcgacggaaagaaaactgtcaagagcggggaggatggcatccagaatcatgagccccagtgcgagaccataaggcctgaagagactgcctggaatacaggaacactcaggaatggaccctcaaaagatactcagcgaactatcaccaatgtgagtgatgaggtgagctcagaagaaggccctgaaactgggtactcgctaaggcgacacgtggatcgcacatctgaaggcgtgttacgtaatagaaagagccatcactacaagaagcattacccgaacgaagacgcccccaagagtggcacctcatgtagctcccggtgttcttcttccagacaggacagcgagagtgcacgcccggagagtgaaaccgaagacgtgctgtgggaggacctgctacattgtgccgagtgccactcatcctgcacgtcagagaccgatgtggaaaaccaccagattaatccttgcgtaaagaaggagtacagagacgatccgttccatcagtcgcatttgccatggctgcattccagccaccctggcctcgaaaaaatctcggcaatcgtgtgggagggaaatgactgtaagaaggctgacatgagtgtacttgaaatcagcggtatgatcatgaatagggtgaattcccacatcccaggcatcggctaccagatcttcggtaacgccgtgtccctaatcttaggcctaacgccgttcgtttttcgactgtcgcaggccaccgatctcgagcagctcaccgcccatagtgcaagtgagctgtacgtcatagccttcgggtctaacgaagacgttatagtactgtccatggttataattagttttgtcgtccgagttagtctcgtttggatatttttcttcctgctttgcgtggcagaacgtacgtacaagcaacggttactgttcgccaagctgttcggccacctgacgagcgcaaggagagctaggaagagtgaggtcccccattttcgcctgaagaaggttcaaaacatcaagatgtggctgtctctgaggtcatatctcaaacggaggggtccccagcgcagtgtcgacgttatcgtttcgtccgcattcctgctgacgatcagcgtggtgttcatatgttgtgctcagttgctgcacgtccatgaaattttcttagactgccattataattgggagcttgttatctggtgtatctccctgacattatttctgctgagatttgtaaccttggggtcagagacttctaagaaatattcaaacacgtctatcctgcttaccgagcagatcaatctctatctaaaaatggaaaaaaagccgaataagaaagaggaactgactctggtgaacaatgtgttgaagctggctaccaagttactcaaagagttagactcaccattcagactctatggtctgactatgaaccccttgctatacaacatcactcaggtcgtgattttgtccgctgtctccggagtgatcagtgacttactcgggttcaacctcaagctctggaaaatcaagagctag

SEQ ID NO: 270394 - DNA, 2256 bp, Artificial Sequence
  derived and/or modified sequence
atggccagcaaggtgaccgacgccatcgtgtggtaccagaagaagattggagcgtacgaccagcagatttgggaaaaatctgtggagcagagggaaatcaagttcatcaagctcggcttacgcaacaagcctaagaagacagcccacgtaaagcccgatctgattgatgtcgatctggtgcgcggtagcgcttttgccaaagcgaaacccgagagcccttggacttctttaacccggaaagggattgttcgagtggtgttctttcctttcttcttcaggtggtggctgcaagtgacctcaaaagtgatctttttctggcttctggtactctatctgttgcaggtggccgctattgttctgttttgctccactagcagcccccatagcattccgttgactgaagtcatcggaccaatttggctcatgctcctgctagggacggtgcattgtcaaatagtttcaacacgtactcccaagcccccactgtcaaccggcgggaagagaaggcgcaaactccggaaggcagcacaccttgaggtgcaccgcgaaggtgacggcagcagcactaccgataatactcaggaaggagcggtgcagaaccacgggacaagcacatctcattccgtggggacagtctttagggacttgtggcacgccgcattctttttgagcggcagcaagaaggccaagaactctatcgataaaagtactgagaccgataacgggtacgtgtccctggacggtaagaaaacggtgaagtcaggggaagatgggattcagaatcatgagccacagtgcgaaaccattagacctgaagaaacagcttggaacactggcacactgagaaacggaccatccaaggatacacagagaacaatcacaaacgtgtccgacgaagtttcctctgaagagggaccagagactggttattcgttgagaaggcatgtggatcggacgtccgagggtgtgctgcgcaaccggaagagccatcactacaagaaacattaccccaacgaagacgctcctaagagtggaacctcatgtagcagccggtgcagctcctcaaggcaggattcagaaagcgctagaccagagagtgagacagaggacgtcctgtgggaagatctgctacattgcgcagaatgtcattccagctgcacttctgaaaccgacgtggagaatcatcagattaacccctgcgtaaagaaagagtatagagatgaccctttccaccaatcacatttgccatggctccattcctcacatcctggtctagagaagatttccgctatcgtgtgggaaggcaatgactgcaagaaagcagacatgagcgtgctggagatctccggcatgataatgaaccgggtaaattctcacatcccgggaattggctaccagatctttgggaatgctgttagccttattttgggcctcacccccttcgtcttccgccttagtcaggctacagatctggagcagttaacagcccactctgcaagtgaactctatgtcatcgctttcgggtccaacgaggatgtaatcgtgctgagcatggtcatcatctctttcgtggtgagggtctccctcgtatggatcttcttttttctcctctgcgtggctgaacgaacatacaaacaaaggctgctctttgccaagctttttggccacctcaccagtgcacgccgcgctcggaaatctgaagtgccacacttcagactgaagaaagtgcaaaatataaaaatgtggctgagcctgcgctcctatctcaaacggcggggacctcagagatctgtggacgtgattgtttcaagcgcattccttcttacaatttccgtcgtttttatatgctgcgctcagcttctgcacgtacacgagattttcctcgactgtcactacaattgggagcttgtaatatggtgtatctcattaacgctgtttctactccgctttgtgacgctcggcagcgaaacctcaaaaaagtacagcaatacatcaatcctgctgacagagcagatcaacctttaccttaagatggaaaaaaagccaaataaaaaagaagaactgaccttagtgaacaatgttctgaaactggctaccaagcttctaaaggagttagactcccctttccggctgtatggactgactatgaatccacttttgtataacatcacccaggtggtaatcttatctgccgttagcggagtgattagcgatcttctgggttttaatctcaaattatggaaaatcaagagctag

SEQ ID NO: 270395 - DNA, 2256 bp, Artificial Sequence
  derived and/or modified sequence
atggccagcaaggtgaccgacgccatcgtgtggtaccagaagaagataggggcttacgaccagcagatttgggagaaatcggtggagcagcgcgaaataaaatttataaagtatggtctgcgtaataagcccaaaaaaaccgcacacgtgaagcctgatctcatcgatgttgatctcgtccggggtagtgcttttgcgaaggcaaagccagagagcccctggactagcttaacccgcaagggcatagtgagagtggtgtttttccccttctttttcagatggtggctccaggtcacctccaaggtcatcttcttttggcttttggtcctgtatcttctccaagtagctgctattgtgctcttttgttctactagctctcctcattccatccctctcacagaagtaataggacctatctggcttatgctgctgctgggaaccgtccactgccagatcgtttcaactcggactcccaagccacctctttccacaggaggcaaacgcaggcggaagctgaggaaggccgcacaccttgaagtgcatcgagaaggagacggctcctctacaacagacaatacacaggaaggtgcagtgcagaatcacgggaccagcacatcacatagtgtcggcactgtgtttcgggacctctggcatgcggcttttttcctgtcagggtctaaaaaggcgaagaacagtatcgataaatcgacagagaccgataatgggtacgtgtctctggatggtaaaaaaaccgtgaagagcggagaggatgggattcagaatcacgaaccacagtgcgaaaccataaggccagaagaaaccgcctggaacacagggactctgcgcaacggtccatctaaagatacccagagaaccattaccaacgtgtctgatgaggtgtcgtctgaggagggccccgagactggatactcactgcggagacatgtcgatcggacctccgaaggagtgctcaggaacagaaagagtcatcactataagaagcattatccgaatgaagatgctcccaagagcgggacgtcatgctcctcacggtgtagctcttctaggcaagattcagaatccgctcgccctgaaagtgaaacagaggacgtcctctgggaagacctgctacactgtgcggagtgtcactctagttgcacatcggagaccgacgtcgaaaaccaccagatcaatccctgtgtgaaaaaagagtacagggatgaccccttccatcaatctcatttgccttggttgcattcaagtcacccgggcctggaaaagatttccgctattgtgtgggagggtaatgattgcaaaaaggcagacatgagcgtgctggagatctcaggcatgatcatgaatagagtgaatagccacattcccggaatcgggtaccagatcttcggcaacgctgtcagcttgatcctgggtctaactccttttgtgttcaggctcagccaggcaacggatttagagcagctgaccgcccacagtgctagcgaactctatgtcatagcgttcggctccaatgaggacgtgatagtcctgagcatggtgatcatatcttttgtcgttcgagtttctttggtgtggatctttttttttcttctgtgcgtggctgagcgtacctacaagcagcggttgcttttcgctaaactctttggacatctgactagcgctcgtagagccaggaaaagcgaagtgcctcattttcgtttgaagaaggtccagaacattaaaatgtggctgtctcttagatcttacctgaagcggaggggtcctcagcggtcagtcgacgtcatcgtgagtagtgcattccttttgactatctcagtggtttttatctgttgcgcgcagctacttcacgtgcatgaaatctttctggattgccattataactgggagttagtcatttggtgcatatctctcaccctttttctcttgcgctttgtcacacttgggagtgaaacaagcaagaagtacagcaatacttccatcctgctgacagagcagatcaacctttatctaaaaatggagaagaagcctaacaagaaagaggaactgaccttggtcaacaatgtgctgaagctggctactaagcttctgaaggagttggacagtcccttccgactatatgggctcactatgaatccactgctgtacaatatcactcaggtcgtcatcctgtcggcggtctcaggcgtgatttcggaccttcttggctttaacctcaagctctggaagatcaaatcctag

SEQ ID NO: 270396 - DNA, 2358 bp, Artificial Sequence
  derived and/or modified sequence
atggccagtaaagtgaccgatgcaatagtgtggtaccagaagaaggagttcctctctgttgccaccactgcgcctggtcctcagcaggtattgcctgggtactgtcagtgcagcctcaaagaccagggtttgttcatccaatgtttgattggtgcttatgaccagcagatttgggagaagtcagtggagcagagagagatcaaatttatcaagttgggcctccgtaacaaacctaagaagaccgcccatgttaaaccagacctgatagatgttgatttagtgcgtgggtcagcctttgccaaggccaagccagaaagcccgtggacaagcctcacccgtaaaggaatagtgcgagtcgtgttttttcctttctttttccggtggtggttacaggtgacctccaaggttatcttcttttggctgcttgtgctttacctcctacaggtggcagcgattgtacttttctgctccacctcgtcaccccattctattccgttgacggaggtgatcggacctatttggctgatgttgttattggggactgtccactgtcagatagttagcactagaacacccaagcccccactgtctaccggaggcaaaaggcggagaaaactgcggaaggccgctcatctggaggtgcaccgggagggtgatggtagttccaccacggacaatacacaagagggggcagtccagaaccacggtaccagtacctcacatagcgtgggcacagtgtttagggacttgtggcacgctgccttttttctgtctgggagcaaaaaggcaaaaaacagcattgataagagcacagaaacagataacgggtatgtctctttagacggcaaaaaaaccgtgaaatctggcgaagacggcatccagaatcatgagcctcagtgcgagaccattaggcccgaagaaacggcctggaacacagggacattacgcaacgggccaagtaaggacacgcagcgaactatcactaatgtttctgatgaggtgagctccgaggagggcccagagactggctatagcctcagaagacacgtcgatcgtacaagcgagggggtacttcgaaacagaaaatctcaccactataaaaaacattacccaaacgaagacgcaccgaaaagcggtacttcctgttcctccaggtgtagttcatccagacaggactccgagagcgcacgcccagagtcagagaccgaagatgttctctgggaagatctgctgcactgcgcggaatgccacagctcttgcaccagcgagaccgacgtagaaaaccaccagatcaacccctgcgtgaaaaaagagtaccgggacgacccgttccaccagtctcacctaccttggctccattcctcccacccaggactggagaagatcagcgccattgtgtgggagggaaacgattgcaaaaaagccgatatgagtgtgttggaaatctccggaatgatcatgaaccgtgtgaatagccacattcccggtatcggataccaaatattcggaaatgctgtaagcctgattttggggctgacccccttcgttttccgcctctcccaagctacagatctcgagcagcttactgctcactctgcttctgagctgtacgtgattgccttcgggtcaaacgaagacgtcatcgtgctgtctatggtgatcatctccttcgtggtgcgtgtatccctggtctggatctttttctttctcttgtgcgttgctgagcgtacttacaaacagcgcctcctcttcgctaagttgttcggacacctgacctccgcaagacgagcgagaaagtctgaggttcctcattttcgcctgaaaaaggttcagaatattaagatgtggctgagcctcaggtcttacctcaagcgacggggacctcagcggagcgtggacgtaatcgtgtcatctgctttcttactcacgattagtgtggtgttcatctgctgcgctcaattgctccacgtgcacgagatctttctggactgccactataattgggagttggtcatctggtgtatctctctcacactgttcctgcttagatttgtaacattggggtccgaaacgagcaagaagtattccaacacttctatactgctcactgaacagatcaacctgtatctgaagatggaaaagaagcccaataaaaaagaagaactgacgttggtcaacaatgtgttaaagctggctacaaagctgttgaaagagctggactccccctttaggctgtacgggttgaccatgaatcccctcttgtacaacatcacacaggtggtaatactgtctgccgtgagcggcgttatatccgacctgctgggctttaacctcaagctgtggaagattaaatcctag

SEQ ID NO: 270397 - DNA, 2256 bp, Artificial Sequence
  derived and/or modified sequence
atggcctccaaggttaccgatgcaatcgtgtggtaccagaaaaaaatcggagcctacgaccagcagatctgggagaaatcggtcgagcagagggagattaagtttatcaaacttggattaagaaataaacccaagaagaccgcacacgttaagccggacctgatcgacgtggacctcgtacgcggatccgcatttgccaaggctaagcctgaaagtccgtggactagcttgactagaaagggtatagtccgcgtggtttttttccccttttttttccgatggtggttacaggtcacctcaaaagtgattttcttctggctgctcgtactgtacctgttacaagtggctgccattgtgctgttctgttccacgagctccccccattctattcctctgactgaggtgatcgggccaatctggcttatgctcctgctggggaccgtgcactgccagattgtgtccacccgcactccaaagcctcctctgtccacagggggtaaaaggaggaggaagctgcgcaaggccgcacatctcgaggtgcacagagaaggtgatggatcttctactacagacaatactcaagaaggtgccgtgcagaaccacggcacctcaacctcccacagtgtcggaaccgtttttcgcgatctttggcatgctgcgttttttttaagcggcagcaagaaagccaaaaacagcatcgataagtccaccgagaccgataacggatatgtgtccctcgatggaaagaagaccgtcaagtcaggcgaggatggaatccagaaccacgaaccacaatgcgaaaccattcgccctgaagagactgcatggaataccggaaccctgcggaacggccctagcaaggatacccagaggactatcactaacgtttccgatgaggtctccagcgaagaggggccagagactgggtattcactacggcgacatgtcgatcgcacaagcgaaggagtattgcgaaaccgcaagtcacaccactacaagaaacattaccccaatgaagatgcgcctaagtccgggacctcttgcagctccaggtgctcctcgtcaaggcaggattccgagtccgccagaccagagtcagagaccgaggatgtcttgtgggaggatctgctacactgtgccgagtgccacagttcttgtacatcagagacggacgtcgagaaccatcagatcaatccctgcgtgaagaaagaataccgggatgatcccttccaccaatcccatctgccatggctgcactcctctcaccctgggcttgagaagatcagtgccatagtgtgggagggaaatgactgcaagaaggcggatatgtccgtgctcgagatttcgggaatgattatgaaccgtgtaaacagtcacatccctggcatcggctatcagattttcgggaacgcggtcagcttaatactgggtctgactcccttcgtctttaggttgagtcaggccacggatctggagcagttgacggcccacagcgcatctgagctctacgtaattgcctttgggagcaacgaggatgttatcgtgctctcaatggtgatcattagttttgtggtgcgagtgtcgttggtatggattttcttctttcttctctgcgttgccgaacggacatacaagcaacgcttactatttgccaagctcttcggacatctgacttcagctaggagagcgagaaaatctgaggttccccatttccgattgaaaaaagtgcagaacattaagatgtggctgagcttgagatcatatctgaagaggagggggccacagcgatccgtggatgtgattgtgtcaagtgctttccttctcaccataagcgtcgtgtttatctgctgcgcgcagttacttcacgttcatgaaatcttcctggactgccactacaattgggagctcgtgatctggtgcatatccctgactctgtttctgctgcgctttgtaactctcggatccgagacctctaaaaaatactctaacacgagcattctgctgacagagcagatcaatctgtacctcaaaatggagaagaagccaaataagaaggaagaactaacgttagttaataacgtgctcaagctcgctaccaaactgttgaaggaactggactcaccgttcaggctctatggattaacaatgaaccccctcctctataacatcactcaggtcgttatcctgtcagccgtttccggagtgatctcagatctgctcgggttcaacttgaaactgtggaaaatcaaaagttag

SEQ ID NO: 270398 - DNA, 2256 bp, Artificial Sequence
  derived and/or modified sequence
atggctagcaaggtcacagatgccattgtctggtaccagaagaagattggcgcttacgaccagcaaatatgggagaagtccgtcgaacaaagggaaatcaaattcatcaaactcggacttcgcaacaaacctaaaaagaccgcccacgtgaaacccgatttgatcgacgtggacctggtcaggggcagcgcatttgccaaggcgaaacccgagagcccctggacgtccctgaccaggaaagggattgtgcgggtggtattttttcctttcttctttcgctggtggctacaggtcactagtaaagtgatctttttctggttgcttgtgctctatctgcttcaggtggctgctatagtactcttttgcagtacttccagcccacacagtattccccttaccgaagtaattggacccatttggctgatgctcctgttgggtaccgttcactgccagatagtgagtactaggacaccgaagccacctttgagcaccggcggaaagcggagaagaaagctgaggaaagccgctcacctggaagttcatcgggagggagatggcagttccaccaccgataatacccaggaaggagctgtacaaaatcacggcacctccaccagtcattcagtcggcaccgttttccgggacctgtggcacgctgcattcttcttgtctgggagcaagaaagccaagaacagtatcgataaatctactgagaccgacaatggctacgtttcgctggacggtaagaagacagttaaatccggcgaggacgggattcagaatcacgagccacaatgtgagacaataaggcctgaggagaccgcatggaataccgggacccttcgcaacggtccaagcaaagatacacagagaaccattacgaacgtatccgatgaggtaagcagcgaagaaggtcctgagacaggatactcacttcgtcgccatgtggaccgcacctcggaaggggtgctccgaaatcgaaaaagccaccactataagaagcattatcctaacgaggacgcgcctaaatcaggcacttcctgctcgtcccggtgttcgtctagcaggcaggatagcgagtcggcaagacccgaatctgaaactgaggatgtattatgggaagacctattgcactgtgcagaatgccattcgtcgtgcacaagtgagactgatgtggaaaatcatcagattaacccatgcgttaagaaggaatatcgcgatgatccctttcatcaaagtcacttgccatggttgcacagcagccaccccggactggaaaagatttccgctatcgtttgggaagggaacgattgcaagaaagccgatatgtccgtcctagaaataagtggaatgattatgaaccgtgtgaactcacacattcccggaattggataccaaatttttggcaatgcagtgagcctcatactggggctgactccatttgtcttccggctgtcccaggcaactgatctggagcagctgaccgcccacagcgcctctgaactctatgtgatcgcgtttggctccaatgaagacgtgattgtcctctctatggttattatcagttttgtggtgagagtttccctggtctggatttttttctttctgttatgcgtggccgaaagaacatacaagcaaagactgctgttcgcaaaacttttcggtcatctgacatctgctcgccgagccaggaagtccgaggtcccacatttccgcctcaagaaagtccagaacataaagatgtggttgtcactgcgatcataccttaagaggcgcggaccccagcgatccgttgatgtgatcgtttcttccgccttcctgctcaccatctcagtggtctttatatgctgcgcccagctgctgcacgtgcacgagattttcctggactgtcactataactgggagctagtgatctggtgtatcagcctcaccctgtttttgctccggtttgtgacgcttggaagcgagactagcaagaagtactctaacacatctattctcctcactgagcaaatcaacctctatctgaagatggagaaaaagccaaataaaaaggaggagctgactctggtcaataacgtgcttaagctggcaacaaagctgctgaaagaactcgattcgccttttagactgtacggcctgacaatgaatcctcttctgtacaacatcacacaggtggtcatcctcagcgcagtgtccggcgtgatctccgatttgctggggttcaatctgaaactgtggaagatcaagtcctag

SEQ ID NO: 270399 - DNA, 2256 bp, Artificial Sequence
  derived and/or modified sequence
atggcgagcaaggtcacagatgctatagtgtggtaccaaaagaaaatcggtgcctatgaccagcagatctgggagaagtccgtggagcagcgagagattaagtttataaaatatggcctcagaaacaaaccgaagaaaacggcacatgtgaagcctgatcttattgacgtggacttggttcgtggcagcgctttcgccaaggctaaaccagagtcaccctggacctcattgactagaaagggaatcgtgcgtgtcgtgttcttcccgttcttttttcggtggtggctgcaagtgacgtccaaagtgatcttcttctggttattggttctgtatctgctgcaggtggcagcaattgtgctgttctgctctacgagctccccacattccatcccgttaacggaggtgatagggccaatctggctaatgttactcctggggactgtacactgccagattgttagcacaagaacacccaagccccctttatccaccggtggcaaaagaaggcgaaagctgcggaaagccgcacatctggaagtacacagggagggcgatggcagctctacaaccgacaatacccaggagggagctgtccagaatcacggaacttctactagtcatagcgtcgggaccgtgttcagagacctgtggcatgcagccttcttcctttcgggatccaaaaaggctaaaaattctatcgataagtcaacagaaactgacaacggatacgtttcacttgatgggaaaaagaccgttaaatctggagaggacggtattcagaaccacgagcctcagtgtgaaacaatcagaccagaagagacagcttggaacacgggcacacttcgaaatggaccgtcaaaggatacacagaggaccattactaacgttagcgatgaggtctctagtgaagaaggaccggagaccggatattccctgaggaggcacgtggacaggacctcagaaggagtgctgcggaataggaagagccaccattataaaaagcattacccgaatgaggatgcccctaagtccggcacctcgtgcagctcacggtgctctagtagtcgccaggactctgaatctgcccgtcctgagtccgaaacagaagacgtgctctgggaggatctcttacactgtgccgagtgccacagttcttgcacatctgagactgatgtggaaaatcatcagattaatccatgtgtgaagaaggagtacagagacgatccctttcaccagtcacaccttccttggttacactcctcccatcctggattggagaaaatttcggctattgtatgggaaggaaacgactgcaagaaagccgacatgtccgtgctagagattagcggaatgataatgaaccgagtcaactcccacatccccggaataggataccaaatctttggtaatgctgtttcgttaatactgggtttaactccatttgtgttccgactgtctcaagccactgaccttgaacagctcactgcccacagcgcatctgagctctatgtgatcgcttttggctccaatgaggatgtgatcgttcttagcatggtcataatatcctttgttgtccgtgtgtccctcgtatggattttcttcttcctgctgtgcgtggcagaaaggacatataaacagcgcctgctcttcgcgaagctgttcggacatctgacttccgccagacgtgcccgaaagtctgaggtgccccacttcagactcaagaaagtgcagaatataaaaatgtggctctcgctcaggtcttacctgaagagacgcggtcctcaacgttcggtagacgtcattgtgtcgtccgctttccttcttacaatctcagtggtgtttatatgttgtgcgcagctgttacacgtgcacgagatctttctcgactgtcattataactgggagctggttatctggtgcatcagtcttactctcttcttgctgaggttcgtgacactgggttcagaaaccagcaaaaagtacagtaatacaagcatcctactcactgaacagattaatctgtatctcaagatggagaaaaagcctaacaaaaaagaagaactcacacttgtgaataatgtgctcaagttggcaactaagttactgaaggagctcgactcgccgttcagactctacggattaacaatgaaccctttactatataacatcacccaggtggttattttatctgccgtgtccggcgtgatctctgatctcctcggcttcaatctgaagctgtggaagatcaagtcgtag

SEQ ID NO: 270400 - DNA, 4778 bp, Artificial Sequence
  derived and/or modified sequence
tgggaaataaagtcatttgtatgtttttctctcttgcacagcctaaaatgaccaatgtgtgatttcagtggaataaatggcgtccaaagtcacagatgctatagtctggtatcaaaagaaggagtttctctctgtggccaccaccgccccaggcccacagcaagtactgcctggctactgccagtgttcactcaaggaccaagggctcttcattcagtgtttgattggagcatatgatcaacaaatatgggaaaaatctgttgaacagagagaaatcaagtttattaaactggggctaaggaataaaccaaagaaaacagcacatgtgaaaccagacctcatagatgttgatcttgtaagagggtctgcatttgcaaaggcaaagcctgaaagtccttggacttctctgaccagaaagggaattgttcgagttgtatttttcccctttttcttccggtggtggttacaagtaacatcaaaggtcatctttttctggcttcttgtcctttatcttcttcaagttgctgcaatagtattattctgctccacttctagcccacacagcatacctctgacagaggtgattgggccgatatggctgatgctgctcctgggaactgtgcattgccagattgtttccacaagaacacccaaacctcctctaagtacagggggtaaaagaagaaggaaattaagaaaagcagcccatttggaagtacatagggaaggagatggttctagtaccacagataacacacaagagggagcagttcagaaccacggtacaagcacctctcacagcgttggcactgtcttcagagatctctggcatgctgctttctttttatcaggatcaaagaaagcaaagaattcaattgataaatcaactgaaactgacaatggctatgtatcccttgatgggaagaagactgttaaaagcggtgaagatggaatacaaaaccatgaacctcagtgtgaaactattcgaccagaagagacagcctggaacacaggaacactgaggaatggtcctagcaaagatacccaaaggacaataacaaatgtctctgatgaagtctccagtgaggaaggtcctgaaacaggatactcattacgtcgtcatgtggacaggacttctgaaggtgttcttcggaatagaaagtcacaccattataagaaacattaccctaatgaggacgcccctaaatcgggtactagttgcagctctcgctgttcaagttccagacaggattctgagagtgcaaggccagaatctgaaacagaagatgtgttatgggaagacttgttacattgtgcagaatgccattcatcttgtaccagtgagacagatgtggaaaatcatcagattaatccatgtgtgaaaaaagaatatagagatgacccttttcatcagagtcatttgccctggctccatagttcccacccaggattagaaaaaataagtgctatagtatgggaaggtaatgattgtaagaaagcagacatgtctgtacttgaaatcagtggaatgataatgaacagagtgaacagccatataccaggaataggataccagatttttggaaatgcagtctctctcatactgggtttaactccatttgttttccgactttctcaagctacagacttggaacaactcacagcacattctgcttcagaactttatgtgattgcatttggttctaatgaagatgtcatagttctttctatggttataataagttttgtggttcgcgtgtctcttgtgtggattttcttttttttgctctgtgtagcagaaagaacttataaacagcgattactttttgcaaaactctttggacatttaacatctgcaaggagggctcgaaaatctgaggttcctcatttccggttgaagaaagtacagaatataaaaatgtggctatctctccgttcctatcttaagcgtcgaggtcctcagcgatcagttgatgtaatagtttcatctgctttcttattgactatctcagttgtatttatctgttgtgcccagctacttcatgtacacgagatcttccttgattgtcactacaattgggaattggtaatctggtgcatctcgttaacactttttctcctaagatttgttacccttggatcagaaacaagtaaaaaatatagtaatacctcaatattacttactgaacagataaacctctacttgaaaatggagaaaaaacctaacaaaaaggaggaactgacactagtgaataatgttttaaaactggctactaaactgctaaaggagttggacagtccttttagattatatgggcttacaatgaatccgctgctttataacatcacccaggttgttatcctgtcagctgtttctggtgttatcagtgacttgcttggatttaatttaaagctatggaagattaagtcatgacaattcaaagaaaagaagatgtagcctcttttccagaataagagtactgactaagctgcctgaaagcttgtcactgattctttgcttcaggagtctcagctagggagttgaagtgtttacatcagactgtcttgtgcaattcttatatttattttactggttcacttttttttacatttattttagtctttatatttttatttttaagcattgatgtacttagttgttgaaagggtgatgaaactgatatccagatacttgagatcctggtaattggtcataaataattggcaaaataacaaattgtgaaaatagaagccattgctcagcaccgtttctccatcaatgccgtgaacttgccttacttgaggaaaaattctttaactttggaatattgcattgaactcagctatacacataaaacattttctttggtaaatcaagatccagtcagggtttctcttgaattattttggaacaatgccaggatccaaactgattaagttacagtttaagcacccttcagtattaatatatacggtattatataacaggtcaacaagtgctctttgatgataaaacttgtaatagagcaataattgtaaatggttaccatactgtaagatattttgataaaaattaactagtaatacttgtatttatttgaaacactgggctgtttgcacagctccaactgtgcatgctcaaaatgtgcactttttaaaattgttacttttaatgcgtatctttatatgggatctgttatagtatactagggcatgatatggtatccttttgagtgaggtatatactcatctcacaagtgaagtgcctactgatattactaaagtacattatgtttactcaagtaaataattttctccccatggtacactctagtgtaggctattcataccacactgaaatgaacaactgaagaataaggctaagaaccaataaaatatttctctaattgctagttgtaaaactgtatccaaattttcagaaaagacagcttcagcttgcaaattctatcctctaaacttatctggtgcattctccccaccccacccccattatataagggctattttagatgcttttaacctccccaacaaataatttgccaagtgtccaatgagaacttatcatgttggtgtgttaggtaaatcgggcaaatatgatagtgtcttacattgggccttgattttaagttgttatatttgtacaatcgagtattttagaaattacatgaaacatgaaacagtttttgcaattttttttaaactgggcatctggtttctaaaaatttatttgaaacaatctagaattttcttggtgcaaagtgtatcatgtggaatatcctcatatttttaccatattttaagaactttaagacgattaattgtaaataatttatttgattggtgcagttctaatccctaaatcataatcttaaaatcaggaatgtgtggagaacagagccatgtcatatcactttgctcttaccattccttttgatcagcctcaattcagcctcattgtgtagtatgttttttctttctatgaaaaacaacagaaagcatttcattttatttgcctatgttcaaatatgtttaataatgaccaaagtgcattctgagttttttcaaggaatgtaatactggagctttaagaacatacttagtttctcatgtgaaaacttaggctttgtctgatgtttttccttcctctattgtctaatgttgaggttgtttttaggaattatgttttataaactttttcaatataaggtacatgcctatacagaacttaacattttgcacagaatatatcaaatatattttgagaaaaaaagtacggcatgagttctgttaggaataaaagatgaaactattgtatctcacaaaaaatcttatttcagaatggaaatatttttgagaaaagtagctgagtatactggtttaagaaaatgcttgttttagattgaggttaacttagagttgggagttgatttattaagtacagtatacctctcaacagtttataaataatatgttgaattatgtcagtgtgggcagcagtagaatactaaaaggaaaatgtcatgttaagcaatttcagaacattaactgaactattttcaaagcagaaaaattgacattgctgcctttaagaataccatgaatgtaagaaattgaaagaaattgtaaaatatcacataatatagaaatggcagttcaaagagaattgtggcagatgttgtgtgtgaactgttgtttctttgccacatgtgttgtatttgaaagttttacagtaagtttaaaataaaacattctgtgac

SEQ ID NO: 270401 - DNA, 5005 bp, Artificial Sequence
  derived and/or modified sequence
aagtaaccagagtgctatgtctgcatgctgttcagtctccttttggaaggtgggaaataaagtcatttgtatgtttttctctcttgcacagcctaaaatgaccaatgtgtgatttcagtggaataaatggcgtccaaagtcacagatgctatagtctggtatcaaaagaagattggagcatatgatcaacaaatatgggaaaaatctgttgaacagagagaaatcaagtttattaaactggggctaaggaataaaccaaagaaaacagcacatgtgaaaccagacctcatagatgttgatcttgtaagagggtctgcatttgcaaaggcaaagcctgaaagtccttggacttctctgaccagaaagggaattgttcgagttgtatttttcccctttttcttccggtggtggttacaagtaacatcaaaggtcatctttttctggcttcttgtcctttatcttcttcaagttgctgcaatagtattattctgctccacttctagcccacacagcatacctctgacagaggtgattgggccgatatggctgatgctgctcctgggaactgtgcattgccagattgtttccacaagaacacccaaacctcctctaagtacagggggtaaaagaagaaggaaattaagaaaagcagcccatttggaagtacatagggaaggagatggttctagtaccacagataacacacaagagggagcagttcagaaccacggtacaagcacctctcacagcgttggcactgtcttcagagatctctggcatgctgctttctttttatcaggatcaaagaaagcaaagaattcaattgataaatcaactgaaactgacaatggctatgtatcccttgatgggaagaagactgttaaaagcggtgaagatggaatacaaaaccatgaacctcagtgtgaaactattcgaccagaagagacagcctggaacacaggaacactgaggaatggtcctagcaaagatacccaaaggacaataacaaatgtctctgatgaagtctccagtgaggaaggtcctgaaacaggatactcattacgtcgtcatgtggacaggacttctgaaggtgttcttcggaatagaaagtcacaccattataagaaacattaccctaatgaggacgcccctaaatcgggtactagttgcagctctcgctgttcaagttccagacaggattctgagagtgcaaggccagaatctgaaacagaagatgtgttatgggaagacttgttacattgtgcagaatgccattcatcttgtaccagtgagacagatgtggaaaatcatcagattaatccatgtgtgaaaaaagaatatagagatgacccttttcatcagagtcatttgccctggctccatagttcccacccaggattagaaaaaataagtgctatagtatgggaaggtaatgattgtaagaaagcagacatgtctgtacttgaaatcagtggaatgataatgaacagagtgaacagccatataccaggaataggataccagatttttggaaatgcagtctctctcatactgggtttaactccatttgttttccgactttctcaagctacagacttggaacaactcacagcacattctgcttcagaactttatgtgattgcatttggttctaatgaagatgtcatagttctttctatggttataataagttttgtggttcgcgtgtctcttgtgtggattttcttttttttgctctgtgtagcagaaagaacttataaacagcgattactttttgcaaaactctttggacatttaacatctgcaaggagggctcgaaaatctgaggttcctcatttccggttgaagaaagtacagaatataaaaatgtggctatctctccgttcctatcttaagcgtcgaggtcctcagcgatcagttgatgtaatagtttcatctgctttcttattgactatctcagttgtatttatctgttgtgcccagctacttcatgtacacgagatcttccttgattgtcactacaattgggaattggtaatctggtgcatctcgttaacactttttctcctaagatttgttacccttggatcagaaacaagtaaaaaatatagtaatacctcaatattacttactgaacagataaacctctacttgaaaatggagaaaaaacctaacaaaaaggaggaactgacactagtgaataatgttttaaaactggctactaaactgctaaaggagttggacagtccttttagattatatgggcttacaatgaatccgctgctttataacatcacccaggttgttatcctgtcagctgtttctggtgttatcagtgacttgcttggatttaatttaaagctatggaagattaagtcatgacaattcaaagaaaagaagatgtagcctcttttccagaataagagtactgactaagctgcctgaaagcttgtcactgattctttgcttcaggagtctcagctagggagttgaagtgtttacatcagactgtcttgtgcaattcttatatttattttactggttcacttttttttacatttattttagtctttatatttttatttttaagcattgatgtacttagttgttgaaagggtgatgaaactgatatccagatacttgagatcctggtaattggtcataaataattggcaaaataacaaattgtgaaaatagaagccattgctcagcaccgtttctccatcaatgccgtgaacttgccttacttgaggaaaaattctttaactttggaatattgcattgaactcagctatacacataaaacattttctttggtaaatcaagatccagtcagggtttctcttgaattattttggaacaatgccaggatccaaactgattaagttacagtttaagcacccttcagtattaatatatacggtattatataacaggtcaacaagtgctctttgatgataaaacttgtaatagagcaataattgtaaatggttaccatactgtaagatattttgataaaaattaactagtaatacttgtatttatttgaaacactgggctgtttgcacagctccaactgtgcatgctcaaaatgtgcactttttaaaattgttacttttaatgcgtatctttatatgggatctgttatagtatactagggcatgatatggtatccttttgagtgaggtatatactcatctcacaagtgaagtgcctactgatattactaaagtacattatgtttactcaagtaaataattttctccccatggtacactctagtgtaggctattcataccacactgaaatgaacaactgaagaataaggctaagaaccaataaaatatttctctaattgctagttgtaaaactgtatccaaattttcagaaaagacagcttcagcttgcaaattctatcctctaaacttatctggtgcattctccccaccccacccccattatataagggctattttagatgcttttaacctccccaacaaataatttgccaagtgtccaatgagaacttatcatgttggtgtgttaggtaaatcgggcaaatatgatagtgtcttacattgggccttgattttaagttgttatatttgtacaatcgagtattttagaaattacatgaaacatgaaacagtttttgcaattttttttaaactgggcatctggtttctaaaaatttatttgaaacaatctagaattttcttggtgcaaagtgtatcatgtggaatatcctcatatttttaccatattttaagaactttaagacgattaattgtaaataatttatttgattggtgcagttctaatccctaaatcataatcttaaaatcaggaatgtgtggagaacagagccatgtcatatcactttgctcttaccattccttttgatcagcctcaattcagcctcattgtgtagtatgttttttctttctatgaaaaacaacagaaagcatttcattttatttgcctatgttcaaatatgtttaataatgaccaaagtgcattctgagttttttcaaggaatgtaatactggagctttaagaacatacttagtttctcatgtgaaaacttaggctttgtctgatgtttttccttcctctattgtctaatgttgaggttgtttttaggaattatgttttataaactttttcaatataaggtacatgcctatacagaacttaacattttgcacagaatatatcaaatatattttgagaaaaaaagtacggcatgagttctgttaggaataaaagatgaaactattgtatctcacaaaaaatcttatttcagaatggaaatatttttgagaaaagtagctgagtatactggtttaagaaaatgcttgttttagattgaggttaacttagagttgggagttgatttattaagtacagtatacctctcaacagtttataaataatatgttgaattatgtcagtgtgggcagcagtagaatactaaaaggaaaatgtcatgttaagcaatttcagaacattaactgaactattttcaaagcagaaaaattgacattgctgcctttaagaataccatgaatgtaagaaattgaaagaaattgtaaaatatcacataatatagaaatggcagttcaaagagaattgtggcagatgttgtgtgtgaactgttgtttctttgccacatgtgttgtatttgaaagttttacagtaagtttaaaataaaacattctgtgactgacggtgtttttttttttaattttcaggtcatatacatttctatggtaattttgtgtttacttaacataaaatttagttagatttggggggagtgaaaataaattttttataactttccaacattttagattttgttatgattcttagaacatgaaagaataatacacaggtttttcatcaccaaaatgatattatatcattaatgtttgtttgcttctttgtttttgaatacagcaaactggctgtggcctgaaatattaaagctcattgtgaaaag

SEQ ID NO: 270402 - DNA, 3525 bp, Artificial Sequence
  derived and/or modified sequence
tccggcgcaaaatcctgcgggagagggggtggggcaaccctctggaggcagcgcgcccgcgggcagcctcgttgtggctccttgggctctgttggcggcggcgctagcttcggagtctcccgcgcgcacctcagccgcctcctagcggcgcggcgctcgctcctacgcctaaaatgaccaatgtgtgatttcagtggaataaatggcgtccaaagtcacagatgctatagtctggtatcaaaagaagattggagcatatgatcaacaaatatgggaaaaatctgttgaacagagagaaatcaagtttattaaactggggctaaggaataaaccaaagaaaacagcacatgtgaaaccagacctcatagatgttgatcttgtaagagggtctgcatttgcaaaggcaaagcctgaaagtccttggacttctctgaccagaaagggaattgttcgagttgtatttttcccctttttcttccggtggtggttacaagtaacatcaaaggtcatctttttctggcttcttgtcctttatcttcttcaagttgctgcaatagtattattctgctccacttctagcccacacagcatacctctgacagaggtgattgggccgatatggctgatgctgctcctgggaactgtgcattgccagattgtttccacaagaacacccaaacctcctctaagtacagggggtaaaagaagaaggaaattaagaaaagcagcccatttggaagtacatagggaaggagatggttctagtaccacagataacacacaagagggagcagttcagaaccacggtacaagcacctctcacagcgttggcactgtcttcagagatctctggcatgctgctttctttttatcaggatcaaagaaagcaaagaattcaattgataaatcaactgaaactgacaatggctatgtatcccttgatgggaagaagactgttaaaagcggtgaagatggaatacaaaaccatgaacctcagtgtgaaactattcgaccagaagagacagcctggaacacaggaacactgaggaatggtcctagcaaagatacccaaaggacaataacaaatgtctctgatgaagtctccagtgaggaaggtcctgaaacaggatactcattacgtcgtcatgtggacaggacttctgaaggtgttcttcggaatagaaagtcacaccattataagaaacattaccctaatgaggacgcccctaaatcgggtactagttgcagctctcgctgttcaagttccagacaggattctgagagtgcaaggccagaatctgaaacagaagatgtgttatgggaagacttgttacattgtgcagaatgccattcatcttgtaccagtgagacagatgtggaaaatcatcagattaatccatgtgtgaaaaaagaatatagagatgacccttttcatcagagtcatttgccctggctccatagttcccacccaggattagaaaaaataagtgctatagtatgggaaggtaatgattgtaagaaagcagacatgtctgtacttgaaatcagtggaatgataatgaacagagtgaacagccatataccaggaataggataccagatttttggaaatgcagtctctctcatactgggtttaactccatttgttttccgactttctcaagctacagacttggaacaactcacagcacattctgcttcagaactttatgtgattgcatttggttctaatgaagatgtcatagttctttctatggttataataagttttgtggttcgcgtgtctcttgtgtggattttcttttttttgctctgtgtagcagaaagaacttataaacagcgattactttttgcaaaactctttggacatttaacatctgcaaggagggctcgaaaatctgaggttcctcatttccggttgaagaaagtacagaatataaaaatgtggctatctctccgttcctatcttaagcgtcgaggtcctcagcgatcagttgatgtaatagtttcatctgctttcttattgactatctcagttgtatttatctgttgtgcccagctacttcatgtacacgagatcttccttgattgtcactacaattgggaattggtaatctggtgcatctcgttaacactttttctcctaagatttgttacccttggatcagaaacaagtaaaaaatatagtaatacctcaatattacttactgaacagataaacctctacttgaaaatggagaaaaaacctaacaaaaaggaggaactgacactagtgaataatgttttaaaactggctactaaactgctaaaggagttggacagtccttttagattatatgggcttacaatgaatccgctgctttataacatcacccaggttgttatcctgtcagctgtttctggtgttatcagtgacttgcttggatttaatttaaagctatggaagattaagtcatgacaattcaaagaaaagaagatgtagcctcttttccagaataagagtactgactaagctgcctgaaagcttgtcactgattctttgcttcaggagtctcagctagggagttgaagtgtttacatcagactgtcttgtgcaattcttatatttattttactggttcacttttttttacatttattttagtctttatatttttatttttaagcattgatgtacttagttgttgaaagggtgatgaaactgatatccagatacttgagatcctggtaattggtcataaataattggcaaaataacaaattgtgaaaatagaagccattgctcagcaccgtttctccatcaatgccgtgaacttgccttacttgaggaaaaattctttaactttggaatattgcattgaactcagctatacacataaaacattttctttggtaaatcaagatccagtcagggtttctcttgaattattttggaacaatgccaggatccaaactgattaagttacagtttaagcacccttcagtattaatatatacggtattatataacaggtcaacaagtgctctttgatgataaaacttgtaatagagcaataattgtaaatggttaccatactgtaagatattttgataaaaattaactagtaatacttgtatttatttgaaacactgggctgtttgcacagctccaactgtgcatgctcaaaatgtgcactttttaaaattgttacttttaatgcgtatctttatatgggatctgttatagtatactagggcatgatatggtatccttttgagtgaggtatatactcatctcacaagtgaagtgcctactgatattactaaagtacattatgtttactcaagtaaataattttctccccatggtacactctagtgtaggctattcataccacactgaaatgaacaactgaagaataaggctaagaaccaataaaatatttctctaattgctagttgtaaaactgtatccaaattttcagaaaagacagcttcagcttgcaaattctatcctctaaacttatctggtgcattctccccacc

SEQ ID NO: 270403 - DNA, 5094 bp, Artificial Sequence
  derived and/or modified sequence
agtgactgcaggctccggcgcaaaatcctgcgggagagggggtggggcaaccctctggaggcagcgcgcccgcgggcagcctcgttgtggctccttgggctctgttggcggcggcgctagcttcggagtctcccgcgcgcacctcagccgcctcctagcggcgcggcgctcgctcctacgcctaaaatgaccaatgtgtgatttcagtggaataaatggcgtccaaagtcacagatgctatagtctggtatcaaaagaagattggagcatatgatcaacaaatatgggaaaaatctgttgaacagagagaaatcaagtttataaagtatgggctaaggaataaaccaaagaaaacagcacatgtgaaaccagacctcatagatgttgatcttgtaagagggtctgcatttgcaaaggcaaagcctgaaagtccttggacttctctgaccagaaagggaattgttcgagttgtatttttcccctttttcttccggtggtggttacaagtaacatcaaaggtcatctttttctggcttcttgtcctttatcttcttcaagttgctgcaatagtattattctgctccacttctagcccacacagcatacctctgacagaggtgattgggccgatatggctgatgctgctcctgggaactgtgcattgccagattgtttccacaagaacacccaaacctcctctaagtacagggggtaaaagaagaaggaaattaagaaaagcagcccatttggaagtacatagggaaggagatggttctagtaccacagataacacacaagagggagcagttcagaaccacggtacaagcacctctcacagcgttggcactgtcttcagagatctctggcatgctgctttctttttatcaggatcaaagaaagcaaagaattcaattgataaatcaactgaaactgacaatggctatgtatcccttgatgggaagaagactgttaaaagcggtgaagatggaatacaaaaccatgaacctcagtgtgaaactattcgaccagaagagacagcctggaacacaggaacactgaggaatggtcctagcaaagatacccaaaggacaataacaaatgtctctgatgaagtctccagtgaggaaggtcctgaaacaggatactcattacgtcgtcatgtggacaggacttctgaaggtgttcttcggaatagaaagtcacaccattataagaaacattaccctaatgaggacgcccctaaatcgggtactagttgcagctctcgctgttcaagttccagacaggattctgagagtgcaaggccagaatctgaaacagaagatgtgttatgggaagacttgttacattgtgcagaatgccattcatcttgtaccagtgagacagatgtggaaaatcatcagattaatccatgtgtgaaaaaagaatatagagatgacccttttcatcagagtcatttgccctggctccatagttcccacccaggattagaaaaaataagtgctatagtatgggaaggtaatgattgtaagaaagcagacatgtctgtacttgaaatcagtggaatgataatgaacagagtgaacagccatataccaggaataggataccagatttttggaaatgcagtctctctcatactgggtttaactccatttgttttccgactttctcaagctacagacttggaacaactcacagcacattctgcttcagaactttatgtgattgcatttggttctaatgaagatgtcatagttctttctatggttataataagttttgtggttcgcgtgtctcttgtgtggattttcttttttttgctctgtgtagcagaaagaacttataaacagcgattactttttgcaaaactctttggacatttaacatctgcaaggagggctcgaaaatctgaggttcctcatttccggttgaagaaagtacagaatataaaaatgtggctatctctccgttcctatcttaagcgtcgaggtcctcagcgatcagttgatgtaatagtttcatctgctttcttattgactatctcagttgtatttatctgttgtgcccagctacttcatgtacacgagatcttccttgattgtcactacaattgggaattggtaatctggtgcatctcgttaacactttttctcctaagatttgttacccttggatcagaaacaagtaaaaaatatagtaatacctcaatattacttactgaacagataaacctctacttgaaaatggagaaaaaacctaacaaaaaggaggaactgacactagtgaataatgttttaaaactggctactaaactgctaaaggagttggacagtccttttagattatatgggcttacaatgaatccgctgctttataacatcacccaggttgttatcctgtcagctgtttctggtgttatcagtgacttgcttggatttaatttaaagctatggaagattaagtcatgacaattcaaagaaaagaagatgtagcctcttttccagaataagagtactgactaagctgcctgaaagcttgtcactgattctttgcttcaggagtctcagctagggagttgaagtgtttacatcagactgtcttgtgcaattcttatatttattttactggttcacttttttttacatttattttagtctttatatttttatttttaagcattgatgtacttagttgttgaaagggtgatgaaactgatatccagatacttgagatcctggtaattggtcataaataattggcaaaataacaaattgtgaaaatagaagccattgctcagcaccgtttctccatcaatgccgtgaacttgccttacttgaggaaaaattctttaactttggaatattgcattgaactcagctatacacataaaacattttctttggtaaatcaagatccagtcagggtttctcttgaattattttggaacaatgccaggatccaaactgattaagttacagtttaagcacccttcagtattaatatatacggtattatataacaggtcaacaagtgctctttgatgataaaacttgtaatagagcaataattgtaaatggttaccatactgtaagatattttgataaaaattaactagtaatacttgtatttatttgaaacactgggctgtttgcacagctccaactgtgcatgctcaaaatgtgcactttttaaaattgttacttttaatgcgtatctttatatgggatctgttatagtatactagggcatgatatggtatccttttgagtgaggtatatactcatctcacaagtgaagtgcctactgatattactaaagtacattatgtttactcaagtaaataattttctccccatggtacactctagtgtaggctattcataccacactgaaatgaacaactgaagaataaggctaagaaccaataaaatatttctctaattgctagttgtaaaactgtatccaaattttcagaaaagacagcttcagcttgcaaattctatcctctaaacttatctggtgcattctccccaccccacccccattatataagggctattttagatgcttttaacctccccaacaaataatttgccaagtgtccaatgagaacttatcatgttggtgtgttaggtaaatcgggcaaatatgatagtgtcttacattgggccttgattttaagttgttatatttgtacaatcgagtattttagaaattacatgaaacatgaaacagtttttgcaattttttttaaactgggcatctggtttctaaaaatttatttgaaacaatctagaattttcttggtgcaaagtgtatcatgtggaatatcctcatatttttaccatattttaagaactttaagacgattaattgtaaataatttatttgattggtgcagttctaatccctaaatcataatcttaaaatcaggaatgtgtggagaacagagccatgtcatatcactttgctcttaccattccttttgatcagcctcaattcagcctcattgtgtagtatgttttttctttctatgaaaaacaacagaaagcatttcattttatttgcctatgttcaaatatgtttaataatgaccaaagtgcattctgagttttttcaaggaatgtaatactggagctttaagaacatacttagtttctcatgtgaaaacttaggctttgtctgatgtttttccttcctctattgtctaatgttgaggttgtttttaggaattatgttttataaactttttcaatataaggtacatgcctatacagaacttaacattttgcacagaatatatcaaatatattttgagaaaaaaagtacggcatgagttctgttaggaataaaagatgaaactattgtatctcacaaaaaatcttatttcagaatggaaatatttttgagaaaagtagctgagtatactggtttaagaaaatgcttgttttagattgaggttaacttagagttgggagttgatttattaagtacagtatacctctcaacagtttataaataatatgttgaattatgtcagtgtgggcagcagtagaatactaaaaggaaaatgtcatgttaagcaatttcagaacattaactgaactattttcaaagcagaaaaattgacattgctgcctttaagaataccatgaatgtaagaaattgaaagaaattgtaaaatatcacataatatagaaatggcagttcaaagagaattgtggcagatgttgtgtgtgaactgttgtttctttgccacatgtgttgtatttgaaagttttacagtaagtttaaaataaaacattctgtgactgacggtgtttttttttttaattttcaggtcatatacatttctatggtaattttgtgtttacttaacataaaatttagttagatttggggggagtgaaaataaattttttataactttccaacattttagattttgttatgattcttagaacatgaaagaataatacacaggtttttcatcaccaaaatgatattatatcattaatgtttgtttgcttctttgtttttgaatacagcaaactggctgtggcctgaaatattaaagctcattgtgaaaag

SEQ ID NO: 270404 - protein, 168 aa, Artificial Sequence
  derived and/or modified sequence
MQAQQYQQQRRKFAAAFLAFIFILAAVDTAEAGKKEKPEKKVKKSDCGEWQWSVCVPTSGDCGLGTREGTRTGAECKQTMKTQRCKIPCNWKKQFGAECKYQFQAWGECDLNTALKTRTGSLKRALHNAECQKTVTISKPCGKLTKPKPQAESKKKKKEGKKQEKMLD

SEQ ID NO: 270405 - DNA, 507 bp, Artificial Sequence
  derived and/or modified sequence
atgcaggcacagcaataccagcaacaaaggaggaaattcgctgcagcttttctggccttcatcttcatattagccgctgtggatactgccgaggccggaaaaaaagaaaaacccgagaaaaaggtcaaaaaaagcgactgtggagaatggcagtggagcgtgtgcgtccctaccagcggggactgtggcctggggacccgagaaggcactcgaaccggggccgagtgtaagcaaactatgaagactcagcggtgcaaaattccctgtaattggaagaagcagtttggggcagaatgtaaataccagtttcaggcctggggtgagtgcgatttaaatacagcactcaagacccggacagggtcccttaagcgggccctacacaacgccgagtgtcagaagactgtcaccatttccaagccctgcggcaaattgacaaagccaaagcctcaggccgaatccaagaaaaagaagaaagaggggaaaaagcaggagaaaatgttagactag

SEQ ID NO: 270406 - DNA, 507 bp, Artificial Sequence
  derived and/or modified sequence
atgcaggcccagcagtaccagcagcagaggaggaagtttgctgctgccttcctggccttcatcttcatcctggccgctgtggacacagctgaggccggcaagaaggagaagccagagaagaaggtgaagaagagtgactgtggggagtggcagtggagcgtgtgtgtgcccaccagcggggactgtggcctgggcacccgggagggcaccaggactggagctgagtgcaagcagaccatgaagacccagcgctgcaagatcccctgcaactggaagaagcagtttggagctgagtgcaagtaccagttccaggcctggggagaatgtgacctgaacacagccctgaagaccaggacaggcagcctgaagagggccctgcacaatgctgagtgccagaagacagtgaccatcagcaagccctgtgggaagctgaccaagcccaagccccaggccgagagcaagaagaagaagaaggagggcaagaagcaggagaagatgctggactag

SEQ ID NO: 270407 - DNA, 507 bp, Artificial Sequence
  derived and/or modified sequence
atgcaggcccagcagtaccagcagcagcggcggaagttcgccgccgcctttttagcctttattttcattcttgcagccgtcgacactgctgaggccggaaaaaaggaaaagccagagaagaaggtaaagaagagtgactgtggggagtggcagtggtcagtttgcgtgccgacaagtggggattgtggcctgggaactcgcgagggcacacgtacaggggccgaatgcaaacaaaccatgaaaactcaaaggtgtaagattccttgcaattggaagaagcagttcggcgcagaatgtaaatatcagtttcaggcctggggagaatgtgaccttaacacagctcttaaaacccgaaccggcagcctgaaacgggccctccataacgctgagtgtcagaagacagttacaatttccaagccctgtggcaaattgacaaaacctaaaccacaggcagagtcaaaaaagaagaagaaggagggtaaaaagcaggagaagatgctcgattag

SEQ ID NO: 270408 - DNA, 1614 bp, Artificial Sequence
  derived and/or modified sequence
ttgctccgcagggagagactgcccctggagtattctgcttttaataagcttcccaatcagctctcgagtgcaaagcgctctccctccctcgcccagccttcgtcctcctggcccgctcctctcatccctcccattctccatttcccttccgttccctccctgtcagggcgtaattgagtcaaaggcaggatcaggttccccgccttccagtccaaaaatcccgccaagagagccccagagcagaggaaaatccaaagtggagagaggggaagaaagagaccagtgagtcatccgtccagaaggcggggagagcagcagcggcccaagcaggagctgcagcgagccgggtacctggactcagcggtagcaacctcgccccttgcaacaaaggcagactgagcgccagagaggacgtttccaactcaaaaatgcaggctcaacagtaccagcagcagcgtcgaaaatttgcagctgccttcttggcattcattttcatactggcagctgtggatactgctgaagcagggaagaaagagaaaccagaaaaaaaagtgaagaagtctgactgtggagaatggcagtggagtgtgtgtgtgcccaccagtggagactgtgggctgggcacacgggagggcactcggactggagctgagtgcaagcaaaccatgaagacccagagatgtaagatcccctgcaactggaagaagcaatttggcgcggagtgcaaataccagttccaggcctggggagaatgtgacctgaacacagccctgaagaccagaactggaagtctgaagcgagccctgcacaatgccgaatgccagaagactgtcaccatctccaagccctgtggcaaactgaccaagcccaaacctcaagcagaatctaagaagaagaaaaaggaaggcaagaaacaggagaagatgctggattaaaagatgtcacctgtggaacataaaaaggacatcagcaaacaggatcagttaactattgcatttatatgtaccgtaggctttgtattcaaaaattatctatagctaagtacacaataagcaaaaacaaaaagaaaagaaaatttttgtagtagcgttttttaaatgtatactatagtaccagtaggggcttataataaaggactgtaatcttatttaggaagttgacttatagtacatgataaatgatagacaattgaggtaagttttttgaaattatgtgacattttacattaaattttttttacattttttgggcagcaatttaaatgttatgactatgtaaactacttctcttgttaggtaatttttttcacctagatttttttcccaattgagaaaaatatatactaaacaaaatagcaataaaacataatcactctatttgaagaaaatatcttgttttctgccaatagattttttaaaatgtagtcagcaaaatgggggtggggaagcagagcatgtcctagttcaatgttgactttttttttttttaaagaaaagcattaagacataaaattctttcactttggcagaagcatttgttttcttgatgaaattatttttccatctgaggaaaaaaatactaggaaaataaatcaaggtgatgctgaaaaaaaaa

SEQ ID NO: 270409 - DNA, 507 bp, Artificial Sequence
  derived and/or modified sequence
atgcaggcccagcagtatcagcagcaaaggaggaaattcgctgccgcttttctcgccttcatattcatattggctgcggtggatactgccgaagccggaaagaaagagaaaccggagaaaaaggtgaagaagtcagactgtggcgaatggcaatggagtgtgtgcgttcctacaagcggcgactgcggactgggaaccagggagggcacgagaaccggtgctgagtgtaaacagacaatgaaaactcagcgttgtaagatcccttgtaactggaaaaagcagttcggagccgagtgtaaataccagttccaggcctggggcgagtgtgacttgaataccgcgttaaaaactaggacaggcagcctgaaaagagctctccataacgccgaatgccagaagacagtcacgattagcaaaccatgcggtaaactgacaaagccaaaaccacaggctgaatcaaagaagaaaaagaaggagggcaagaagcaggaaaagatgttggattag

SEQ ID NO: 270410 - DNA, 507 bp, Artificial Sequence
  derived and/or modified sequence
atgcaggcccagcagtaccagcagcagagaagaaagttcgccgccgccttcctggccttcatcttcatcctggccgccgtggacaccgccgaggccggcaagaaggagaagcccgagaagaaggtgaagaagagcgactgcggcgagtggcagtggagcgtgtgcgtgcccaccagcggcgactgcggcctgggcaccagagagggcaccagaaccggcgccgagtgcaagcagaccatgaagacccagagatgcaagatcccctgcaactggaagaagcagttcggcgccgagtgcaagtaccagttccaggcctggggcgagtgcgacctgaacaccgccctgaagaccagaaccggcagcctgaagagagccctgcacaacgccgagtgccagaagaccgtgaccatcagcaagccctgcggcaagctgaccaagcccaagccccaggccgagagcaagaagaagaagaaggagggcaagaagcaggagaagatgctggactag

SEQ ID NO: 270411 - DNA, 1953 bp, Artificial Sequence
  derived and/or modified sequence
atggcgtgccgagaattcgaaatgggtcgaaaaaaatgcgagcgctattggcctctctacggagaagacccgatcacattcgcaccatttaagatcagctgtgaagacgagcaggcccgaacagattacttcatcagaactctcctgctggaatttcaaaatgaatcccgccgattataccagttccactacgtgaattggccagaccatgacgtcccatcatcattcgattctattttggacatgataagcctcatgcgcaaatatcaggagcatgaggatgtccccatctgtatccattgttccgctggctgcggaaggaccggggctatctgtgcaatagattacacatggaacttgttgaaggcaggtaagatcccagaagagttcaacgtcttcaatttgattcaagagatgcgaacacagaggcattccgcggtgcagactaaggagcagtatgagctggtccatagagctatagctcagctgtttgaaaaacagctacagttatacgagatccatggagcccagaagatagctgacggcgttaacgagatcaacacggagaacatggtgagctcgatcgagcctgaaaagcaggactccccaccccccaagcctccacgcacccgcagttgccttgtggaaggtgacgctaaggaggagatactccaaccacccgagccccatccggtccctcccattctgacaccatcaccgccttcagcctttccaacggtgaccaccgtgtggcaggataacgatcgctatcacccgaaacctgtgctccacatggtcagttctgagcaacattccgccgatctcaatcgcaattatagcaagtccactgagctgcccggaaagaacgagagcaccattgaacaaatcgataaaaagttggagagaaacctgtccttcgagataaagaaggtgccacttcaggagggacctaagtcgttcgacggaaacaccctccttaatagaggccacgcaattaaaataaaatccgcttctccttgtatagctgataaaatctccaaaccacaggagttgtcaagtgacctgaacgtgggcgatacctcgcagaattcgtgcgtcgactgctccgtcacacaatcaaacaaggttagcgtcacgcccccagaggaaagccaaaactcagacacaccccccagaccggacagactccctctggatgagaagggtcatgtgacgtggagcttccacgggccagaaaacgctatccccataccggacttatcagagggcaactcttctgatatcaattaccagacgaggaaaaccgtctctctgaccccttcgccgacaacccaggttgaaacccccgatctagtggaccacgataatacttcccccctgttcagaacccccctgagctttaccaaccctctgcacagcgatgacagtgactctgatgagaggaacagtgatggcgctgtcacccagaacaaaacaaatatctctacagccagcgccaccgtgagcgctgctacctctacagaaagtattagtacacgaaaggtcctccccatgtcaatcgcaagacataacatcgctgggaccacgcacagcggtgctgagaaggatgttgacgtttccgaagacagtcccccaccattaccagaaaggacacctgagtctttcgtgcttgcctcagagcacaacacccccgtgcggtccgagtggtccgagcttcaatcgcaagagcggtctgaacagaaaaaatccgagggcttaatcactagcgaaaatgaaaagtgtgaccaccctgctggggggattcactatgaaatgtgtatcgagtgtccacccacattctcagataagcgagagcaaatttccgagaatccaaccgaggcgactgacattggatttggcaatcgttgcggcaagccgaaggggccacgggaccctccctctgagtggacttag

SEQ ID NO: 270412 - DNA, 1953 bp, Artificial Sequence
  derived and/or modified sequence
atggcctgccgggagtttgagatgggcaggaagaagtgtgagcgctactggcccctgtatggagaggaccccatcacctttgcccccttcaagatcagctgtgaagatgagcaggccaggacagactacttcatccgcaccctgctgctggagttccagaatgaaagcagaagactctaccagttccactacgtgaactggccagaccatgatgtgcccagcagctttgacagcatcctggacatgatcagcctgatgaggaagtaccaggagcatgaagatgtgcccatctgcatccactgcagcgctggctgcggccgcactggagccatctgtgccatcgactacacctggaacctgctgaaggccggcaagatccctgaggagttcaacgtgttcaacctgatccaggagatgaggacccagaggcacagcgctgtgcagaccaaggagcagtatgagctggtgcaccgggccatcgcccagctgtttgagaagcagctgcagctgtatgagatccacggggcccagaagattgctgatggagtgaatgagatcaacacagagaacatggtgagcagcattgagcctgagaagcaggacagccccccacccaagccacccaggaccaggagctgcctggtggagggagatgccaaggaggagatcctgcagcccccagagccccaccctgtgccccccatcctgacccccagcccccccagcgccttccccaccgtgaccaccgtgtggcaggacaatgaccgctaccaccccaagcctgtgctgcacatggtgagcagcgagcagcacagcgctgacctgaacagaaactacagcaagagcacagagctgcccgggaagaatgaaagcaccatcgagcagattgacaagaagctggagaggaacctgagctttgagatcaagaaggtgcccctgcaggagggccccaagagctttgatggcaacaccctgctgaacagaggccacgccatcaagatcaagagcgccagcccctgcatcgctgacaagatcagcaagccccaggagctgagcagtgacctgaatgtgggggacaccagccagaacagctgtgtggactgcagcgtgacccagagcaacaaggtgtctgtgaccccacctgaggagagccagaacagcgacaccccacccaggccagaccggctgcccctggatgagaagggccacgtgacctggagcttccacggcccagaaaatgccatccccatcccagacctgtctgagggcaacagcagtgacatcaactaccagaccaggaagacagtgtccctgacccccagccccaccacccaggtggagaccccagacctggtggaccatgacaacaccagccccctcttccgcacccccctgtccttcaccaaccccctgcacagtgatgacagcgacagtgatgaaagaaacagtgatggagctgtgacccagaacaagaccaacatcagcacagccagcgccaccgtgtctgctgccaccagcacagagagcatcagcaccaggaaggtgctgcccatgagcatcgcccggcacaacattgctggcaccacccacagcggggctgagaaggatgtggatgtgtctgaggacagccccccacccctgcctgagaggaccccagagagctttgtgctggccagcgagcacaacacccctgtgcgctctgagtggagcgagctgcagagccaggagaggtctgagcagaagaagtctgagggcctcatcaccagtgaaaatgaaaaatgtgaccaccctgctgggggcatccactatgagatgtgcatcgagtgcccccccaccttcagtgacaagcgggagcagatcagcgagaaccccacagaggccacagacatcggcttcggcaacagatgtgggaagcccaagggcccccgggaccccccatctgagtggacctag

SEQ ID NO: 270413 - DNA, 1953 bp, Artificial Sequence
  derived and/or modified sequence
atggcctgccgggagttcgagatgggccggaagaagtgcgagcggtattggcctttatatggcgaagatcctattaccttcgccccttttaagatctcttgtgaggatgagcaggcccgcacagattattttataagaactctcttgttagaattccagaacgaaagtcgacgcctttaccagtttcactacgtaaattggccagaccacgacgtccccagctcttttgacagcatactagatatgatctcactgatgcgcaagtaccaggaacacgaagacgtgcccatttgtatacactgctcagctggctgtggaagaactggcgcgatatgcgccatcgattatacctggaacttgctaaaggccggaaaaattccagaagagttcaatgtgttcaacctgatccaggaaatgcgcacccagaggcattccgccgtacaaactaaggagcagtatgagctggtgcacagagctattgcccagcttttcgaaaagcaactccagctatacgaaatccatggggctcaaaaaattgctgatggagtcaacgaaattaatactgaaaatatggtgagctctattgaaccggagaagcaggactcccctcctcccaaaccccccagaacccgatcctgcctggtggaaggagatgccaaggaggaaatattgcaaccacctgagccccacccagtgcccccaatactcaccccgagccccccatcagcttttccgaccgtgacaactgtgtggcaggacaatgatagataccaccccaagcccgtcttacatatggtgagtagtgaacagcattccgcagacctaaacaggaattactcaaaaagtacagagcttccgggcaagaacgagtcaacaatcgaacagattgacaagaaactggagaggaatctgtccttcgagattaagaaggtcccactgcaggaaggacccaaatctttcgatggaaacactctgctgaatcgcggccacgcaattaaaatcaaatctgctagtccatgcattgccgataagattagtaagcctcaggaactctctagcgacctgaatgtgggggatacctcccaaaactcttgtgtggattgctccgtaacccagtctaataaggtgtctgtcacacccccagaggaatcacagaactcagatacccccccgcggcctgaccgtctcccattggatgagaagggccatgtcacctggtcttttcacggacctgagaatgccatacctatccctgatctgtctgaaggcaattcctccgatataaattatcagacaagaaaaaccgtatctctcacaccttctcccacaacacaggtggagacccccgacctcgtcgaccacgataatactagcccccttttccggacccctctgtcatttactaatcctctacacagcgatgatagtgatagtgacgagcgaaacagcgatggggctgtgacccagaataagaccaacattagcacagcgagcgcaacagtctctgcagctacctcgactgagtctatttccacccgaaaggtcctgccaatgtccattgcaagacataatatcgcaggcaccacccactcaggcgccgagaaggatgttgacgtctctgaagactcgccaccccccctgcctgagcggacccccgagtcattcgtgctggctagcgagcacaatacccccgtgagatccgagtggtcagaattacagagccaggaacgaagcgagcagaagaagagcgagggcctcatcacatctgagaatgaaaagtgtgaccaccctgccggtggtatccattacgagatgtgcattgagtgcccaccgacattttctgacaagagagagcagatcagcgagaatcccaccgaggcaaccgacatcggttttgggaacagatgcggcaagcctaagggacctagagacccccctagtgaatggacatag

SEQ ID NO: 270414 - DNA, 1953 bp, Artificial Sequence
  derived and/or modified sequence
atggcctgcagggagttcgagatgggcaggaagaaatgtgagcgttactggccactgtatggggaggaccccatcacattcgccccttttaaaatctcatgcgaagacgaacaggcccgtactgactatttcatcagaaccttgctgctggagtttcagaacgagtcccgccgattgtatcagtttcattatgtcaactggcccgatcacgacgtgccttcctcattcgactcgatactggacatgatttcgctaatgcgcaagtaccaggagcacgaagatgttccaatctgtatacactgtagtgcaggatgtggcaggaccggcgctatctgcgctattgactacacctggaatctgctgaaggccggaaagatcccggaagagttcaatgtgttcaacctaatccaggagatgcgaactcagcgccactcagcagtccagaccaaggagcaatatgaacttgtgcacagggcaattgcacagcttttcgagaagcaactgcagctgtacgaaatccacggagctcagaaaattgcagacggagttaacgagatcaataccgagaatatggtgtcaagtatcgagcctgaaaaacaagatagtccgccaccaaaacccccacgaacacggtcgtgccttgtggaaggcgacgcgaaggaagagattttacagcctcctgagccccaccctgtgccacctattctgacacctagcccgccttccgctttcccgacagtgaccacagtctggcaggacaacgacagatatcatcctaagccagtactgcatatggtctcttccgagcagcattctgccgatcttaacaggaactatagcaaatctaccgagcttcccggaaagaacgagtctacaattgaacaaatcgacaaaaaactcgaaagaaacttaagctttgagatcaagaaggtaccgctgcaagagggcccaaaatcttttgacggcaatactctattgaaccgtggccatgccatcaaaatcaaatctgcatcaccttgtatcgccgataaaatctctaagcctcaggagttgtcatccgacctgaatgtgggcgatacaagtcagaactcctgtgtggattgctctgtgacacagagcaataaggtgagcgttacaccgcctgaagagagtcaaaactctgacaccccacccaggcccgacagattgcctctggacgaaaaaggccacgtgacctggtcattccacggcccagaaaacgccattcccatacccgatctgagtgagggtaacagcagcgatattaactaccagactagaaagaccgtgtcactgacacctagcccgacaacacaagtggagaccccagaccttgtggatcacgacaatacatctcctctattccgtacgcccctgagcttcactaatcccctgcactctgacgacagcgatagcgacgaaagaaacagcgatggcgcagtgactcagaacaaaacaaacatttccaccgcctcagccaccgtttctgctgctacatctacagaatcaatcagcacccgtaaagtgttacctatgtcaattgctagacacaatattgccggaactacgcattctggagctgagaaggacgtggatgtctcggaggattctccacctcccctaccggaacgcacgccagagagcttcgtgcttgccagtgagcacaacacacccgtgaggagcgagtggagcgagctccaatctcaggagagatcagagcagaagaagtcggaaggactgatcacaagtgagaatgagaagtgtgatcatcctgccggaggtattcattacgaaatgtgcatcgagtgcccaccaaccttctctgacaagagggagcaaatcagcgaaaaccctacggaggccactgacattggttttggcaaccgatgcggcaagcccaaaggtcctcgcgaccccccatccgaatggacatag

SEQ ID NO: 270415 - DNA, 1953 bp, Artificial Sequence
  derived and/or modified sequence
atggcctgcagagagttcgagatgggcagaaagaagtgcgagagatactggcccctgtacggcgaggaccccatcaccttcgcccccttcaagatcagctgcgaggacgagcaggccagaaccgactacttcatcagaaccctgctgctggagttccagaacgagagcagaagactgtaccagttccactacgtgaactggcccgaccacgacgtgcccagcagcttcgacagcatcctggacatgatcagcctgatgagaaagtaccaggagcacgaggacgtgcccatctgcatccactgcagcgccggctgcggcagaaccggcgccatctgcgccatcgactacacctggaacctgctgaaggccggcaagatccccgaggagttcaacgtgttcaacctgatccaggagatgagaacccagagacacagcgccgtgcagaccaaggagcagtacgagctggtgcacagagccatcgcccagctgttcgagaagcagctgcagctgtacgagatccacggcgcccagaagatcgccgacggcgtgaacgagatcaacaccgagaacatggtgagcagcatcgagcccgagaagcaggacagccccccccccaagccccccagaaccagaagctgcctggtggagggcgacgccaaggaggagatcctgcagccccccgagccccaccccgtgccccccatcctgacccccagcccccccagcgccttccccaccgtgaccaccgtgtggcaggacaacgacagataccaccccaagcccgtgctgcacatggtgagcagcgagcagcacagcgccgacctgaacagaaactacagcaagagcaccgagctgcccggcaagaacgagagcaccatcgagcagatcgacaagaagctggagagaaacctgagcttcgagatcaagaaggtgcccctgcaggagggccccaagagcttcgacggcaacaccctgctgaacagaggccacgccatcaagatcaagagcgccagcccctgcatcgccgacaagatcagcaagccccaggagctgagcagcgacctgaacgtgggcgacaccagccagaacagctgcgtggactgcagcgtgacccagagcaacaaggtgagcgtgaccccccccgaggagagccagaacagcgacaccccccccagacccgacagactgcccctggacgagaagggccacgtgacctggagcttccacggccccgagaacgccatccccatccccgacctgagcgagggcaacagcagcgacatcaactaccagaccagaaagaccgtgagcctgacccccagccccaccacccaggtggagacccccgacctggtggaccacgacaacaccagccccctgttcagaacccccctgagcttcaccaaccccctgcacagcgacgacagcgacagcgacgagagaaacagcgacggcgccgtgacccagaacaagaccaacatcagcaccgccagcgccaccgtgagcgccgccaccagcaccgagagcatcagcaccagaaaggtgctgcccatgagcatcgccagacacaacatcgccggcaccacccacagcggcgccgagaaggacgtggacgtgagcgaggacagccccccccccctgcccgagagaacccccgagagcttcgtgctggccagcgagcacaacacccccgtgagaagcgagtggagcgagctgcagagccaggagagaagcgagcagaagaagagcgagggcctgatcaccagcgagaacgagaagtgcgaccaccccgccggcggcatccactacgagatgtgcatcgagtgcccccccaccttcagcgacaagagagagcagatcagcgagaaccccaccgaggccaccgacatcggcttcggcaacagatgcggcaagcccaagggccccagagacccccccagcgagtggacctag

SEQ ID NO: 270416 - protein, 1035 aa, Artificial Sequence
  derived and/or modified sequence
MAAETLNFGPEWLRALSGGGSVASPPPSPAMPKYKLADYRYGREEMLALYVKENKVPEELQDKEFAAVLQDEPLQPLALEPLTEEEQRNFSLSVNSVAVLRLMGKGAGPPLAGTSRGRGSTRSRGRGRGDSCFYQRSIEEGDGAFGRSPREIQRSQSWDDRGERRFEKSARRDGARCGFEEGGAGPRKEHARSDSENWRSLREEQEEEEEGSWRLGAGPRRDGDRWRSASPDGGPRSAGWREHGERRRKFEFDLRGDRGGCGEEEGRGGGGSSHLRRCRAPEGFEEDKDGLPEWCLDDEDEEMGTFDASGAFLPLKKGPKEPIPEEQELDFQGLEEEEEPSEGLEEEGPEAGGKELTPLPPQEEKSSSPSPLPTLGPLWGTNGDGDETAEKEPPAAEDDIRGIQLSPGVGSSAGPPGDLEDDEGLKHLQQEAEKLVASLQDSSLEEEQFTAAMQTQGLRHSAAATALPLSHGAARKWFYKDPQGEIQGPFTTQEMAEWFQAGYFSMSLLVKRGCDEGFQPLGEVIKMWGRVPFAPGPSPPPLLGNMDQERLKKQQELAAAALYQQLQHQQFLQLVSSRQLPQCALREKAALGDLTPPPPPPPQQQQQQLTAFLQQLQALKPPRGGDQNLLPTMSRSLSVPDSGRLWDVHTSASSQSGGEASLWDIPINSSTQGPILEQLQLQHKFQERREVELRAKREEEERKRREEKRRQQQQEEQKRRQEEEELFRRKHVRQQELLLKLLQQQQAVPVPPAPSSPPPLWAGLAKQGLSMKTLLELQLEGERQLHKQPPPREPARAQAPNHRVQLGGLGTAPLNQWVSEAGPLWGGPDKSGGGSSGLGLWEDTPKSGGSLVRGLGLKNSRSSPSLSDSYSHLSGRPIRKKTEEEEKLLKLLQGIPRPQDGFTQWCEQMLHTLSATGSLDVPMAVAILKEVESPYDVHDYIRSCLGDTLEAKEFAKQFLERRAKQKASQQRQQQQEAWLSSASLQTAFQANHSTKLGPGEGSKAKRRALMLHSDPSILGYSLHGSSGEIESVDDY

SEQ ID NO: 270417 - protein, 754 aa, Artificial Sequence
  derived and/or modified sequence
SSFPSPRLPQVFHRLDDEDEEMGTFDASGAFLPLKKGPKEPIPEEQELDFQGLEEEEEPSEGLEEEGPEAGGKELTPLPPQEEKSSSPSPLPTLGPLWGTNGDGDETAEKEPPAAEDDIRGIQLSPGVGSSAGPPGDLEDDEGLKHLQQEAEKLVASLQDSSLEEEQFTAAMQTQGLRHSAAATALPLSHGAARKWFYKDPQGEIQGPFTTQEMAEWFQAGYFSMSLLVKRGCDEGFQPLGEVIKMWGRVPFAPGPSPPPLLGNMDQERLKKQQELAAAALYQQLQHQQFLQLVSSRQLPQCALREKAALGDLTPPPPPPPQQQQQQLTAFLQQLQALKPPRGGDQNLLPTMSRSLSVPDSGRLWDVHTSASSQSGGEASLWDIPINSSTQGPILEQLQLQHKFQERREVELRAKREEEERKRREEKRRQQQQEEQKRRQEEEELFRRKHVRQQELLLKLLQQQQAVPVPPAPSSPPPLWAGLAKQGLSMKTLLELQLEGERQLHKQPPPREPARAQAPNHRVQLGGLGTAPLNQWVSEAGPLWGGPDKSGGGSSGLGLWEDTPKSGGSLVRGLGLKNSRSSPSLSDSYSHLSGRPIRKKTEEEEKLLKLLQGIPRPQDGFTQWCEQMLHTLSATGSLDVPMAVAILKEVESPYDVHDYIRSCLGDTLEAKEFAKQFLERRAKQKASQQRQQQQEAWLSSASLQTAFQANHSTKLGPGEGSKAKRRALMLHSDPSILGYSLHGSSGEIESVDDY

SEQ ID NO: 270418 - DNA, 3108 bp, Artificial Sequence
  derived and/or modified sequence
atggccgcagaaactctaaacttcggacctgagtggctgcgagcgttaagtggaggcggctcagtcgcgtcaccaccgccatcgcctgccatgccgaagtacaagctggcggattaccgatacggcagggaagagatgttggctctgtacgtgaaagagaacaaagtccccgaggaactgcaggataaggagttcgctgccgtgcttcaagacgagcctctccagcctttagctctggaacctcttacagaggaggagcaacgcaattttagtctgagcgtgaatagtgtggccgtcctgagactgatgggcaaaggggcaggcccacccctcgcaggaacctccaggggcaggggcagcacacggtctagaggccggggcagaggggatagctgtttctatcagaggagtatcgaagagggcgacggcgccttcggccgcagtcctagggagatccagcggagccaatcgtgggatgacagaggtgagaggcgctttgaaaagagcgcgcgtagggacggagcccggtgcggattcgaggagggcggagcaggcccaagaaaggagcacgctaggagcgacagtgagaattggcgttcacttcgggaggaacaagaagaggaggaggagggaagttggcgtctgggggcaggcccccgccgagacggagatcgatggaggagtgcgtcccctgacgggggtccgagatccgctgggtggagagaacacggcgagaggcggcggaaattcgagttcgacttgcggggtgacagggggggatgtggagaggaggagggccgcggtggaggtggcagctcccatctcagacgctgccgggcacctgaggggtttgaggaagataaagatggccttcccgagtggtgcctggatgacgaggatgaagagatgggtacattcgacgctagtggtgctttcctcccactgaagaaaggtcccaaagagccaatacccgaagagcaagaacttgattttcaggggctggaggaagaagaggagccaagcgaaggactcgaagaagagggacccgaagctggggggaaagaactcacacccctgccaccccaagaggagaagtccagctcgcccagcccattgcccactctcggccctctgtggggaacgaatggagatggcgacgagaccgcagaaaaagagccaccagctgcggaggatgatatccgaggtattcagctgtctccgggagtaggatccagcgccgggccccctggagatctggaggatgacgagggactaaagcacctgcagcaggaggctgagaagctggtggcctccctgcaagacagctcactggaggaggagcagtttaccgcagcaatgcaaacccagggtctgcgtcatagcgcggccgccacagcgctgccgctgtcacacggggctgcaagaaagtggttctataaggacccccaaggggaaattcaggggccatttaccacacaggagatggccgaatggtttcaggcagggtacttcagtatgtccttactggttaagagggggtgtgacgagggcttccagcccctcggggaagtgatcaaaatgtggggcagagtgcccttcgcacccggcccaagcccgcctcctttacttgggaacatggaccaagagagactcaagaagcagcaagagctggctgctgcagctctgtatcagcagctgcagcaccagcaattcctgcagctggttagtagtcgccaacttcctcaatgtgctttgagggagaaggctgccctgggcgacctgacaccccctccccctcccccccctcagcagcagcagcaacagcttaccgcctttctgcaacagctgcaagccctgaagcccccacggggtggagatcagaaccttcttcctacaatgagcaggtcattgtctgtgcctgactctggccggctgtgggacgtccacacttctgcctctagccagtccggcggggaggctagtctgtgggacatcccgattaatagctcaacacaggggccaatcctggaacagctgcagctgcaacacaagttccaggaacggcgcgaagtcgagctgagggccaagcgcgaagaggaggagaggaagaggagagaggagaagcgccggcagcaacagcaagaagagcagaagcgaaggcaagaagaggaggaactctttcgacggaaacacgtgcggcagcaggagctgctactgaaactccttcagcagcaacaggccgttccagttcccccagcaccctcctctcctcccccgctgtgggcaggcctcgccaagcaaggcttgagcatgaagactttgctggaattacagttggaaggagagcggcagctgcacaagcaaccaccaccaagagagccagccagggcccaagctcccaaccatagagtccagcttggcgggctcggcaccgcccccctcaatcagtgggtaagcgaagctggccctctgtggggaggaccagataaaagcggtggcggctcttccggactgggcctgtgggaagatacgccaaagtccggcggctcattggtcaggggcttaggcctgaaaaatagccggtccagcccgtcactgagcgattcgtattctcaccttagcggcagaccgatacgtaagaaaaccgaggaggaggagaagctacttaaacttcttcaaggaattcctcggccccaagatggatttacacaatggtgcgagcagatgctgcatactctgtccgcgactggctccctggatgttcccatggcggtcgcaatcctgaaggaggttgaatctccttatgacgtacatgactatatccgaagctgtctgggcgataccctggaggccaaagagtttgccaaacagttccttgagagacgggccaagcagaaggcttcacaacaacggcaacaacagcaagaggcttggctatcatccgccagcctgcaaaccgcttttcaggccaatcacagcactaagctgggccctggcgaaggcagtaaagccaagaggagagcactcatgttacatagcgaccctagtatactcggatattcactccacggaagcagtggcgaaattgagtctgtggatgactattag

SEQ ID NO: 270419 - DNA, 2265 bp, Artificial Sequence
  derived and/or modified sequence
agttcctttccttcaccgagactcccacaggttttccatcgacttgacgatgaagatgaagagatgggaacattcgatgcatctggggcttttctccctcttaagaaaggacctaaggagccaattcccgaggagcaagagctcgattttcagggtctggaggaagaggaagaaccgtcagagggactggaggaagaagggcctgaagccgggggaaaggaactcacgccgctccctccccaggaagagaaaagctctagccccagcccgctgccaactctggggcctctttggggaaccaatggggatggggacgaaactgctgaaaaagaacccccagctgcagaggatgatattcgcggcatccagctgagcccgggcgtgggctccagcgcaggcccaccaggagaccttgaggatgacgaaggcctcaagcacctgcagcaggaggccgagaagctcgtcgcctctctgcaggatagcagtcttgaggaagaacagttcactgctgccatgcaaactcagggcctgcggcactcggccgcagctactgcactgccgttgagccatggggctgcgcggaaatggttctacaaagatcctcagggggaaatacaggggccttttacaacacaagaaatggccgagtggtttcaggcaggctactttagcatgagtctactggttaaaaggggttgcgatgaaggctttcaacccctgggcgaggtgattaaaatgtgggggagagtcccatttgcaccaggaccatccccacccccattgctcggaaacatggaccaggaacgacttaagaagcagcaggagctcgccgccgccgcgctctaccaacagctccagcaccagcaattcctccagctggtgagttcccgacaactacctcagtgcgcccttcgcgagaaagcagccttgggagatctgacacctcctccgccaccacccccacagcaacagcagcaacaactcacagcgtttctgcagcagctccaggcccttaagccaccacgggggggggaccagaatttgctgcctacgatgagtaggagcctgagcgtgcctgatagtggaagactgtgggacgtgcacacatcagccagcagccaaagcggtggtgaggcgtccttgtgggatattcccatcaactcttccacccaaggcccaatcctggaacagctgcaactgcagcacaaatttcaggagcgacgggaggtggagctgagggcaaaaagggaggaagaagagaggaagcggagggaagaaaagcgccgccagcaacagcaggaagagcaaaagagaagacaggaagaagaagagctttttcgccggaaacacgtgaggcagcaggagctcctgctgaaattactgcaacagcagcaggcagtgcccgtgccccccgcgcccagctcacctccacctctgtgggcagggctggctaaacaaggcctgagtatgaaaactctcctcgagctgcaattggaaggtgaaagacaacttcacaaacagcccccacctcgagaaccagccagagctcaggccccaaaccatagagtccagctggggggcttaggcactgctcctctcaaccaatgggtttcagaggctggccccctctggggtggtcccgataaaagcggcggaggaagctcaggattgggactgtgggaggatacaccgaagagcggaggcagcctcgtgagagggctagggctcaagaacagcaggtctagtccctctctgtccgattcttacagtcatctgagcggaagacccatacgcaaaaagaccgaggaggaagaaaaacttctcaaactgttacaggggatacctcgtcctcaagacggtttcacccaatggtgcgaacagatgctacacacactgtccgctaccggtagcctggatgtacctatggcagtagcaatcttaaaggaagtggagtcaccgtacgacgtgcacgattatatcaggtcttgcctgggcgacacattagaagccaaagagtttgcaaaacagtttctggagaggagggctaaacagaaagcatcccagcagcggcaacagcagcaggaggcctggttatctagcgcctcccttcagactgcctttcaagcgaatcattcgaccaagctcggaccgggggagggctctaaagccaagaggagggcgttaatgctccacagcgacccctctattctcgggtacagtctgcacgggtccagcggtgaaattgaatccgtggatgactactag

SEQ ID NO: 270420 - DNA, 5488 bp, Artificial Sequence
  derived and/or modified sequence
cctctgcctggggccccagggatgcgcctcctcctgaaagtcccctccatcctcccttagaggaacaggctgccgccgcgcccccatcagcctccattgccctgaccttatttccacctgatggtgccagaggctgcttcccagctggtatcctgagatcctcgttcccttggtggcttggttgtttaagcctccattattgattgggggcggtggtctgggtgtgattcctgtgggggaaaccagcccgaggtgccttggctcaggcttgcctgcctggagtccttgtcgtgtacccgtctgtggccctagagtcacctcctgctccttttcactgggtttctccccagaccaagcccctggatttgagcttctgagcagccaactgatttttttcatgagggaaagaattttgctcctagatttatttctaatccttttctccgtaactgaccttttctctgtaagctatttgtggctctagtgggtttttgtttgcttgcttgtttttgttttatctttgccctgaacgtccatcctggcctcggctgcctccctccccgagttcttcactacacctcctgtctcagcctcccagagagggtggcgagggtgctgatgcccagagacaccatccggcgaatggacctctcctgtcatgcggggcagggcagggctgccggcagagccatgtcctgaaccctccctcctcccccctgctctccttaagggtctttcccagatgtgaaggtccctcccaggctctactgaggtcagaccaattcccagtggcttgggtaccctcgttcactccagcaccagcccctgccctccttcttcccgggccaggctgccaggtgagccccgggccaagggtggttgccctgctgaggccgaaaggactcgagcttcccatctcctcgcctcccccaggtctttcaccgtctggactcatctctgggtaactcatggtgtgagtggccacgtggctggctcaggtgagtccttttagaccccaggtgacccaccagctagtccggggcccattgttgtgcccactaggatgtcccccatggtgtcctccctgcgctttaaagttctccttcgtgtgctgttcttcatggcccctgttcccccacaggtgtttggacagtgaacgccaggtcccctcctccccacccccggcctctcaaacacgcccagccccacgatggcagcagagacactcaactttgggcctgagtggctcagggccctgtccgggggcggcagcgtggcctccccacccccgtcccctgccatgcccaaatacaagctggctgactaccgttatgggcgagaggaaatgctggctctctacgtcaaggagaacaaggtcccggaagagctgcaggacaaggagttcgccgcggtgctgcaggacgagccactgcagcccctggctctggagccgctgactgaggaggaacagagaaacttctccctgtcagtgaacagcgtggctgtgctgaggctgatggggaaaggggctggcccccccctggctggcacctcccgaggcaggggcagcacgcggagccgaggccgcggccgtggtgacagctgcttttaccaaagaagcatcgaagaaggcgatggggcctttggacgaagcccccgggaaatccagcgcagccagagctgggatgacagaggcgagaggcggtttgagaagtcagcaaggcgggatggagcacgatgtggctttgaggagggaggggctggcccaaggaaggagcacgcccgctcagacagcgagaactggcgctccctacgggaggaacaggaggaggaggaggagggcagctggaggctcggagcagggccccggcgagacggcgaccgctggcgctccgccagccctgatggtggtccccgctctgctggctggcgggaacatggggaacggcggcgcaagtttgaatttgatttgcgaggggatcgaggagggtgtggtgaagaggaggggcggggagggggaggcagctctcacctgcggcggtgccgagcgcctgaaggctttgaggaggacaaggatgggctcccagagtggtgcctggacgatgaggatgaagaaatgggcacctttgatgcctctggggccttcttgcctctcaagaagggccccaaggagcccattcctgaggagcaggagctggacttccaagggttggaggaggaggaggaaccttccgaagggctagaggaggaagggcctgaggcaggtgggaaagagctgaccccactgcctcctcaggaggagaagtccagctccccatccccactgcccaccctgggcccactctgggggacaaacggggatggggacgaaactgcagagaaagagcccccagcggccgaagatgatattcgggggatccagctgagtcccggggtgggctcctctgctggcccacccggagatctggaggatgatgaaggcttgaagcacctgcagcaggaggcggagaagctggtggcctccctgcaggacagctccttggaggaggagcagttcacggctgccatgcagacccagggcctgcgccactctgcagccgccactgccctcccgctcagccatggggctgcccggaagtggttctacaaggacccacagggcgagatccaaggccccttcacgacacaggagatggcagagtggttccaggccggctacttttccatgtcactgctggtgaagcggggctgcgatgagggcttccagccgctgggcgaggtgatcaagatgtggggccgcgtgccctttgccccagggccctcacctcccccactgctgggaaacatggaccaggagcggctgaagaagcaacaggagctggccgcggcggccttgtaccagcagctgcagcaccagcagtttctccagctggtcagcagccgccagctcccacagtgcgcgctccgagaaaaggcagctctgggggacctgacaccgccaccaccgccgccgccacagcagcagcagcagcagctcacggcattcctgcagcagctccaggcgctcaaaccccccagaggcggggaccagaacctgctcccgacgatgagccggtccttgtcggtgccagattcgggccgcctctgggacgtacatacctcagcctcatcacagtcaggtggtgaggccagtctttgggacataccaattaactcttcgactcagggtccaattctagaacaactccagctgcaacataaattccaggagcgcagagaagtggagctcagggcgaagcgggaggaagaggaacgcaagcgtcgagaggagaagcgccgccagcagcagcaggaggagcagaagcggcggcaggaggaggaagagctgtttcggcgcaagcacgtgcggcagcaggagctattgctgaagttgctacagcagcagcaggcggtccctgtgccccccgcacccagctccccgcccccactctgggctggcctggccaagcaggggctgtccatgaagacgctcctggagttgcagctggagggcgagcggcagctgcacaaacagcccccacctcgggagccagctcgggcccaggcccccaaccaccgagtgcagcttgggggcctgggcactgcccccctgaaccagtgggtgtctgaggctgggccactgtggggcgggccagacaagagtgggggcggcagcagcggcctggggctctgggaggacacccccaagagcggcgggagcctggtccgtggcctcggcctgaagaacagccggagcagcccatctctcagtgactcatacagccacctatcgggtcggcccattcgcaaaaagacggaggaagaagagaagctgctgaagctgctgcagggcattcccaggccccaggacggcttcacccagtggtgcgagcagatgctgcacacgctgagcgccacgggcagcctggacgtgcccatggctgtagcgatcctcaaggaggtggaatccccctatgatgtccacgattatatccgttcctgcctgggggacacgctggaagccaaagaatttgccaaacaattcctggagcggagggccaagcagaaagccagccagcagcggcagcagcagcaggaggcatggctgagcagcgcctcgctgcagacggccttccaggccaaccacagcaccaaactcggccccggggagggcagcaaggccaagaggcgggcactgatgctgcactcagaccccagcatcctggggtactccctgcacggatcttctggtgagatcgagagcgtggatgactactgaccagcccggacccccagcccctgggctgtaggccagggcagccacagcggcgtggaccgagggtcccagcctgcaggctccccgcagagagcacaggaagaggcaggggcggggtccccagcacttgttacaaacacacgatgcaccttaactcacccaccacgaggcactttacagactgggggagggggtttttctttttatttttttttttaattttaaacgactgaagaaaacattaggagaggcaaaaatattgttaaaaactagactctaaacaccccttcctgctgtgaggatagtgggtgtgacaatggaaggtccacagaggtttttgttttttggttttttttttttttttaagaaaaaaagatgaaaaatgaaaaaaaaaatggttaggaggctgaaagaaaaaacacactgttattttggggcagtggggacacaggccccgtggacctgtcctgcctggcccccaaggccatacttaccccccagaaggcgggccatggggtaactggaagctgggggccagcagtttgcacaggaggcctgtctgagccccacccgccagacctgttgtgagcagctcctgtcactgaggctggctgaggtgtccggggtggggccaaagtagccccttggcttcgctgctttgggggacagttgcacaaattggacgagtggccccagctctctggctgccatcttgtgctggccgagtagacgggaggggccaagccgtgccaacctctctggctggcagggtggggcagcaggactctggttctggtgaggggcgtctcccactgctgccattttgggggacaccctgggtttgaacctgaaagccccagctctctgccttgccacgtgaatgtattctttgggccacaagcccccgcctcacccctgcctgagctgcctcacccctgtgagcggcgggggtggatgattgctccagaggctgcagagagaaggctgagctgtttctccagtgaagggggcaggaggaggggcctcaaaggcaaggagtgggtggctttgggcttagggttgcagtagaggggctgccgcccggggccccaacctgtagccagctcgtaagatgtggaccacccagctctgcacctgacccttccgctgaccaaatgggagaggagcaggtgg

SEQ ID NO: 270421 - DNA, 4477 bp, Artificial Sequence
  derived and/or modified sequence
tcgagcttcccatctcctcgcctcccccaggtctttcaccgtctggacgatgaggatgaagaaatgggcacctttgatgcctctggggccttcttgcctctcaagaagggccccaaggagcccattcctgaggagcaggagctggacttccaagggttggaggaggaggaggaaccttccgaagggctagaggaggaagggcctgaggcaggtgggaaagagctgaccccactgcctcctcaggaggagaagtccagctccccatccccactgcccaccctgggcccactctgggggacaaacggggatggggacgaaactgcagagaaagagcccccagcggccgaagatgatattcgggggatccagctgagtcccggggtgggctcctctgctggcccacccggagatctggaggatgatgaaggcttgaagcacctgcagcaggaggcggagaagctggtggcctccctgcaggacagctccttggaggaggagcagttcacggctgccatgcagacccagggcctgcgccactctgcagccgccactgccctcccgctcagccatggggctgcccggaagtggttctacaaggacccacagggcgagatccaaggccccttcacgacacaggagatggcagagtggttccaggccggctacttttccatgtcactgctggtgaagcggggctgcgatgagggcttccagccgctgggcgaggtgatcaagatgtggggccgcgtgccctttgccccagggccctcacctcccccactgctgggaaacatggaccaggagcggctgaagaagcaacaggagctggccgcggcggccttgtaccagcagctgcagcaccagcagtttctccagctggtcagcagccgccagctcccacagtgcgcgctccgagaaaaggcagctctgggggacctgacaccgccaccaccgccgccgccacagcagcagcagcagcagctcacggcattcctgcagcagctccaggcgctcaaaccccccagaggcggggaccagaacctgctcccgacgatgagccggtccttgtcggtgccagattcgggccgcctctgggacgtacatacctcagcctcatcacagtcaggtggtgaggccagtctttgggacataccaattaactcttcgactcagggtccaattctagaacaactccagctgcaacataaattccaggagcgcagagaagtggagctcagggcgaagcgggaggaagaggaacgcaagcgtcgagaggagaagcgccgccagcagcagcaggaggagcagaagcggcggcaggaggaggaagagctgtttcggcgcaagcacgtgcggcagcaggagctattgctgaagttgctacagcagcagcaggcggtccctgtgccccccgcacccagctccccgcccccactctgggctggcctggccaagcaggggctgtccatgaagacgctcctggagttgcagctggagggcgagcggcagctgcacaaacagcccccacctcgggagccagctcgggcccaggcccccaaccaccgagtgcagcttgggggcctgggcactgcccccctgaaccagtgggtgtctgaggctgggccactgtggggcgggccagacaagagtgggggcggcagcagcggcctggggctctgggaggacacccccaagagcggcgggagcctggtccgtggcctcggcctgaagaacagccggagcagcccatctctcagtgactcatacagccacctatcgggtcggcccattcgcaaaaagacggaggaagaagagaagctgctgaagctgctgcagggcattcccaggccccaggacggcttcacccagtggtgcgagcagatgctgcacacgctgagcgccacgggcagcctggacgtgcccatggctgtagcgatcctcaaggaggtggaatccccctatgatgtccacgattatatccgttcctgcctgggggacacgctggaagccaaagaatttgccaaacaattcctggagcggagggccaagcagaaagccagccagcagcggcagcagcagcaggaggcatggctgagcagcgcctcgctgcagacggccttccaggccaaccacagcaccaaactcggccccggggagggcagcaaggccaagaggcgggcactgatgctgcactcagaccccagcatcctggggtactccctgcacggatcttctggtgagatcgagagcgtggatgactactgaccagcccggacccccagcccctgggctgtaggccagggcagccacagcggcgtggaccgagggtcccagcctgcaggctccccgcagagagcacaggaagaggcaggggcggggtccccagcacttgttacaaacacacgatgcaccttaactcacccaccacgaggcactttacagactgggggagggggtttttctttttatttttttttttaattttaaacgactgaagaaaacattaggagaggcaaaaatattgttaaaaactagactctaaacaccccttcctgctgtgaggatagtgggtgtgacaatggaaggtccacagaggtttttgttttttggttttttttttttttttaagaaaaaaagatgaaaaatgaaaaaaaaaatggttaggaggctgaaagaaaaaacacactgttattttggggcagtggggacacaggccccgtggacctgtcctgcctggcccccaaggccatacttaccccccagaaggcgggccatggggtaactggaagctgggggccagcagtttgcacaggaggcctgtctgagccccacccgccagacctgttgtgagcagctcctgtcactgaggctggctgaggtgtccggggtggggccaaagtagccccttggcttcgctgctttgggggacagttgcacaaattggacgagtggccccagctctctggctgccatcttgtgctggccgagtagacgggaggggccaagccgtgccaacctctctggctggcagggtggggcagcaggactctggttctggtgaggggcgtctcccactgctgccattttgggggacaccctgggtttgaacctgaaagccccagctctctgccttgccacgtgaatgtattctttgggccacaagcccccgcctcacccctgcctgagctgcctcacccctgtgagcggcgggggtggatgattgctccagaggctgcagagagaaggctgagctgtttctccagtgaagggggcaggaggaggggcctcaaaggcaaggagtgggtggctttgggcttagggttgcagtagaggggctgccgcccggggccccaacctgtagccagctcgtaagatgtggaccacccagctctgcacctgacccttccgctgaccaaatgggagaggagcaggtggccttccgggtctgatatgatgcgctttttaccgttgggtaaggttggggtgaagagaagtgtgcggctcctgggtcagaggaggctgccccttctattgctcacccacttcttattcccggtcccctacttgggttcgtctccgcccattttgggttttgtaacagttttgtcttttgggtttctcatccagctcctcccattgacctcattgctcagagtgcagtattagggcaaggcttcgccactgcctccctccatgaatgtatttctccctcctgccctggggacatggggagtggcccgtttctttccccatctagtcccagaaagatggtgtttggttttctgttgttggatttttttttttttttttttttttttgcaccaaagtggcaactaggtcagtgttgggggatcaagctggcctcggggtggggggcccccacctgcctctccctggttcccacagtgttagcgtccctgaaaagacaatattctctctaaagcaataaggggtgacgggccggggggagtgtttgctgctgctggcccccagctccccttccctcttgccaggtgtgggggagactcctgttgtgactgaatgtaacccccccacccctgccgcagccaatgcaggggaagggggacactcttcctgtctcttctccccagctaaagagactttggacttagggggcccatgagcctggagaggccttaaccctgtgaggaagtatagggggagccctctcccacccccatccccttctgagagtggtcaatgtttacaagcccctgagcccccctgcccagggactcagaccctgttgctgtccttccccggccccggtcttcctgggccctcgctgctcccctgcccttcctggggttggggtgggtgcaggggtcaccgtgttccctgtctgccttgtacccacagtctccccgccccctctccaccctgtgtgacttccctctcttttacctgctcctgtaaatactcccttctcccaataaaacttggtgtgtgttctccc

SEQ ID NO: 270422 - DNA, 3108 bp, Artificial Sequence
  derived and/or modified sequence
atggctgctgagaccctgaactttggacctgagtggctgcgggccctgagcggcggcggctctgtggccagccccccacccagccctgccatgcccaagtacaagctggccgactaccgctatggccgggaggagatgctggccctgtatgtgaaggagaacaaggtgcctgaggagctgcaggacaaggagtttgctgctgtgctgcaggatgagcccctgcagcccctggccctggagcccctgacagaggaggagcagaggaacttcagcctgtctgtgaacagcgtggccgtgctgcggctgatgggcaaaggagctggcccccccctggccggcaccagccggggccggggcagcaccaggagccggggccggggccgcggggacagctgcttctaccagaggagcattgaggagggagatggagccttcggccgcagcccccgggagatccagaggagccagagctgggatgacagaggagagaggagatttgagaagagcgccaggagagatggagcccgctgtggctttgaggagggcggggccggccccaggaaggagcacgcccggagtgacagcgagaactggaggagcctgcgggaggagcaggaggaggaggaggagggctcctggaggctgggcgccggccccaggagagatggagaccgctggaggtctgccagcccagatggcggccccaggtctgctggctggagggagcacggggagaggaggaggaagtttgaatttgacctgcggggggacagaggaggctgtggggaggaggagggccggggcggcggcggcagcagccacctgcggcgctgccgggcccctgagggctttgaggaggacaaggatggcctgcctgagtggtgcctggatgatgaagatgaggagatgggcacctttgatgccagcggggccttcctgcccctgaagaagggccccaaggagcccatccctgaggagcaggagctggacttccagggcctggaggaggaggaggagcccagcgagggcctggaggaggagggccctgaggccggcggcaaggagctgacccccctgcccccccaggaggagaagagcagcagccccagccccctgcccaccctgggccccctgtggggcaccaatggagatggagatgaaacagctgagaaggagcccccagctgctgaagatgacatccggggcatccagctgagccctggggtgggcagcagcgctggccccccaggggacctggaggatgatgagggcctgaagcacctgcagcaggaggccgagaagctggtggccagcctgcaggacagcagcctggaggaggagcagttcaccgctgccatgcagacccagggcctgcggcacagcgctgctgccacagccctgcccctgagccatggagctgccaggaagtggttctacaaggacccccagggcgagatccagggccccttcaccacccaggagatggccgagtggttccaggccggctacttctccatgagcctgctggtgaagaggggctgtgatgagggcttccagcccctgggggaggtgatcaagatgtggggccgggtgccctttgcccctggccccagccccccacccctgctgggcaacatggaccaggagcggctgaagaagcagcaggagctggccgccgccgccctgtaccagcagctgcagcaccagcagttcctgcagctggtgagcagccggcagctgccccagtgtgccctgcgggagaaggccgccctgggggacctgaccccacctcctcctcctccaccccagcagcagcagcagcagctgacagccttcctgcagcagctgcaggccctgaagccaccccggggcggggaccagaacctgctgcccaccatgagccgcagcctgtctgtgcctgacagcggccgcctgtgggatgtgcacaccagcgccagcagccagagcggcggggaggccagcctgtgggacatccccatcaacagcagcacccagggccccatcctggagcagctgcagctgcagcacaagttccaggagcggcgggaggtggagctgcgggccaagcgggaggaggaggagaggaagaggcgggaggagaagaggcggcagcagcagcaggaggagcagaagaggcggcaggaggaggaggagctgttccggaggaagcacgtgcggcagcaggagctgctgctgaagctgctgcagcagcagcaggccgtgcctgtgcccccagcccccagcagccccccacccctgtgggccggcctggccaagcagggcctgtccatgaagaccctgctggagctgcagctggagggggagcggcagctgcacaagcagcccccaccccgggagcccgcccgggcccaggcccccaaccaccgggtgcagctgggcggcctgggcacagcccccctgaaccagtgggtgtctgaggccggccccctgtggggcggccctgacaagagcggcggcggcagcagcggcctgggcctgtgggaggacacccccaagagcggcggcagcctggtgcggggcctgggcctgaagaacagccgcagcagccccagcctgagtgacagctacagccacctgagcggccggcccatcaggaagaagacagaggaggaggagaagctgctgaagctgctgcagggcatcccccggccccaggacggcttcacccagtggtgtgagcagatgctgcacaccctgagcgccaccggcagcctggatgtgcccatggctgtggccatcctgaaggaggtggagagcccctatgatgtgcatgactacatccgcagctgcctgggggacaccctggaggccaaggagtttgccaagcagttcctggagcggcgggccaagcagaaggccagccagcagaggcagcagcagcaggaggcctggctgagcagcgccagcctgcagacagccttccaggccaaccacagcaccaagctgggccctggagagggcagcaaggccaagaggcgggccctgatgctgcacagcgaccccagcatcctgggctacagcctgcacggcagcagcggggagattgaatctgtggatgactactag

SEQ ID NO: 270423 - DNA, 2265 bp, Artificial Sequence
  derived and/or modified sequence
agcagcttccccagcccccggctgccccaggtgttccaccggctggatgatgaagatgaggagatgggcacctttgatgccagcggggccttcctgcccctgaagaagggccccaaggagcccatccctgaggagcaggagctggacttccagggcctggaggaggaggaggagcccagcgagggcctggaggaggagggccctgaggccggcggcaaggagctgacccccctgcccccccaggaggagaagagcagcagccccagccccctgcccaccctgggccccctgtggggcaccaatggagatggagatgaaacagctgagaaggagcccccagctgctgaagatgacatccggggcatccagctgagccctggggtgggcagcagcgctggccccccaggggacctggaggatgatgagggcctgaagcacctgcagcaggaggccgagaagctggtggccagcctgcaggacagcagcctggaggaggagcagttcaccgctgccatgcagacccagggcctgcggcacagcgctgctgccacagccctgcccctgagccacggggccgccaggaagtggttctacaaggacccccagggcgagatccagggccccttcaccacccaggagatggccgagtggttccaggccggctacttctccatgagcctgctggtgaagaggggctgtgatgagggcttccagcccctgggggaggtgatcaagatgtggggccgggtgccctttgcccctggccccagccccccacccctgctgggcaacatggaccaggagcggctgaagaagcagcaggagctggccgctgctgccctgtaccagcagctgcagcaccagcagttcctgcagctggtgagcagccggcagctgccccagtgtgccctgcgggagaaggccgccctgggggacctgaccccacctcctcctcctccaccccagcagcagcagcagcagctgacagccttcctgcagcagctgcaggccctgaagccaccccggggcggggaccagaacctgctgcccaccatgagccgcagcctgtctgtgcctgattctggccgcctgtgggatgtgcacaccagcgccagcagccagagcggcggggaggccagcctgtgggacatccccatcaacagcagcacccagggccccatcctggagcagctgcagctgcagcacaagttccaggagcggcgggaggtggagctgcgggccaagcgggaggaggaggagaggaagagaagagaggagaagaggcggcagcagcagcaggaggagcagaagaggcggcaggaggaggaggagctgttccggaggaagcacgtgcggcagcaggagctgctgctgaagctgctgcagcagcagcaggccgtgcctgtgcccccagcccccagcagccccccacccctgtgggccggcctggccaagcagggcctgtccatgaagaccctgctggagctgcagctggagggggagcggcagctgcacaagcagcccccaccccgggagcccgcccgggcccaggcccccaaccaccgggtgcagctgggcggcctgggcacagcccccctgaaccagtgggtgtctgaggccggccccctgtggggcggccctgacaagagcggcggcggcagcagcggcctgggcctgtgggaggacacccccaagagcggcggcagcctggtgcggggcctgggcctgaagaacagccgcagcagccccagcctgagtgacagctacagccacctgagcggccggcccatcaggaagaagacagaggaggaggagaagctgctgaagctgctgcagggcatcccccggccccaggacggcttcacccagtggtgtgagcagatgctgcacaccctgagcgccaccggcagcctggatgtgcccatggctgtggccatcctgaaggaggtggagagcccctatgatgtgcatgactacatccgcagctgcctgggggacaccctggaggccaaggagtttgccaagcagttcctggagcggcgggccaagcagaaggccagccagcagaggcagcagcagcaggaggcctggctgagcagcgccagcctgcagacagccttccaggccaaccacagcaccaagctgggccctggagagggcagcaaggccaagagaagagccctgatgctgcacagcgaccccagcatcctgggctacagcctgcacggcagcagtggagaaattgagagcgtggatgactactag

SEQ ID NO: 270424 - DNA, 3108 bp, Artificial Sequence
  derived and/or modified sequence
atggccgccgagaccctgaacttcggccccgagtggctgcgggccttgtctggagggggcagcgtggcttcaccgcctccaagccccgccatgcctaaatacaagctcgcggactatcgctacgggagagaggagatgctagccttgtacgtgaaggagaacaaggtgccagaggaactccaggacaaagaattcgcggcggtcctgcaggatgaacctctacaacctctagccctagaacccctgaccgaggaagaacaaaggaacttcagcctgtctgtaaacagcgtggccgtgttgcgcttaatgggaaaaggtgccggcccaccactcgcgggcacatcaaggggacgagggagcacgcggtctcggggacgcggcagaggagatagctgcttttatcagcgaagcatcgaagaaggggacggggcatttgggcgcagcccacgggagattcagcgcagtcaatcatgggacgacaggggtgaacgccggttcgaaaaaagcgcgcggcgcgacggcgcgcggtgcggatttgaggaggggggagctggtccaagaaaggaacacgctagatccgatagcgagaactggagaagcttgagagaagaacaagaggaggaagaagaaggctcatggaggttgggcgcaggcccacggcgagacggagatcgctggagaagtgcctctcctgacggcgggcccagatctgcaggctggagggaacatggggagcgccgacgaaaattcgagttcgatctgaggggggaccggggtggatgcggagaagaggaggggagagggggaggagggagttcccacctcaggcgatgtcgggccccagagggttttgaggaagacaaggacggtctcccagaatggtgcctcgacgatgaagacgaggagatgggcaccttcgacgctagcggagccttcctgccccttaaaaagggccctaaggagccaatccctgaggagcaggagctggacttccagggcctcgaagaggaagaagagcctagcgaaggcctcgaggaggaaggaccagaagcggggggcaaggaactcactccactacctccacaagaggaaaagagtagctctccttctccactgcccacactaggccccttgtgggggactaatggtgatggcgatgagactgcagaaaaagagccgcctgccgctgaggacgacatcagaggcattcagctgtcccccggcgtgggctcctccgctggtcctcctggagacctggaggatgacgaagggctcaagcacctccaacaggaagccgaaaaactggtagcctccctccaggattcaagcctcgaggaggagcaattcactgcagccatgcagacccagggtctaagacactccgccgctgctaccgccctcccactgtctcacggggcggcaaggaagtggttctacaaggacccgcaaggagagatccaaggcccctttaccacccaggagatggcagaatggtttcaggctggctatttcagtatgtccctgctcgttaaacgcggctgcgatgagggcttccagcccctgggagaagtcatcaaaatgtggggtcgggttccgtttgccccggggcccagcccacctcccctgcttggcaacatggatcaagaaagattaaaaaagcagcaggagctcgcggcagccgcgttgtatcagcagctccagcatcagcagtttttgcaacttgtttcctcccgtcagttaccacagtgcgctctgcgtgagaaagctgcgcttggtgatctcaccccgccccctccaccgcctccacagcagcagcagcagcagttgacggcctttcttcagcaactccaggccctgaaaccacctagaggtggcgaccagaatctgctgcctaccatgtcaaggagcttgagtgtgcctgactctggcagactgtgggatgtgcacacgagtgcttcttcccagagtggaggagaggcttccttgtgggacatccctatcaatagcagtactcagggaccaatacttgaacagcttcaacttcagcataagtttcaagagaggcgggaggtggaactgcgagcaaaacgcgaagaggaggaaagaaagcgccgtgaggagaaaaggagacagcaacagcaagaagagcagaagaggcggcaggaggaagaggagctgtttcgtaggaaacacgtgcggcaacaggaattgttgctcaagctcctccagcagcagcaggctgtgcccgtacctcccgcaccttcttcccccccccctctctgggctgggctcgccaagcagggactttcaatgaagaccttgctagagcttcagctggaaggagagaggcaactccataagcagccgcctccgagagagccagcaagggcccaagctcccaatcatagagtccagctaggaggattagggacagcccctctcaaccaatgggtaagcgaggcggggcccctctgggggggccctgacaagtctggcggggggagtagcggcctcggtctgtgggaggatacccctaaatcagggggctctttggtgcgaggattaggactgaaaaatagcagaagtagtccctctctgagcgatagctattcacacctgtccggccgccccatccgaaaaaaaactgaggaggaagagaagctgttgaagctgttacagggcatccccagaccacaggacggcttcacccagtggtgtgagcaaatgttacacaccttgtctgccacaggttcattggacgtccccatggccgtggctattttgaaagaggtagagtccccctatgacgtccacgactacatccgctcatgtctgggagatactctggaggccaaggagtttgcaaagcagtttctcgaaaggagagctaagcaaaaggctagccagcagaggcagcagcaacaagaggcctggctctcaagcgcttccctacagacagccttccaggccaaccacagtacaaaactaggacctggcgagggaagtaaagcgaagagacgagcactcatgttgcattctgatccaagcatcctgggctacagtctacacggaagctctggagaaatcgaaagcgttgacgattattag

SEQ ID NO: 270425 - DNA, 2265 bp, Artificial Sequence
  derived and/or modified sequence
agcagcttccccagcccccggctgccccaggtgttccaccggctggacgatgaggacgaagaaatgggcactttcgatgcaagcggggccttcctacccctgaaaaaaggcccgaaagagcctatccctgaggagcaggaattggattttcaagggttggaagaagaggaagaaccctctgaagggctagaagaagaaggtcccgaggctgggggcaaggagcttacccccctgccaccacaggaggaaaaaagctccagtccctccccattaccaactttaggcccactttggggcaccaatggagatggagacgaaactgccgagaaggagcctccagccgcggaagatgatatccggggaatacaactgagtcctggagtggggagctccgccggcccacccggagacctagaagacgatgaaggcctgaaacaccttcagcaggaggccgaaaaattggtggcgagtctgcaggattctagtctggaggaggaacaattcaccgccgcaatgcagacacagggactgaggcattccgcggcagcaacggcattgcccctctcccacggagccgctaggaaatggttttataaggatcctcagggagagatacagggacctttcacaacccaagagatggcagagtggttccaggcgggctacttttctatgtctctgctggtcaagagagggtgcgacgagggatttcaaccacttggcgaagtgatcaagatgtggggcagagtacccttcgcacctggcccaagcccaccccctttgctcggtaacatggaccaggaacggctgaagaaacagcaggagctcgctgcagcagcactttatcagcagctacagcaccagcaatttctgcagctggtcagctctcgtcaacttccccagtgcgcgttgcgagagaaggccgccctgggcgacctgacccctcccccccccccccctccccagcagcagcagcagcaactgaccgccttcctgcagcagctccaggcactgaagccacctcggggaggcgaccaaaaccttctgcctaccatgtcacgatctttgagcgtacctgactccgggcggttatgggacgttcacacatcagcaagctctcagagcggaggagaagcctctctctgggacattcctatcaacagcagcacccagggacccattctggagcaattgcagctgcagcataagtttcaggagaggagggaggtcgagcttcgagccaaaagggaggaggaagagagaaaacgtcgtgaggaaaagcgaagacagcaacagcaggaagaacagaaacggaggcaggaagaggaggagttattcagacgcaaacacgtgcggcagcaggagttgctattgaagttactccagcagcagcaggccgtgcctgttccacccgccccttcgtctccaccgccgctatgggcgggcttggccaaacaggggctctctatgaagaccctgctggagttgcagctggaaggcgaaagacagctccacaaacagcctccaccacgggaaccagcgcgcgcccaagctcctaaccaccgggtgcaactgggtggcctgggaacagcacctttgaatcagtgggtcagcgaagccgggcccttatggggcggacctgataaaagcggcggcggaagcagcgggctgggtctgtgggaggataccccaaagtcgggcgggtccctggtccgcgggttgggcttgaagaactcaaggtcaagcccttccctttcggattcctactctcacttatcaggtagacccattagaaagaaaacagaagaagaagaaaagctacttaaactgctgcaggggatcccacgtccccaggatggctttactcagtggtgtgaacaaatgctccacacactgtctgccacgggcagtctcgatgtcccaatggctgttgccatcttaaaggaagtggagtccccttatgacgtccatgactacatcagatcgtgtttaggagacacactggaggccaaggaattcgcgaaacagttcctcgaaaggcgggccaaacagaaggcttcccagcagcgacagcagcagcaggaggcctggttgagcagtgcttcactccagactgcattccaggccaaccactctacaaagcttggccctggtgagggttccaaggccaagagaagggcactgatgctccacagcgacccatccatcctggggtactccctccacggttcttctggggagattgaaagtgtagacgactactag

SEQ ID NO: 270426 - DNA, 3108 bp, Artificial Sequence
  derived and/or modified sequence
atggccgctgagacactgaatttcgggcctgaatggctgcgggctctgtccgggggaggatccgtcgcctcccctcctccaagtccagcaatgcctaagtacaaactggctgactataggtacgggagagaggagatgttggccctctacgtcaaggagaataaggtacccgaagagctgcaagacaaggaatttgccgctgtcttgcaggatgagccgttacaacctctcgctctggagcccctcactgaagaagagcagcggaactttagtctgtccgtgaatagcgtggccgtcctgcggctgatgggaaagggggctggccctcccttggctgggacctcacggggacgtggtagtacccgcagcaggggacgaggcagaggagattcttgtttctaccaacgatcgattgaagaaggtgatggcgcttttgggaggtctcctagagaaatccagcggtcacagagctgggatgacaggggtgagagacggtttgaaaagtccgcgcgtagagatggagcacgttgtgggttcgaagagggtggggctggtccacggaaggagcatgccagaagcgatagcgaaaattggagaagcctcagagaggagcaggaggaagaagaggaagggagctggagactgggcgcagggccaaggcgggatggagatcgatggcggagtgccagccccgacgggggacctcggtccgcagggtggagagaacatggtgagcgcaggcgaaaatttgagttcgatctgaggggggaccggggtggctgtggagaagaggagggcagagggggaggtgggagctctcatctccgacggtgtagggcccctgaagggtttgaggaagacaaggacgggctgccagagtggtgtctagacgatgaagatgaggagatgggaacttttgatgcttctggcgcttttctgccactgaaaaagggccctaaagaacccattcctgaagaacaggaactggattttcagggactcgaggaggaggaggaaccctccgaaggcctagaagaggaaggtcctgaggccggaggcaaagagcttactcctcttccccctcaggaagagaagtcttccagtccttcccccctgcccaccctgggaccactttggggcacgaacggagatggagatgaaacggccgagaaggagccaccagcagcggaggatgatatcagggggatacagttgtccccgggtgtgggttcaagtgcagggccacctggggacttggaggatgacgagggtttaaaacatctgcagcaggaggccgagaagcttgtcgctagcctgcaagattcctctctggaggaggagcagtttactgcggcaatgcaaacacaaggcttgcgccattcagccgcagcaaccgctctcccgctgagccatggtgccgctcgtaagtggttctacaaggatcctcagggtgagattcagggcccttttaccacgcaagaaatggctgaatggttccaggccggatatttctcaatgtcactcctggttaagcgcggttgcgacgaaggattccagccgttgggcgaggtgatcaaaatgtggggaagggtaccattcgccccaggtccctcccctccaccgctgctcgggaacatggaccaggaacggttgaaaaagcagcaagagctggccgctgctgccttatatcaacagctacagcaccagcaatttttacagctcgtgagcagccgccagctccctcagtgtgcattaagggagaaagcagcattaggggacctcacaccacctccgcctcctccgcctcagcagcaacaacagcagttgacagcattccttcagcagctccaggccctaaaacccccaagaggaggagatcaaaatctgttgcccacgatgagtaggtcactttctgtgcccgacagtggtcgcctttgggatgtgcatacatctgctagtagccagtccggaggcgaggcctccctctgggacatccccatcaattccagcacccaggggcctatcctggagcagctgcagctgcagcataaattccaggaaaggagagaagtggaactgcgggcaaaacgcgaggaggaagaacgtaagaggagggaggagaaacggaggcaacagcagcaggaggagcagaaacgtaggcaggaggaggaggagctcttccgcagaaagcacgtgcggcagcaggagttgctgctcaagctcctgcagcagcaacaggctgtccctgtccctccagcaccctcaagtcctcctcccttatgggccggactagccaagcaaggtctgtcaatgaagaccctcctggagctccagctggaaggagaaagacagctacataaacagccaccacctcgggagcctgccagggcacaggcccctaaccatagggtgcagctggggggtctgggaactgctcccctgaaccagtgggtttcagaagccggaccgttatggggcggtccggacaagtccggtggcggttccagtggtctggggctctgggaggatacacccaaatcaggaggttctctagttcgcggtctcgggctcaagaattcacggtcttctccttcgcttagtgatagttattcccatctgtcaggcagaccgatcaggaaaaagactgaggaagaggagaagctgctgaagctgctgcaagggatccccagaccacaggatggtttcacacagtggtgtgagcaaatgctacacactttatctgcgactggatctctggacgtccctatggcggtcgctattctgaaggaggtggagtcaccatacgatgtgcatgattacatccggagctgcctcggagatacgctggaagcgaaggagtttgccaaacagtttctagaaaggcgggcaaagcagaaggcttcgcaacagagacagcagcagcaggaggcctggctgagtagtgccagcctgcagacagcattccaggcaaaccatagcacaaagctggggcctggagaggggtcaaaagccaaaaggcgcgctctgatgctccattccgacccatcaatcctgggatacagcttgcatggatcttccggcgagatcgaatctgtggatgattattag

SEQ ID NO: 270427 - DNA, 2265 bp, Artificial Sequence
  derived and/or modified sequence
tcttcattccccagccccaggctgccccaggtgttccataggctagatgacgaggatgaggagatgggcactttcgatgcctctggcgcttttctgcctcttaaaaagggccctaaggagccaattcccgaagaacaggagctcgatttccagggactcgaggaggaagaagaaccgtccgaaggtctggaggaggagggccctgaggcgggtggcaaggaattaactcctctcccgcctcaggaggagaagtcgagcagcccgagtcccctacccactctcggcccactgtggggcactaatggggatggagacgaaaccgctgaaaaggaacctcccgctgcggaggatgatattcggggtattcagttatcacccggagtggggtcatccgcaggtccacctggcgacctagaagacgacgaaggactcaagcaccttcagcaagaagccgaaaaactggtcgcctccctgcaagacagctcccttgaagaggagcagtttacggctgctatgcagactcagggcctccgccactcagctgccgcaacagcattacccctctcccatggcgctgcacggaaatggttttacaaggatcctcagggagaaatccagggaccgtttaccacacaggagatggccgagtggttccaagcaggctatttctccatgagcctgttggtgaagcgaggctgcgacgagggattccagcccctcggggaggttatcaaaatgtggggtagggttccctttgcccctgggccatctccgccaccactgctgggaaatatggaccaggaacgacttaaaaagcagcaggaactggctgctgccgctctataccagcaactgcagcatcagcagtttttacaattggtgtcaagtcggcagctcccccagtgtgctctgagggagaaggccgcactgggcgatttaacaccgccaccaccgcctcctcctcagcagcagcagcaacagctgacggcatttcttcaacagctgcaggcactgaaaccacctcgcggaggcgatcaaaatctgcttcctacaatgtctcggtccctgagcgtcccggattctggacggctatgggatgtacacacgtcggcgtcttcacagtcagggggtgaggcatctctgtgggatatcccaatcaactctagcacacagggacccatactggagcagctgcaactccagcacaaattccaagaaaggcgcgaagtggagttgcgagctaagagagaggaggaggagaggaaaagacgcgaggaaaagagaaggcagcagcagcaggaagaacagaaacgcaggcaagaggaggaagaactttttcggcgtaaacatgttcggcagcaagagctgctcctcaagcttttacagcaacagcaagcggtgcctgtgcctccagcccctagcagcccacctccattatgggccggtttggcaaagcagggcttgtccatgaagaccctgctggagctgcagctcgagggagaacgccagttacataagcaaccgcctccacgcgaacctgcaagagcacaggcccctaatcaccgtgtgcagttaggcggactaggcaccgcccctctgaatcaatgggtgagcgaagctgggcctctttgggggggtcccgacaagtcagggggaggaagttccggcctgggactgtgggaggacaccccaaaatccggcggatcattagtgagggggctgggattaaaaaacagtcgctcatccccaagcctttctgattcttactctcacctgtctggcaggcccatcagaaagaagaccgaagaggaggagaaactgctcaagctgctgcaaggcatcccccgaccccaggatggatttactcagtggtgtgaacagatgctgcacacgcttagcgctactgggtcactggacgtgccgatggccgtggcaatcctgaaggaggtggaaagtccctacgacgtccacgactacattcggtcctgccttggagatactctggaagcgaaagagttcgctaagcaattcttggagaggagagctaagcagaaggcctcccagcagcggcagcagcagcaggaagcttggctgtcttccgcatcactccaaaccgccttccaggctaaccattccaccaagctgggacctggggagggaagtaaggcaaagaggcgcgctctcatgctgcatagcgatccgagcattctgggatattcactgcacggctcatcaggcgaaatcgaatcagtagatgactactag

SEQ ID NO: 270428 - DNA, 3108 bp, Artificial Sequence
  derived and/or modified sequence
atggccgccgagaccctgaacttcggccccgagtggctgagagccctgagcggcggcggcagcgtggccagccccccccccagccccgccatgcccaagtacaagctggccgactacagatacggcagagaggagatgctggccctgtacgtgaaggagaacaaggtgcccgaggagctgcaggacaaggagttcgccgccgtgctgcaggacgagcccctgcagcccctggccctggagcccctgaccgaggaggagcagagaaacttcagcctgagcgtgaacagcgtggccgtgctgagactgatgggcaagggcgccggcccccccctggccggcaccagcagaggcagaggcagcaccagaagcagaggcagaggcagaggcgacagctgcttctaccagagaagcatcgaggagggcgacggcgccttcggcagaagccccagagagatccagagaagccagagctgggacgacagaggcgagagaagattcgagaagagcgccagaagagacggcgccagatgcggcttcgaggagggcggcgccggccccagaaaggagcacgccagaagcgacagcgagaactggagaagcctgagagaggagcaggaggaggaggaggagggcagctggagactgggcgccggccccagaagagacggcgacagatggagaagcgccagccccgacggcggccccagaagcgccggctggagagagcacggcgagagaagaagaaagttcgagttcgacctgagaggcgacagaggcggctgcggcgaggaggagggcagaggcggcggcggcagcagccacctgagaagatgcagagcccccgagggcttcgaggaggacaaggacggcctgcccgagtggtgcctggacgacgaggacgaggagatgggcaccttcgacgccagcggcgccttcctgcccctgaagaagggccccaaggagcccatccccgaggagcaggagctggacttccagggcctggaggaggaggaggagcccagcgagggcctggaggaggagggccccgaggccggcggcaaggagctgacccccctgcccccccaggaggagaagagcagcagccccagccccctgcccaccctgggccccctgtggggcaccaacggcgacggcgacgagaccgccgagaaggagccccccgccgccgaggacgacatcagaggcatccagctgagccccggcgtgggcagcagcgccggcccccccggcgacctggaggacgacgagggcctgaagcacctgcagcaggaggccgagaagctggtggccagcctgcaggacagcagcctggaggaggagcagttcaccgccgccatgcagacccagggcctgagacacagcgccgccgccaccgccctgcccctgagccacggcgccgccagaaagtggttctacaaggacccccagggcgagatccagggccccttcaccacccaggagatggccgagtggttccaggccggctacttcagcatgagcctgctggtgaagagaggctgcgacgagggcttccagcccctgggcgaggtgatcaagatgtggggcagagtgcccttcgcccccggccccagccccccccccctgctgggcaacatggaccaggagagactgaagaagcagcaggagctggccgccgccgccctgtaccagcagctgcagcaccagcagttcctgcagctggtgagcagcagacagctgccccagtgcgccctgagagagaaggccgccctgggcgacctgaccccccccccccccccccccccccagcagcagcagcagcagctgaccgccttcctgcagcagctgcaggccctgaagccccccagaggcggcgaccagaacctgctgcccaccatgagcagaagcctgagcgtgcccgacagcggcagactgtgggacgtgcacaccagcgccagcagccagagcggcggcgaggccagcctgtgggacatccccatcaacagcagcacccagggccccatcctggagcagctgcagctgcagcacaagttccaggagagaagagaggtggagctgagagccaagagagaggaggaggagagaaagagaagagaggagaagagaagacagcagcagcaggaggagcagaagagaagacaggaggaggaggagctgttcagaagaaagcacgtgagacagcaggagctgctgctgaagctgctgcagcagcagcaggccgtgcccgtgccccccgcccccagcagccccccccccctgtgggccggcctggccaagcagggcctgagcatgaagaccctgctggagctgcagctggagggcgagagacagctgcacaagcagcccccccccagagagcccgccagagcccaggcccccaaccacagagtgcagctgggcggcctgggcaccgcccccctgaaccagtgggtgagcgaggccggccccctgtggggcggccccgacaagagcggcggcggcagcagcggcctgggcctgtgggaggacacccccaagagcggcggcagcctggtgagaggcctgggcctgaagaacagcagaagcagccccagcctgagcgacagctacagccacctgagcggcagacccatcagaaagaagaccgaggaggaggagaagctgctgaagctgctgcagggcatccccagaccccaggacggcttcacccagtggtgcgagcagatgctgcacaccctgagcgccaccggcagcctggacgtgcccatggccgtggccatcctgaaggaggtggagagcccctacgacgtgcacgactacatcagaagctgcctgggcgacaccctggaggccaaggagttcgccaagcagttcctggagagaagagccaagcagaaggccagccagcagagacagcagcagcaggaggcctggctgagcagcgccagcctgcagaccgccttccaggccaaccacagcaccaagctgggccccggcgagggcagcaaggccaagagaagagccctgatgctgcacagcgaccccagcatcctgggctacagcctgcacggcagcagcggcgagatcgagagcgtggacgactactag

SEQ ID NO: 270429 - DNA, 2265 bp, Artificial Sequence
  derived and/or modified sequence
agcagcttccccagccccagactgccccaggtgttccacagactggacgacgaggacgaggagatgggcaccttcgacgccagcggcgccttcctgcccctgaagaagggccccaaggagcccatccccgaggagcaggagctggacttccagggcctggaggaggaggaggagcccagcgagggcctggaggaggagggccccgaggccggcggcaaggagctgacccccctgcccccccaggaggagaagagcagcagccccagccccctgcccaccctgggccccctgtggggcaccaacggcgacggcgacgagaccgccgagaaggagccccccgccgccgaggacgacatcagaggcatccagctgagccccggcgtgggcagcagcgccggcccccccggcgacctggaggacgacgagggcctgaagcacctgcagcaggaggccgagaagctggtggccagcctgcaggacagcagcctggaggaggagcagttcaccgccgccatgcagacccagggcctgagacacagcgccgccgccaccgccctgcccctgagccacggcgccgccagaaagtggttctacaaggacccccagggcgagatccagggccccttcaccacccaggagatggccgagtggttccaggccggctacttcagcatgagcctgctggtgaagagaggctgcgacgagggcttccagcccctgggcgaggtgatcaagatgtggggcagagtgcccttcgcccccggccccagccccccccccctgctgggcaacatggaccaggagagactgaagaagcagcaggagctggccgccgccgccctgtaccagcagctgcagcaccagcagttcctgcagctggtgagcagcagacagctgccccagtgcgccctgagagagaaggccgccctgggcgacctgaccccccccccccccccccccccccagcagcagcagcagcagctgaccgccttcctgcagcagctgcaggccctgaagccccccagaggcggcgaccagaacctgctgcccaccatgagcagaagcctgagcgtgcccgacagcggcagactgtgggacgtgcacaccagcgccagcagccagagcggcggcgaggccagcctgtgggacatccccatcaacagcagcacccagggccccatcctggagcagctgcagctgcagcacaagttccaggagagaagagaggtggagctgagagccaagagagaggaggaggagagaaagagaagagaggagaagagaagacagcagcagcaggaggagcagaagagaagacaggaggaggaggagctgttcagaagaaagcacgtgagacagcaggagctgctgctgaagctgctgcagcagcagcaggccgtgcccgtgccccccgcccccagcagccccccccccctgtgggccggcctggccaagcagggcctgagcatgaagaccctgctggagctgcagctggagggcgagagacagctgcacaagcagcccccccccagagagcccgccagagcccaggcccccaaccacagagtgcagctgggcggcctgggcaccgcccccctgaaccagtgggtgagcgaggccggccccctgtggggcggccccgacaagagcggcggcggcagcagcggcctgggcctgtgggaggacacccccaagagcggcggcagcctggtgagaggcctgggcctgaagaacagcagaagcagccccagcctgagcgacagctacagccacctgagcggcagacccatcagaaagaagaccgaggaggaggagaagctgctgaagctgctgcagggcatccccagaccccaggacggcttcacccagtggtgcgagcagatgctgcacaccctgagcgccaccggcagcctggacgtgcccatggccgtggccatcctgaaggaggtggagagcccctacgacgtgcacgactacatcagaagctgcctgggcgacaccctggaggccaaggagttcgccaagcagttcctggagagaagagccaagcagaaggccagccagcagagacagcagcagcaggaggcctggctgagcagcgccagcctgcagaccgccttccaggccaaccacagcaccaagctgggccccggcgagggcagcaaggccaagagaagagccctgatgctgcacagcgaccccagcatcctgggctacagcctgcacggcagcagcggcgagatcgagagcgtggacgactactag

SEQ ID NO: 270430 - protein, 1157 aa, Artificial Sequence
  derived and/or modified sequence
LRALEGEVLLPALYEEEEEEEEEEEEVEEEEEQVQKGGSVGSLSVNKHRGLSLTETELEELRAQVLQLVAELEETRELAGQHEDDSLELQGLLEDERLASAQQAEVFTKQIQQLQGELRSLREEISLLEHEKESELKEIEQELHLAQAEIQSLRQAAEDSATEHESDIASLQEDLCRMQNELEDMERIRGDYEMEIASLRAEMEMKSSEPSGSLGLSDYSGLQEELQELRERYHFLNEEYRALQESNSSLTGQLADLESERTQRATERWLQSQTLSMTSAESQTSEMDFLEPDPEMQLLRQQLRDAEEQMHGMKNKCQELCCELEELQHHRQVSEEEQRRLQRELKCAQNEVLRFQTSHSVTQNEELKSRLCTLQKKYDTSQDEQNELLKMQLQLQTELRQLKVMKSTLVENQSEKELLCRLQKLHLQHQNVTCEKEKLLERQQQLQEELQCHEAELQHLRDTVASFKESNEKDTETHAQLQEMKQLYQASKDELERQKHMYDQLEQDLLLCQLELKELKASHPIPEDKGKCANKCDTLLSRLTELQEKYKASQKEMGQLQMEQCELLEDQRRMQEEQGQLQEELHRLTLPLPKSGLLLKSQELLTKLEDLCELQLLYQGMQEEQKKLIQNQDCVLKEQLEIHEELRRFKESHFQEVLENPDDSKLAKSSKCNRNKQSKLLMEQMQALQVMYDAGQAKQELLQQEQGRLLEERKRLQADLQLCLEEMQLLQVQSPSIKMSLESYGKSYGSMVPSNENCRKTYDTTVDDNESYYKSYTSTQTSSKSFLKSYDSSTSASEAYGKSYCTTSNSSITYKKSYGSTSSSDTCQKSFVSSCTDEEPAEPEDMERFEEMVVKVLIKLQAVQAMYQISQEEHSQLQEQMEKLLAKQKDLKEELDACEREFKECMECLEKPMAPQNDKNEIKELQTKLRELQLQYQASMDEQGRLLVVQEQLEGQLQCCQEELRQLREKRPSVVKEARGKNANKNMNKNANGVKMKKVTKPCSDTSESDLETRKSLEVVLYYKASQRKLDGLAKEEEKKEEMEEEKKQVKEEAKEQCGDELVAEPADPEEAKSTEDQEENEEDKEEEEKEEDSEEEEDDADSSLESPEENNPLRLSESKKNMFGLWKPMVFLAIAAVALYVLPNMRQQESEFCLME

SEQ ID NO: 270431 - DNA, 3474 bp, Artificial Sequence
  derived and/or modified sequence
ctgcgcgcgttggaaggtgaagttttgctgccggccctatatgaggaggaggaagaagaagaggaagaggaagaagaggtggaagaagaggaggagcaagttcagaaggggggttcggttggtagcctgtcagtgaataaacatcgcggactgagtcttacagagacggagctcgaagagctaagagctcaggttctccagctggtcgccgagctggaggaaacccgagagctggctggacagcatgaggatgacagcttggaactccaaggtttactggaggatgagcgattggcatcggcacaacaggctgaagtgttcactaaacagattcagcagttacagggagaacttaggtcgcttagagaagagatctctctgctggagcatgagaaggaatctgagctaaaggagatagaacaggagttacacttggcccaggcagagattcaatcactgcgacaggcagccgaagattccgcaactgagcatgagtctgatatcgcttctctccaagaagatctgtgccgcatgcagaatgaactggaagatatggagagaatcaggggcgactatgaaatggagatagcaagtctgagagcggagatggaaatgaagagctctgagccatctggcagcctcgggctttctgattatagtgggctacaggaagagcttcaagagctgcgcgagcgttatcacttcctgaacgaggagtaccgagccctccaagaatcgaattcttctctgaccggccagcttgcagacttggagagcgagaggacgcagagagcaactgaaaggtggttacagtcccaaacccttagtatgaccagcgctgagtcccagacctcagaaatggacttccttgagcctgatccggagatgcaactgctccggcaacagctacgagatgccgaagaacagatgcatggcatgaaaaataagtgccaagagctgtgctgcgaactggaggagctccaacaccatcggcaggtgtcagaagaggaacagcgacgtctacagcgtgagctcaaatgtgcacaaaacgaggtgctgcgcttccagacctctcattcagtaacccagaatgaagaactgaaaagccgcctctgcaccttgcagaaaaagtatgacacctcacaggacgaacaaaatgagctcctgaagatgcagctgcagctgcaaaccgaacttcgccagctgaaagtcatgaagagcaccctagtagaaaaccaatccgagaaagaactgctgtgcagactccaaaaattgcacctccagcatcaaaatgtcacctgtgagaaagaaaaactgctcgagcgccaacagcaactgcaggaagagctgcagtgccacgaagccgagctccagcatcttcgcgatacagtggccagcttcaaggaatccaacgaaaaggacactgagacgcacgcgcagctgcaggaaatgaaacaactgtaccaagcctccaaagacgagttagaacgacagaagcatatgtatgatcaacttgagcaagatctgcttttgtgccagttggagcttaaagagttgaaggccagccatcccatccctgaggataaagggaaatgtgcgaataagtgtgacaccctgctcagccgacttacagagctgcaggaaaagtacaaggctagccagaaggagatggggcagctgcaaatggagcaatgcgagctcctggaggatcaacgtcggatgcaagaagagcagggccaactgcaggaggagttgcaccggctcactctcccactgccgaagtctgggctactactaaaaagccaggaattgcttacaaaactagaagatctttgtgagctgcaattactttaccagggaatgcaggaagaacaaaagaagctgatccagaatcaggattgcgtgttgaaggagcaactcgaaattcacgaggagctgcgccgtttcaaggagtcgcacttccaggaggtactcgagaatcctgatgacagcaagttagcgaaatcatctaagtgcaacagaaacaagcagagtaaactgttgatggaacagatgcaggcactccaagtgatgtatgacgctggtcaggcgaaacaggaactgctacagcaagagcaaggtcgtctccttgaagagcgaaagcgtttgcaggcagacttgcaattatgcctggaggagatgcaactattacaggtccagagccccagcatcaagatgtcgttggagagctacgggaagtcatacggttcgatggtaccatcaaatgaaaattgcagaaagacctacgacacaactgtggatgacaatgagtcttattataagagctacacgagtacgcagacctcctcaaagagtttcctgaagtcttacgatagctcaactagtgcctccgaagcctacggaaaatcctactgtactacatctaatagctctatcacctataaaaagagctacggtagcacttcctcatcggatacgtgccagaaatcatttgttagtagctgcacagatgaagaaccagcggagccagaggatatggaacgttttgaagagatggtggtgaaagtgttgattaaactccaagccgtccaggctatgtatcaaatttctcaggaagagcactcgcaacttcaggaacagatggagaaactcttagcaaaacaaaaagacctcaaggaggagttggatgcctgtgagcgcgaattcaaagaatgcatggagtgcttagaaaaacctatggcaccccagaatgataaaaacgaaatcaaagagttgcagacaaagttgagagagctgcagctccaatatcaggctagtatggacgaacagggccggttgttagttgtgcaggagcaattggagggacagttacagtgctgtcaggaagaactcagacagttgcgagagaaaaggccttcagtcgtcaaagaggcccggggtaagaatgcgaataaaaacatgaataagaacgcaaatggagtgaaaatgaagaaagtgaccaagccttgcagtgacacttctgagtcggacctagaaacccgcaaaagtcttgaggtggttctgtattacaaggccagtcagcgcaaactggacggtctcgccaaggaggaggagaaaaaggaagaaatggaggaggagaagaaacaagttaaagaggaggccaaagaacagtgcggtgacgagctcgtagcagagccagctgatcctgaggaagctaaatcaacagaggaccaggaagagaacgaagaagacaaggaggaggaggagaaggaggaagacagcgaggaggaggaggatgatgccgacagctccctagagagtcccgaggagaataatcccctgcgattatcagagagcaaaaaaaatatgttcggcttatggaaacctatggtcttcttggccatcgccgctgtggctctctacgtcctgcctaatatgcggcagcaggagagcgagttttgcctgatggagtag

SEQ ID NO: 270432 - DNA, 3474 bp, Artificial Sequence
  derived and/or modified sequence
ctgcgggccctggagggggaggtgctgctgcctgccctgtatgaggaggaggaggaggaggaggaggaggaggaggaggtggaggaggaggaggagcaggtgcagaagggcggctctgtgggcagcctgtctgtgaacaagcaccggggcctgagcctgacagaaacagagctggaggagctgcgggcccaggtgctgcagctggtggccgagctggaggagacccgggagctggccggccagcatgaagatgacagcctggagctgcagggcctgctggaggatgagcggctggccagcgcccagcaggccgaggtgttcaccaagcagatccagcagctgcagggcgagctgcggagcctgcgggaggagatcagcctgctggagcacgagaaggagagcgagctgaaggagattgagcaggagctgcacctggcccaggccgagatccagagcctgcggcaggccgctgaggacagcgccacagagcacgagagtgacatcgccagcctgcaggaggacctgtgcaggatgcagaatgagctggaggacatggagcgcatccggggggactatgagatggagatcgccagcctgcgggcagagatggagatgaagagcagcgagcccagcggcagcctgggcctgagtgactacagcggcctgcaggaggagctgcaggagctgcgggagcgctaccacttcctgaatgaggagtaccgggccctgcaggagagcaacagcagcctgaccggccagctggccgacctggagagcgagaggacccagagggccacagagcgctggctgcagagccagaccctgtccatgaccagcgctgagagccagaccagcgagatggacttcctggagccagaccctgagatgcagctgctgcggcagcagctgagagatgctgaggagcagatgcacggcatgaagaacaagtgccaggagctgtgctgtgagctggaggagctgcagcaccaccggcaggtgtctgaggaggagcagaggcggctgcagcgggagctgaagtgtgcccagaatgaggtgctgcgcttccagaccagccacagcgtgacccagaatgaggagctgaagagccggctgtgcaccctgcagaagaagtatgacaccagccaggatgagcagaatgagctgctgaagatgcagctgcagctgcagacagagctgcggcagctgaaggtgatgaagagcaccctggtggagaaccagagcgagaaggagctgctgtgccgcctgcagaagctgcacctgcagcaccagaatgtgacctgtgagaaggagaagctgctggagcggcagcagcagctgcaggaggagctgcagtgccatgaagctgagctgcagcacctgcgggacacagtggccagcttcaaggagagcaatgagaaggacacagagacccacgcccagctgcaggagatgaagcagctgtaccaggccagcaaggatgagctggagcggcagaagcacatgtatgaccagctggagcaggacctgctgctgtgccagctggagctgaaggagctgaaggccagccaccccatcccagaagataaaggaaaatgtgccaacaagtgtgacaccctgctgagccggctgacagagctgcaggagaagtacaaggccagccagaaggagatgggccagctgcagatggagcagtgtgagctgctggaggaccagaggaggatgcaggaggagcagggccagctgcaggaggagctgcaccggctgaccctgcccctgcccaagagcggcctgctgctgaagagccaggagctgctgaccaagctggaggacctgtgtgagctgcagctgctgtaccagggcatgcaggaggagcagaagaagctgatccagaaccaggactgtgtgctgaaggagcagctggagatccacgaggagctgcggcgcttcaaggagagccacttccaggaggtgctggagaacccagatgacagcaagctggccaagagcagcaagtgcaacagaaacaagcagagcaagctgctgatggagcagatgcaggccctgcaggtgatgtatgatgctggccaggccaagcaggagctgctgcagcaggagcagggccgcctgctggaggagaggaagaggctgcaggccgacctgcagctgtgcctggaggagatgcagctgctgcaggtgcagagccccagcatcaagatgagcctggagagctatggcaagagctatggctccatggtgcccagcaatgaaaactgcaggaagacctatgacaccaccgtggatgacaatgaaagctactacaagagctacaccagcacccagaccagcagcaagagcttcctgaagagctatgacagcagcaccagcgccagcgaggcctacggcaagagctactgcaccaccagcaacagcagcatcacctacaagaagagctatggcagcaccagcagcagtgacacctgccagaagagctttgtgagcagctgcacagatgaggagcctgctgagcctgaggacatggagagatttgaggagatggtggtgaaggtgctgatcaagctgcaggccgtgcaggccatgtaccagatcagccaggaggagcacagccagctgcaggagcagatggagaagctgctggccaagcagaaggacctgaaggaggagctggatgcctgtgagcgggagttcaaggagtgcatggagtgcctggagaagcccatggccccccagaatgacaagaatgagatcaaggagctgcagaccaagctgcgggagctgcagctgcagtaccaggcctccatggatgagcagggccgcctgctggtggtgcaggagcagctggagggccagctgcagtgctgccaggaggagctgcggcagctgcgggagaagaggccttctgtggtgaaggaggcccggggcaagaatgccaacaagaacatgaacaagaatgccaacggggtgaagatgaagaaggtgaccaagccctgcagcgacaccagcgagagtgacctggagaccaggaagagcctggaggtggtgctgtactacaaggccagccagaggaagctggatggcctggccaaggaggaggagaagaaggaggagatggaggaggagaagaagcaggtgaaggaggaggccaaggagcagtgtggagatgagctggtggccgagcctgctgaccctgaggaggccaagagcacagaggaccaggaggagaatgaggaggacaaggaggaggaggagaaggaggaggacagcgaggaggaggaggatgatgctgacagcagcctggagagccctgaggagaacaaccccctgcggctgtctgagagcaagaagaacatgtttggcctgtggaagcccatggtgttcctggccatcgctgctgtggccctgtatgtgctgcccaacatgaggcagcaggagagcgagttctgcctgatggagtag

SEQ ID NO: 270433 - DNA, 3474 bp, Artificial Sequence
  derived and/or modified sequence
ctgcgggccctggagggcgaggtgctgctgcccgccctgtacgaggaagaggaggaagaggaagaggaggaagaagaggtcgaagaggaagaagagcaggtgcagaagggagggtccgttggctccctgtctgtcaataaacatcgtgggctctctcttaccgaaacagaactggaggagctgagagcacaggtgctccagcttgtagcagaattggaggagacacgtgaattggctggccaacacgaagacgattcactcgagctgcaaggcttactagaggatgaaagactggcctcagcacagcaggcagaggttttcactaaacagattcagcagttgcagggcgaactgcggagcctccgtgaggaaatatcactcctggagcacgaaaaagaaagcgaattgaaagaaattgaacaggaacttcatttagcacaggccgaaatccaaagtctccggcaggcggccgaggacagcgcaaccgagcacgaatctgacatcgcatccctgcaggaggacctctgtcggatgcaaaacgagctcgaagatatggagcgaatcaggggggactacgagatggaaatcgcctcattacgcgcggaaatggagatgaagtctagtgagccctccgggagtctgggcctgagcgactactcaggcctccaggaggagctgcaggagttgcgagaacgctaccacttcctgaatgaggagtatagggccttacaggagtcaaattcttcactcacagggcaactggctgacctggaatcggagcgtactcagcgagctaccgaacggtggctccagtcccaaaccctatcaatgacatcggctgaaagccagaccagcgaaatggatttcctggagccagatcccgagatgcagctactgcgccagcagcttagagacgccgaggaacagatgcatggcatgaaaaacaaatgccaggaactgtgctgcgagcttgaagaacttcagcaccatcgccaggtcagcgaagaagaacagagaagactacagcgagagctcaaatgcgctcagaacgaggtcctgagattccagacctctcattctgtgacccagaacgaggagctgaaaagcaggctgtgtaccctacagaagaagtatgatacgagccaggatgagcagaacgagctccttaagatgcagctccagctgcaaaccgaactccgtcagctgaaagtcatgaaatcaacacttgtggaaaatcagagcgagaaggagctgctgtgcaggttgcagaagctccacctccagcatcaaaacgttacctgcgaaaaggagaaactgctggaacgccagcagcagcttcaagaagagctgcagtgccatgaggcggaacttcagcacctgcgagatactgtggcatccttcaaagaaagtaatgagaaggataccgagacccacgcccagctccaagagatgaaacaactgtaccaagctagcaaagacgagctcgaaagacagaagcacatgtacgatcagctcgaacaagacctgttgctttgccaactagagcttaaagagttgaaagcatctcaccctatccctgaagataagggtaaatgcgcaaataaatgtgacacacttctgagccgcttgactgagctgcaggagaaatacaaggcatcacagaaagagatggggcaattgcagatggaacagtgtgaacttctggaagatcaaagaagaatgcaagaggaacagggacagctgcaggaggaacttcatagattgactttgcctcttcctaaaagcggcttgctgcttaaaagccaggaactccttaccaaactagaagatttatgtgaactgcagctgctgtaccagggaatgcaggaggagcagaaaaagctaatccaaaaccaggactgcgtgttaaaggaacagctggaaattcatgaagaactacggcgctttaaagaaagccattttcaggaagtgcttgagaatccagatgactccaagctggcaaagtctagtaagtgcaaccgcaacaagcagtccaaacttttaatggagcagatgcaggctctgcaggtcatgtatgatgccggacaggccaagcaagaacttctgcagcaggaacaaggccgattattggaggaacgaaagcgcctgcaggccgatcttcagctttgtctggaggaaatgcagctgctccaagtgcagtctccttccatcaaaatgtctctggaaagttatggcaagtcctatggctccatggtcccgtccaacgagaactgtcgaaagacatatgacacaactgtggatgataacgagtcctactacaaatcctatacaagcacgcaaacgagcagcaagagcttcctaaaatcctatgattcttcaactagcgcctccgaggcctatggcaagagctactgtacgacgtctaattcctcaatcacatataaaaagtcttacggctccacctcatcttctgatacgtgccagaagtcctttgtgtctagctgcactgacgaagaaccagccgagcccgaggatatggaaagattcgaagaaatggtggtcaaagttctcataaagctccaggctgtgcaggcaatgtaccagatttcccaagaagaacattcccagctgcaggagcagatggaaaaacttctggccaaacagaaagacctgaaagaagagctggatgcttgtgaaagagaatttaaagaatgtatggagtgcctcgaaaaaccgatggcaccgcagaacgacaagaatgagataaaggaacttcaaaccaagttgcgcgagctacagctgcaatatcaggcctctatggacgagcagggccgcctgttggtagtccaggagcagctggaagggcaattgcaatgttgtcaagaagaattgcgccaattgagagaaaagcggccaagcgtggtcaaggaggcaaggggcaaaaacgcgaacaaaaatatgaacaagaacgccaatggagtaaagatgaagaaggtgaccaaaccttgctccgataccagtgaatctgatcttgagacaaggaagagccttgaagtggtgttgtattataaggcttcacagcgtaagttggacgggctggccaaagaagaggaaaagaaagaggagatggaggaagagaaaaagcaagttaaggaggaggccaaggagcaatgtggcgacgaactggtggccgagcctgctgatcctgaggaagcgaagtccactgaagatcaagaggagaacgaggaagataaagaggaggaagaaaaggaagaggatagcgaagaggaggaggatgatgccgacagctccctggaatctcccgaagagaataatccactgaggcttagtgagtcaaagaagaatatgttcggtctgtggaagcccatggtgtttctagccattgccgccgtagctctttacgtgttgccaaatatgagacaacaggagtcggagttttgtctcatggagtag

SEQ ID NO: 270434 - DNA, 3474 bp, Artificial Sequence
  derived and/or modified sequence
ctacgcgcacttgagggggaggtgctgctgcccgctctttacgaggaagaggaagaggaggaagaggaagaagaggaggtggaggaggaggaagagcaggtccagaagggaggaagcgtgggttctttatcagttaataaacatagaggtttatctcttactgagaccgaactggaggaactgagggcgcaggtgcttcagttggttgccgagcttgaggaaacccgggagctggccggacagcacgaagacgactccctcgagttacagggactgctagaggatgaaagactggcttcagctcagcaagccgaagtgtttactaaacagattcagcagctacaaggcgagttaaggagtctacgagaggagatctctcttcttgagcatgaaaaggagagcgagctaaaagagattgagcaggagctccacctcgcgcaggcagagatacagtcactacggcaggcagctgaggacagcgcaacagagcacgaatctgacatcgctagtctacaggaggacctctgccgcatgcagaacgagctggaggacatggaacgtattcgcggagattatgagatggagatagccagtttgagagccgagatggagatgaaatcttcggagcccagcgggagcctgggtttatccgattatagtggactgcaggaggagcttcaggaacttcgagagcgataccactttctgaatgaagagtaccgagctctgcaggaatccaatagctctctcactggacagctcgcagatcttgagtcggaacgaacccagcgagcaaccgagaggtggttgcagtcacaaactcttagcatgactagcgcagagagtcaaactagtgagatggattttttggaaccagatccagagatgcagctcctgagacagcagctgcgcgatgccgaagagcagatgcatggtatgaaaaacaaatgccaggagttatgttgcgagttggaggagctccagcaccaccggcaggtgtcggaagaggaacagcgccgtctgcagcgagagcttaaatgcgcccagaatgaggtgctgcgcttccagacttcgcactccgtaactcagaatgaggaactgaagtcgaggttgtgcactttacagaaaaagtacgacaccagccaggacgagcaaaatgagctcctaaaaatgcagctgcagctccaaacggagctaaggcaactaaaggtgatgaaatctacgctggtggaaaaccagtctgaaaaagaactgctctgtagactccagaagttgcaccttcaacaccagaacgttacatgcgaaaaagagaagcttcttgagcgccaacagcagctccaggaggaactgcagtgtcatgaagcggagcttcaacatctgagggacaccgtagcgagctttaaggaaagcaacgaaaaggacacagaaactcatgcgcaactgcaggagatgaagcagctgtaccaagcatctaaagatgaattggagcgacagaaacacatgtacgatcaactcgagcaggatctcctgctctgtcagctggagttgaaagaactgaaagcatctcaccccatccccgaggataaaggcaagtgcgcaaacaaatgcgatactttgctatctcgcttgacagaacttcaggagaaatataaggcctcccagaaggagatgggacagctccagatggaacagtgtgaactgctggaggaccaacgcaggatgcaggaggagcaaggccagctgcaggaggagttacacagactgactctgccactgccgaagtctggtctgctgctgaagtcacaggagcttctgactaaactcgaagacctctgtgaacttcagcttctgtaccaaggcatgcaagaagagcagaagaaactgatccagaaccaggactgtgtactcaaagagcaactagagatccatgaggaactgagaagattcaaggaatctcatttccaggaggttcttgagaacccggacgattccaaactggcgaagagtagtaagtgcaatcgaaacaagcagagcaaactcctcatggagcagatgcaggcactccaggtaatgtacgacgctggacaggccaagcaagaactcctacagcaggagcagggccgactgctcgaggagcgcaagcgtttacaagccgacctccagctgtgccttgaggagatgcagctgcttcaggtccagagtccttcaattaaaatgagcctcgaatcttatggcaaaagctatggctccatggtgcctagcaacgagaattgtagaaagacatacgacaccacagtggacgacaacgagtcttactacaagtcttatacctccacccagacatcaagcaaatcttttctcaaatcatacgacagctccacttcggcttctgaagcctatggaaagtcctactgtacgaccagtaactcatccatcacatacaagaaatcgtatggctccacatccagctccgacacttgccagaagagctttgtgtcaagttgtaccgacgaggaacccgctgaacccgaggatatggagcggtttgaagagatggtggtgaaggtactgatcaagctccaggcggtgcaggcgatgtaccagatctcccaagaagagcacagccagcttcaggagcagatggagaaactgttggctaagcagaaggatttgaaagaagagctcgatgcgtgtgaacgagaatttaaagagtgtatggagtgccttgaaaagcctatggctccccaaaatgataagaatgagatcaaggagctgcagaccaaactgagagagttacaactgcagtatcaagcatcaatggacgagcaggggcgtctgctggtcgtacaagagcaactggaaggacagctgcaatgctgccaggaagagttacgccagctcagggaaaagcggccatcagtggtcaaggaagcgagaggaaagaacgcaaacaaaaacatgaataaaaacgctaacggcgttaagatgaagaaagtgacaaagccctgctctgatacttccgaatcggatctggagacccggaaatcattggaggttgtgctgtactataaggctagccagcggaagcttgatggtctggcaaaagaggaagagaaaaaagaagagatggaggaggaaaaaaaacaggtgaaggaagaagctaaagaacagtgcggcgacgagctggtcgccgaaccagcggaccccgaagaagccaaaagcacagaggaccaggaggagaacgaagaagacaaggaagaggaagagaaagaagaggattccgaggaggaggaggacgacgccgatagctctttagagtcacctgaggaaaataaccctctgaggctcagcgagagcaagaaaaacatgtttgggttgtggaagccaatggtctttctagctatcgcagcagttgcactgtatgtgcttccgaatatgcgccaacaagaatcagagttttgtctgatggaatag

SEQ ID NO: 270435 - DNA, 3694 bp, Artificial Sequence
  derived and/or modified sequence
ttgagggccctggaaggggaggtgttactcccagctctctatgaggaggaagaggaagaggaagaggaggaagaagaggtggaagaagaagaagaacaagtgcagaaaggtggcagtgttggctctctgtcagtcaacaagcaccggggactgagcctcacggagacagagctggaggagctgcgggctcaggtgctgcagctggtggcagaactggaggagacccgggaactggcagggcagcatgaggatgactccttggagctacaggggctcctggaggatgaacggctagccagcgcccagcaggcagaggtgttcaccaagcagatccagcagctccaaggtgagctgcgttctctacgggaggagatttccctgttagagcatgagaaagaaagcgaacttaaggaaatagaacaggaattgcatttggcccaggctgagatccagagtctgcggcaagcagcagaggattccgcaactgaacatgagagtgacatagcatccctgcaggaggatctctgccggatgcagaatgaacttgaagacatggaacgcattcggggagattatgagatggagatcgcctccctccgtgcagaaatggaaatgaagagctctgaaccatccggtagtttaggtctctcagattactctgggttacaagaagaactgcaggagctgcgggaacgctaccatttcctgaatgaggaataccgggccctgcaggagagcaacagcagcctcacggggcagcttgcagatctggagagtgagaggacacagagagcaacagagagatggctgcagtcccaaacactgagtatgacgtcagcagagtctcagacttcagaaatggatttcttagagcctgatcctgaaatgcagttgttacggcagcagctacgggatgctgaagagcagatgcatggcatgaagaacaagtgtcaggaattgtgttgtgagttggaagagctacagcatcatcgccaggtcagtgaggaggagcagaggcggctgcagagggagctcaagtgtgctcagaatgaggtgcttcggtttcagacctcccacagtgtcacccagaatgaggagctgaagtccagactctgtaccctgcagaaaaaatatgatactagccaggatgagcagaacgagctcttgaagatgcagctgcaacttcagactgagctccggcagctcaaagtcatgaaatccacacttgtagaaaaccagagtgagaaggagttactgtgccggctgcagaagctgcacctccagcaccagaacgtcacatgtgagaaggaaaagctgctggaacggcagcagcagctgcaggaggagctgcagtgccatgaggcagagctgcagcacctcagggatacggtggcctccttcaaagagagcaatgagaaggacacagagacgcacgctcagcttcaggagatgaagcagctgtaccaggccagcaaggacgagctggagcggcagaagcacatgtatgaccagctggagcaggacctcctgctctgccagctggagctgaaagagctcaaggcctcccaccccattccggaggacaaaggaaagtgtgctaataagtgtgacacactgctgtccagactgacagaattgcaggaaaagtacaaggccagccagaaggagatggggcagctgcagatggagcagtgtgagctcctggaggatcagaggaggatgcaggaggagcagggccagctgcaggaagagctgcacaggctcacactgccactgccaaagagtggcctcttactcaagagtcaggagctactcaccaagttagaagacctgtgtgagctgcagctgctctaccaaggcatgcaggaggaacagaagaagctgatacagaaccaagactgtgtattaaaagaacaattagagatccacgaagagctgcgacgtttcaaagagtctcatttccaggaagtgttggagaatcccgatgattccaaattggctaagtcctccaaatgtaatcgaaacaagcaatccaagctgctcatggagcagatgcaggccctgcaggtgatgtatgacgccggtcaggcgaagcaggagctcttgcagcaagagcaagggaggctcctagaggagcggaagaggctgcaggcagacttgcagctctgcctggaagaaatgcagctgcttcaagtccagtccccttctataaaaatgagccttgagtcctacgggaagagctatggtagcatggtccccagcaatgagaactgtcgcaagacttatgataccactgtggatgacaatgagagctattacaagagttacaccagcacccagaccagcagcaagagctttctcaagagctatgacagcagcaccagtgccagtgaggcctatgggaagagttactgcactaccagcaacagcagcattacctataagaagagttacggcagcaccagtagctctgacacctgccagaagagttttgtcagcagctgcactgacgaggaacctgctgagcctgaagacatggagcgctttgaggaaatggttgtgaaagtgctgatcaagctgcaggcggtgcaggccatgtaccagataagccaggaggaacacagccagctgcaagagcagatggaaaagttactggccaagcagaaagacctgaaggaagagctggatgcctgtgaaagggagttcaaggagtgcatggaatgccttgaaaagcccatggccccccagaacgacaagaatgagatcaaagaactgcagaccaagctgcgggagctgcagctgcaataccaggctagcatggatgagcaggggcggcttctggtagtgcaggagcagctggaggggcagctgcagtgctgccaggaggagctccgccagctcagggagaagaggccttctgttgtcaaagaagcccgggggaagaatgctaataagaacatgaacaagaatgccaatggggttaaaatgaaaaaggtgaccaagccatgctcggatacttctgagagcgaccttgagaccagaaagagtctggaggtagtgctgtactacaaggccagccagaggaaattagatggactagcaaaagaggaggaaaagaaagaggagatggaggaggaaaaaaagcaagtgaaagaggaagcaaaggagcagtgtggggatgagctagttgctgagccagcagatcctgaggaagctaaatccacagaagatcaggaggaaaatgaagaggacaaagaggaagaggagaaggaagaagacagtgaagaggaggaggatgacgccgactcttcccttgaaagtcccgaagaaaataaccccctcagactttccgagagcaaaaagaacatgtttgggttgtggaagcctatggtattcttggctattgcagctgtggctctgtatgtgttacccaacatgcgacagcaggagtcagagttctgcctcatggagtgatggcagaccttggccagcgcgagggcagatccccagtggccaccaccctcagctttgggcaggacacactgtgccagaaccctccccatatgttccatgtgtccccatctcctcagcctcagtcacccaggctgaaaaggcttgtggggagcggctgacttccatctcctgccttgtgtaagaacctgagttccttgtaattaaatatcaactgaattac

SEQ ID NO: 270436 - DNA, 3474 bp, Artificial Sequence
  derived and/or modified sequence
ctgagagccctggagggcgaggtgctgctgcccgccctgtacgaggaggaggaggaggaggaggaggaggaggaggaggtggaggaggaggaggagcaggtgcagaagggcggcagcgtgggcagcctgagcgtgaacaagcacagaggcctgagcctgaccgagaccgagctggaggagctgagagcccaggtgctgcagctggtggccgagctggaggagaccagagagctggccggccagcacgaggacgacagcctggagctgcagggcctgctggaggacgagagactggccagcgcccagcaggccgaggtgttcaccaagcagatccagcagctgcagggcgagctgagaagcctgagagaggagatcagcctgctggagcacgagaaggagagcgagctgaaggagatcgagcaggagctgcacctggcccaggccgagatccagagcctgagacaggccgccgaggacagcgccaccgagcacgagagcgacatcgccagcctgcaggaggacctgtgcagaatgcagaacgagctggaggacatggagagaatcagaggcgactacgagatggagatcgccagcctgagagccgagatggagatgaagagcagcgagcccagcggcagcctgggcctgagcgactacagcggcctgcaggaggagctgcaggagctgagagagagataccacttcctgaacgaggagtacagagccctgcaggagagcaacagcagcctgaccggccagctggccgacctggagagcgagagaacccagagagccaccgagagatggctgcagagccagaccctgagcatgaccagcgccgagagccagaccagcgagatggacttcctggagcccgaccccgagatgcagctgctgagacagcagctgagagacgccgaggagcagatgcacggcatgaagaacaagtgccaggagctgtgctgcgagctggaggagctgcagcaccacagacaggtgagcgaggaggagcagagaagactgcagagagagctgaagtgcgcccagaacgaggtgctgagattccagaccagccacagcgtgacccagaacgaggagctgaagagcagactgtgcaccctgcagaagaagtacgacaccagccaggacgagcagaacgagctgctgaagatgcagctgcagctgcagaccgagctgagacagctgaaggtgatgaagagcaccctggtggagaaccagagcgagaaggagctgctgtgcagactgcagaagctgcacctgcagcaccagaacgtgacctgcgagaaggagaagctgctggagagacagcagcagctgcaggaggagctgcagtgccacgaggccgagctgcagcacctgagagacaccgtggccagcttcaaggagagcaacgagaaggacaccgagacccacgcccagctgcaggagatgaagcagctgtaccaggccagcaaggacgagctggagagacagaagcacatgtacgaccagctggagcaggacctgctgctgtgccagctggagctgaaggagctgaaggccagccaccccatccccgaggacaagggcaagtgcgccaacaagtgcgacaccctgctgagcagactgaccgagctgcaggagaagtacaaggccagccagaaggagatgggccagctgcagatggagcagtgcgagctgctggaggaccagagaagaatgcaggaggagcagggccagctgcaggaggagctgcacagactgaccctgcccctgcccaagagcggcctgctgctgaagagccaggagctgctgaccaagctggaggacctgtgcgagctgcagctgctgtaccagggcatgcaggaggagcagaagaagctgatccagaaccaggactgcgtgctgaaggagcagctggagatccacgaggagctgagaagattcaaggagagccacttccaggaggtgctggagaaccccgacgacagcaagctggccaagagcagcaagtgcaacagaaacaagcagagcaagctgctgatggagcagatgcaggccctgcaggtgatgtacgacgccggccaggccaagcaggagctgctgcagcaggagcagggcagactgctggaggagagaaagagactgcaggccgacctgcagctgtgcctggaggagatgcagctgctgcaggtgcagagccccagcatcaagatgagcctggagagctacggcaagagctacggcagcatggtgcccagcaacgagaactgcagaaagacctacgacaccaccgtggacgacaacgagagctactacaagagctacaccagcacccagaccagcagcaagagcttcctgaagagctacgacagcagcaccagcgccagcgaggcctacggcaagagctactgcaccaccagcaacagcagcatcacctacaagaagagctacggcagcaccagcagcagcgacacctgccagaagagcttcgtgagcagctgcaccgacgaggagcccgccgagcccgaggacatggagagattcgaggagatggtggtgaaggtgctgatcaagctgcaggccgtgcaggccatgtaccagatcagccaggaggagcacagccagctgcaggagcagatggagaagctgctggccaagcagaaggacctgaaggaggagctggacgcctgcgagagagagttcaaggagtgcatggagtgcctggagaagcccatggccccccagaacgacaagaacgagatcaaggagctgcagaccaagctgagagagctgcagctgcagtaccaggccagcatggacgagcagggcagactgctggtggtgcaggagcagctggagggccagctgcagtgctgccaggaggagctgagacagctgagagagaagagacccagcgtggtgaaggaggccagaggcaagaacgccaacaagaacatgaacaagaacgccaacggcgtgaagatgaagaaggtgaccaagccctgcagcgacaccagcgagagcgacctggagaccagaaagagcctggaggtggtgctgtactacaaggccagccagagaaagctggacggcctggccaaggaggaggagaagaaggaggagatggaggaggagaagaagcaggtgaaggaggaggccaaggagcagtgcggcgacgagctggtggccgagcccgccgaccccgaggaggccaagagcaccgaggaccaggaggagaacgaggaggacaaggaggaggaggagaaggaggaggacagcgaggaggaggaggacgacgccgacagcagcctggagagccccgaggagaacaaccccctgagactgagcgagagcaagaagaacatgttcggcctgtggaagcccatggtgttcctggccatcgccgccgtggccctgtacgtgctgcccaacatgagacagcaggagagcgagttctgcctgatggagtag

SEQ ID NO: 270437 - protein, 957 aa, Artificial Sequence
  derived and/or modified sequence
LRALEGEVLLPALYEEEEEEEEEEEEVEEEEEQVQKGGSVGSLSVNKHRGLSLTETELEELRAQVLQLVAELEETRELAGQHEDDSLELQGLLEDERLASAQQAEVFTKQIQQLQGELRSLREEISLLEHEKESELKEIEQELHLAQAEIQSLRQAAEDSATEHESDIASLQEDLCRMQNELEDMERIRGDYEMEIASLRAEMEMKSSEPSGSLGLSDYSGLQEELQELRERYHFLNEEYRALQESNSSLTGQLADLESERTQRATERWLQSQTLSMTSAESQTSEMDFLEPDPEMQLLRQQLRDAEEQMHGMKNKCQELCCELEELQHHRQVSEEEQRRLQRELKCAQNEVLRFQTSHSVTQNEELKSRLCTLQKKYDTSQDEQNELLKMQLQLQTELRQLKVMKSTLVENQSEKELLCRLQKLHLQHQNVTCEKEKLLERQQQLQEELQCHEAELQHLRDTVASFKESNEKDTETHAQLQEMKQLYQASKDELERQKHMYDQLEQDLLLCQLELKELKASHPIPEDKGKCANKCDTLLSRLTELQEKYKASQKEMGQLQMEQCELLEDQRRMQEEQGQLQEELHRLTLPLPKSGLLLKSQELLTKLEDLCELQLLYQGMQEEQKKLIQNQDCVLKEQLEIHEELRRFKESHFQEVLENPDDSKLAKSSKCNRNKQSKLLMEQMQALQVMYDAGQAKQELLQQEQGRLLEERKRLQADLQLCLEEMQLLQVQSPSIKMSLESYGKSYGSMVPSNENCRKTYDTTVDDNESYYKSYTSTQTSSKSFLKSYDSSTSASEAYGKSYCTTSNSSITYKKSYGSTSSSDTCQKSFVSSCTDEEPAEPEDMERFEEMVVKVLIKLQAVQAMYQISQEEHSQLQEQMEKLLAKQKDLKEELDACEREFKECMECLEKPMAPQNDKNENMFGLWKPMVFLAIAAVALYVLPNMRQQESEFCLME

SEQ ID NO: 270438 - DNA, 2874 bp, Artificial Sequence
  derived and/or modified sequence
ctccgcgcactcgaaggagaggtcttactcccagccctgtacgaggaagaggaagaggaggaggaagaggaagaagaggtggaagaagaggaagaacaggtacaaaagggaggctcagtgggtagcctgtccgtaaacaagcatagggggctgtcactgaccgaaaccgagctagaggaacttcgagcacaggtgctgcagttagtggccgaattggaggaaactagagaactggcagggcagcatgaagacgatagtctggagctacaggggttgctggaggacgagcggcttgcgagcgcccagcaagccgaggtgttcaccaaacaaatccagcagttgcagggcgagctgagatcactgagagaggagatctcactcttggagcacgaaaaggaaagcgaattaaaggaaattgagcaggaactgcaccttgcccaagccgagatacaaagcctgagacaggccgcggaggactccgccacggaacatgagtctgacattgcatcactacaggaggacctgtgcagaatgcagaatgaactggaagatatggaacggattcggggggattacgagatggaaatagcttccctgcgggctgagatggaaatgaagtcttccgagccgagtggcagtcttggcctcagtgactactcaggactgcaggaagaacttcaagagcttcgagagaggtatcattttttgaacgaagaataccgggccctgcaggagtctaattcttctttaacagggcagctagctgatcttgagagtgagaggacccagagggcaaccgagcgctggctgcaatcacagactttaagcatgacatccgcagagagccagacttccgaaatggactttctagagcctgatccagaaatgcagttgctgaggcaacaattgcgggatgccgaagagcagatgcacggtatgaagaacaaatgccaggagctgtgctgcgagcttgaggagctgcagcaccatcgccaagtgagcgaagaagaacagaggagactgcagcgcgaacttaagtgtgctcagaacgaggtcctgagattccagacgtctcacagtgttactcagaacgaggagctcaaaagtaggttgtgtactctgcagaagaaatacgatacatcccaagatgagcagaatgaactactgaagatgcagttacaactgcagactgaactgcggcagctgaaagtgatgaaatccacacttgtggagaaccagtccgagaaagagctcttgtgtagactccagaaactccacctacagcaccagaatgtcacctgtgagaaagagaagctactcgaacgtcagcagcaactgcaggaagagttgcaatgccacgaggctgagctccaacatcttagggatacagtggccagttttaaggagtcaaacgagaaagacacagagacacacgcccaactgcaggaaatgaagcagctgtatcaggccagcaaggacgaactcgagcggcaaaagcacatgtacgaccagcttgagcaggatctccttctttgtcagcttgagctgaaagagttaaaagcttcgcatcccatccccgaggacaaggggaagtgtgcaaacaagtgcgacaccctgctgagtcggctcaccgagctgcaggagaaatacaaggccagccaaaaggagatgggacaactgcaaatggaacaatgtgaacttctggaagaccaacggcggatgcaagaagagcaaggccagctacaggaggagctccaccgactcacactgcctctgccaaaatcaggcctgttactaaaatcgcaagaactgctgaccaaactggaggacctctgcgaactccagctcctctaccagggaatgcaagaagaacagaagaagcttattcagaatcaagactgtgtgcttaaagaacagcttgaaatccatgaggaactgaggcgcttcaaagagtctcatttccaggaggttcttgagaaccccgacgattcaaagctcgctaagagcagtaagtgcaataggaataagcaaagcaagttgctgatggagcaaatgcaggccctacaggtaatgtatgacgcggggcaggccaagcaagagctactccaacaagagcagggccggctgttagaggaacgaaagcgactacaagcagacctgcaactgtgcctggaagagatgcaactcctccaggtacagtctccctcaatcaagatgagtctcgagtcctacgggaagagctacggatccatggtgccttcaaacgagaattgccgcaagacgtatgatacgactgtcgatgacaacgagtcatactacaaaagttacacatcgacacaaacatctagcaagtcgttcctcaaatcatacgacagctccactagtgcgtccgaggcgtatggaaagtcttattgcacaacatcaaattcgagcattacctataagaaaagctatggatctaccagttcaagtgacacctgccagaaaagtttcgtgtccagttgtaccgacgaggagcctgcagagcctgaagatatggagagattcgaggagatggtggtcaaggttcttatcaaacttcaggctgtgcaggccatgtaccagatcagccaggaggagcactctcagctgcaggagcaaatggagaaactgttggctaaacaaaaggacctgaaagaggagctggacgcatgcgaacgcgagttcaaggagtgcatggagtgtctagagaaacctatggctcctcaaaacgataagaacgagaatatgtttggcctgtggaagccaatggtatttcttgccatcgccgccgttgcactctatgtgctgccaaatatgagacaacaggagtcggagttttgcttaatggagtag

SEQ ID NO: 270439 - DNA, 2874 bp, Artificial Sequence
  derived and/or modified sequence
ctgcgggccctggagggggaggtgctgctgcctgccctgtatgaggaggaggaggaggaggaggaggaggaggaggaggtggaggaggaggaggagcaggtgcagaagggcggctctgtgggcagcctgtctgtgaacaagcaccggggcctgagcctgacagaaacagagctggaggagctgcgggcccaggtgctgcagctggtggccgagctggaggagacccgggagctggccggccagcatgaagatgacagcctggagctgcagggcctgctggaggatgagcggctggccagcgcccagcaggccgaggtgttcaccaagcagatccagcagctgcagggcgagctgcggagcctgcgggaggagatcagcctgctggagcacgagaaggagagcgagctgaaggagattgagcaggagctgcacctggcccaggccgagatccagagcctgcggcaggccgctgaggacagcgccacagagcacgagagtgacatcgccagcctgcaggaggacctgtgcaggatgcagaatgagctggaggacatggagcgcatccggggggactatgagatggagatcgccagcctgcgggcagagatggagatgaagagcagcgagcccagcggcagcctgggcctgagtgactacagcggcctgcaggaggagctgcaggagctgcgggagcgctaccacttcctgaatgaggagtaccgggccctgcaggagagcaacagcagcctgaccggccagctggccgacctggagagcgagaggacccagagggccacagagcgctggctgcagagccagaccctgtccatgaccagcgctgagagccagaccagcgagatggacttcctggagccagaccctgagatgcagctgctgcggcagcagctgagagatgctgaggagcagatgcacggcatgaagaacaagtgccaggagctgtgctgtgagctggaggagctgcagcaccaccggcaggtgtctgaggaggagcagaggcggctgcagcgggagctgaagtgtgcccagaatgaggtgctgcgcttccagaccagccacagcgtgacccagaatgaggagctgaagagccggctgtgcaccctgcagaagaagtatgacaccagccaggatgagcagaatgagctgctgaagatgcagctgcagctgcagacagagctgcggcagctgaaggtgatgaagagcaccctggtggagaaccagagcgagaaggagctgctgtgccgcctgcagaagctgcacctgcagcaccagaatgtgacctgtgagaaggagaagctgctggagcggcagcagcagctgcaggaggagctgcagtgccatgaagctgagctgcagcacctgcgggacacagtggccagcttcaaggagagcaatgagaaggacacagagacccacgcccagctgcaggagatgaagcagctgtaccaggccagcaaggatgagctggagcggcagaagcacatgtatgaccagctggagcaggacctgctgctgtgccagctggagctgaaggagctgaaggccagccaccccatcccagaagataaaggaaaatgtgccaacaagtgtgacaccctgctgagccggctgacagagctgcaggagaagtacaaggccagccagaaggagatgggccagctgcagatggagcagtgtgagctgctggaggaccagaggaggatgcaggaggagcagggccagctgcaggaggagctgcaccggctgaccctgcccctgcccaagagcggcctgctgctgaagagccaggagctgctgaccaagctggaggacctgtgtgagctgcagctgctgtaccagggcatgcaggaggagcagaagaagctgatccagaaccaggactgtgtgctgaaggagcagctggagatccacgaggagctgcggcgcttcaaggagagccacttccaggaggtgctggagaacccagatgacagcaagctggccaagagcagcaagtgcaacagaaacaagcagagcaagctgctgatggagcagatgcaggccctgcaggtgatgtatgatgctggccaggccaagcaggagctgctgcagcaggagcagggccgcctgctggaggagaggaagaggctgcaggccgacctgcagctgtgcctggaggagatgcagctgctgcaggtgcagagccccagcatcaagatgagcctggagagctatggcaagagctatggctccatggtgcccagcaatgaaaactgcaggaagacctatgacaccaccgtggatgacaatgaaagctactacaagagctacaccagcacccagaccagcagcaagagcttcctgaagagctatgacagcagcaccagcgccagcgaggcctacggcaagagctactgcaccaccagcaacagcagcatcacctacaagaagagctatggcagcaccagcagcagtgacacctgccagaagagctttgtgagcagctgcacagatgaggagcctgctgagcctgaggacatggagagatttgaggagatggtggtgaaggtgctgatcaagctgcaggccgtgcaggccatgtaccagatcagccaggaggagcacagccagctgcaggagcagatggagaagctgctggccaagcagaaggacctgaaggaggagctggatgcctgtgagcgggagttcaaggagtgcatggagtgcctggagaagcccatggccccccagaatgacaagaatgaaaacatgtttggcctgtggaagcccatggtgttcctggccatcgctgctgtggccctgtatgtgctgcccaacatgaggcagcaggagagcgagttctgcctgatggagtag

SEQ ID NO: 270440 - DNA, 2874 bp, Artificial Sequence
  derived and/or modified sequence
ctgcgggccctggagggcgaggtgctgctgcccgccctgtacgaggaggaggaagaggaagaggaggaagaagaggaggtggaagaagaggaggagcaggtccaaaagggcggatccgttggcagcctgtctgttaacaagcatcggggcctttccctcaccgagacagagctagaggagctgagagcgcaggtgctgcagcttgtagccgaactagaggagacacgcgagctggctggccagcacgaggacgattcattagagctccaggggttgctcgaggacgagcgccttgcaagcgcccaacaggcggaggtgtttactaagcaaatacaacagctgcagggcgaactgcgttcactcagggaggaaatctctctactggaacatgagaaagaaagcgaattgaaagagatcgagcaggagctgcaccttgcgcaagctgagatccagtccctgcggcaagcggctgaggacagcgccaccgagcatgaatccgatattgcgagtttgcaagaggacctttgtagaatgcagaatgagctggaggatatggagaggatcagaggagactacgagatggagattgccagcctgcgggccgagatggaaatgaaaagcagtgagccttcgggtagcctggggctgagcgattactcaggcttgcaggaggagctgcaggaactgagggaacggtaccacttcctgaatgaagaataccgggccctgcaggaaagcaattccagtctgactgggcagcttgccgacctggagagcgaaaggacccagagagctacagagcggtggttgcagagccagacactgtcaatgaccagcgctgagtcacagacttccgagatggacttcttggaaccggacccagaaatgcagctgttgaggcagcaactccgtgatgccgaagaacaaatgcacggtatgaaaaataaatgccaggagttatgctgtgagctggaggagctgcaacatcatcgtcaggttagtgaagaagaacaacgacggctccaacgcgaattgaaatgtgcccagaacgaggtgcttagattccaaacatcccactcagtcactcagaatgaggagctaaagtcccgactctgcaccctccagaaaaaatatgacaccagccaagacgaacagaacgagctgctgaagatgcagctgcaactgcagactgaactgagacagctaaaggtgatgaagagtactcttgtcgaaaaccagtccgaaaaagaactcttgtgccggttgcagaaattacatttgcagcaccaaaatgtgacgtgcgagaaggaaaagctcctggagagacagcagcaactgcaagaagaacttcaatgtcatgaagccgaacttcagcacctgagggatactgtggcgtcttttaaagagtctaacgaaaaagacacagaaactcacgcacaattgcaggagatgaaacaattgtatcaggcaagcaaagacgaactcgagcgacaaaaacacatgtatgatcaactggagcaggacctgctgctctgtcaactggagttaaaggaattaaaagcttcacatcctatacccgaggacaaaggaaagtgtgccaacaaatgcgacacgctgctatctaggctgactgaactgcaggagaaatataaggcttcacagaaggaaatggggcaactgcaaatggaacagtgcgagctcctggaggaccagcgtagaatgcaggaggagcaagggcagctgcaggaggagctacatcgcctcacactgccactgccaaaaagtggtcttctcctgaagagccaggagctgctcaccaaacttgaggatttgtgcgaactgcagctcctctatcagggtatgcaagaggaacagaaaaaactgatacagaaccaggattgcgtcctgaaagagcagttagagatccacgaggaactgaggaggttcaaggagagtcactttcaggaagtattggaaaaccccgacgacagcaagcttgcaaagtcctccaagtgcaatagaaacaaacaaagtaaactcctgatggaacaaatgcaggcgctccaggttatgtatgatgcggggcaggctaaacaggagctgctgcaacaggaacagggccggctgctggaggagagaaagcgccttcaagctgacttacagttgtgtttagaagaaatgcagctgctgcaggttcaatcaccctctattaaaatgtcgcttgagtcatatgggaaatcctatggcagtatggtgccatcaaacgagaactgtcgcaaaacatacgatactactgttgacgataatgagtcatactacaaatcatacacatccacccagacttcctctaaaagcttcctgaaatcttatgactcctcaacatcagcatctgaggcttacggtaagtcttactgtacaacgagcaattcatctatcacctacaagaaaagctatggatcaaccagcagtagcgatacgtgccagaaaagcttcgtttcatcctgcacagacgaagagcccgctgaacctgaggatatggaaagattcgaggaaatggttgttaaggtgcttattaaactgcaagcagtgcaggctatgtatcaaatctctcaggaggaacacagccagttacaggaacagatggaaaagttacttgcgaaacagaaggatctcaaggaggagcttgacgcctgtgaaagggagttcaaggagtgcatggagtgtctggagaagcccatggctcctcagaatgacaagaatgaaaacatgttcgggttgtggaagcccatggtgttcttggccatcgctgccgtggctctgtatgtgttgccgaatatgcgccaacaggagtcagaattttgcctaatggagtag

SEQ ID NO: 270441 - DNA, 2874 bp, Artificial Sequence
  derived and/or modified sequence
ctcagagcccttgaaggcgaggtgctcttgcccgcattatatgaggaggaggaagaggaggaggaagaagaggaggaagtggaagaggaggaggagcaggtacaaaaaggcggaagtgtcggaagcctatcggttaataagcaccggggactgtcactgaccgaaacagaactggaagaactccgggcacaggtactgcagcttgttgcagagttagaggaaacccgtgagcttgctggccagcacgaagatgatagcctagaactccaagggctgctggaggatgagaggctggcctctgcccagcaggcagaggtcttcaccaaacagattcagcagctgcagggagagttacgatcgctgcgtgaggagataagtcttctggagcatgaaaaagagagcgagctgaaggaaatagaacaagaattacacctggcacaggctgagattcaatctctgcgtcaggccgcagaagactcagcaacagagcacgagtccgatatcgcgtctctgcaggaagacctctgccgcatgcagaatgaactggaggacatggaaaggatccgaggagactacgagatggaaatagccagtctgagggctgaaatggagatgaaatcctcagaacctagcgggagcctaggcctctctgactacagtgggctccaggaagagctgcaggagctccgcgagagatatcattttctcaatgaggaatatcgcgcactgcaggaaagcaatagctccctaactggccaactggccgatttggaaagtgagcgcacccagcgggctactgagcggtggttgcaatctcaaacgctgtccatgactagcgctgaatcgcagacatctgagatggactttctcgaacctgatccagaaatgcagctgctgaggcagcagcttcgggacgcagaagagcagatgcatgggatgaagaacaagtgccaggaactttgttgcgaactggaagagctccagcatcatcggcaggttagcgaagaagagcagaggaggctacagcgtgagctgaagtgcgcacaaaacgaagtgttacggttccagactagccactctgtgacccagaatgaagagctgaaaagtaggctttgcacccttcagaagaagtatgatacatcccaggatgagcagaatgagctcctgaagatgcagctgcagctgcagactgagcttcggcagcttaaagttatgaagagtactctcgtggagaaccaatcagagaaggaattgctatgtaggttgcagaagttgcacctccagcatcagaacgtcacatgtgaaaaggaaaaactcctagaaaggcagcagcagctgcaggaggaacttcaatgccacgaagctgaacttcagcatcttcgagacacagttgccagtttcaaggagtcaaatgagaaggacaccgagacccatgctcagctgcaggagatgaagcagctctaccaggccagcaaggacgaattggagcgccagaaacatatgtatgatcagctcgagcaagatttgcttctttgccaacttgaattgaaagagctgaaagcatcccatcccatcccggaagacaaggggaagtgcgctaacaagtgtgataccctgctgagtcggctcacagaactgcaagagaaatataaggccagccaaaaggagatgggtcagctccagatggaacagtgtgaactgcttgaggaccaaaggcgaatgcaggaagagcagggccagctgcaggaggagctccatcgacttacacttccactccccaaatcgggcctgctgctgaaatcccaggagttgttgacaaagttggaggatctttgcgagctgcagctgctgtaccagggaatgcaagaggaacaaaaaaagcttatccagaaccaggactgtgtgctcaaggaacagcttgagatccatgaagagctgcggagattcaaagagtcacacttccaggaggtgctggagaaccccgacgatagcaagctcgccaaaagctccaagtgtaatcggaacaagcagagcaaactcttgatggagcagatgcaggcactgcaggtgatgtatgacgccggacaagccaagcaggaactgctgcagcaggagcagggcagactcctggaagagagaaaaaggctgcaggccgacctgcagctttgtctggaagaaatgcagctgctgcaggtacagtctccttcgatcaaaatgtcacttgaatcatatggcaaatcttatgggagcatggtcccttctaacgagaattgcaggaagacatacgatacaactgtagatgacaatgaatcctactataagagctatacgtccactcagacctcatctaagagtttcctgaagtcctacgactcctctacgagcgcctccgaggcttacggcaaatcctattgtaccacctcaaattccagcattacctataaaaagtcatacggatctacctcttcttccgatacatgtcagaaaagcttcgtgagcagctgtaccgacgaggaacctgccgagccagaagatatggagagatttgaggagatggtggtcaaggtcctaatcaagctgcaggctgtgcaggccatgtatcagatctcccaagaggagcactcacagttgcaggaacagatggagaaactgctcgccaagcaaaaggatctcaaggaagagcttgacgcctgcgaacgggagttcaaagaatgtatggaatgtttggaaaaacctatggccccacagaacgacaagaatgagaacatgtttggcctgtggaagccgatggtgtttttggctattgccgcagtggcactatacgttctgccaaacatgagacagcaggagagcgaattctgtttgatggagtag

SEQ ID NO: 270442 - DNA, 3094 bp, Artificial Sequence
  derived and/or modified sequence
ttgagggccctggaaggggaggtgttactcccagctctctatgaggaggaagaggaagaggaagaggaggaagaagaggtggaagaagaagaagaacaagtgcagaaaggtggcagtgttggctctctgtcagtcaacaagcaccggggactgagcctcacggagacagagctggaggagctgcgggctcaggtgctgcagctggtggcagaactggaggagacccgggaactggcagggcagcatgaggatgactccttggagctacaggggctcctggaggatgaacggctagccagcgcccagcaggcagaggtgttcaccaagcagatccagcagctccaaggtgagctgcgttctctacgggaggagatttccctgttagagcatgagaaagaaagcgaacttaaggaaatagaacaggaattgcatttggcccaggctgagatccagagtctgcggcaagcagcagaggattccgcaactgaacatgagagtgacatagcatccctgcaggaggatctctgccggatgcagaatgaacttgaagacatggaacgcattcggggagattatgagatggagatcgcctccctccgtgcagaaatggaaatgaagagctctgaaccatccggtagtttaggtctctcagattactctgggttacaagaagaactgcaggagctgcgggaacgctaccatttcctgaatgaggaataccgggccctgcaggagagcaacagcagcctcacggggcagcttgcagatctggagagtgagaggacacagagagcaacagagagatggctgcagtcccaaacactgagtatgacgtcagcagagtctcagacttcagaaatggatttcttagagcctgatcctgaaatgcagttgttacggcagcagctacgggatgctgaagagcagatgcatggcatgaagaacaagtgtcaggaattgtgttgtgagttggaagagctacagcatcatcgccaggtcagtgaggaggagcagaggcggctgcagagggagctcaagtgtgctcagaatgaggtgcttcggtttcagacctcccacagtgtcacccagaatgaggagctgaagtccagactctgtaccctgcagaaaaaatatgatactagccaggatgagcagaacgagctcttgaagatgcagctgcaacttcagactgagctccggcagctcaaagtcatgaaatccacacttgtagaaaaccagagtgagaaggagttactgtgccggctgcagaagctgcacctccagcaccagaacgtcacatgtgagaaggaaaagctgctggaacggcagcagcagctgcaggaggagctgcagtgccatgaggcagagctgcagcacctcagggatacggtggcctccttcaaagagagcaatgagaaggacacagagacgcacgctcagcttcaggagatgaagcagctgtaccaggccagcaaggacgagctggagcggcagaagcacatgtatgaccagctggagcaggacctcctgctctgccagctggagctgaaagagctcaaggcctcccaccccattccggaggacaaaggaaagtgtgctaataagtgtgacacactgctgtccagactgacagaattgcaggaaaagtacaaggccagccagaaggagatggggcagctgcagatggagcagtgtgagctcctggaggatcagaggaggatgcaggaggagcagggccagctgcaggaagagctgcacaggctcacactgccactgccaaagagtggcctcttactcaagagtcaggagctactcaccaagttagaagacctgtgtgagctgcagctgctctaccaaggcatgcaggaggaacagaagaagctgatacagaaccaagactgtgtattaaaagaacaattagagatccacgaagagctgcgacgtttcaaagagtctcatttccaggaagtgttggagaatcccgatgattccaaattggctaagtcctccaaatgtaatcgaaacaagcaatccaagctgctcatggagcagatgcaggccctgcaggtgatgtatgacgccggtcaggcgaagcaggagctcttgcagcaagagcaagggaggctcctagaggagcggaagaggctgcaggcagacttgcagctctgcctggaagaaatgcagctgcttcaagtccagtccccttctataaaaatgagccttgagtcctacgggaagagctatggtagcatggtccccagcaatgagaactgtcgcaagacttatgataccactgtggatgacaatgagagctattacaagagttacaccagcacccagaccagcagcaagagctttctcaagagctatgacagcagcaccagtgccagtgaggcctatgggaagagttactgcactaccagcaacagcagcattacctataagaagagttacggcagcaccagtagctctgacacctgccagaagagttttgtcagcagctgcactgacgaggaacctgctgagcctgaagacatggagcgctttgaggaaatggttgtgaaagtgctgatcaagctgcaggcggtgcaggccatgtaccagataagccaggaggaacacagccagctgcaagagcagatggaaaagttactggccaagcagaaagacctgaaggaagagctggatgcctgtgaaagggagttcaaggagtgcatggaatgccttgaaaagcccatggccccccagaacgacaagaatgagaacatgtttgggttgtggaagcctatggtattcttggctattgcagctgtggctctgtatgtgttacccaacatgcgacagcaggagtcagagttctgcctcatggagtgatggcagaccttggccagcgcgagggcagatccccagtggccaccaccctcagctttgggcaggacacactgtgccagaaccctccccatatgttccatgtgtccccatctcctcagcctcagtcacccaggctgaaaaggcttgtggggagcggctgacttccatctcctgccttgtgtaagaacctgagttccttgtaattaaatatcaactgaattac

SEQ ID NO: 270443 - DNA, 2874 bp, Artificial Sequence
  derived and/or modified sequence
ctgagagccctggagggcgaggtgctgctgcccgccctgtacgaggaggaggaggaggaggaggaggaggaggaggaggtggaggaggaggaggagcaggtgcagaagggcggcagcgtgggcagcctgagcgtgaacaagcacagaggcctgagcctgaccgagaccgagctggaggagctgagagcccaggtgctgcagctggtggccgagctggaggagaccagagagctggccggccagcacgaggacgacagcctggagctgcagggcctgctggaggacgagagactggccagcgcccagcaggccgaggtgttcaccaagcagatccagcagctgcagggcgagctgagaagcctgagagaggagatcagcctgctggagcacgagaaggagagcgagctgaaggagatcgagcaggagctgcacctggcccaggccgagatccagagcctgagacaggccgccgaggacagcgccaccgagcacgagagcgacatcgccagcctgcaggaggacctgtgcagaatgcagaacgagctggaggacatggagagaatcagaggcgactacgagatggagatcgccagcctgagagccgagatggagatgaagagcagcgagcccagcggcagcctgggcctgagcgactacagcggcctgcaggaggagctgcaggagctgagagagagataccacttcctgaacgaggagtacagagccctgcaggagagcaacagcagcctgaccggccagctggccgacctggagagcgagagaacccagagagccaccgagagatggctgcagagccagaccctgagcatgaccagcgccgagagccagaccagcgagatggacttcctggagcccgaccccgagatgcagctgctgagacagcagctgagagacgccgaggagcagatgcacggcatgaagaacaagtgccaggagctgtgctgcgagctggaggagctgcagcaccacagacaggtgagcgaggaggagcagagaagactgcagagagagctgaagtgcgcccagaacgaggtgctgagattccagaccagccacagcgtgacccagaacgaggagctgaagagcagactgtgcaccctgcagaagaagtacgacaccagccaggacgagcagaacgagctgctgaagatgcagctgcagctgcagaccgagctgagacagctgaaggtgatgaagagcaccctggtggagaaccagagcgagaaggagctgctgtgcagactgcagaagctgcacctgcagcaccagaacgtgacctgcgagaaggagaagctgctggagagacagcagcagctgcaggaggagctgcagtgccacgaggccgagctgcagcacctgagagacaccgtggccagcttcaaggagagcaacgagaaggacaccgagacccacgcccagctgcaggagatgaagcagctgtaccaggccagcaaggacgagctggagagacagaagcacatgtacgaccagctggagcaggacctgctgctgtgccagctggagctgaaggagctgaaggccagccaccccatccccgaggacaagggcaagtgcgccaacaagtgcgacaccctgctgagcagactgaccgagctgcaggagaagtacaaggccagccagaaggagatgggccagctgcagatggagcagtgcgagctgctggaggaccagagaagaatgcaggaggagcagggccagctgcaggaggagctgcacagactgaccctgcccctgcccaagagcggcctgctgctgaagagccaggagctgctgaccaagctggaggacctgtgcgagctgcagctgctgtaccagggcatgcaggaggagcagaagaagctgatccagaaccaggactgcgtgctgaaggagcagctggagatccacgaggagctgagaagattcaaggagagccacttccaggaggtgctggagaaccccgacgacagcaagctggccaagagcagcaagtgcaacagaaacaagcagagcaagctgctgatggagcagatgcaggccctgcaggtgatgtacgacgccggccaggccaagcaggagctgctgcagcaggagcagggcagactgctggaggagagaaagagactgcaggccgacctgcagctgtgcctggaggagatgcagctgctgcaggtgcagagccccagcatcaagatgagcctggagagctacggcaagagctacggcagcatggtgcccagcaacgagaactgcagaaagacctacgacaccaccgtggacgacaacgagagctactacaagagctacaccagcacccagaccagcagcaagagcttcctgaagagctacgacagcagcaccagcgccagcgaggcctacggcaagagctactgcaccaccagcaacagcagcatcacctacaagaagagctacggcagcaccagcagcagcgacacctgccagaagagcttcgtgagcagctgcaccgacgaggagcccgccgagcccgaggacatggagagattcgaggagatggtggtgaaggtgctgatcaagctgcaggccgtgcaggccatgtaccagatcagccaggaggagcacagccagctgcaggagcagatggagaagctgctggccaagcagaaggacctgaaggaggagctggacgcctgcgagagagagttcaaggagtgcatggagtgcctggagaagcccatggccccccagaacgacaagaacgagaacatgttcggcctgtggaagcccatggtgttcctggccatcgccgccgtggccctgtacgtgctgcccaacatgagacagcaggagagcgagttctgcctgatggagtag

SEQ ID NO: 270444 - protein, 801 aa, Artificial Sequence
  derived and/or modified sequence
MERLWGLFQRAQQLSPRSSQTVYQRVEGPRKGHLEEEEEDGEEGAETLAHFCPMELRGPEPLGSRPRQPNLIPWAAAGRRAAPYLVLTALLIFTGAFLLGYVAFRGSCQACGDSVLVVSEDVNYEPDLDFHQGRLYWSDLQAMFLQFLGEGRLEDTIRQTSLRERVAGSAGMAALTQDIRAALSRQKLDHVWTDTHYVGLQFPDPAHPNTLHWVDEAGKVGEQLPLEDPDVYCPYSAIGNVTGELVYAHYGRPEDLQDLRARGVDPVGRLLLVRVGVISFAQKVTNAQDFGAQGVLIYPEPADFSQDPPKPSLSSQQAVYGHVHLGTGDPYTPGFPSFNQTQFPPVASSGLPSIPAQPISADIASRLLRKLKGPVAPQEWQGSLLGSPYHLGPGPRLRLVVNNHRTSTPINNIFGCIEGRSEPDHYVVIGAQRDAWGPGAAKSAVGTAILLELVRTFSSMVSNGFRPRRSLLFISWDGGDFGSVGSTEWLEGYLSVLHLKAVVYVSLDNAVLGDDKFHAKTSPLLTSLIESVLKQVDSPNHSGQTLYEQVVFTNPSWDAEVIRPLPMDSSAYSFTAFVGVPAVEFSFMEDDQAYPFLHTKEDTYENLHKVLQGRLPAVAQAVAQLAGQLLIRLSHDRLLPLDFGRYGDVVLRHIGNLNEFSGDLKARGLTLQWVYSARGDYIRAAEKLRQEIYSSEERDERLTRMYNVRIMRVEFYFLSQYVSPADSPFRHIFMGRGDHTLGALLDHLRLLRSNSSGTPGATSSTGFQESRFRRQLALLTWTLQGAANALSGDVWNIDNNF

SEQ ID NO: 270445 - protein, 355 aa, Artificial Sequence
  derived and/or modified sequence
MERLWGLFQRAQQLSPRSSQTVYQRVEGPRKGHLEEEEEDGEEGAETLAHFCPMELRGPEPLGSRPRQPNLIPWAAAGRRAAPYLVLTALLIFTGAFLLGYVAFRGSCQACGDSVLVVSEDVNYEPDLDFHQGRLYWSDLQAMFLQFLGEGRLEDTIRQTSLRERVAGSAGMAALTQDIRAALSRQKLDHVWTDTHYVGLQFPDPAHPNTLHWVDEAGKVGEQLPLEDPDVYCPYSAIGNVTGELVYAHYGRPEDLQDLRARGVDPVGRLLLVRVGVISFAQKEAQRPCGPPRMAGEPPRLPLSPGPRATTAASGQQSQDLHPHQQHLRLHRRPLRARSLRCHRGPEGCMGPRSS

SEQ ID NO: 270446 - DNA, 2406 bp, Artificial Sequence
  derived and/or modified sequence
atggagagactgtggggcctgttccagagagcccagcagctgagccccagaagcagccagaccgtgtaccagagagtggagggccccagaaagggccacctggaggaggaggaggaggacggcgaggagggcgccgagaccctggcccacttctgccccatggagctgagaggccccgagcccctgggcagcagacccagacagcccaacctgatcccctgggccgccgccggcagaagagccgccccctacctggtgctgaccgccctgctgatcttcaccggcgccttcctgctgggctacgtggccttcagaggcagctgccaggcctgcggcgacagcgtgctggtggtgagcgaggacgtgaactacgagcccgacctggacttccaccagggcagactgtactggagcgacctgcaggccatgttcctgcagttcctgggcgagggcagactggaggacaccatcagacagaccagcctgagagagagagtggccggcagcgccggcatggccgccctgacccaggacatcagagccgccctgagcagacagaagctggaccacgtgtggaccgacacccactacgtgggcctgcagttccccgaccccgcccaccccaacaccctgcactgggtggacgaggccggcaaggtgggcgagcagctgcccctggaggaccccgacgtgtactgcccctacagcgccatcggcaacgtgaccggcgagctggtgtacgcccactacggcagacccgaggacctgcaggacctgagagccagaggcgtggaccccgtgggcagactgctgctggtgagagtgggcgtgatcagcttcgcccagaaggtgaccaacgcccaggacttcggcgcccagggcgtgctgatctaccccgagcccgccgacttcagccaggacccccccaagcccagcctgagcagccagcaggccgtgtacggccacgtgcacctgggcaccggcgacccctacacccccggcttccccagcttcaaccagacccagttcccccccgtggccagcagcggcctgcccagcatccccgcccagcccatcagcgccgacatcgccagcagactgctgagaaagctgaagggccccgtggccccccaggagtggcagggcagcctgctgggcagcccctaccacctgggccccggccccagactgagactggtggtgaacaaccacagaaccagcacccccatcaacaacatcttcggctgcatcgagggcagaagcgagcccgaccactacgtggtgatcggcgcccagagagacgcctggggccccggcgccgccaagagcgccgtgggcaccgccatcctgctggagctggtgagaaccttcagcagcatggtgagcaacggcttcagacccagaagaagcctgctgttcatcagctgggacggcggcgacttcggcagcgtgggcagcaccgagtggctggagggctacctgagcgtgctgcacctgaaggccgtggtgtacgtgagcctggacaacgccgtgctgggcgacgacaagttccacgccaagaccagccccctgctgaccagcctgatcgagagcgtgctgaagcaggtggacagccccaaccacagcggccagaccctgtacgagcaggtggtgttcaccaaccccagctgggacgccgaggtgatcagacccctgcccatggacagcagcgcctacagcttcaccgccttcgtgggcgtgcccgccgtggagttcagcttcatggaggacgaccaggcctaccccttcctgcacaccaaggaggacacctacgagaacctgcacaaggtgctgcagggcagactgcccgccgtggcccaggccgtggcccagctggccggccagctgctgatcagactgagccacgacagactgctgcccctggacttcggcagatacggcgacgtggtgctgagacacatcggcaacctgaacgagttcagcggcgacctgaaggccagaggcctgaccctgcagtgggtgtacagcgccagaggcgactacatcagagccgccgagaagctgagacaggagatctacagcagcgaggagagagacgagagactgaccagaatgtacaacgtgagaatcatgagagtggagttctacttcctgagccagtacgtgagccccgccgacagccccttcagacacatcttcatgggcagaggcgaccacaccctgggcgccctgctggaccacctgagactgctgagaagcaacagcagcggcacccccggcgccaccagcagcaccggcttccaggagagcagattcagaagacagctggccctgctgacctggaccctgcagggcgccgccaacgccctgagcggcgacgtgtggaacatcgacaacaacttctag

SEQ ID NO: 270447 - DNA, 2406 bp, Artificial Sequence
  derived and/or modified sequence
atggaaagattgtgggggcttttccaaagagctcagcagctgtcacctcgcagctctcagaccgtataccaacgtgtggaaggacctcggaagggacatctggaggaggaagaggaggatggggaagagggggccgagacattggctcatttttgtccaatggaacttaggggaccagagcccctgggcagtcgccccagacagcccaacttgattccatgggcagcagcagggcggagggccgccccatacttggttcttactgccctgttaatctttacgggagcgtttctcctggggtatgttgctttccgaggcagctgccaagcgtgcggggactctgtcctcgtcgttagcgaggacgtgaactatgagcccgacctggacttccaccaaggccgactatattggagcgatttacaggctatgttcctccagttcttgggtgaggggcggctggaggatactattcggcagacctctctgagggaaagggtggctgggtccgcaggtatggcagccctgacccaggacataagagccgcgctcagccgccaaaagctcgatcacgtctggaccgacactcattacgtaggcctccagtttcccgatcctgctcatcctaatactctacactgggttgatgaggcaggcaaagtcggagagcagctccctctcgaagatcccgacgtgtattgtccctactcagctattggtaatgtgaccggtgagttagtgtatgcacattatggacgacctgaggatctacaggacctccgcgcacgaggcgtggatccagtgggcaggcttttgttggttagagtgggtgttatttctttcgctcaaaaagtgaccaacgcccaagactttggggcccagggcgtcttaatctatcccgagccggctgattttagccaggaccctcctaagccctctctgtcctctcaacaggcggtttacgggcatgtgcacctgggaaccggggatccttatacaccaggatttcctagtttcaaccagacacagttccccccggtggcaagctctggtctcccatccataccagcgcaaccaatttctgccgacatcgcatcgcggctgctgcgcaaactgaaagggcctgtggccccgcaggaatggcagggctctcttttgggttctccctatcaccttggccccggcccccgactgcgcctggtggtgaataaccatagaacgtctacacctatcaacaatatcttcggctgcatcgaaggtagatctgaacctgatcactatgtggtgattggcgctcagagagacgcttggggcccaggagccgcaaagtcagcagtgggcacggccatactgctggagcttgtgcgtaccttcagctctatggtgtctaatgggttcaggccaagacggagcctattatttatttcttgggatggaggagacttcggcagcgtgggctctaccgaatggctcgaggggtacctttctgtgttgcatctgaaggccgtcgtttatgtgagtcttgacaatgcggtcctgggtgacgataaattccacgcaaaaacatccccacttctaactagcctcatagaatcggttttgaagcaggtggattcccccaaccattctgggcagacactctacgaacaggtggtatttactaacccgtcctgggatgctgaggtgattcgtcccttgccaatggacagctctgcctactcctttaccgcattcgtaggcgtacctgctgtggaattctcttttatggaagacgaccaggcctaccccttcctgcacactaaagaggatacgtatgagaatttgcataaggtgttgcagggacgcctgccagctgttgctcaggccgtggcccagctggccggccaactcttaatcagactgtctcatgaccgtttgcttcccttagactttggaaggtatggagatgtggtccttcgccacatcggcaatttgaacgaattttctggcgacctgaaagctcggggtttaacgctgcagtgggtctacagtgcacgcggggactacatccgcgctgctgaaaagctcaggcaggaaatctactccagcgaagaacgtgatgaacggttgacgcgtatgtataatgtgcggattatgagagtggagttttactttctatctcagtatgtgagccccgcagactccccatttcgacatatctttatgggccgaggggaccatacactaggtgccctgctggaccatctcagattgctcagatccaattcctcaggcacacccggagctacctcctccactggctttcaggagtctcgattccgccgtcaactagccttgctcacatggacccttcaaggagccgcgaatgcactgtccggggacgtgtggaacatcgataacaatttctag

SEQ ID NO: 270448 - DNA, 2406 bp, Artificial Sequence
  derived and/or modified sequence
atggagcggctgtggggcctcttccagagggcccagcagctgagccccaggagcagccagacagtgtaccagagggtggagggccccaggaagggccacctggaggaggaggaggaggatggagaggagggcgctgagaccctggcccacttctgccccatggagctgcggggccctgagcccctgggcagccggccccggcagcccaacctgatcccctgggccgctgctggaagaagagctgccccctacctggtgctgacagccctgctgatcttcaccggggccttcctgctgggctacgtggccttccggggcagctgccaggcctgtggggacagcgtgctggtggtgtctgaagatgtgaactatgagccagacctggacttccaccagggccgcctgtactggagcgacctgcaggccatgttcctgcagttcctgggggagggccgcctggaggacaccatccggcagaccagcctgcgggagcgggtggccggcagcgctggcatggccgccctgacccaggacatccgggccgccctgagccggcagaagctggaccacgtgtggacagacacccactacgtgggcctgcagttcccagaccctgcccaccccaacaccctgcactgggtggatgaagctgggaaggtgggggagcagctgcccctggaggaccctgatgtgtactgcccctacagcgccatcggaaatgtgactggagagctggtgtatgcccactacggccggcctgaggacctgcaggacctgcgggcccggggcgtggaccctgtgggccgcctgctgctggtgcgggtgggcgtcatcagctttgcccagaaggtgaccaatgcccaggactttggagcccagggcgtgctgatctacccagagcctgctgacttcagccaggacccccccaagcccagcctgagcagccagcaggccgtgtatggccacgtgcacctgggcactggagacccctacaccccaggcttccccagcttcaaccagacccagttcccccctgtggccagcagcggcctgcccagcatcccagcccagcccatctctgctgacatcgccagccggctgctgaggaagctgaagggccctgtggccccccaggagtggcagggcagcctgctgggcagcccctaccacctgggccctggcccccggctgcggctggtggtgaacaaccacaggaccagcacccccatcaacaacatcttcggctgcatcgagggccgctctgagccagaccactacgtggtgattggagcccagagagatgcctggggccctggggccgccaagtctgctgtgggcacagccatcctgctggagctggtgaggaccttcagctccatggtgtccaatggcttccggccccggcgcagcctgctcttcatctcctgggatggaggagactttggatctgtgggcagcacagagtggctggagggctacctgtctgtgctgcacctgaaggctgtggtgtatgtgtccctggacaatgctgtgctgggagatgacaagttccacgccaagaccagccccctgctgaccagcctgattgaatctgtgctgaagcaggtggacagccccaaccacagcggccagaccctgtatgagcaggtggtgttcaccaaccccagctgggatgctgaggtgatccggcccctgcccatggacagcagcgcctacagcttcaccgcctttgtgggcgtgcctgctgtggagttctccttcatggaggatgaccaggcctaccccttcctgcacaccaaggaggacacctatgagaacctgcacaaggtgctgcagggccgcctgcctgctgtggcccaggccgtggcccagctggccggccagctgctgatccggctgagccatgaccggctgctgcccctggactttggccgctatggagatgtggtgctgcggcacatcggcaacctgaatgagttcagcggggacctgaaggcccggggcctgaccctgcagtgggtgtacagcgcccggggggactacatccgggctgctgagaagctgcggcaggagatctacagcagcgaggagagagatgagcggctgaccaggatgtacaacgtgcgcatcatgagggtggagttctacttcctgagccagtatgtgtccccagctgacagccccttccgccacatcttcatgggccgcggggaccacaccctgggcgccctgctggaccacctgcggctgctgcggagcaacagcagcggcacccctggggccaccagcagcacaggcttccaggagagccgcttccggcggcagctggccctgctgacctggaccctgcagggcgccgccaatgccctgtctggagatgtgtggaacatcgacaacaacttctag

SEQ ID NO: 270449 - DNA, 2406 bp, Artificial Sequence
  derived and/or modified sequence
atggagcggctgtggggcctgttccagcgggcccagcagctgagccctcgatcctcccagactgtgtatcagcgagtcgagggacctagaaaggggcaccttgaagaggaggaagaggacggggaagagggcgcagaaacattggcccatttctgtcccatggaacttcgcggcccagagcctcttggttctagacctcggcagcctaacctgatcccttgggcggcagccggcagacgggcggctccatatctggttctgacagctctgctcatatttaccggtgcctttctgttaggctatgttgcctttcgagggtcatgccaggcatgcggcgacagcgtgcttgtggtgtccgaggacgtcaattacgagcctgacctggattttcatcaggggagactttattggtcagatctgcaggctatgttcctacaattcctgggagaaggccggctggaggacactattagacaaactagtctgagagaacgcgtggccggtagcgcgggaatggctgctctgacacaagatatccgcgccgccctgagtaggcagaaactcgatcatgtgtggacagatactcactacgtaggtttgcagttccctgacccagcccaccctaacaccctccactgggtggacgaagcaggaaaggtcggtgaacagctgcctctagaggatcccgatgtctactgcccctattcggcgatcggtaacgtcactggtgaattggtatacgctcactatggaaggccggaggatctgcaggatttgagggcacggggtgttgatccagtcgggcgcttactgctcgtcagggttggggtgatttctttcgcccagaaggtcaccaacgctcaagactttggagctcagggcgtcctcatatacccagaacctgccgacttcagccaggatccccccaaaccgagtctatcctctcagcaggccgtttatggccacgtgcatctgggcacaggtgatccctataccccgggtttccccagttttaatcagacccagtttccgccagtggctagttctggattgccaagcatacctgctcaaccgataagcgccgacatagcgtcccgattattgcggaaactgaaaggacctgtggcgccccaggaatggcagggcagtctgctaggttcgccttaccacctcggccctggcccccggctcaggctggtggttaacaaccatcgcacttccacccccatcaataatatatttggatgcatcgagggaaggagcgagcctgaccactatgttgtcatcggagctcaacgcgatgcctggggcccgggggctgccaagtcagccgttggaactgccattctgcttgaacttgttaggacattctccagcatggtgtcgaacgggttccgcccgcgcagaagtctgctgtttattagctgggacggcggtgacttcggctcagtcgggtcgactgaatggctcgagggctatctgtctgtgctgcatttgaaagctgtcgtctatgtgagtctggataacgcggtgctgggggatgacaaattccatgccaaaacaagtcccctgcttacctcattgattgagtctgtgctcaaacaggttgacagccctaatcactctgggcaaaccttatatgaacaggtggttttcacaaatccttcttgggacgcagaagttattcgaccattgcccatggatagtagtgcctattcctttaccgcttttgtgggcgtgcccgctgtggagttctcctttatggaagacgatcaagcgtatccatttctgcatactaaagaagacacctacgaaaacctacacaaggtgctacaggggcgcctgcccgccgttgcccaggctgtggcccagttagccggccagctgctcatccgcctttcgcatgaccgattactccctcttgatttcggcaggtacggggatgtggtgttacgacacattggaaacctcaacgagttctcgggtgacctcaaagcccgcggcttgacccttcagtgggtttatagtgctcgcggagactatatacgagcggcagaaaagctgcgccaagagatttactccagtgaagagagggacgagaggctgacaaggatgtacaacgtccggataatgagagtcgaattttatttcctttcacagtacgtatcccccgctgattccccattcaggcacatatttatgggaaggggtgatcatactcttggcgctctgctcgaccacttgaggctgctgcgttcgaattcatccggcactcctggtgctacaagcagtacgggatttcaggaaagccggttccgtcgtcagttggctctgttaacctggacactgcagggagcagcaaacgctttatcaggtgacgtttggaatatcgacaacaacttctag

SEQ ID NO: 270450 - DNA, 2406 bp, Artificial Sequence
  derived and/or modified sequence
atggaaagactttgggggctgttccaacgtgctcagcagctgtcaccgcgaagctcccagaccgtctatcaacgggtggaaggcccaagaaagggacacctggaggaggaggaggaggatggtgaggagggagccgagactctggctcatttttgccccatggagctgcgtggaccggaacccttagggtctcgacccaggcaacccaatctcataccatgggccgcagcaggcagaagggccgctccctatctcgtcctgactgctctcttaatttttactggagcattccttctggggtatgtggcatttagaggaagctgtcaggcttgcggggactctgttcttgtggtctctgaggatgttaactacgagcctgacctggacttccatcaggggagactatactggagcgacctgcaggctatgtttttgcaattcctaggcgaggggaggctggaagacaccatcagacagacctcattgcgagagagagtggccggtagcgccggtatggcagccctgacacaggacatccgtgcagctttgagtagacagaagctggaccacgtttggacggacacccattacgttgggttgcagttccctgaccctgcacacccaaatacactgcactgggtagatgaagctggcaaggttggggagcagctgcccctggaggaccctgatgtctactgtccttattctgctatcggaaacgttacgggcgaactggtgtacgctcactacggtcgtcccgaggacctccaagatctacgtgctagaggggtggaccctgttgggcgtttgcttctggttagggttggcgtgatctctttcgcacagaaagtaacgaatgcccaggacttcggggctcagggtgtcctgatttatcccgaacccgctgatttctctcaggacccacctaagccgtcactgagctcccaacaggctgtgtatggccacgtccaccttggaacgggcgacccctacacacccggtttcccgtccttcaaccagacgcagtttcctccagtcgcctctagtggactcccgagcatccctgcccaacctatatctgccgatattgcgtcgcgcttacttcggaagttaaagggacccgtagccccacaggagtggcaggggagcttgttggggtccccgtaccacctgggcccaggacccaggcttagactggtcgtcaataatcacagaacctcaacaccaatcaataacatcttcggctgtatagagggcagatctgaacctgatcattatgtcgtcattggagcgcagagagacgcctggggcccaggcgctgccaaaagtgcagtaggaaccgccatcctgttggaactcgtcagaaccttcagctccatggtctccaatggatttcgcccaagacgcagtctcctgtttatcagctgggatggcggtgacttcggaagcgtgggttctaccgaatggttggaaggatacttgagtgtgttgcatttaaaggcagtcgtctatgtgtctttagacaacgccgtgttgggagatgacaaatttcatgccaaaacctctcctcttctaacttccctgatcgaatctgtgctcaaacaggtggacagcccgaatcactctggccaaaccctttatgagcaggtagtgtttaccaacccttcctgggacgccgaagttattaggccccttcccatggacagtagcgcctacagctttacggctttcgtcggggtccccgctgttgaattctcgtttatggaggacgaccaggcgtatcccttcctgcacacaaaggaggacacatacgaaaatctgcataaagtgctgcaaggtcggctacccgctgtcgcccaggccgtggcacagctggcaggccagttgctgatccgcctctctcacgacaggttgctgccccttgattttggacgctatggggatgtggtcctgcgccacattgggaatttgaatgaattctctggtgatctgaaagctaggggactcacactccagtgggtgtactctgccaggggcgactacatcagagcggcagaaaagttgcgtcaggaaatttactccagcgaagagcgcgatgaaaggctgacccgcatgtataacgtgcggattatgcgagtggagttctactttctgagccagtatgtgtcgccagccgatagtccttttaggcatatattcatggggcgaggtgaccataccttaggcgctctgctggaccacttgcgattactgcgctcaaactcttcaggcactcccggtgcaacgtcttccactgggtttcaggagagcaggttccgcagacagctggccctcctgacctggacactgcagggggctgcgaatgcgctatccggagatgtatggaacattgacaataacttctag

SEQ ID NO: 270451 - DNA, 2406 bp, Artificial Sequence
  derived and/or modified sequence
atggaacggctctggggtctatttcaacgggctcaacagctgtctcctcgcagtagccagacagtgtaccaaagggtggaagggcccaggaaagggcacctggaggaggaggaggaagatggagaggagggtgccgaaacattagcgcatttctgtcctatggagctccgcggtccagaaccgctcgggtccagacccaggcagcctaatctgatcccctgggcggcagctggcaggagagccgccccttatcttgtcttgacagctctgctcattttcactggggctttcctgcttggctacgtggcctttcggggctcatgccaggcctgcggggattccgtacttgtggtttcagaggacgttaactatgagccggacctggatttccatcagggaaggctctactggtctgatctgcaagccatgttccttcagtttctcggggaggggcgactagaggatactattcgccagacttctctgagagagagggtcgccggcagtgctggcatggctgccttgacccaggacatacgagccgcgctgtcacgacagaaactagatcacgtttggaccgacacccactacgtcgggttgcagtttcccgaccccgcacatcctaacacccttcattgggtggacgaggcgggaaaggttggggaacagctgcccctggaagatccagacgtctactgtccttactctgctatcgggaatgtgacgggtgaattggtgtacgcccactacggtcgaccagaggacctccaagacctgagagctcgaggcgtggatcccgtcgggcgattgctgcttgtgagggttggcgtgattagcttcgcccagaaggttaccaatgcccaggatttcggggcccagggtgtcctgatctatcccgaacccgccgatttcagtcaggatccccccaaacccagcctctcctcccagcaggcagtgtacggtcacgtacacctcggaacaggcgatccgtacactcctggcttcccctccttcaatcagacacaattcccccctgtggcgtcatctgggctgcctagtatccccgcacaaccgatctccgcagacattgcctctagactgctgagaaagctcaaaggccctgttgccccccaggaatggcagggtagcctgctgggctccccgtaccacctgggccctggtcccaggcttagactagtggtgaataaccatcgcactagcacccctatcaacaatatttttggctgtatagagggcaggtcagaacccgaccattatgttgtcataggggcccagagagacgcatggggccccggcgcagcgaagagtgccgtcggcaccgccatacttctggagctggtccgtacttttagctccatggtgagtaacggcttccggcccaggagatcactcctcttcatctcctgggacggcggcgattttggcagtgtggggagtactgagtggctcgaagggtacctatctgtactacatcttaaagctgtggtgtacgtgtctcttgataacgccgtcttgggcgatgacaagtttcacgccaaaacaagcccactccttacgagcttgattgagtctgttctcaagcaggtggactcacctaaccactctgggcagaccttatatgaacaggtggtattcacgaacccgtcatgggacgccgaggtgatccgccccttgcctatggattcttcagcctacagcttcacggcattcgtcggggttcccgctgtagagttttcatttatggaggacgaccaggcttatccttttctgcatacaaaggaggacacctatgagaacttgcacaaggtactgcaaggacggttacccgcagtggcacaggcggtggctcaattggccggacagctgctgatccgactgtcccacgatagactattgcctttggattttggcagatatggggatgtggtcctgcgccatattgggaacctcaatgaattttcaggggacctgaaggcccgggggctgaccctgcagtgggtctacagcgcgcgaggcgattacataagagcagctgaaaagctgcgccaggagatatactcgtcagaagagagagacgagcgacttaccaggatgtacaacgtgcggattatgcgggtggaattctacttcctttcccaatacgtgtctcccgctgactccccttttagacacatctttatgggaaggggcgatcacactctgggcgccctactggaccatctgcgccttctgagatcaaattcatctggcactcccggcgcaacctcaagcacggggttccaggagtcacgttttaggagacagctcgcgttacttacctggaccctgcaaggggctgcaaatgcccttagtggagacgtctggaacattgacaataatttctag

SEQ ID NO: 270452 - DNA, 2406 bp, Artificial Sequence
  derived and/or modified sequence
atggagcggctgtggggcctgttccagcgggcccagcagctgagcccacgatccagccagacagtgtaccaacgtgtggagggccccagaaaagggcatcttgaggaagaggaggaagacggagaagagggagccgagactctggcccacttttgtccaatggagttgcgcgggcccgaaccactgggatcacgacccagacagcccaatctgataccgtgggccgcagctggccgacgcgcagccccatacctggtcctgactgctctcctgatattcacgggcgcctttttgctgggctatgtggcttttcgtggatcttgccaggcatgcggcgactcggtattagtggtgagcgaagatgtgaactacgagcccgatctcgatttccatcagggtaggctgtattggagcgatctgcaagctatgtttttacagttccttggtgagggacggctggaggataccattcgccaaacctcactgagggagcgggtcgcaggatccgctggcatggctgccttgacacaggatatccgcgccgcactgtctcggcagaagctcgatcatgtttggacagatactcactacgtagggctgcagtttcccgatcccgcacaccccaatacccttcattgggtcgatgaggccgggaaggtgggagagcaacttcccctcgaggaccctgatgtgtattgtccctactccgccattggcaatgtcaccggagagctggtgtatgctcattatggcagacccgaagatctgcaggacctgcgagcacgcggggtcgaccctgtaggtaggttgctgctggtccgcgtcggcgtcatatctttcgctcagaaggttacaaatgcacaggacttcggggcacagggggtgcttatctacccagagcctgccgatttctctcaagacccgccaaaaccatccctgagttctcagcaggccgtgtatggtcatgtccacttaggcaccggtgatccatatacacccgggttcccaagctttaatcagactcagttccctccagtggcctcctccggtttgccctcgatcccggcccagccaatcagtgctgacattgcctctcgattgcttcgcaagctcaaagggccggtggccccacaggagtggcaaggatcactacttggaagtccataccacctgggtcccggtcccagattaagattggttgttaacaaccaccgtaccagtacccccattaacaatatttttggatgtattgagggacggtcagagcctgaccactatgtggtgatcggcgcccagcgagacgcttggggaccgggagccgccaaatccgccgtaggcactgcaatcctgcttgagttggtaagaacgttcagttccatggtgtcaaacgggttcaggcccagacggagtctgctgtttatttcatgggatgggggggactttggcagcgtcggttcaacggaatggctggaagggtatctttccgtgctacacctcaaagccgtggtgtatgtgtcactggacaatgccgtgctgggagacgataagttccacgctaagaccagtcctctgttaacatccctgattgagtccgtcttgaaacaggtggactccccgaaccactccgggcagaccttgtacgaacaggtggttttcaccaacccttcttgggatgccgaggtgattcggccactgccaatggattcttcggcctatagctttacagcgtttgtgggggtccctgccgtggagttttcgtttatggaggatgaccaggcataccccttcttgcataccaaggaggacacttacgagaatttgcacaaagtgcttcaggggcggttaccagccgtggcgcaggccgtcgcccagctggcaggtcaactgctgattcgactgtcgcacgataggttactgccactagattttgggagatatggcgacgtcgtcctccgacacattggtaacttaaacgagttctcgggggaccttaaggcaaggggtctgacactgcagtgggtgtactctgccaggggggactatatccgcgcagctgagaagctgaggcaggaaatttatagttccgaggagagggatgagaggctgacacggatgtataacgtgagaatcatgcgagtggagttttactttctgtctcagtatgtctctcctgctgactcgccctttaggcacatttttatgggccggggtgatcacaccttgggagccctcctcgatcacctgaggctgcttagaagcaatagctctggcactcccggtgctacatcatcgacaggctttcaagaaagccggtttaggagacaactggcattactcacctggacccttcagggagcggccaatgccttaagtggcgacgtgtggaacatagacaacaatttctag

SEQ ID NO: 270453 - DNA, 2406 bp, Artificial Sequence
  derived and/or modified sequence
atggagcggctttgggggctgttccaacgggcacagcagctctcacctagaagtagccagacagtgtaccagagggtggaagggccacggaagggccacctggaagaggaagaggaagacggtgaagagggcgctgaaacacttgcccacttctgtcccatggaactgcgcggacctgagccacttggatctagaccgaggcagccaaatctgatcccttgggccgcagccggacgcagggcagccccatacctcgtcctaacggcactactcatttttaccggggcttttctgctcggttatgtggccttccgcggatcttgccaggcctgcggcgatagtgtgcttgtagtgtctgaagatgtgaactacgaacctgatctggattttcaccaaggcagactttattggagtgacctgcaagctatgttcttgcagtttctcggcgaagggaggttggaggacaccatccggcagacctcgttgcgggaaagggttgcaggatctgccggtatggctgcgctgacacaggacatccgtgccgcactgtcaagacagaaactggatcatgtatggacagacacccactatgtgggtctgcagtttccggaccccgcacaccccaacacactacactgggtcgacgaggctggcaaggttggagaacagctcccgctggaggatccggatgtgtattgcccctactccgctatcggcaatgtcacaggagagctggtctatgcacattacggccgaccggaggacctgcaagatttgagagccagaggtgtggatcctgtgggccgtctgttactggtgcgcgtcggggtgatatccttcgcacagaaggtaacaaatgctcaggattttggcgctcagggagtgctgatctatcctgaaccagcagatttcagccaagatccaccaaagccatctctctcaagccaacaggctgtgtacggacatgtgcatctggggaccggcgacccttacaccccaggctttccaagcttcaaccaaacgcagtttccccctgtggcttccagcggcctgccttcaatccccgcacagcctatatccgcagacattgccagtcgcctccttcgcaaactgaagggaccagttgcgccacaggagtggcaggggagtctactgggctctccctaccacttggggccaggtccccgtcttaggctcgttgtcaataatcatcggacttctacccccattaataatatatttgggtgcatagagggtcgctctgagcctgatcattacgtggtgatcggtgcccagcgggacgcatggggtccaggggcagcaaaaagcgcagtcggcactgccatactccttgagcttgttaggactttcagttctatggtctcaaacggtttcagaccaagacgtagcctgttgttcatatcatgggatggcggtgactttggatccgtcgggtccaccgaatggctggagggatacttgtccgtgttacatttgaaagctgttgtctatgtgtcattggataatgccgttctgggcgatgacaaatttcacgctaaaacaagccctctactgaccagcctgatcgaatcagttctgaagcaggttgactccccaaaccattctgggcagaccctgtatgagcaagtcgtgttcacaaatccgtcttgggacgcagaggtaattcgcccactacccatggattctagtgcttactcatttacagcctttgttggtgtcccggctgtggagttcagcttcatggaagacgaccaggcatatccgttcctccatacaaaggaggatacttatgagaacctacacaaggttctgcagggacgtctgcctgccgttgcacaggccgttgctcagcttgccggacagctgctaattagactgagccatgatcgactgttgcccctagacttcgggcgttatggcgacgtagtactgagacacatcgggaacctgaacgaatttagtggcgatctgaaagctagaggactgactttacagtgggtctacagtgcccgtggagattatatcagggccgctgaaaagttacgccaggagatatacagttctgaagaaagagacgagaggctgactcgaatgtataatgtgaggattatgcgggtcgaattttacttcctgtcccagtatgtgtctcccgcagactcaccattccgacacattttcatgggtaggggcgaccatacgctcggcgctctcttagaccatttaagactacttaggagcaactcaagcggaaccccgggagcaacgagtagtaccggcttccaggagtctcgattccggagacagctggccttgctgacctggacactgcaaggggctgcaaatgccttaagcggcgatgtgtggaatatcgacaacaatttttag

SEQ ID NO: 270454 - DNA, 2888 bp, Artificial Sequence
  derived and/or modified sequence
cgctgggggacagcctgcaggcttcaggaggggacacaagcatggagcggctttggggtctattccagagagcgcaacaactgtccccaagatcctctcagaccgtctaccagcgtgtggaaggcccccggaaagggcacctggaggaggaagaggaagacggggaggagggggcggagacattggcccacttctgccccatggagctgaggggccctgagcccctgggctctagacccaggcagccaaacctcattccctgggcggcagcaggacggagggctgccccctacctggtcctgacggccctgctgatcttcactggggccttcctactgggctacgtcgccttccgagggtcctgccaggcgtgcggagactctgtgttggtggtcagtgaggatgtcaactatgagcctgacctggatttccaccagggcagactctactggagcgacctccaggccatgttcctgcagttcctgggggaggggcgcctggaggacaccatcaggcaaaccagccttcgggaacgggtggcaggctcggccgggatggccgctctgactcaggacattcgcgcggcgctctcccgccagaagctggaccacgtgtggaccgacacgcactacgtggggctgcaattcccggatccggctcaccccaacaccctgcactgggtcgatgaggccgggaaggtcggagagcagctgccgctggaggaccctgacgtctactgcccctacagcgccatcggcaacgtcacgggagagctggtgtacgcccactacgggcggcccgaagacctgcaggacctgcgggccaggggcgtggatccagtgggccgcctgctgctggtgcgcgtgggggtgatcagcttcgcccagaaggtgaccaatgctcaggacttcggggctcaaggagtgctcatatacccagagccagcggacttctcccaggacccacccaagccaagcctgtccagccagcaggcagtgtatggacatgtgcacctgggaactggagacccctacacacctggcttcccttccttcaatcaaacccagttccctccagttgcatcatcaggccttcccagcatcccagcccagcccatcagtgcagacattgcctcccgcctgctgaggaagctcaaaggccctgtggccccccaagaatggcaggggagcctcctaggctccccttatcacctgggccccgggccacgactgcggctagtggtcaacaatcacaggacctccacccccatcaacaacatcttcggctgcatcgaaggccgctcagagccagatcactacgttgtcatcggggcccagagggatgcatggggcccaggagcagctaaatccgctgtggggacggctatactcctggagctggtgcggaccttttcctccatggtgagcaacggcttccggccccgcagaagtctcctcttcatcagctgggacggtggtgactttggaagcgtgggctccacggagtggctagagggctacctcagcgtgctgcacctcaaagccgtagtgtacgtgagcctggacaacgcagtgctgggggatgacaagtttcatgccaagaccagcccccttctgacaagtctcattgagagtgtcctgaagcaggtggattctcccaaccacagtgggcagactctctatgaacaggtggtgttcaccaatcccagctgggatgctgaggtgatccggcccctacccatggacagcagtgcctattccttcacggcctttgtgggagtccctgccgtcgagttctcctttatggaggacgaccaggcctacccattcctgcacacaaaggaggacacttatgagaacctgcataaggtgctgcaaggccgcctgcccgccgtggcccaggccgtggcccagctcgcagggcagctcctcatccggctcagccacgatcgcctgctgcccctcgacttcggccgctacggggacgtcgtcctcaggcacatcgggaacctcaacgagttctctggggacctcaaggcccgcgggctgaccctgcagtgggtgtactcggcgcggggggactacatccgggcggcggaaaagctgcggcaggagatctacagctcggaggagagagacgagcgactgacacgcatgtacaacgtgcgcataatgcgggtggagttctacttcctttcccagtacgtgtcgccagccgactccccgttccgccacatcttcatgggccgtggagaccacacgctgggcgccctgctggaccacctgcggctgctgcgctccaacagctccgggacccccggggccacctcctccactggcttccaggagagccgtttccggcgtcagctagccctgctcacctggacgctgcaaggggcagccaatgcgcttagcggggatgtctggaacattgataacaacttctgaggccctggggatcctcacatccccgtcccccagtcaagagctcctctgctcctcgcttgaatgattcagggtcagggaggtggctcagagtccacctctcattgctgatcaatttctcattacccctacacatctctccacggagcccagaccccagcacagatatccacacaccccagccctgcagtgtagctgaccctaatgtgacggtcatactgtcggttaatcagagagtagcatcccttcaatcacagccccttcccctttctggggtcctccatacctagagaccactctgggaggtttgctaggccctgggacctggccagctctgttagtgggagagatcgctggcaccatagccttatggccaacaggtggtctgtggtgaaaggggcgtggagtttcaatatcaataaaccacctgatatcaataagcca

SEQ ID NO: 270455 - DNA, 3131 bp, Artificial Sequence
  derived and/or modified sequence
cacgcctgagcaccccaggacctgcgctcagggaggaggcaggcgtggggctgtggagagattggcaggggagagcacagccccttgtgctctggcctggacccgggggccacgtctggaaggctggactgaggccaggactgtgcccccacccttgggggtggtgaggagcagccttggttcaggctgcctgccaggactgataaggggccctcctagggctcccacaaacggtttatcggtttatcgctgggggacagcctgcaggcttcaggaggggacacaagcatggagcggctttggggtctattccagagagcgcaacaactgtccccaagatcctctcagaccgtctaccagcgtgtggaaggcccccggaaagggcacctggaggaggaagaggaagacggggaggagggggcggagacattggcccacttctgccccatggagctgaggggccctgagcccctgggctctagacccaggcagccaaacctcattccctgggcggcagcaggacggagggctgccccctacctggtcctgacggccctgctgatcttcactggggccttcctactgggctacgtcgccttccgagggtcctgccaggcgtgcggagactctgtgttggtggtcagtgaggatgtcaactatgagcctgacctggatttccaccagggcagactctactggagcgacctccaggccatgttcctgcagttcctgggggaggggcgcctggaggacaccatcaggcaaaccagccttcgggaacgggtggcaggctcggccgggatggccgctctgactcaggacattcgcgcggcgctctcccgccagaagctggaccacgtgtggaccgacacgcactacgtggggctgcaattcccggatccggctcaccccaacaccctgcactgggtcgatgaggccgggaaggtcggagagcagctgccgctggaggaccctgacgtctactgcccctacagcgccatcggcaacgtcacgggagagctggtgtacgcccactacgggcggcccgaagacctgcaggacctgcgggccaggggcgtggatccagtgggccgcctgctgctggtgcgcgtgggggtgatcagcttcgcccagaaggtgaccaatgctcaggacttcggggctcaaggagtgctcatatacccagagccagcggacttctcccaggacccacccaagccaagcctgtccagccagcaggcagtgtatggacatgtgcacctgggaactggagacccctacacacctggcttcccttccttcaatcaaacccagttccctccagttgcatcatcaggccttcccagcatcccagcccagcccatcagtgcagacattgcctcccgcctgctgaggaagctcaaaggccctgtggccccccaagaatggcaggggagcctcctaggctccccttatcacctgggccccgggccacgactgcggctagtggtcaacaatcacaggacctccacccccatcaacaacatcttcggctgcatcgaaggccgctcagagccagatcactacgttgtcatcggggcccagagggatgcatggggcccaggagcagctaaatccgctgtggggacggctatactcctggagctggtgcggaccttttcctccatggtgagcaacggcttccggccccgcagaagtctcctcttcatcagctgggacggtggtgactttggaagcgtgggctccacggagtggctagagggctacctcagcgtgctgcacctcaaagccgtagtgtacgtgagcctggacaacgcagtgctgggggatgacaagtttcatgccaagaccagcccccttctgacaagtctcattgagagtgtcctgaagcaggtggattctcccaaccacagtgggcagactctctatgaacaggtggtgttcaccaatcccagctgggatgctgaggtgatccggcccctacccatggacagcagtgcctattccttcacggcctttgtgggagtccctgccgtcgagttctcctttatggaggacgaccaggcctacccattcctgcacacaaaggaggacacttatgagaacctgcataaggtgctgcaaggccgcctgcccgccgtggcccaggccgtggcccagctcgcagggcagctcctcatccggctcagccacgatcgcctgctgcccctcgacttcggccgctacggggacgtcgtcctcaggcacatcgggaacctcaacgagttctctggggacctcaaggcccgcgggctgaccctgcagtgggtgtactcggcgcggggggactacatccgggcggcggaaaagctgcggcaggagatctacagctcggaggagagagacgagcgactgacacgcatgtacaacgtgcgcataatgcgggtggagttctacttcctttcccagtacgtgtcgccagccgactccccgttccgccacatcttcatgggccgtggagaccacacgctgggcgccctgctggaccacctgcggctgctgcgctccaacagctccgggacccccggggccacctcctccactggcttccaggagagccgtttccggcgtcagctagccctgctcacctggacgctgcaaggggcagccaatgcgcttagcggggatgtctggaacattgataacaacttctgaggccctggggatcctcacatccccgtcccccagtcaagagctcctctgctcctcgcttgaatgattcagggtcagggaggtggctcagagtccacctctcattgctgatcaatttctcattacccctacacatctctccacggagcccagaccccagcacagatatccacacaccccagccctgcagtgtagctgaccctaatgtgacggtcatactgtcggttaatcagagagtagcatcccttcaatcacagccccttcccctttctggggtcctccatacctagagaccactctgggaggtttgctaggccctgggacctggccagctctgttagtgggagagatcgctggcaccatagccttatggccaacaggtggtctgtggtgaaaggggcgtggagtttcaatatcaataaaccacctgatatcaataa

SEQ ID NO: 270456 - DNA, 2191 bp, Artificial Sequence
  derived and/or modified sequence
actacgggcggcccgaagacctgcaggacctgcgggccaggggcgtggatccagtgggccgcctgctgctggtgcgcgtgggggtgatcagcttcgcccagaaggtgaccaatgctcaggacttcggggctcaaggagtgctcatatacccagagccagcggacttctcccaggacccacccaagccaagcctgtccagccagcaggcagtgtatggacatgtgcacctgggaactggagacccctacacacctggcttcccttccttcaatcaaacccagttccctccagttgcatcatcaggccttcccagcatcccagcccagcccatcagtgcagacattgcctcccgcctgctgaggctggagtgcagtggtgcaatcttggctcactgcaacctccacctcccgggttcaagtgattcttctgcctcagactccagagtatctaggattacaggaagctcaaaggccctgtggccccccaagaatggcaggggagcctcctaggctccccttatcacctgggccccgggccacgactgcggctagtggtcaacaatcacaggacctccacccccatcaacaacatcttcggctgcatcgaaggccgctcagagccagatcactacgttgtcatcggggcccagagggatgcatggggcccaggagcagctaaatccgctgtggggacggctatactcctggagctggtgcggaccttttcctccatggtgagcaacggcttccggccccgcagaagtctcctcttcatcagctgggacggtggtgactttggaagcgtgggctccacggagtggctagagggctacctcagcgtgctgcacctcaaagccgtagtgtacgtgagcctggacaacgcagtgctgggggatgacaagtttcatgccaagaccagcccccttctgacaagtctcattgagagtgtcctgaagcaggtggattctcccaaccacagtgggcagactctctatgaacaggtggtgttcaccaatcccagctgggatgctgaggtgatccggcccctacccatggacagcagtgcctattccttcacggcctttgtgggagtccctgccgtcgagttctcctttatggaggacgaccaggcctacccattcctgcacacaaaggaggacacttatgagaacctgcataaggtgctgcaaggccgcctgcccgccgtggcccaggccgtggcccagctcgcagggcagctcctcatccggctcagccacgatcgcctgctgcccctcgacttcggccgctacggggacgtcgtcctcaggcacatcgggaacctcaacgagttctctggggacctcaaggcccgcgggctgaccctgcagtgggtgtactcggcgcggggggactacatccgggcggcggaaaagctgcggcaggagatctacagctcggaggagagagacgagcgactgacacgcatgtacaacgtgcgcataatgcgggtggagttctacttcctttcccagtacgtgtcgccagccgactccccgttccgccacatcttcatgggccgtggagaccacacgctgggcgccctgctggaccacctgcggctgctgcgctccaacagctccgggacccccggggccacctcctccactggcttccaggagagccgtttccggcgtcagctagccctgctcacctggacgctgcaaggggcagccaatgcgcttagcggggatgtctggaacattgataacaacttctgaggccctggggatcctcacatccccgtcccccagtcaagagctcctctgctcctcgcttgaatgattcagggtcagggaggtggctcagagtccacctctcattgctgatcaatttctcattacccctacacatctctccacggagcccagaccccagcacagatatccacacaccccagccctgcagtgtagctgaccctaatgtgacggtcatactgtcggttaatcagagagtagcatcccttcaatcacagccccttcccctttctggggtcctccatacctagagaccactctgggaggtttgctaggccctgggacctggccagctctgttagtgggagagatcgctggcaccatagccttatggccaacaggtggtctgtggtgaaaggggcgtggagtttcaatatcaataaaccacctgatatc

SEQ ID NO: 270457 - DNA, 1068 bp, Artificial Sequence
  derived and/or modified sequence
atggagagactgtggggcctgttccagagagcccagcagctgagccccagaagcagccagaccgtgtaccagagagtggagggccccagaaagggccacctggaggaggaggaggaggacggcgaggagggcgccgagaccctggcccacttctgccccatggagctgagaggccccgagcccctgggcagcagacccagacagcccaacctgatcccctgggccgccgccggcagaagagccgccccctacctggtgctgaccgccctgctgatcttcaccggcgccttcctgctgggctacgtggccttcagaggcagctgccaggcctgcggcgacagcgtgctggtggtgagcgaggacgtgaactacgagcccgacctggacttccaccagggcagactgtactggagcgacctgcaggccatgttcctgcagttcctgggcgagggcagactggaggacaccatcagacagaccagcctgagagagagagtggccggcagcgccggcatggccgccctgacccaggacatcagagccgccctgagcagacagaagctggaccacgtgtggaccgacacccactacgtgggcctgcagttccccgaccccgcccaccccaacaccctgcactgggtggacgaggccggcaaggtgggcgagcagctgcccctggaggaccccgacgtgtactgcccctacagcgccatcggcaacgtgaccggcgagctggtgtacgcccactacggcagacccgaggacctgcaggacctgagagccagaggcgtggaccccgtgggcagactgctgctggtgagagtgggcgtgatcagcttcgcccagaaggaggcccagagaccctgcggcccccccagaatggccggcgagccccccagactgcccctgagccccggccccagagccaccaccgccgccagcggccagcagagccaggacctgcacccccaccagcagcacctgagactgcacagaagacccctgagagccagaagcctgagatgccacagaggccccgagggctgcatgggccccagaagcagctag

SEQ ID NO: 270458 - DNA, 1068 bp, Artificial Sequence
  derived and/or modified sequence
atggaaaggctgtggggcctctttcaacgggcacagcagctttcaccccgtagcagccagacggtctatcagcgagtagaagggcctcgtaaggggcatctcgaggaggaagaagaagacggagaggaaggcgccgaaacgctcgctcacttttgtcctatggaattgaggggtccagagcccctcggctcccgaccacgtcagccaaatcttatcccttgggctgcagctggacggagggccgccccgtacttggtgctaacagcactcctgatttttacaggagctttcttattgggatatgtggccttccggggatcttgccaggcttgcggagattccgtgttggtcgtctcagaggatgtgaattatgaacccgacctcgactttcaccagggccgcctgtactggtctgacctgcaggccatgttcttacagttcctcggcgagggtaggctcgaggatacgatacggcagacttcactgcgggagagggttgcaggcagcgcaggcatggcagcgctaacccaggacatccgggcggccctcagtagacaaaagcttgatcacgtgtggacggatacgcactatgttggactgcagttccctgatcccgctcatcccaacactttgcactgggtagacgaggctgggaaagtaggcgagcagctgccactggaagatcccgacgtgtactgcccatactccgctataggcaatgtcactggagagctggtgtatgcccattatggaagaccagaggacctgcaggaccttcgggctcgtggagtggaccctgtgggcagattacttctagtcagagtgggcgttatctcttttgctcagaaggaagcacagagaccgtgcggaccacctaggatggcaggcgagccacccagactgcctctgagtccaggacctagggccacaacagcggcaagcggtcagcagagccaggacctgcacccccatcagcagcatctgcgactgcacaggagacccttaagggcccggtccctcagatgccatagaggccctgaaggttgtatgggaccaaggtcctcgtag

SEQ ID NO: 270459 - DNA, 1068 bp, Artificial Sequence
  derived and/or modified sequence
atggagcggctgtggggcctcttccagagggcccagcagctgagccccaggagcagccagacagtgtaccagagggtggagggccccaggaagggccacctggaggaggaggaggaggatggagaggagggcgctgagaccctggcccacttctgccccatggagctgcggggccctgagcccctgggcagccggccccggcagcccaacctgatcccctgggccgctgctggaagaagagctgccccctacctggtgctgacagccctgctgatcttcaccggggccttcctgctgggctacgtggccttccggggcagctgccaggcctgtggggacagcgtgctggtggtgtctgaagatgtgaactatgagccagacctggacttccaccagggccgcctgtactggagcgacctgcaggccatgttcctgcagttcctgggggagggccgcctggaggacaccatccggcagaccagcctgcgggagcgggtggccggcagcgctggcatggccgccctgacccaggacatccgggccgccctgagccggcagaagctggaccacgtgtggacagacacccactacgtgggcctgcagttcccagaccctgcccaccccaacaccctgcactgggtggatgaagctgggaaggtgggggagcagctgcccctggaggaccctgatgtgtactgcccctacagcgccatcggaaatgtgactggagagctggtgtatgcccactacggccggcctgaggacctgcaggacctgcgggcccggggcgtggaccctgtgggccgcctgctgctggtgcgggtgggcgtcatcagctttgcccagaaggaggcccagaggccctgtggcccccccaggatggccggggagcccccccggctgcccctgagccctggcccccgggccaccacagctgccagcggccagcagagccaggacctgcacccccaccagcagcacctgcggctgcaccggcggcccctgcgggcccggagcctgcgctgccaccggggccctgagggctgcatgggccccaggagcagctag

SEQ ID NO: 270460 - DNA, 1068 bp, Artificial Sequence
  derived and/or modified sequence
atggagcggctgtggggcctgttccagcgggcccagcagctgagcccccgaagttctcagaccgtgtatcagagagttgaaggcccgcgaaagggacatctggaagaggaggaggaggatggggaagagggagccgagactctggcacacttctgtcctatggagctccgcgggccagagccactgggtagcaggcctagacaacccaatttgataccatgggctgccgctggtaggagagccgctccctacttggtgctaacagcacttctgatatttaccggagccttcttattggggtatgtcgctttccgagggagttgtcaggcctgtggagattccgttctggtcgttagcgaagatgtaaattatgaaccagacctggacttccatcaggggcggttgtattggtcggatctgcaggctatgttcctgcagtttcttggtgaggggcggctggaggataccatcagacagacgagcctccgggaaagagtcgcaggttccgcaggaatggcagcactgacccaggatatccgggctgcgctatccaggcagaagctggatcatgtctggaccgatactcactatgtagggctacagttccccgacccagcgcatcccaacactctccactgggtagatgaggctggcaaggtgggcgaacaactgccattggaggatccagacgtctactgcccttatagcgctataggaaacgtgacgggggagctggtgtatgcgcattacggcaggcccgaagacctccaggaccttcgcgctcggggggtggaccctgtcgggagattgctgctggtgcgagttggcgtcatttcgtttgcccagaaagaggctcaacgaccttgtggccctccccgaatggcaggtgagcccccaagattacctctcagcccaggacctagagctacaaccgccgcgtcggggcaacagagccaggatttacacccccatcagcagcatttgcggctgcacagaaggcccctgcgagcaaggagtctgcgatgccacagaggccctgagggttgcatgggcccaaggtcttcatag

SEQ ID NO: 270461 - DNA, 1068 bp, Artificial Sequence
  derived and/or modified sequence
atggaacgtctgtggggtctgttccagcgggcacagcagctttctcctaggagcagccagactgtctatcaacgagtggagggaccgcgaaagggtcatctggaagaggaggaagaggacggtgaagagggagccgagacactggctcacttctgcccaatggagctgaggggaccagaaccactgggaagtaggccccgacagccgaatctcatcccgtgggctgccgctggcaggcgcgcagccccatacttagtacttaccgcccttctcatcttcaccggggcattcttgctcggttatgtggccttccggggaagctgccaggcttgcggggatagcgtcctggtggtctccgaagatgttaattacgaacccgacttagattttcaccaaggtagattgtattggtctgatctgcaggccatgttcctccagtttctgggggagggacggctggaagataccattcgacagacttcgctgagggagcgcgttgctggttccgcaggcatggccgctctgactcaagatatcagggcggcactatcccgccagaagctcgaccatgtgtggaccgatacgcactacgtcggtcttcagtttccagatccggcacaccccaacaccctacattgggtggacgaggccggaaaggtgggggaacagctgccccttgaagacccagatgtatactgtccgtactctgcgattggtaacgtcaccggcgagctcgtttatgcccattatgggaggcccgaggacctgcaggacttacgggctcggggagtggacccagtgggcaggctgttactggttagagtgggagtgataagtttcgctcagaaggaggcacagaggccgtgcggaccgcctcgaatggccggagagcctccccgactccccttgtctcccggacctcgcgctaccaccgccgcttccggccagcagtcccaggatctgcaccctcatcagcagcatctgaggctgcatcgacggccactgcgtgccagatctctgcgctgccacagaggtccagagggctgcatgggtccaagatcctcgtag

SEQ ID NO: 270462 - DNA, 378 bp, Artificial Sequence
  derived and/or modified sequence
atgatgaccgccgagagcagagaggccaccggcctgagcccccaggccgcccaggagaaggacggcatcgtgatcgtgaaggtggaggaggaggacgaggaggaccacatgtggggccaggacagcaccctgcaggacacccccccccccgaccccgagatcttcagacagagattcagaagattctgctaccagaacaccttcggccccagagaggccctgagcagactgaaggagctgtgccaccagtggctgagacccgagatcaacaccaaggagcagatcctggagctgctggtgctggagcagttcctgagcatcctgcccaaggagctgcaggtgtggctgcaggagtacagacccgacagcggcgagtag

SEQ ID NO: 270463 - DNA, 378 bp, Artificial Sequence
  derived and/or modified sequence
atgatgacagcagaaagtagggaagcgactggactgagcccgcaggcagcccaagaaaaggacgggatcgtcatcgtcaaggtggaggaggaggatgaagaggaccatatgtggggccaggattccactctgcaggacacacctcctccggatcctgagattttcaggcaacgattcaggcgcttctgctaccagaacacatttggccctcgtgaggccctctctaggcttaaggagttatgtcaccagtggctgagacctgagataaacactaaagaacagatactcgaattactggtgctcgagcaattcctcagcattctgcccaaggaactgcaggtctggctgcaagagtaccgccctgattcaggcgagtag

SEQ ID NO: 270464 - DNA, 378 bp, Artificial Sequence
  derived and/or modified sequence
atgatgacagctgagagccgggaggccaccggcctgagcccccaggccgcccaggagaaggatggcatcgtgattgtgaaggtggaggaggaggatgaggaggaccacatgtggggccaggacagcaccctgcaggacaccccacctccagaccctgagatcttccggcagcgcttccgccgcttctgctaccagaacaccttcggcccccgggaggccctgagccggctgaaggagctgtgccaccagtggctgcggcctgagatcaacaccaaggagcagatcctggagctgctggtgctggagcagttcctgagcatcctgcccaaggagctgcaggtgtggctgcaggagtacagaccagattctggagagtag

SEQ ID NO: 270465 - DNA, 378 bp, Artificial Sequence
  derived and/or modified sequence
atgatgaccgccgagagccgggaggccaccggcctgagcccccaggctgctcaggagaaagatggaatagtcatagtgaaggtggaagaagaggatgaggaggaccacatgtggggacaagattcaacccttcaggatactccacctcctgatcccgaaattttccgccagaggtttcggagattctgttatcaaaatacgtttggacctcgggaggctttgtctcgactgaaagaactgtgtcatcaatggctgcggcccgagattaatactaaggaacagattctggaattactcgtcttagaacagtttctcagcatcctgcctaaggagctgcaggtgtggttacaggagtacaggccagattcgggagagtag

SEQ ID NO: 270466 - DNA, 378 bp, Artificial Sequence
  derived and/or modified sequence
atgatgactgctgaaagcagggaagcaacaggccttagtcctcaagccgcacaagagaaagatgggatcgtgattgtgaaggtggaggaggaagacgaagaagatcacatgtgggggcaagactccacactgcaggacacccccccaccagatcctgaaatttttaggcaacggtttcgcaggttctgttaccagaacacctttggcccaagggaggccctgagtcggctgaaggaattgtgtcaccaatggctgcgaccagaaataaatactaaggaacagatcctggaactgttggtactggagcaatttctgtcgatcttgcccaaagaactacaagtgtggctccaggagtacaggccagattctggggagtag

SEQ ID NO: 270467 - DNA, 573 bp, Artificial Sequence
  derived and/or modified sequence
attgtaaccacatcagcaaagcactgttagtatatatgctgaacaaatgtggagaaatcgctgttttacataggaaaccatggtgatttgccccagaatgtgtatccaggaatagtaaagaaacacatcataaaacctcccaggacataaaggtgagcacagaccctgtttggatcaagtcagttcctggagcctgaatgatgactgctgaatcacgggaagccacgggtctgtccccacaggctgcacaggagaaggatggtatcgtaatagtgaaggtggaagaggaagatgaggaagaccacatgtgggggcaggattccaccctacaggacacgcctcctccagacccagagatattccgccaacgcttcaggcgcttctgttaccagaacacttttgggccccgagaggctctcagtcggctgaaggaactttgtcatcagtggctgcggccagaaataaacaccaaggaacagatcctggagcttctggtgctagagcagtttctttccatcctgcccaaggagctccaggtctggctgcaggaataccgccccgatagtggagagg

SEQ ID NO: 270468 - protein, 1103 aa, Artificial Sequence
  derived and/or modified sequence
MAAGCLLALTLTLFQSLLIGPSSEEPFPSAVTIKSWVDKMQEDLVTLAKTASGVNQLVDIYEKYQDLYTVEPNNARQLVEIAARDIEKLLSNRSKALVRLALEAEKVQAAHQWREDFASNEVVYYNAKDDLDPEKNDSEPGSQRIKPVFIEDANFGRQISYQHAAVHIPTDIYEGSTIVLNELNWTSALDEVFKKNREEDPSLLWQVFGSATGLARYYPASPWVDNSRTPNKIDLYDVRRRPWYIQGAASPKDMLILVDVSGSVSGLTLKLIRTSVSEMLETLSDDDFVNVASFNSNAQDVSCFQHLVQANVRNKKVLKDAVNNITAKGITDYKKGFSFAFEQLLNYNVSRANCNKIIMLFTDGGEERAQEIFNKYNKDKKVRVFTFSVGQHNYDRGPIQWMACENKGYYYEIPSIGAIRINTQEYLDVLGRPMVLAGDKAKQVQWTNVYLDALELGLVITGTLPVFNITGQFENKTNLKNQLILGVMGVDVSLEDIKRLTPRFTLCPNGYYFAIDPNGYVLLHPNLQPKPIGVGIPTINLRKRRPNIQNPKSQEPVTLDFLDAELENDIKVEIRNKMIDGESGEKTFRTLVKSQDERYIDKGNRTYTWTPVNGTDYSLALVLPTYSFYYIKAKLEETITQARYSETLKPDNFEESGYTFIAPRDYCNDLKISDNNTEFLLNFNEFIDRKTPNNPSCNADLINRVLLDAGFTNELVQNYWSKQKNIKGVKARFVVTDGGITRVYPKEAGENWQENPETYEDSFYKRSLDNDNYVFTAPYFNKSGPGAYESGIMVSKAVEIYIQGKLLKPAVVGIKIDVNSWIENFTKTSIRDPCAGPVCDCKRNSDVMDCVILDDGGFLLMANHDDYTNQIGRFFGEIDPSLMRHLVNISVYAFNKSYDYQSVCEPGAAPKQGAGHRSAYVPSVADILQIGWWATAAAWSILQQFLLSLTFPRLLEAVEMEDDDFTASLSKQSCITEQTQYFFDNDSKSFSGVLDCGNCSRIFHGEKLMNTNLIFIMVESKGTCPCDTRLLIQAEQTSDGPNPCDMVKQPRYRKGPDVCFDNNVLEDYTDCGGVSGLNPSLWYIIGIQFLLLWLVSGSTHRLL

SEQ ID NO: 270469 - DNA, 3312 bp, Artificial Sequence
  derived and/or modified sequence
atggccgccggctgcctgctggccctgaccctgaccctgttccagagcctgctgatcggccccagcagcgaggagcccttccccagcgccgtgaccatcaagagctgggtggacaagatgcaggaggacctggtgaccctggccaagaccgccagcggcgtgaaccagctggtggacatctacgagaagtaccaggacctgtacaccgtggagcccaacaacgccagacagctggtggagatcgccgccagagacatcgagaagctgctgagcaacagaagcaaggccctggtgagactggccctggaggccgagaaggtgcaggccgcccaccagtggagagaggacttcgccagcaacgaggtggtgtactacaacgccaaggacgacctggaccccgagaagaacgacagcgagcccggcagccagagaatcaagcccgtgttcatcgaggacgccaacttcggcagacagatcagctaccagcacgccgccgtgcacatccccaccgacatctacgagggcagcaccatcgtgctgaacgagctgaactggaccagcgccctggacgaggtgttcaagaagaacagagaggaggaccccagcctgctgtggcaggtgttcggcagcgccaccggcctggccagatactaccccgccagcccctgggtggacaacagcagaacccccaacaagatcgacctgtacgacgtgagaagaagaccctggtacatccagggcgccgccagccccaaggacatgctgatcctggtggacgtgagcggcagcgtgagcggcctgaccctgaagctgatcagaaccagcgtgagcgagatgctggagaccctgagcgacgacgacttcgtgaacgtggccagcttcaacagcaacgcccaggacgtgagctgcttccagcacctggtgcaggccaacgtgagaaacaagaaggtgctgaaggacgccgtgaacaacatcaccgccaagggcatcaccgactacaagaagggcttcagcttcgccttcgagcagctgctgaactacaacgtgagcagagccaactgcaacaagatcatcatgctgttcaccgacggcggcgaggagagagcccaggagatcttcaacaagtacaacaaggacaagaaggtgagagtgttcaccttcagcgtgggccagcacaactacgacagaggccccatccagtggatggcctgcgagaacaagggctactactacgagatccccagcatcggcgccatcagaatcaacacccaggagtacctggacgtgctgggcagacccatggtgctggccggcgacaaggccaagcaggtgcagtggaccaacgtgtacctggacgccctggagctgggcctggtgatcaccggcaccctgcccgtgttcaacatcaccggccagttcgagaacaagaccaacctgaagaaccagctgatcctgggcgtgatgggcgtggacgtgagcctggaggacatcaagagactgacccccagattcaccctgtgccccaacggctactacttcgccatcgaccccaacggctacgtgctgctgcaccccaacctgcagcccaagcccatcggcgtgggcatccccaccatcaacctgagaaagagaagacccaacatccagaaccccaagagccaggagcccgtgaccctggacttcctggacgccgagctggagaacgacatcaaggtggagatcagaaacaagatgatcgacggcgagagcggcgagaagaccttcagaaccctggtgaagagccaggacgagagatacatcgacaagggcaacagaacctacacctggacccccgtgaacggcaccgactacagcctggccctggtgctgcccacctacagcttctactacatcaaggccaagctggaggagaccatcacccaggccagatacagcgagaccctgaagcccgacaacttcgaggagagcggctacaccttcatcgcccccagagactactgcaacgacctgaagatcagcgacaacaacaccgagttcctgctgaacttcaacgagttcatcgacagaaagacccccaacaaccccagctgcaacgccgacctgatcaacagagtgctgctggacgccggcttcaccaacgagctggtgcagaactactggagcaagcagaagaacatcaagggcgtgaaggccagattcgtggtgaccgacggcggcatcaccagagtgtaccccaaggaggccggcgagaactggcaggagaaccccgagacctacgaggacagcttctacaagagaagcctggacaacgacaactacgtgttcaccgccccctacttcaacaagagcggccccggcgcctacgagagcggcatcatggtgagcaaggccgtggagatctacatccagggcaagctgctgaagcccgccgtggtgggcatcaagatcgacgtgaacagctggatcgagaacttcaccaagaccagcatcagagacccctgcgccggccccgtgtgcgactgcaagagaaacagcgacgtgatggactgcgtgatcctggacgacggcggcttcctgctgatggccaaccacgacgactacaccaaccagatcggcagattcttcggcgagatcgaccccagcctgatgagacacctggtgaacatcagcgtgtacgccttcaacaagagctacgactaccagagcgtgtgcgagcccggcgccgcccccaagcagggcgccggccacagaagcgcctacgtgcccagcgtggccgacatcctgcagatcggctggtgggccaccgccgccgcctggagcatcctgcagcagttcctgctgagcctgaccttccccagactgctggaggccgtggagatggaggacgacgacttcaccgccagcctgagcaagcagagctgcatcaccgagcagacccagtacttcttcgacaacgacagcaagagcttcagcggcgtgctggactgcggcaactgcagcagaatcttccacggcgagaagctgatgaacaccaacctgatcttcatcatggtggagagcaagggcacctgcccctgcgacaccagactgctgatccaggccgagcagaccagcgacggccccaacccctgcgacatggtgaagcagcccagatacagaaagggccccgacgtgtgcttcgacaacaacgtgctggaggactacaccgactgcggcggcgtgagcggcctgaaccccagcctgtggtacatcatcggcatccagttcctgctgctgtggctggtgagcggcagcacccacagactgctgtag

SEQ ID NO: 270470 - DNA, 3312 bp, Artificial Sequence
  derived and/or modified sequence
atggcagctgggtgcttgctggccctgacgttaactctgtttcaaagcctcctgattggacccagttcggaggaacctttcccatccgcagtgactatcaagagttgggtggacaaaatgcaggaggacttagtgaccctggccaaaacagcaagcggggtgaaccaacttgtggacatctacgaaaagtatcaggacctgtatacggttgagcctaataatgcgcgccagctcgttgaaatcgccgccagggatattgaaaaattgttgagcaatagatccaaagccctagtcaggttagctttggaagctgagaaggtccaagctgcccaccagtggagggaggactttgccagtaacgaagtggtatactacaacgcgaaggacgatctggacccggagaagaacgattcggagccaggatctcaacggatcaagccagtcttcattgaagacgcgaactttggtagacaaatttcatatcagcatgccgccgtgcatatacctacagatatttacgaagggagcactatcgttctcaatgaactcaattggaccagcgctcttgacgaggtgtttaagaagaaccgagaggaggacccttcgctcctatggcaggttttcggctccgccactgggctggccagatattacccggcaagcccatgggtcgacaactccagaaccccgaacaagatcgacttatacgacgtccggcgtcgaccatggtatatacaaggggcagcaagccctaaggacatgctgattctggtcgacgtgagcggcagtgtaagcggactcactctcaaattaatccgcacttccgtgtcagaaatgctggagacactatcagacgacgatttcgtgaacgtggctagctttaactccaacgcgcaggacgtatcgtgctttcagcatctggtccaggccaacgtccgaaataagaaggtgctgaaagacgctgtcaacaatattacagccaagggcatcacagactataagaaaggctttagctttgcttttgagcaacttctgaactacaatgtaagccgagccaattgtaacaaaattattatgctgtttaccgatgggggggaagaacgcgcccaggaaatttttaacaagtataacaaagataagaaggtgcgcgtctttaccttcagcgtcggccagcacaattacgatcggggacccatccaatggatggcttgcgagaataaagggtattattatgagattccctcaattggtgcaatcaggataaacactcaggaatacctagatgttcttggacgtcctatggtgctggccggcgacaaagccaagcaagtgcaatggactaacgtgtacctggacgcactggagcttggtctggtaataactgggaccctgccagtatttaacatcacagggcagtttgagaacaagacaaatctcaagaatcagctaatcctgggcgtgatgggcgttgacgtaagtttggaggatataaaacgactcacgcccaggttcacgttgtgccctaatggatactattttgctattgacccgaacggatatgttttgctccatccgaacctacagccaaaacccatcggagtggggatcccgactattaatttacgaaaaagaaggcccaatatacagaatcccaaatctcaagagcccgtcacactcgatttcttagacgctgagttagaaaatgacatcaaggtcgaaatcagaaataaaatgattgatggagaatcgggggaaaaaacgtttcggacactggtaaagtcacaggacgagcgatacattgataaggggaaccgtacttacacttggacgcccgttaacggcaccgactatagtttggctttggtgctgccaacatatagtttttactacatcaaagccaaactggaggagactatcacacaggcaagatattcagaaactctcaagccagataatttcgaagaatctgggtacacctttattgccccccgtgactactgtaacgacttgaagatcagcgacaacaatacagagtttttactcaacttcaacgagttcatagatcgcaagacacctaataaccccagttgtaatgcggacctgatcaatcgtgttctcctggacgccggcttcaccaacgagcttgttcagaattattggtcaaagcagaaaaacatcaaaggcgtaaaagcgcggtttgtggttacagatggcggcataacccgggtttatccaaaggaagccggagaaaattggcaggaaaatcccgagacatacgaggacagcttctataagcggtctctcgacaacgacaactatgtttttaccgctccatacttcaacaagtcaggccctggtgcatatgagagcggcattatggtgtccaaggctgtggagatctacatccaggggaaacttctcaagccagccgtagtgggaatcaagattgatgtcaatagctggatcgaaaactttaccaagacaagtatcagagacccatgcgccggacctgtgtgtgattgtaagcgcaactctgacgtaatggattgcgtgattcttgacgacggggggttcctacttatggcgaatcacgacgactacacgaatcagattggccggttcttcggtgaaatcgacccctcactgatgaggcatctggtgaatatctctgtttatgcctttaataagtcctatgactaccagagtgtgtgtgagccaggtgccgccccaaaacaaggggccggccacaggagcgcttacgtgcctagcgtagctgacatcctccagattggatggtgggctacagcagccgcctggtctatattgcaacaattccttctgtcacttaccttcccacgactgttagaagccgttgagatggaagacgatgacttcaccgctagcttgtcaaagcagtcttgtattaccgagcagacccaatatttcttcgataatgatagtaagtccttcagtggggtgctggactgtggtaattgttctaggattttccatggcgaaaaactcatgaacacaaatctgattttcattatggtggagtccaagggcacctgcccatgtgatacccgattactgatccaggctgagcaaacgtccgatggaccaaacccttgtgatatggtgaagcaaccacgctacaggaagggccctgatgtttgcttcgacaataatgttctcgaagactacacagattgcggtggtgtgagcgggttgaatccgagtttgtggtacattatcggcatccagttcctgctgctgtggttagtgtctgggagcacccatcgccttttgtag

SEQ ID NO: 270471 - DNA, 3312 bp, Artificial Sequence
  derived and/or modified sequence
atggctgctggctgcctgctggccctgaccctgaccctcttccagagcctgctgattggccccagcagcgaggagcccttccccagcgctgtgaccatcaagtcctgggtggacaagatgcaggaggacctggtgaccctggccaagacagccagcggcgtgaaccagctggtggacatctatgagaagtaccaggacctgtacacagtggagcccaacaatgcccggcagctggtggagattgctgcccgggacatcgagaagctgctgagcaacagaagcaaggccctggtgcggctggccctggaggccgagaaggtgcaggccgcccaccagtggagagaagattttgccagcaatgaggtggtgtactacaatgccaaggatgacctggaccctgagaagaatgacagcgagcccggcagccagaggatcaagcctgtgttcattgaagatgccaactttggccggcagatctcctaccagcacgccgctgtgcacatccccacagacatctatgagggcagcaccatcgtgctgaatgagctgaactggaccagcgccctggatgaggtgttcaagaagaaccgggaggaggaccccagcctgctgtggcaggtgtttggcagcgccaccggcctggcccgctactacccagccagcccctgggtggacaacagcaggacccccaacaagattgacctgtatgatgtgagaagaagaccctggtacatccagggcgccgccagccccaaggacatgctgatcctggtggatgtgtctggctctgtgtctggcctgaccctgaagctgatccgcacctctgtgtctgagatgctggagaccctgagtgatgatgactttgtgaatgtggccagcttcaacagcaatgcccaggatgtgtcctgcttccagcacctggtgcaggccaacgtgaggaacaagaaggtgctgaaggatgctgtgaacaacatcacagccaagggcatcacagactacaagaagggcttctcctttgcctttgagcagctgctgaactacaacgtgtcccgggccaactgcaacaagatcatcatgctgttcacagatggaggagaggagcgggcccaggagatcttcaacaagtacaacaaggacaagaaggtgcgggtcttcaccttctctgtgggccagcacaactatgaccggggccccatccagtggatggcctgtgaaaataaaggctactactatgagatccccagcatcggggccatccgcatcaacacccaggagtacctggatgtgctgggccggcccatggtgctggccggggacaaggccaagcaggtgcagtggaccaacgtgtacctggatgccctggagctgggcctggtgatcaccggcaccctgcctgtgttcaacatcaccggccagtttgagaacaagaccaacctgaagaaccagctgatcctgggcgtgatgggcgtggatgtgtccctggaggacatcaagaggctgaccccccgcttcaccctgtgccccaacggctactactttgccatcgaccccaacggctacgtgctgctgcaccccaacctgcagcccaagcccatcggcgtgggcatccccaccatcaacctgaggaagaggcggcccaacatccagaaccccaagagccaggagcctgtgaccctggacttcctggatgctgagctggagaatgacatcaaggtggagatccggaacaagatgattgatggagagagcggggagaagaccttccgcaccctggtgaagagccaggatgagcgctacatcgacaagggcaacagaacctacacctggacccctgtgaatggaacagactacagcctggccctggtgctgcccacctacagcttctactacatcaaggccaagctggaggagaccatcacccaggcccgctacagcgagaccctgaagccagacaactttgaggagagcggctacaccttcatcgccccccgggactactgcaatgacctgaagatcagtgacaacaacacagagttcctgctgaacttcaatgagttcatcgacaggaagacccccaacaaccccagctgcaatgctgacctgatcaacagagtgctgctggatgctggcttcaccaatgagctggtgcagaactactggagcaagcagaagaacatcaagggcgtgaaggccaggtttgtggtgacagatggcggcatcaccagggtgtaccccaaggaggccggggagaactggcaggagaaccctgagacctatgaggacagcttctacaagaggagcctggacaatgacaactacgtgttcaccgccccctacttcaacaagagcggccctggggcctatgagagcggcatcatggtgtccaaggctgtggagatctacatccagggcaagctgctgaagccagctgtggtgggcatcaagattgatgtgaacagctggattgagaacttcaccaagaccagcatccgggacccctgtgccggccctgtgtgtgactgcaagaggaacagtgatgtgatggactgtgtgatcctggatgatggcggcttcctgctgatggccaaccatgatgactacaccaaccagatcggccgcttctttggagaaattgaccccagcctgatgaggcacctggtgaacatctctgtgtatgccttcaacaagagctatgactaccagagcgtgtgtgagcccggggccgcccccaagcagggcgccggccacaggtctgcctacgtgcccagcgtggccgacatcctgcagatcggctggtgggccacagctgctgcctggagcatcctgcagcagttcctgctgagcctgaccttcccccggctgctggaggccgtggagatggaggatgatgacttcaccgccagcctgagcaagcagagctgcatcacagagcagacccagtacttctttgacaatgacagcaagagcttctctggagtgctggactgtggcaactgcagccgcatcttccacggggagaagctgatgaacaccaacctgatcttcatcatggtggagagcaagggcacctgcccctgtgacacccggctgctgatccaggccgagcagaccagtgatggccccaacccctgtgacatggtgaagcagccccgctacaggaagggcccagatgtgtgctttgacaacaacgtgctggaggactacacagactgtggcggcgtgtctggcctgaaccccagcctgtggtacatcatcggcatccagttcctgctgctgtggctggtgtctggcagcacccaccggctgctgtag

SEQ ID NO: 270472 - DNA, 3312 bp, Artificial Sequence
  derived and/or modified sequence
atggccgccggctgcctgctggccctgaccctgaccctgttccagtccctgcttataggtccgagctcggaggagccattcccttcggccgtcacaatcaaatcttgggtggataagatgcaagaggatttggttactctggcaaaaactgcttccggcgttaatcaacttgtagacatttatgaaaaataccaagacctgtatacagtcgaacccaataacgccaggcagttggtggagatcgcggcgcgggacatcgaaaaactactttcaaataggagcaaagctcttgtgcggctggcactcgaggccgaaaaagttcaagctgctcaccaatggagggaagactttgcctccaacgaggtggtttactacaacgcaaaggacgacctggaccccgagaaaaatgattccgagcctgggagccaaagaataaagcccgtgttcattgaagacgcaaatttcggccggcaaatttcgtatcagcatgctgccgtgcatatcccaacggatatttatgaaggaagcaccattgttttaaatgagttgaactggacctccgccctggacgaagtattcaagaaaaaccgcgaagaagatccatcactgctatggcaagtatttgggtccgctaccgggttggcccgctattatccggccagcccttgggtcgacaattcccggactcctaataaaatcgatctatacgacgtacggcgacgcccatggtacatccaaggagctgcctccccaaaggatatgcttattctggtcgacgtttcaggatccgtctccggactcaccttgaaattgatcaggacttcggtttcagaaatgctggaaactctgtctgatgatgactttgttaacgttgcatcctttaacagtaatgcacaggacgtgtcttgtttccaacacctcgtccaggccaatgtacgcaataaaaaggtgctgaaagatgcagttaacaatatcacagccaaaggcatcaccgactacaaaaagggattttcatttgcctttgagcaactcctgaattacaatgtctcccgtgctaactgcaacaagatcattatgttgttcactgacggcggcgaagagcgagctcaagaaattttcaataaatacaataaagataagaaggtgcgagtgttcactttctccgtgggccaacataactacgaccggggacctattcagtggatggcctgcgagaataaggggtattattatgaaattccttctattggcgctattcgaatcaacacccaagaatatcttgatgtgctggggagaccaatggtcctggcaggggacaaggcaaaacaggtccagtggacaaacgtttatttggacgcgctggagcttggtctggtcatcaccgggaccctcccagtctttaatattaccggacagtttgaaaataagaccaatttaaagaatcagctgatcctgggggtcatgggggtcgacgtatcccttgaagacattaagcgacttactccaagatttacgctgtgtccaaacgggtactactttgcaattgacccgaatgggtatgtcttactgcaccctaatctgcagccaaagccaattggagtggggattccaaccattaacctccgcaaaagacgaccaaacatacagaatcctaaaagtcaagaaccagtcaccttggatttcctggacgccgaactggagaacgatatcaaggtcgagatcagaaacaaaatgatcgacggcgaatctggtgaaaagacattccgcacactggttaagtcccaggatgagcgatacatcgacaagggcaatagaacttatacgtggacgcccgtgaacggtactgactacagcctggccctggttctgccgacgtatagcttctactacattaaggcaaagttggaggagacaattacgcaggccagatatagcgagacactcaagcccgataatttcgaagaatccgggtacacctttatcgcgcctcgggactattgtaacgatctgaaaatctcagataataacacggagttcctgcttaacttcaacgagttcattgacaggaagaccccaaacaacccttcctgtaatgcagacctcattaatcgggttcttttagacgccggttttaccaatgagctggtccagaattactggagtaagcagaaaaatatcaagggagtgaaagcacgctttgtcgtcaccgacggtgggatcacaagggtataccccaaagaagcaggggaaaactggcaggagaaccctgaaacttatgaagattcattttacaagagaagtcttgacaacgataattacgtgttcaccgccccctactttaacaaatccggaccaggagcgtatgagtccggcatcatggtgtcgaaggccgtggagatttacatccagggcaagctcctcaaacccgccgtcgtgggaatcaaaattgacgtcaattcctggattgaaaactttacaaaaacatctatccgcgatccctgcgcagggcccgtgtgtgattgtaagcgaaacagtgatgttatggactgtgtgatcctggacgatggaggattccttttaatggccaatcacgacgactacaccaaccagatcggaagattctttggagaaatcgacccatcactgatgaggcatttggtaaacatctccgtgtatgctttcaataagtcctacgattaccagagcgtatgtgagcccggcgctgctccgaagcagggagccggtcatagaagcgcttacgtgccatccgtggcagatatccttcagatcggatggtgggctacagctgctgcatggagcatcttgcaacagttccttctgtctctcaccttcccgaggttgctggaggccgtggagatggaggatgatgatttcactgccagcctgagcaagcagagctgtattaccgaacagacacagtacttttttgataacgattctaaatcctttagtggggtgctcgactgcggaaactgctcacgaatttttcatggagaaaagctcatgaacaccaacctgatttttattatggttgagtctaagggtacatgcccatgtgatacccgacttctgattcaggcagagcaaacctccgatggcccgaatccctgcgacatggtcaagcagcccagatacagaaaggggccagatgtatgttttgacaataacgtgttggaggattacactgactgtggcggggtatcaggcctgaatccttcattgtggtatatcatcggaatacagttcctgttactgtggctcgtctccgggtccacacaccgcctgctgtag

SEQ ID NO: 270473 - DNA, 3312 bp, Artificial Sequence
  derived and/or modified sequence
atggccgcaggctgtctcctagcattgactctcaccctatttcagtcactcttgattgggcctagcagcgaagaaccattcccatctgctgtgacaatcaagtcctgggtggacaagatgcaagaggaccttgtgaccctggctaaaacagcgtcaggagtgaatcaacttgtggatatttatgagaagtaccaggatttgtacaccgtggaaccaaataatgctcgacagttggtagaaattgctgccagggacatcgaaaagcttctttcaaacagaagcaaggccctggtgcgactggccctcgaggcagagaaagtacaggccgcacatcagtggagagaggactttgccagcaatgaggtggtttactacaatgccaaggatgatctggatcccgagaagaacgactccgagccaggaagtcagcggatcaaacctgtgttcattgaggacgccaattttgggcgtcagatatcataccaacatgcggcagtccacatccctaccgacatctacgagggcagtactatagtgctcaacgagttaaattggaccagtgcactagacgaggtgttcaagaagaacagggaggaagacccaagtctcctttggcaggtcttcgggtccgccaccggcttggcaaggtactaccctgcgagtccttgggtggataactcccggactccgaacaaaatcgacctatatgacgttcggaggcggccttggtacatacagggggcagcctctcccaaggatatgctcattttggtggacgtgtccggttccgtgtccggcttgacccttaagctgattcggacttcggtctctgaaatgctggagaccctgtctgacgacgattttgtgaatgtcgcttccttcaacagcaatgcccaagacgtgtcctgctttcagcatctggtgcaggccaacgtcaggaacaaaaaagtgttgaaggatgccgttaataatattacggcgaaggggatcacagattataagaagggattttcattcgcctttgagcagcttctcaattataatgtgtcccgtgccaactgtaataaaatcatcatgctctttacggacggtggcgaggaacgtgctcaggagatcttcaataagtataacaaggataaaaaggtccgggtttttacgttttcagttgggcagcataattacgacagaggcccaattcaatggatggcttgtgagaacaagggctattactacgaaatccctagtatcggagctatacgaatcaatactcaggaatacctagatgtacttggccgaccaatggtcttggcaggcgataaggcaaagcaagtccagtggacaaacgtgtatctcgatgccctggagctgggtttagtcattactggaaccctgcccgtattcaacatcaccggacaatttgagaataaaactaatctgaagaatcaactcattcttggcgtaatgggggtagacgtgtctcttgaggatattaaaagactgacccctagattcaccctgtgcccaaatggctattactttgccattgacccaaatggctacgttctcctgcatcccaaccttcagccaaaacccattggggtcggcattccaacaatcaacctccggaaaagacggccaaacatccagaatcctaagtcccaggaaccagtgacactggactttctagacgccgagctcgaaaatgacattaaggtggagatacgcaataaaatgatagatggcgaaagtggggaaaagacattccgcaccttggtaaaaagtcaagatgagaggtatatcgataaaggcaaccgaacctatacctggaccccagtgaatggaaccgactatagcctggctctcgttctacccacctactctttttactatattaaagccaaactagaggagactattacacaggcacgatactctgagactctcaaaccagataattttgaggagtccggttatactttcatcgcccctagagactactgcaacgacttgaaaatttcagataacaacacagaatttctgttgaactttaacgagtttattgaccggaaaacacctaataacccgagctgcaatgcagatctgatcaatagggtactgctggatgctggcttcaccaatgaactggttcagaactactggtccaaacaaaagaacattaaaggtgttaaggccagattcgttgtgaccgatggaggcattacacgtgtgtatcctaaggaagccggtgagaattggcaggaaaaccctgagacatacgaagacagtttctataagagatccctcgataacgacaattacgtttttactgcaccatactttaacaagtcaggccctggagcttatgagagtggaataatggtgagcaaggccgtcgagatctatatacaagggaaacttctgaagcccgcagtggtgggcattaagatcgatgtaaattcttggatcgagaatttcactaagaccagtatacgggacccatgcgcaggaccggtatgtgattgtaaaaggaactcggacgtgatggattgcgtgatacttgacgacggtgggttcctgctcatggccaatcacgatgactacacaaatcagatcgggaggttctttggagagatagatccctccctcatgcgtcatctggtaaatatcagcgtttacgcttttaacaaatcttatgactaccaatccgtgtgcgagcccggagctgcaccaaagcagggagccggacacaggtccgcttatgtgccttctgtggccgatatcctccagattggatggtgggccactgccgctgcatggtctattttgcaacagttcctcctgtccctaacgttccctcgcctgttggaggccgtggaaatggaagatgacgattttacggcctcattgtctaagcaatcatgcatcaccgaacagacccagtatttttttgacaacgattccaaatcctttagcggcgttttagattgcggtaactgttctcgcatctttcacggagagaaactgatgaacacaaatcttattttcatcatggtagagagtaagggaacctgtccctgcgataccagactcttaatacaggctgaacagacctccgacggccctaacccgtgtgacatggtgaagcagccgagatataggaaaggaccagacgtctgctttgataataacgtgctagaggactacactgactgcggcggtgtgtcagggcttaacccaagtctctggtacattattggtatccagtttcttctgctctggctcgtctcaggcagtactcatcgcttactctag

SEQ ID NO: 270474 - DNA, 3858 bp, Artificial Sequence
  derived and/or modified sequence
cggcggaggcaaggcggccgcggcgcggagcagccgacgcacgctagtgggtccgcccgccaccgccccttcctcggcgtccgctcccgcccttgccgtcccccgcgcggctccgcgcctcgggccccgggcgcagccagccctccagacgcccgcggtcccggcggcgtgtgctgctcttcctccgcccgcggtttccagcgccgctccttcccccgcttgggcagggagggggcattgatcttcgatcgcgaagatggctgctggctgcctgctggccttgactctgacacttttccaatctttgctcatcggcccctcgtcggaggagccgttcccttcggccgtcactatcaaatcatgggtggataagatgcaagaagaccttgtcacactggcaaaaacagcaagtggagtcaatcagcttgttgatatttatgagaaatatcaagatttgtatactgtggaaccaaataatgcacgccagctggtagaaattgcagccagggatattgagaaacttctgagcaacagatctaaagccctggtgcgcctggcattggaagcggagaaagttcaagcagctcaccagtggagagaagattttgcaagcaatgaagttgtctactacaatgcaaaggatgatctcgatcctgagaaaaatgacagtgagccaggcagccagaggataaaacctgttttcattgaagatgctaattttggacgacaaatatcttatcagcacgcagcagtccatattcctactgacatctatgagggctcaacaattgtgttaaatgaactcaactggacaagtgccttagatgaagttttcaaaaagaatcgcgaggaagacccttcattattgtggcaggtttttggcagtgccactggcctagctcgatattatccagcttcaccatgggttgataatagtagaactccaaataagattgacctttatgatgtacgcagaagaccatggtacatccaaggagctgcatctcctaaagacatgcttattctggtggatgtgagtggaagtgttagtggattgacacttaaactgatccgaacatctgtctccgaaatgttagaaaccctctcagatgatgatttcgtgaatgtagcttcatttaacagcaatgctcaggatgtaagctgttttcagcaccttgtccaagcaaatgtaagaaataaaaaagtgttgaaagacgcggtgaataatatcacagccaaaggaattacagattataagaagggctttagttttgcttttgaacagctgcttaattataatgtttccagagcaaactgcaataagattattatgctattcacggatggaggagaagagagagcccaggagatatttaacaaatacaataaagataaaaaagtacgtgtattcacgttttcagttggtcaacacaattatgacagaggacctattcagtggatggcctgtgaaaacaaaggttattattatgaaattccttccattggtgcaataagaatcaatactcaggaatatttggatgttttgggaagaccaatggttttagcaggagacaaagctaagcaagtccaatggacaaatgtgtacctggatgcattggaactgggacttgtcattactggaactcttccggtcttcaacataaccggccaatttgaaaataagacaaacttaaagaaccagctgattcttggtgtgatgggagtagatgtgtctttggaagatattaaaagactgacaccacgttttacactgtgccccaatgggtattactttgcaatcgatcctaatggttatgttttattacatccaaatcttcagccaaagcctattggtgtaggtataccaacaattaatttaagaaaaaggagacccaatatccagaaccccaaatctcaggagccagtaacattggatttccttgatgcagagttagagaatgatattaaagtggagattcgaaataagatgattgatggggaaagtggagaaaaaacattcagaactctggttaaatctcaagatgagagatatattgacaaaggaaacaggacatacacatggacacctgtcaatggcacagattacagtttggccttggtattaccaacctacagtttttactatataaaagccaaactagaagagacaataactcaggccagatattcggaaaccctgaagccagataattttgaagaatctggctatacattcatagcaccaagagattactgcaatgacctgaaaatatcggataataacactgaatttcttttaaatttcaacgagtttattgatagaaaaactccaaacaacccatcatgtaacgcggatttgattaatagagtcttgcttgatgcaggctttacaaatgaacttgtccaaaattactggagtaagcagaaaaatatcaagggagtgaaagcacgatttgttgtgactgatggtgggattaccagagtttatcccaaagaggctggagaaaattggcaagaaaacccagagacatatgaggacagcttctataaaaggagcctagataatgataactatgttttcactgctccctactttaacaaaagtggacctggtgcctatgaatcgggcattatggtaagcaaagctgtagaaatatatattcaagggaaacttcttaaacctgcagttgttggaattaaaattgatgtaaattcctggatagagaatttcaccaaaacctcaatcagagatccgtgtgctggtccagtttgtgactgcaaaagaaacagtgacgtaatggattgtgtgattctggatgatggtgggtttcttctgatggcaaatcatgatgattatactaatcagattggaagattttttggagagattgatcccagcttgatgagacacctggttaatatatcagtttatgcttttaacaaatcttatgattatcagtcagtatgtgagcccggtgctgcaccaaaacaaggagcaggacatcgctcagcatatgtgccatcagtagcagacatattacaaattggctggtgggccactgctgctgcctggtctattctacagcagtttctcttgagtttgacctttccacgactccttgaggcagttgagatggaggatgatgacttcacggcctccctgtccaagcagagctgcattactgaacaaacccagtatttcttcgataacgacagtaaatcattcagtggtgtattagactgtggaaactgttccagaatctttcatggagaaaagcttatgaacaccaacttaatattcataatggttgagagcaaagggacatgtccatgtgacacacgactgctcatacaagcggagcagacttctgacggtccaaatccttgtgacatggttaagcaacccagataccgaaaagggcctgatgtctgctttgataacaatgtcttggaggattatactgactgtggtggtgtttctggattaaatccctccctgtggtatatcattggaatccagtttctactactttggctggtatctggcagcacacaccgcctgttatgaccttctaaaaaccaaatctgcatagttaaactccagaccctgccaaaacatgagccctgccctcaattacagtaacgtagggtcagctataaaatcagacaaacattagctgggcctgttccatggcataacactaaggcgcagactcctaaggcacccactggctgcatgtcagggtgtcagatccttaaacgtgtgtgaatgctgcatcatctatgtgtaacatcaaagcaaaatcctatacgtgtcctctattggaaaatttgggagtttgttgttgcattgttggt

SEQ ID NO: 270475 - protein, 175 aa, Artificial Sequence
  derived and/or modified sequence
MAQSQGWVKRYIKAFCKGFFVAVPVAVTFLDRVACVARVEGASMQPSLNPGGSQSSDVVLLNHWKVRNFEVHRGDIVSLVSPKNPEQKIIKRVIALEGDIVRTIGHKNRYVKVPRGHIWVEGDHHGHSFDSNSFGPVSLGLLHAHATHILWPPERWQKLESVLPPERLPVQREEE

SEQ ID NO: 270476 - DNA, 528 bp, Artificial Sequence
  derived and/or modified sequence
atggcccaaagtcagggatgggtgaagcgctacatcaaggccttttgcaagggttttttcgtggctgtccctgtggctgtgacatttctggatcgggtggcctgtgtcgccagggttgagggtgcaagtatgcaaccgtcgctcaatccagggggcagccaatcttccgacgtggtattacttaatcactggaaagttagaaattttgaggtccacagaggtgatattgtaagcctcgtcagtcccaagaaccccgaacaaaagatcatcaagcgggtgatcgccctggagggtgacattgtgcggaccattggacacaagaacaggtacgttaaagtcccaaggggacatatctgggtggagggagatcaccacggccactccttcgattccaattcattcgggcctgtgagcctcgggctgctgcatgcgcatgcgactcacattctctggcccccagaaaggtggcaaaagctggagagcgttctaccccccgagcgccttcctgtccaacgggaagaggaatag

SEQ ID NO: 270477 - DNA, 528 bp, Artificial Sequence
  derived and/or modified sequence
atggcacagtctcagggctgggtgaagagatatattaaagctttctgcaagggctttttcgtagccgttccagtggccgttacgtttctggaccgtgttgcatgtgtcgcccgcgtcgagggtgcgtctatgcagcctagtctcaatccagggggtagccagagctctgatgttgtgctacttaaccattggaaggtccgaaacttcgaagttcaccgcggcgatattgtgtctctcgtgtcacctaagaatcccgagcagaaaattattaagcgagtgatagctctggaaggagatattgtcaggacgatcgggcataaaaacagatacgttaaagtgccccggggccatatttgggtggaaggagaccatcatgggcacagcttcgattccaatagcttcggacctgtgagcctaggtctgctgcatgctcatgccactcatatactgtggccccctgagaggtggcagaaactcgagtcagtgcttccaccagagcggctgccggtccagcgagaagaagaatag

SEQ ID NO: 270478 - DNA, 528 bp, Artificial Sequence
  derived and/or modified sequence
atggcccaatcccaggggtgggtgaaaagatacataaaagcattttgcaaagggttttttgtagccgttccagttgccgtcacttttctggaccgggtagcctgtgtggctagagtggaaggggccagcatgcaacctagtctgaaccccggcggttctcagtcaagtgacgtggtgttattgaaccactggaaggtgcgcaactttgaggtccaccgcggagatatagtgtccctggtctcccccaaaaaccccgagcagaagatcataaagcgcgtgattgcacttgagggtgatatagtgcgaactataggccataaaaatagatacgtgaaagtcccccgcgggcatatctgggtggagggggatcatcatggtcactcctttgattcaaactcatttggtcctgtttcactggggctgttacacgctcatgctactcacatcttgtggccacccgagaggtggcaaaaactggagagcgttctcccccctgagcggctccctgtgcagagggaagaggaatag

SEQ ID NO: 270479 - DNA, 528 bp, Artificial Sequence
  derived and/or modified sequence
atggcccaatcccaaggctgggtgaagcgatacattaaagccttctgcaaggggttttttgtagcagtccccgttgccgtgaccttcctagatcgagtggcctgtgttgcccgggtcgaaggtgcatctatgcaacccagtctcaacccaggaggatcgcagtcctctgacgttgtactcctgaaccattggaaagtgagaaactttgaggtgcacagaggagacatagtgagcttggtgtccccaaaaaaccctgagcaaaaaataattaagcgagttatagctctggagggggacatcgtgcgcactatcggacacaaaaaccgatacgtgaaagtgccacggggccacatttgggtcgaaggagaccatcatggacactccttcgattccaactccttcggcccagtgagtttaggattgttgcacgcccacgcgacccacatactgtggccgcccgagagatggcagaagttggagtcggtgctgcctcctgagcggctgccggttcagcgggaagaggaatag

SEQ ID NO: 270480 - DNA, 1205 bp, Artificial Sequence
  derived and/or modified sequence
cggcggagggcggggtctgcgcggggacttcccccgggctgagctgcgcagcggggttttggccaaattgggcgagggcacaaaataaccacttaccccttctcaccgaggaagagcgggagaaagggtatggcacagtcacaagggtgggtgaaaagatacatcaaggccttttgtaaaggcttctttgtggcggtgcctgtggcagtgactttcttggatcgggtcgcctgtgtggcaagagtagaaggagcatcgatgcagccttctttgaatcctggggggagccagtcatctgatgtggtgcttttgaaccactggaaagtgaggaattttgaagtacaccgtggtgacattgtatcattggtgtctcctaaaaacccagaacagaagatcattaagagagtgattgctcttgaaggagatattgtcagaaccataggacacaaaaaccggtatgtcaaagtcccccgtggtcacatctgggttgaaggtgatcatcatggacacagttttgacagtaattcttttgggccggtttccctaggacttctgcatgcccatgccacacatatcctgtggcccccagagcgctggcagaaattggaatctgttcttcctccagagcgcttaccagtacagagagaagaggaatgactgcatgaatctacctgagttgctggcattgggaggccagttactggaaaggaatggaaaaaagaagcctccaaaagggaaaaacttctgacaatatgatgctgtgcgagaaatatttacagcacattaaaacgatctgtattattaaataaataattttcaaatgttaaacagtattaaatggcacctgattttgtgttaaattttagttccctgttgtttaatgcccccaaaatatgcagacctttgggaatataaaaatattgcacccacatgtcttaatggggctgaatttcagattatttgttacatatacttattatattgattgttgggttttgattttggtgcttgctgctgaaataaattgaaaattaatattcaataaaaatgatgtatttgtcacttgctgttaaggtagaacaagaaggaacacatattatacacataatgatgggaattacattgtgatttgtactatctacaaaggagtaactgccagttaggaagaacagtaaacagtgatgttaaaataaaacaatgatttg

SEQ ID NO: 270481 - DNA, 1519 bp, Artificial Sequence
  derived and/or modified sequence
cggccgcgagtcctgcgtgatcgcgagcatgtgtgcgtgcgcgtgtttatctgaggcgcgtgcggcggccaccccagcctagtcctcttcttggtgccactggctaactaggttgagaaaccggcgccacaggcggcacacctggcccggagctggcccgctcctccccgccgagccggcgccccaacaacgcgccctctcccagtcctcacaaaggggcctagtccggcccccggctctggccgtgagggagcgctgtgggggcgcgctgccttctgcctggaagtgttgggcaggtggtgggagagcgtcaggcttgaacaacatgattttaaagcacgtgtctgtctgtcgttttttacttttagggttttggccaaattgggcgagggcacaaaataaccacttaccccttctcaccgaggaagagcgggagaaagggtatggcacagtcacaagggtgggtgaaaagatacatcaaggccttttgtaaaggcttctttgtggcggtgcctgtggcagtgactttcttggatcgggtcgcctgtgtggcaagagtagaaggagcatcgatgcagccttctttgaatcctggggggagccagtcatctgatgtggtgcttttgaaccactggaaagtgaggaattttgaagtacaccgtggtgacattgtatcattggtgtctcctaaaaacccagaacagaagatcattaagagagtgattgctcttgaaggagatattgtcagaaccataggacacaaaaaccggtatgtcaaagtcccccgtggtcacatctgggttgaaggtgatcatcatggacacagttttgacagtaattcttttgggccggtttccctaggacttctgcatgcccatgccacacatatcctgtggcccccagagcgctggcagaaattggaatctgttcttcctccagagcgcttaccagtacagagagaagaggaatgactgcatgaatctacctgagttgctggcattgggaggccagttactggaaaggaatggaaaaaagaagcctccaaaagggaaaaacttctgacaatatgatgctgtgcgagaaatatttacagcacattaaaacgatctgtattattaaataaataattttcaaatgttaaacagtattaaatggcacctgattttgtgttaaattttagttccctgttgtttaatgcccccaaaatatgcagacctttgggaatataaaaatattgcacccacatgtcttaatggggctgaatttcagattatttgttacatatacttattatattgattgttgggttttgattttggtgcttgctgctgaaataaattgaaaattaatattcaataaaaatgatgtatttgtcacttgctgttaaggtagaacaagaaggaacacatattatacacataatgatgggaattacattgtgatttgtactatctacaaaggagtaactgccagttaggaagaacagtaaacagtgatgttaaaataaaacaatgatttg

SEQ ID NO: 270482 - DNA, 528 bp, Artificial Sequence
  derived and/or modified sequence
atggcacagtcacaagggtgggtgaaaagatacatcaaggccttttgtaaaggcttctttgtggcggtgcctgtggcagtgactttcttggatcgggtcgcctgtgtggcaagagtagaaggagcatcgatgcagccttctttgaatcctggggggagccagtcatctgatgtggtgcttttgaaccactggaaagtgaggaattttgaagtacaccgtggtgacattgtatcattggtgtctcctaaaaacccagaacagaagatcattaagagagtgattgctcttgaaggagatattgtcagaaccataggacacaaaaaccggtatgtcaaagtcccccgtggtcacatctgggttgaaggtgatcatcatggacacagttttgacagtaattcttttgggccggtttccctaggacttctgcatgcccatgccacacatatcctgtggcccccagagcgctggcagaaattggaatctgttcttcctccagagcgcttaccagtacagagagaagaggaatga

SEQ ID NO: 270483 - DNA, 833 bp, Artificial Sequence
  derived and/or modified sequence
cccccgggctgagctgcgcagcgggtgcggagggcgggcgcccgggttttggccaaattgggcgagggcacaaaataaccacttaccccttctcaccgaggaagagcgggagaaagggtatggcacagtcacaagggtgggtgaaaagatacatcaaggccttttgtaaaggcttctttgtggcggtgcctgtggcagtgactttcttggatcgggtcgcctgtgtggcaagagtagaaggagcatcgatgcagccttctttgaatcctggggggagccagtcatctgatgtggtgcttttgaaccactggaaagtgaggaattttgaagtacaccgtggtgacattgtatcattggtgtctcctaaaaacccagaacagaagatcattaagagagtgattgctcttgaaggagatattgtcagaaccataggacacaaaaaccggtatgtcaaagtcccccgtggtcacatctgggttgaaggtgatcatcatggacacagttttgacagtaattcttttgggccggtttccctaggacttctgcatgcccatgccacacatatcctgtggcccccagagcgctggcagaaattggaatctgttcttcctccagagcgcttaccagtacagagagaagaggaatgactgcatgaatctacctgagttgctggcattgggaggccagttactggaaaggaatggaaaaaagaagcctccaaaagggaaaaacttctgacaatatgatgctgtgcgagaaatatttacagcacattaaaacgatctgtattattaaataaataattttcaaatgttaaacagtattaaatggca

SEQ ID NO: 270484 - DNA, 528 bp, Artificial Sequence
  derived and/or modified sequence
atggcccagagccagggctgggtgaagcgctacatcaaggccttctgcaagggcttctttgtggccgtgcctgtggccgtgaccttcctggacagagtggcctgtgtggcccgggtggagggcgcctccatgcagcccagcctgaaccctgggggcagccagagcagtgatgtggtgctgctgaaccactggaaggtgaggaactttgaggtgcacagaggagacatcgtgtccctggtgagccccaagaaccctgagcagaagatcatcaagagggtcatcgccctggagggggacatcgtgaggaccatcggccacaagaaccgctacgtgaaggtgccccggggccacatctgggtggagggggaccaccacggccacagctttgacagcaacagctttggacctgtgtccctgggcctgctgcacgcccacgccacccacatcctgtggcccccagagcgctggcagaagctggagagcgtgctgcccccagagcggctgcctgtgcagcgggaggaggagtag

SEQ ID NO: 270485 - DNA, 528 bp, Artificial Sequence
  derived and/or modified sequence
atggcccagagccagggctgggtgaagcggtacatcaaggccttctgtaagggcttcttcgttgccgtccctgtcgcagtcacttttctggatagggtcgcttgcgttgccagggtggagggggcatcaatgcagccttccctgaaccccggaggaagccagagcagcgacgtcgtcctcctcaatcattggaaagtacgtaacttcgaagtgcaccggggagacatcgtgtcactggtctcgccaaagaaccctgagcaaaagatcataaaaagagtcatcgccctcgaaggggacatcgtccgtacgattggtcataagaatcgatatgtgaaagtcccgagggggcacatctgggtggagggtgatcaccatggacatagttttgacagcaactcatttggccccgtgtctcttggcctgctgcacgcgcatgccacacatattctctggccccctgagcgctggcagaagctggaatctgttcttccgcccgaaaggctgcctgtccagcgggaagaggaatag

SEQ ID NO: 270486 - DNA, 528 bp, Artificial Sequence
  derived and/or modified sequence
atggcccagagccagggctgggtgaagcggtacatcaaggccttctgcaagggcttcttcgttgccgtgccagttgcagtcacatttttggacagagtagcgtgtgtggcccgcgttgaaggggcgtcaatgcaacctagcctcaatcccggcggaagtcagagtagtgatgttgtgctgctcaaccactggaaggttagaaattttgaggtgcaccgaggagatatagtaagcctggtgtctccaaagaacccggagcagaaaatcattaagcgggtcatcgcactggagggtgatatagtgagaaccataggccacaagaataggtacgtgaaggttccccgaggccatatttgggtagagggtgaccaccacgggcatagcttcgatagcaattcgtttggccccgtgtccctggggctgctgcacgctcacgccactcacattctatggccgcccgaaagatggcagaaactggagagtgttcttccccctgagaggctccctgtgcaaagagaagaagaatag

SEQ ID NO: 270487 - DNA, 528 bp, Artificial Sequence
  derived and/or modified sequence
atggcccagagccagggctgggtgaagcggtacatcaaggccttctgcaaggggtttttcgttgcagtacccgtagcagtgacgttcctagatagagtggcctgcgttgcccgggtggagggagcgtccatgcagccgagcctcaacccgggtggctctcagagctccgatgtggttcttttgaatcattggaaagtgcgtaacttcgaagtccatcgcggggatatcgtgtctctggtctcacccaaaaacccagaacagaaaattattaagagagttatagccctggaaggcgatattgttcgaaccatcggtcataaaaatcgttatgtaaaggtacccaggggccatatttgggtggaaggagatcaccatggccacagtttcgattctaattcgttcggaccagtgagcttgggactgttgcacgcccacgctacccatatcctctggcctcccgaaagatggcagaaattggaatccgtgctgccaccagaaagacttccagttcagagagaggaggagtag

SEQ ID NO: 270488 - DNA, 528 bp, Artificial Sequence
  derived and/or modified sequence
atggcccagagccagggctgggtgaagcggtacatcaaggccttctgcaaaggcttttttgtagctgtaccggttgccgtcacttttttggatagggtggcctgcgtggctagggtcgagggtgcttcaatgcagcctagccttaatcccggcggctcacagagcagcgatgtcgtccttcttaatcactggaaggttcgaaatttcgaagttcatcgcggcgacattgtatctctggttagtcccaagaatccagagcagaagattatcaagagagtaatcgccctcgagggggatattgtgcggaccatcggccacaagaacagatacgtgaaagtgccaagaggtcatatttgggtggagggggatcaccacggccacagtttcgattcaaacagctttgggccagtcagtttagggctgctgcacgctcatgcaacacatatattgtggcctccagaacggtggcagaaactcgaatcagtcctgccacccgaacgactgcctgtgcagcgtgaagaagaatag

SEQ ID NO: 270489 - DNA, 528 bp, Artificial Sequence
  derived and/or modified sequence
atggcccagtcgcagggttgggtcaagcgctacatcaaggctttttgcaaggggttctttgttgcggtcccggtggctgtgacctttctggatagggttgcctgcgtggccagggtggagggggcaagtatgcagccctccctgaatccaggtggatcccagagctctgacgtcgtgctacttaaccattggaaggtccgtaacttcgaagtgcataggggggacattgtgtccctggtatctcccaaaaatccggaacagaagattattaagcgggtgatcgcgttggagggcgatatagtacgcacaatcgggcataaaaacagatatgtgaaagtcccccgaggccatatctgggtggagggagaccatcacggtcactcgttcgattccaacagttttggccctgtgagtcttgggttactgcatgcacatgccacccacatcctttggcccccagagcgatggcaaaaacttgaaagcgtcctacctcctgagcggttaccagtccagcgcgaggaggaatag

SEQ ID NO: 270490 - DNA, 528 bp, Artificial Sequence
  derived and/or modified sequence
atggctcagtcccagggctgggttaaacggtacattaaggccttctgcaaagggttcttcgttgctgtgcctgtggcagtgacattcctggatagggtagcgtgtgtggccagggtcgaaggtgctagcatgcagccctccctgaaccccggaggctctcaaagttctgatgtggtcttgttgaatcactggaaggtcagaaattttgaggtccaccgaggggacatcgtgagccttgtaagccctaaaaaccccgagcaaaagattatcaagagagtcattgccctggaaggcgatattgtccggacaattgggcacaaaaatcgttacgttaaggttccacgcggacatatttgggtggagggggaccaccatggacattcctttgacagcaactctttcggtcccgtgtctctagggctgctccatgctcacgcgactcatatcctgtggcctcccgaaagatggcaaaagctggagtccgtgctgcccccagagcgcttacctgtacagagggaggaagagtag

SEQ ID NO: 270491 - DNA, 528 bp, Artificial Sequence
  derived and/or modified sequence
atggcccaaagccaaggatgggtcaaaaggtacattaaggccttctgtaagggctttttcgtggcggtgccagtggcagtgacattccttgatagagtggcctgcgtcgccagggttgagggcgcatcaatgcagccctccctgaatccaggtggatctcaaagttccgacgtcgtactcctcaatcactggaaggtccgtaattttgaggtgcatcggggtgacatcgtctctctggtgagtcctaagaatcctgagcagaaaataataaaacgggtgattgccttggagggagacatcgttcggacaatcgggcacaaaaacagatatgtcaaagtgccgcgtgggcacatatgggtcgagggagaccaccacggccacagttttgacagcaactccttcggtcccgtatctctgggcctgcttcatgcccatgctacccatattctatggccacccgagcggtggcagaagctagaatctgtcttgccccctgaacgccttccagtgcagagggaggaagaatag

SEQ ID NO: 270492 - DNA, 528 bp, Artificial Sequence
  derived and/or modified sequence
atggctcagagccaaggctgggtcaaaagatatattaaagccttctgtaaaggcttctttgtggcagtccccgtggccgtcaccttccttgaccgagttgcctgtgttgcaagggttgagggcgcttccatgcagccttcactgaacccagggggaagccagagttccgacgtcgttctgcttaatcactggaaggtgcgtaatttcgaggtccatcgaggtgacatcgtatccctggtcagccctaaaaatcctgaacagaagatcattaaaagggtgattgctctggaaggtgacattgtgcggacaatcgggcacaaaaacagatacgtgaaggtccccaggggacatatctgggtggagggcgaccaccacggccactcctttgattcaaactccttcggtcctgtttctttagggctcctccacgcccatgctacccacatcttatggccgccagagagatggcaaaagctggaatcggtactgccccctgaacgcctacctgtgcagagggaagaagagtag

SEQ ID NO: 270493 - DNA, 528 bp, Artificial Sequence
  derived and/or modified sequence
atggcccagagccagggctgggtgaagagatacatcaaggccttctgcaagggcttcttcgtggccgtgcccgtggccgtgaccttcctggacagagtggcctgcgtggccagagtggagggcgccagcatgcagcccagcctgaaccccggcggcagccagagcagcgacgtggtgctgctgaaccactggaaggtgagaaacttcgaggtgcacagaggcgacatcgtgagcctggtgagccccaagaaccccgagcagaagatcatcaagagagtgatcgccctggagggcgacatcgtgagaaccatcggccacaagaacagatacgtgaaggtgcccagaggccacatctgggtggagggcgaccaccacggccacagcttcgacagcaacagcttcggccccgtgagcctgggcctgctgcacgcccacgccacccacatcctgtggccccccgagagatggcagaagctggagagcgtgctgccccccgagagactgcccgtgcagagagaggaggagtag

SEQ ID NO: 270494 - DNA, 1416 bp, Artificial Sequence
  derived and/or modified sequence
atgcagttgccccgatggtgggaactgggtgacccttgcgcatggactggacagggccggggaactagacgcatgtcaccagcaaccactggtaccttccttctcaccgctttcctgctcagctgcgcagacgggatcaatgggacagttaattggaagacccgccaagctaacaacttcatcatttcacgtaagatggccgccggcatgaaggacgtttacagtattttttccaaagtccactcggaccggaacgtctaccctagcgctggcgtcctcttcgtccatgtcctcgaacgagagtatttcaaaggggagttccctccctaccccaagccgggcgaaatttcaaatgaccccatcacatttaataccaatctaatgggttatcccgacagacccggctggcttagatatatccagcgaacaccctattctgacggggtgctctatggaagtccaactgccgagaatgttggcaagcctacaatcatagagattaccgcatataaccgtagaacttttgagaccgccagacataacctgataattaacattatgtctgcggaagatttccccctcccttaccaggccgagttctttatcaagaatatgaatgtcgaagagatgctcgccagcgaagttttgggggactttcttggtgctgtcaagaacgtttggcagccagaaagacttaacgccatcaatataacctctgctctggacagaggagggcgggtgccactccccatcaatgacctgaaagaaggggtgtatgtgatggtgggcgccgatgtccccttttccagttgtctgcgagaagtagagaatcctcagaaccagttacggtgctcccaggaaatggaacccgtgataacctgcgacaaaaaatttagaacacaattttatatcgactggtgcaagatctccttggttgataagacaaaacaggtgtccacctatcaggaagtgattaggggagagggcatattgccagatgggggtgagtacaaaccgcccagcgattccctaaagtccagagactattatacggacttcctgattaccctcgccgttccctccgccgtggccctggttctcttcctgatcctagcgtacattatgtgctgtcgacgtgaaggcgtggagaaacggaacatgcaaaccccagacattcagctggtgcaccattccgccattcaaaaatcaactaaggaactgcgtgatatgtccaagaaccgggagattgcgtggcctctctccactctgcccgtgttccatcccgtgactggcgagattattcccccattacacacggacaattatgactccaccaatatgcctctcatgcagactcaacagaaccttcctcaccagacacaaatcccacagcagcagactaccggggagtgttag

SEQ ID NO: 270495 - DNA, 1416 bp, Artificial Sequence
  derived and/or modified sequence
atgcagctgccccgctggtgggagctgggggacccctgtgcctggacaggccagggccggggcaccaggaggatgagccctgccaccaccggcaccttcctgctgacagccttcctgctgagctgtgctgatggcatcaatggaacagtgaactggaagacccggcaggccaacaacttcatcatcagcaggaagatggccgccggcatgaaggatgtgtacagcatcttcagcaaggtgcacagcgacagaaatgtgtaccccagcgctggggtgctgtttgtgcacgtgctggagcgggagtacttcaagggggagttccccccctaccccaagccaggagagatcagcaatgaccccatcaccttcaacaccaacctgatgggctacccagaccggcccggctggctgcgctacatccagaggaccccctacagtgatggagtgctgtatggcagccccacagcagaaaatgtgggcaagcccaccatcatcgagatcacagcctacaacagaaggacctttgaaacagcccggcacaacctgatcatcaacatcatgtctgctgaggacttccccctgccctaccaggccgagttcttcatcaagaacatgaatgtggaggagatgctggccagcgaggtgctgggggacttcctgggcgctgtgaagaatgtgtggcagcctgagcggctgaatgccatcaacatcaccagcgccctggaccggggcggccgggtgcccctgcccatcaatgacctgaaggagggcgtgtatgtgatggtgggcgcagatgtgcccttcagcagctgcctgcgggaggtggagaacccccagaaccagctgcgctgcagccaggagatggagcccgtcatcacctgtgacaagaagttccgcacccagttctacatcgactggtgcaagatcagcctggtggacaagaccaagcaggtgtccacctaccaggaggtgatccggggggagggcatcctgcctgatggaggagagtacaagcccccaagtgacagcctgaagagccgggactactacacagacttcctgatcaccctggccgtgcccagcgctgtggccctggtgctcttcctgatcctggcctacatcatgtgctgccggcgggagggcgtggagaagaggaacatgcagaccccagacatccagctggtgcaccacagcgccatccagaagagcaccaaggagctgcgggacatgagcaagaaccgggagatcgcctggcccctgagcaccctgcccgtcttccaccctgtgactggagagatcatcccccccctgcacacagacaactatgacagcaccaacatgcccctgatgcagacccagcagaacctgccccaccagacccagatcccccagcagcagaccaccggggagtgctag

SEQ ID NO: 270496 - DNA, 1416 bp, Artificial Sequence
  derived and/or modified sequence
atgcagctgccccggtggtgggagctgggcgacccctgcgcctggaccggtcagggacgcgggacccgccgcatgagtccagcaaccactggaactttcctgttgacagcatttttgctctcatgcgccgatggcattaacggtactgtcaattggaaaacacgccaggccaacaactttatcatttcccgcaaaatggcagcgggcatgaaggatgtgtactcgattttttccaaggtacattccgatcgaaacgtgtatccctccgctggggtcctctttgtacatgttctggagagggaatattttaaaggcgagttccctccttaccccaaacccggcgaaattagcaatgacccaatcacctttaacactaacctgatgggatatccagatagaccagggtggctgcgttatatccagagaacgccgtacagcgacggcgtgctgtacggcagtccaactgcagagaatgtaggcaaacccaccattatcgaaatcactgcttataatagacgcaccttcgaaaccgctcgccataacttgattattaacattatgtcagctgaggactttcccctaccataccaggcagagttcttcatcaagaacatgaatgtcgaggaaatgctagcatccgaagtgcttggcgactttctcggtgcagttaagaacgtctggcaacccgagaggctcaacgctatcaacattacttccgccttggacagaggaggtagagtgccattgcctataaatgatctgaaagagggagtgtacgtgatggtaggcgcggatgtccctttttcttcatgtctcagagaggtcgagaacccccagaaccagctgcgatgctctcaggagatggaacccgtgatcacttgtgacaagaaattccgcacacagttttacatcgactggtgtaagattagtctggtggacaagaccaagcaagtgtcaacctaccaggaagttatccgcggggagggcatcttgcctgatgggggcgaatataagcccccctcggacagcctcaaatcacgcgactactataccgatttccttatcaccttagcagtcccctccgcagtggccctggtgctgttcttgatccttgcctatattatgtgctgccgtagagaaggggtggagaaacgcaacatgcaaactccggacatacaactggtccaccattccgctattcaaaaatcaacaaaggagttgcgggatatgtcaaagaaccgagagattgcatggcccctctccacattacccgtgttccaccccgtcaccggagagataattccgcccctacacaccgacaattatgattctaccaatatgcccctgatgcagacacagcaaaacctcccacaccagactcaaattccacagcagcagacgacgggcgaatgttag

SEQ ID NO: 270497 - DNA, 1416 bp, Artificial Sequence
  derived and/or modified sequence
atgcagctgcctcgttggtgggagcttggcgacccttgcgcttggaccggtcagggaagaggcacacggaggatgtcccctgctaccactggcaccttcctcctcacggcctttttgttatcgtgcgcagacggaattaacgggactgtgaactggaaaactcggcaggctaacaactttatcattagtcgcaaaatggcagccggaatgaaggacgtctactccatcttcagcaaagtccactctgacaggaatgtttacccgtctgctggcgtgttgttcgtgcatgttttggaaagagagtattttaaaggagaattcccaccatacccgaaacctggagagatttccaatgatccgatcacattcaatacaaacctgatgggttacccagaccgccctggatggctaagatacatccaacgtacaccatacagcgatggagttctatacggatctccaacagccgaaaacgtgggcaagcctactatcatagaaataaccgcatataaccgcaggaccttcgagaccgctcgtcacaatctgattattaatataatgtctgctgaggattttccacttccttatcaggccgagtttttcatcaagaatatgaacgttgaggaaatgctggctagcgaggtgctgggagatttcttgggagccgttaaaaatgtctggcagccagaaagactgaacgcaatcaatattacatcagccttggaccggggaggacgggttcctctgcccatcaatgatctcaaggagggggtatatgtgatggttggtgccgacgtgcctttctcgtcctgtctgagggaggtggagaatccacagaatcaactgagatgtagccaggagatggagcccgtgataacgtgtgataaaaagttcaggacccagttctacatcgattggtgcaaaatttctttagtggataaaaccaagcaggtgtcaacgtaccaggaggtgattcgaggggaaggtattctgccagacggaggagagtacaagcctccttcagactcattgaagtcccgtgactattatactgacttcctaatcactctcgccgtcccctctgccgtcgcattagtgctttttctgatcctggcctacatcatgtgttgtcgtcgggaaggagtcgagaaacggaatatgcaaacacccgatatccaactggtccatcactctgccatccaaaaatcaaccaaggagctacgcgacatgagcaagaatagagaaatcgcctggcccctgtcgaccctcccggtttttcaccctgtgacgggagaaatcatccccccactccacaccgataactacgacagcacaaatatgcctctgatgcagacgcagcagaatctgccccaccaaacccaaataccacagcaacagaccaccggcgaatgctag

SEQ ID NO: 270498 - DNA, 1871 bp, Artificial Sequence
  derived and/or modified sequence
atgctgatgctgaactggccaagctgggagggaagaagaaagggaggggaggggagaatcgaggacggacggcctagccaggccaagaatgcaattgccccggtggtgggagctgggagacccctgtgcttggacgggacagggtcgggggacacgcaggatgagccccgcgaccactggcacattcttgctgacagcttttttattaagctgtgctgatggcataaatggaacagttaactggaagaccagacaggccaacaattttattatcagcagaaaaatggctgctgggatgaaagatgtgtacagtattttctccaaggtacactccgatcggaatgtatacccatcagcaggtgtcctctttgttcatgttttggaaagagaatattttaagggggaatttccaccttacccaaaacctggcgagattagtaatgatcccataacatttaatacaaatttaatgggttacccagaccgacctggatggcttcgatatatccaaaggacaccatatagtgatggagtcctatatgggtccccaacagctgaaaatgtggggaagccaacaatcattgagataactgcctacaacaggcgcacctttgagactgcaaggcataatttgataattaatataatgtctgcagaagacttcccgttgccatatcaagcagaattcttcattaagaatatgaatgtagaagaaatgttggccagtgaggttcttggagactttcttggcgcagtgaaaaatgtgtggcagccagagcgcctgaacgccataaacatcacatcggccctagacaggggtggcagggtgccacttcccattaatgacctgaaggagggcgtttatgtcatggttggtgcagatgtcccgttttcttcttgtttacgagaagttgaaaatccacagaatcaattgagatgtagtcaagaaatggagcctgtaataacatgtgataaaaaatttcgtactcaattttacattgactggtgcaaaatttcattggttgataaaacaaagcaagtgtccacctatcaggaagtgattcgtggagaggggattttacctgatggtggagaatacaaacccccttctgattctttgaaaagcagagactattacacggatttcctaattacactggctgtgccctcggcagtggcactggtcctttttctaatacttgcttatatcatgtgctgccgacgggaaggcgtggaaaagagaaacatgcaaacaccagacatccaactggtccatcacagtgctattcagaaatctaccaaggagcttcgagacatgtccaagaatagagagatagcatggcccctgtcaacgcttcctgtgttccaccctgtgactggggaaatcatacctcctttacacacagacaactatgatagcacaaacatgccattgatgcaaacgcagcagaacttgccacatcagactcagattccccaacagcagactacaggtgagtgctaagaataataaattaatgtttatgaatgaatctaatagattaaaagataattatggcactatataatttatgaagctttatcttcaccaaataaggcaaaacacttgtgtcattccttaatcagacttaaaacctcagaataatagcttagattattacatagattggcatcagaatgataaacacagggtaaatgatcttagagcaaaagcatccatggaggtcctgtctaattaaggaagactgaatgaaacccctttccttcagtgaagttccctattcttccccttggtatgaaagattcttagcttggatgcatccaggatttgtctcagtaagtgagcagcttgaagtttcaagctctcttac

SEQ ID NO: 270499 - DNA, 1416 bp, Artificial Sequence
  derived and/or modified sequence
atgcagctgcccagatggtgggagctgggcgacccctgcgcctggaccggccagggcagaggcaccagaagaatgagccccgccaccaccggcaccttcctgctgaccgccttcctgctgagctgcgccgacggcatcaacggcaccgtgaactggaagaccagacaggccaacaacttcatcatcagcagaaagatggccgccggcatgaaggacgtgtacagcatcttcagcaaggtgcacagcgacagaaacgtgtaccccagcgccggcgtgctgttcgtgcacgtgctggagagagagtacttcaagggcgagttccccccctaccccaagcccggcgagatcagcaacgaccccatcaccttcaacaccaacctgatgggctaccccgacagacccggctggctgagatacatccagagaaccccctacagcgacggcgtgctgtacggcagccccaccgccgagaacgtgggcaagcccaccatcatcgagatcaccgcctacaacagaagaaccttcgagaccgccagacacaacctgatcatcaacatcatgagcgccgaggacttccccctgccctaccaggccgagttcttcatcaagaacatgaacgtggaggagatgctggccagcgaggtgctgggcgacttcctgggcgccgtgaagaacgtgtggcagcccgagagactgaacgccatcaacatcaccagcgccctggacagaggcggcagagtgcccctgcccatcaacgacctgaaggagggcgtgtacgtgatggtgggcgccgacgtgcccttcagcagctgcctgagagaggtggagaacccccagaaccagctgagatgcagccaggagatggagcccgtgatcacctgcgacaagaagttcagaacccagttctacatcgactggtgcaagatcagcctggtggacaagaccaagcaggtgagcacctaccaggaggtgatcagaggcgagggcatcctgcccgacggcggcgagtacaagccccccagcgacagcctgaagagcagagactactacaccgacttcctgatcaccctggccgtgcccagcgccgtggccctggtgctgttcctgatcctggcctacatcatgtgctgcagaagagagggcgtggagaagagaaacatgcagacccccgacatccagctggtgcaccacagcgccatccagaagagcaccaaggagctgagagacatgagcaagaacagagagatcgcctggcccctgagcaccctgcccgtgttccaccccgtgaccggcgagatcatcccccccctgcacaccgacaactacgacagcaccaacatgcccctgatgcagacccagcagaacctgccccaccagacccagatcccccagcagcagaccaccggcgagtgctag

SEQ ID NO: 270500 - protein, 1894 aa, Artificial Sequence
  derived and/or modified sequence
MKAMPWNWTCLLSHLLMVGMGSSTLLTRQPAPLSQKQRSFVTFRGEPAEGFNHLVVDERTGHIYLGAVNRIYKLSSDLKVLVTHETGPDEDNPKCYPPRIVQTCNEPLTTTNNVNKMLLIDYKENRLIACGSLYQGICKLLRLEDLFKLGEPYHKKEHYLSGVNESGSVFGVIVSYSNLDDKLFIATAVDGKPEYFPTISSRKLTKNSEADGMFAYVFHDEFVASMIKIPSDTFTIIPDFDIYYVYGFSSGNFVYFLTLQPEMVSPPGSTTKEQVYTSKLVRLCKEDTAFNSYVEVPIGCERSGVEYRLLQAAYLSKAGAVLGRTLGVHPDDDLLFTVFSKGQKRKMKSLDESALCIFILKQINDRIKERLQSCYRGEGTLDLAWLKVKDIPCSSALLTIDDNFCGLDMNAPLGVSDMVRGIPVFTEDRDRMTSVIAYVYKNHSLAFVGTKSGKLKKIRVDGPRGNALQYETVQVVDPGPVLRDMAFSKDHEQLYIMSERQLTRVPVESCGQYQSCGECLGSGDPHCGWCVLHNTCTRKERCERSKEPRRFASEMKQCVRLTVHPNNISVSQYNVLLVLETYNVPELSAGVNCTFEDLSEMDGLVVGNQIQCYSPAAKEVPRIITENGDHHVVQLQLKSKETGMTFASTSFVFYNCSVHNSCLSCVESPYRCHWCKYRHVCTHDPKTCSFQEGRVKLPEDCPQLLRVDKILVPVEVIKPITLKAKNLPQPQSGQRGYECILNIQGSEQRVPALRFNSSSVQCQNTSYSYEGMEINNLPVELTVVWNGHFNIDNPAQNKVHLYKCGAMRESCGLCLKADPDFACGWCQGPGQCTLRQHCPAQESQWLELSGAKSKCTNPRITEIIPVTGPREGGTKVTIRGENLGLEFRDIASHVKVAGVECSPLVDGYIPAEQIVCEMGEAKPSQHAGFVEICVAVCRPEFMARSSQLYYFMTLTLSDLKPSRGPMSGGTQVTITGTNLNAGSNVVVMFGKQPCLFHRRSPSYIVCNTTSSDEVLEMKVSVQVDRAKIHQDLVFQYVEDPTIVRIEPEWSIVSGNTPIAVWGTHLDLIQNPQIRAKHGGKEHINICEVLNATEMTCQAPALALGPDHQSDLTERPEEFGFILDNVQSLLILNKTNFTYYPNPVFEAFGPSGILELKPGTPIILKGKNLIPPVAGGNVKLNYTVLVGEKPCTVTVSDVQLLCESPNLIGRHKVMARVGGMEYSPGMVYIAPDSPLSLPAIVSIAVAGGLLIIFIVAVLIAYKRKSRESDLTLKRLQMQMDNLESRVALECKEAFAELQTDIHELTSDLDGAGIPFLDYRTYTMRVLFPGIEDHPVLRDLEVPGYRQERVEKGLKLFAQLINNKVFLLSFIRTLESQRSFSMRDRGNVASLIMTVLQSKLEYATDVLKQLLADLIDKNLESKNHPKLLLRRTESVAEKMLTNWFTFLLYKFLKECAGEPLFSLFCAIKQQMEKGPIDAITGEARYSLSEDKLIRQQIDYKTLVLSCVSPDNANSPEVPVKILNCDTITQVKEKILDAIFKNVPCSHRPKAADMDLEWRQGSGARMILQDEDITTKIENDWKRLNTLAHYQVPDGSVVALVSKQVTAYNAVNNSTVSRTSASKYENMIRYTGSPDSLRSRTPMITPDLESGVKMWHLVKNHEHGDQKEGDRGSKMVSEIYLTRLLATKGTLQKFVDDLFETIFSTAHRGSALPLAIKYMFDFLDEQADKHGIHDPHVRHTWKSNCLPLRFWVNMIKNPQFVFDIHKNSITDACLSVVAQTFMDSCSTSEHRLGKDSPSNKLLYAKDIPSYKNWVERYYSDIGKMPAISDQDMNAYLAEQSRMHMNEFNTMSALSEIFSYVGKYSEEILGPLDHDDQCGKQKLAYKLEQVITLMSLDS

SEQ ID NO: 270501 - DNA, 5685 bp, Artificial Sequence
  derived and/or modified sequence
atgaaggctatgccctggaactggacttgcctgctcagtcacctcctgatggtcggcatgggtagtagcaccctgctaacacggcagcctgccccactgagccagaagcagcgctctttcgtgacctttcgcggggagcccgctgaggggtttaaccacctggtagtcgacgaacggactggccatatctacctcggagcggtgaaccgtatttataaactgagctctgatctgaaagttttagtgacccacgaaaccggaccagacgaagataacccaaaatgttacccacccaggatcgtgcaaacatgcaacgagccactgaccaccaccaataacgttaataagatgctcctgatcgactataaggaaaacaggctgattgcgtgtggttcactttatcaagggatctgcaagctgctgaggctagaggatctgttcaaactcggagagccatatcataagaaagaacattatctctccggagtcaatgagagtggaagtgtgttcggcgtgatcgtatcgtatagcaatttagacgataagcttttcatcgcaaccgccgtggacggcaagcccgagtatttccccactattagcagtaggaagttgaccaaaaattctgaagctgatgggatgtttgcgtacgtctttcacgacgagtttgttgcatctatgattaaaattccctctgacacctttaccataattccagacttcgatatatactatgtctacggatttagctccggaaatttcgtgtatttcttgacactgcagcctgaaatggtgtcaccccccggatccaccaccaaagaacaggtatacacttccaaattagtgcgtctctgcaaagaagatacagcttttaacagctatgtggaggtgccaattggctgcgagcgctctggagtggagtatcgcctgctccaagccgcatacttgtcaaaagctggagccgtgctagggcggacccttggcgtccacccggatgacgacctgctctttacagtgtttagcaaggggcaaaagcggaaaatgaaaagtctggacgaatccgctttgtgcattttcatcctaaagcagattaacgatagaattaaggagcgccttcagtcatgttatagaggcgaaggtacactcgatctcgcatggcttaaggtgaaagacatcccatgctcctccgctcttctcactattgacgacaacttctgcggactggatatgaacgcccccctcggagtaagcgatatggtacggggcatcccggtgttcaccgaagaccgggatcgtatgaccagtgttatcgcctatgtgtataaaaaccattccctggcatttgtcggtactaagtccggaaaactaaagaagattcgggtcgatggtccccgcgggaatgctctgcaatatgagactgtgcaggttgttgatccaggtcctgtgttgagagatatggcctttagtaaagatcatgagcagctctacatcatgtcggagcggcagctgaccagagtgcctgtcgaatcttgtggacagtaccagtcgtgcggcgaatgcctcgggtcaggcgatccccattgcggctggtgcgtgctgcacaatacctgtacgcgaaaggagcgatgtgagcgctctaaggagcctagacggtttgctagcgagatgaagcagtgtgtgagactcaccgtccaccccaacaatatctcggtaagccagtacaatgtgttgcttgtgctggagacatacaacgttccagaactctcagcaggtgttaactgtaccttcgaggacctcagcgagatggacggcttggtcgttggcaaccagatccagtgttactcacccgctgccaaggaggttccacgaatcataactgagaatggtgatcaccatgtggtgcagctccagctgaaaagcaaagaaaccggcatgaccttcgcgtctactagctttgtgttctacaactgttccgttcataattcctgcctgtcatgtgtggaatctccctatcgatgtcactggtgcaaatatagacacgtgtgcacacacgaccccaagacttgcagcttccaggagggacgtgtgaaactcccagaggactgcccccagctgctgagggtggataagatacttgtgcctgtggaggtgattaaacccattacgctcaaggcaaaaaatttgccccagccccaatctggtcagcgaggctatgagtgtatcctgaacatccagggaagcgagcagagagtcccggcattgaggttcaactcttcctccgtgcaatgccagaatacctcctattcatatgaaggaatggaaatcaataatctgccggttgagttaacggtggtgtggaacgggcatttcaatatcgataaccctgcacagaataaggttcatctctataagtgtggggccatgcgagagagttgcggactttgcctgaaagcggaccccgatttcgcatgtggatggtgtcaaggacctggccagtgcaccttgcgacagcattgtccagcgcaagagtcgcagtggctagaattgtccggcgctaaaagcaagtgtactaaccccagaatcaccgaaattattcctgtcacgggccctagagagggtggtactaaggtcaccataagaggggaaaatctggggctggaatttagggatattgcaagtcatgtcaaagtagccggtgtggaatgttctccgctggtcgatgggtacattccggctgagcaaatagtctgtgagatgggcgaggccaagcctagtcagcacgcaggatttgtggaaatctgtgtggctgtatgcaggccggagtttatggctagatcttcacagctatactacttcatgactctgactctgtctgatcttaaaccctctaggggacccatgtccgggggaacacaagtgaccataaccgggactaacttgaatgctgggagcaatgtggtggtcatgttcggcaagcagccttgtctattccacaggagaagcccatcttacattgtgtgtaacacaacctcatctgatgaggtacttgaaatgaaagttagcgtgcaggtagatagggccaagatccaccaggatctcgttttccaatatgtcgaagatcccacaatcgttcggatcgaacccgagtggagcattgtttctggaaatacacccatcgcagtttggggaactcacctcgaccttatccagaatcctcaaatcagggctaaacatggtggtaaggagcacatcaatatctgcgaggtgcttaacgccactgaaatgacttgtcaggctcccgcactagctttgggacctgaccatcagagtgacctgaccgaacggcctgaggaattcggcttcattctcgacaacgtgcagagcctccttatcctcaataagacaaattttacttactacccaaacccggtttttgaagccttcggcccgtcgggcattcttgagctgaaaccaggcactcctattattttgaaaggcaagaacctgataccacccgtggctggaggcaatgtgaagttaaactacacagtgctcgtgggggaaaagccctgtacagtcacggtgagcgatgtacaattgctgtgtgaaagccctaacttaatcgggcgtcataaggttatggcacgggttggcgggatggagtactcacccggaatggtttacatagcccccgactcacctctctccttgccagccatagtctcaatcgcggtcgccggcggtcttttgatcatcttcatagtggcagtgctgatcgcctacaagaggaaatccagggaatccgacctgacactaaagcgcctccagatgcaaatggataatctggaatcaagggtggcgctagagtgtaaagaggctttcgccgaattacaaacagacattcacgagctcaccagcgatctcgacggtgcagggattccgttcttggactacaggacatacaccatgagggtgctttttcctgggatcgaagatcaccccgtcttgagagacctcgaagtgcccggctatcgacaagagagggtagaaaagggattaaaattgttcgcccaactcattaacaataaggttttcctgcttagctttatccggactctcgagtcacagcgctccttttctatgcgagaccgtggcaatgtggcctcactgatcatgaccgttctgcagtccaaactggagtacgcaactgatgtactgaagcagctgttagccgatctcatcgataagaacctggagtccaagaaccacccgaagctcctgctgcgacggaccgagagtgtggccgagaagatgctcaccaactggtttacatttttactatataagtttttgaaggaatgtgctggggagccgctgttctcacttttctgcgccattaaacaacagatggagaagggacccattgacgccatcacaggggaagcaagatactctctctccgaggataagctgataaggcagcaaattgattacaagaccttggtgctctcttgcgtcagtccggacaacgccaacagcccagaggttcccgttaaaatcctgaattgtgatacaatcacacaggttaaggagaaaatcttggacgccatcttcaaaaacgtcccttgttcacaccgccccaaagccgctgacatggatttggaatggagacagggctcaggagcacggatgattttgcaagatgaggatataaccaccaagatcgagaacgattggaaacggctcaatactcttgctcattaccaagtgcccgacgggagtgtggtcgcactcgtcagcaagcaggtgaccgcttacaatgccgtgaacaacagcacggtctctagaacaagtgccagcaagtatgagaatatgatccgctatacaggatctccagattctttaagaagcaggacccctatgataactcccgacctcgagagcggagttaagatgtggcatctggtaaagaaccatgagcacggagaccagaaggagggcgaccgggggagcaagatggtctccgagatctacttgacgaggctgttagcaactaaaggcacccttcagaaattcgtcgacgatcttttcgaaactattttcagtaccgctcaccgcggctccgcattgcctctggctatcaaatacatgtttgactttctcgacgaacaggccgacaaacatggtatccatgacccacacgtgagacacacgtggaagtctaattgtttgcccctccgattctgggtgaatatgattaagaatccgcagttcgttttcgatatccacaaaaacagcatcacggatgcttgcctctctgtagtggcacagacctttatggattcatgtagcactagcgagcaccgattaggaaaagatagcccctccaataaactgctttacgctaaggacatccctagctacaaaaactgggtggagcggtactacagtgacatcgggaaaatgcctgccattagcgatcaggatatgaacgcttacttagccgagcagtctcggatgcacatgaatgagttcaacaccatgtctgctctaagtgagatcttctcatatgtggggaagtattcagaagagattttggggccccttgaccacgatgatcagtgcggtaagcaaaaactggcgtataagctggaacaagtgattaccttgatgagccttgacagttag

SEQ ID NO: 270502 - DNA, 5685 bp, Artificial Sequence
  derived and/or modified sequence
atgaaggcgatgccttggaattggacttgcctcctgtctcatctactgatggttgggatggggagcagtacgctgctcacgagacaacctgctcccttatcccaaaagcagcgtagcttcgtaacattcagaggagagcccgccgagggctttaatcacttagtggtagacgagcggaccggccacatctatcttggggccgtcaataggatctacaaactcagttctgatctgaaggtcttggttacccacgagacaggcccagacgaagacaatcccaagtgctacccaccaagaatcgtccagacctgtaacgagccgttgactactacaaacaatgtcaacaagatgctgttaatcgattacaaggaaaacaggctcatcgcatgcggctcgctctaccagggtatctgcaaactattacgcctggaggacctgtttaaactgggtgaaccctatcataagaaagagcattacttgagtggcgttaatgagtctgggtctgtttttggggtgatcgtgagttattcaaatctagacgacaaactctttatagcaaccgctgtggacgggaaaccagagtattttcccacaataagcagtagaaagcttaccaagaacagtgaggctgatggcatgtttgcctacgtgttccatgacgagtttgtggcctctatgataaagatcccttctgacacttttactataattccagactttgacatttactatgtttacggcttctcctccgggaattttgtgtattttctgactctgcagccggaaatggtgtccccccccggaagcactaccaaggagcaagtttacaccagcaaactcgtccggctctgtaaagaggatactgctttcaactcctatgtggaggtacctataggttgtgaacgcagtggcgtcgaataccggctcctacaggcagcctatctgtccaaggcaggcgccgtgttgggacgcacgttaggcgtacatcccgacgatgatctactcttcaccgtcttcagtaagggacagaagagaaagatgaaaagcctggacgaatcagcattgtgtatattcattctgaaacagattaatgacaggattaaggaaagacttcaatcctgctaccgcggcgaagggacgctcgacctggcttggctcaaggtgaaagacatcccatgctcttctgcccttttaacaattgatgataacttttgcggcctggatatgaacgccccactcggtgtctctgacatggtacgcgggatccccgtcttcacagaagatcgggataggatgacatcagtgatagcgtatgtgtacaaaaatcactccttagcctttgtgggcactaagagtggtaagctcaaaaagattagggtggatgggccccggggcaacgccctgcagtatgagactgtccaggttgtagaccccgggcctgtgctgcgggacatggctttctccaaagatcacgagcagttatacatcatgtctgagcgccaattgacgcgggtcccagttgagagctgtggacagtatcagtcttgcggagaatgcctcggatctggtgaccctcactgtggctggtgtgttctccacaacacctgtacacgtaaggagcggtgcgagcgcagcaaggagccacggagattcgcatcagagatgaaacagtgtgttcggctgaccgttcatcccaacaacattagcgtaagccagtacaatgtgcttctggtgttagaaacctataacgtgccagagttgtccgccggcgtgaattgtacttttgaggatctcagtgaaatggacggacttgtcgtcggcaatcagatacagtgctattcccctgccgctaaggaggtccctagaatcattaccgagaatggtgaccaccacgtggttcagctccagctaaagtccaaggaaactggaatgacatttgccagtaccagcttcgtgttctacaattgtagtgtgcataatagttgtctgagttgcgtcgaatccccttaccggtgccactggtgcaaataccgccacgtctgtactcacgaccctaaaacctgcagcttccaggaaggccgggttaagctccccgaggattgtcctcaactcttgcgtgttgacaagatactggtccctgttgaagtgatcaagccaatcaccctcaaggcaaagaatctgccacagccgcagtccgggcagagaggctatgaatgcatcctcaatatccaaggctccgaacagcgcgtgccagccttacggttcaacagctccagcgttcagtgtcagaatacctcgtactcctacgagggcatggagatcaataatctgcctgtcgaactcacagtggtctggaacggacattttaatatcgacaaccctgcccagaataaggtccatctttataaatgcggcgcgatgcgggagtcctgcggtttgtgtcttaaggccgatcccgacttcgcttgcggctggtgtcagggtccagggcaatgcacactacgacagcattgccccgcacaggaaagtcagtggctagagctctctggtgccaagagcaagtgcaccaaccctagaatcaccgaaatcattccggtaactggacccagggaaggcggaacgaaagtgaccattagaggagagaatctggggttggagttccgcgacattgcatctcacgttaaagtggcaggcgttgaatgttctccgctggtcgatggctacattcctgccgagcagatagtgtgcgaaatgggggaggcgaagccctcccagcacgctggatttgttgagatatgcgttgctgtttgcagacctgagtttatggctagatcgagccagttgtactacttcatgacacttaccttgtcagatctcaagcccagcagggggcccatgagcgggggcacgcaggtgacaattactgggacaaacttgaacgcggggagcaatgtggtggtgatgtttggaaagcaaccttgcctcttccaccggcgctcacctagctacatagtgtgcaatactacgagcagtgatgaagtcttggaaatgaaggtcagcgtgcaggtggacagggcgaaaattcaccaggatctcgtcttccagtacgtcgaggacccaaccatagtccgcatcgagcccgagtggtccatagtaagcggcaacacccctatcgccgtctgggggactcacttagacttgatccaaaacccccagattcgggccaaacatggaggcaaggaacatatcaatatctgcgaggttctgaatgctaccgaaatgacctgtcaagcccccgcactcgccctgggaccagaccatcagtctgatcttaccgagagacctgaagagtttgggttcattctcgacaatgtacagtcgctgctgattctgaataagaccaattttacatattatcccaatcccgtgttcgaggccttcggcccttcgggcattctcgaactgaaacctggtaccccaattattttaaagggtaaaaatttgattccccccgtagcaggcggtaacgtaaaactgaactacaccgtgctggtgggggaaaagccctgtaccgtgaccgtgtccgatgtacagctcttatgcgagagtcccaatctgatcggacgccataaggtgatggcccgagtcggagggatggagtactcccctgggatggtgtacattgctcctgatagtccccttagtctgccagcaatagtctccatcgcagtcgccggaggactgctaatcatctttatcgtggctgtgttgattgcttataaacggaaatcaagggagagcgaccttactctgaaaaggctgcaaatgcaaatggacaaccttgagagcagagtggccttagagtgtaaagaggcctttgctgagcttcagactgacatccacgagcttacatctgatctagatggcgctggtatacctttcctggactaccggacttatacaatgcgggtgctgtttccgggcatcgaggatcatcctgtgttgcgggacctggaggtgcccggctacaggcaagagcgtgtggaaaagggtctgaagctgttcgcccaattgatcaacaacaaggtcttcctgctgtcctttattcggacgctggaatctcaacgttcctttagtatgagggaccgcggtaacgtggcttcgctgattatgaccgtgttgcagagtaagctggaatatgccaccgacgtgttgaaacagctcttagccgatctcatcgataagaacttagaatctaaaaatcatccaaagctcctcctgagacgtacagagagtgtggccgaaaaaatgctgaccaactggttcacattcttgctgtataagtttctcaaggagtgcgctggagagccactgttcagtctgttttgtgctataaaacagcaaatggagaaagggccgatcgatgctattaccggagaggcccgatattcactcagtgaagataaacttattcgccaacagattgattacaaaacgttggtgctcagctgtgtttctcctgacaacgccaatagccctgaggtgcctgtgaagatactgaattgcgacacaatcacccaagtgaaagagaaaatcctggatgccatctttaagaacgttccatgcagccatagacccaaggctgctgacatggatctcgagtggaggcagggatctggggcccggatgatcttgcaggatgaggacatcaccacgaaaatcgagaacgactggaaaaggctgaacactctcgcccattatcaagtaccggatggatcagtcgtggccctcgtgtctaagcaggtgacagcttacaacgctgtaaataattcgaccgtgtcccgaacaagcgcctctaaatacgagaatatgattcggtatactggcagccccgacagtctccgctcacgcactccgatgattacgcctgacctggagagcggagtcaaaatgtggcatctggtcaaaaatcacgagcacggagaccagaaggagggcgacagagggtctaagatggtttcggaaatttacctcacacggctgctcgcaacgaagggcacattgcagaaattcgtagatgacctcttcgagacaatattctccaccgcccaccgcggcagcgctctgcccctcgcaataaaatacatgttcgatttcctcgacgagcaagctgataagcacggcattcatgaccctcacgtgcggcacacttggaagtctaattgtctaccactcaggttttgggtgaatatgataaagaatcctcaattcgtgtttgatatccataagaattctatcacagacgcgtgcctgtccgtggttgcacagacttttatggactcttgctccacaagtgagcacaggctaggcaaagactccccctccaacaagttgctctatgctaaggacatcccgagttacaagaactgggttgagcgatactacagtgacattgggaaaatgcctgccatatctgaccaggacatgaacgcctacttggccgagcagtctcggatgcacatgaacgagtttaatactatgagcgctctgtccgagatcttcagttacgtgggaaagtattcagaagaaatccttgggccactggaccatgacgaccagtgcggtaagcaaaaactcgcatacaagttagaacaagtaatcaccctgatgtctttagatagctag

SEQ ID NO: 270503 - DNA, 5685 bp, Artificial Sequence
  derived and/or modified sequence
atgaaggccatgccctggaactggacctgcctgctgagccacctgctgatggtgggcatgggcagcagcaccctgctgacccggcagcctgcccccctgagccagaagcagaggagctttgtgaccttccggggggagcctgctgagggcttcaaccacctggtggtggatgagaggacaggccacatctacctgggcgctgtgaaccgcatctacaagctgagcagtgacctgaaggtgctggtgacccatgagaccggcccagatgaggacaaccccaagtgctacccaccccgcatcgtgcagacctgcaatgagcccctgaccaccaccaacaacgtgaacaagatgctgctgattgactacaaggagaacagactcatcgcctgtggcagcctgtaccagggcatctgcaagctgctgcggctggaggacctcttcaagctgggggagccctaccacaagaaggagcactacctgtctggagtgaatgaaagtggctctgtgtttggagtgattgtgtcctacagcaacctggatgacaagctgttcatcgccacagctgtggatggcaagccagagtacttccccaccatcagcagcaggaagctgaccaagaacagcgaggctgatggcatgtttgcctacgtgttccatgatgaatttgtggcctccatgatcaagatccccagcgacaccttcaccatcatcccagactttgacatctactacgtgtatggcttcagcagcggcaactttgtgtacttcctgaccctgcagcctgagatggtgagccccccaggcagcaccaccaaggagcaggtgtacaccagcaagctggtgcggctgtgcaaggaggacacagccttcaacagctatgtggaggtgcccatcggctgtgagaggtctggagtggagtaccgcctgctgcaggccgcctacctgagcaaggccggggctgtgctgggccgcaccctgggcgtgcacccagatgatgacctgctcttcaccgtcttcagcaagggccagaagaggaagatgaagagcctggatgaaagtgccctgtgcatcttcatcctgaagcagatcaatgaccgcatcaaggagcggctgcagagctgctacagaggagagggcaccctggacctggcctggctgaaggtgaaggacatcccctgcagcagcgccctgctgaccattgatgacaacttctgtggcctggacatgaatgcccccctgggcgtgtctgacatggtgcggggcatccctgtgttcacagaagatcgggacaggatgaccagcgtcatcgcctacgtgtacaagaaccacagcctggcctttgtgggcaccaagagcggcaagctgaagaagatccgggtggatggccccagaggaaatgccctgcagtatgagaccgtgcaggtggtggaccccggccctgtgctgcgggacatggccttcagcaaggaccacgagcagctgtacatcatgtctgagcggcagctgaccagggtgcctgtggagagctgtggccagtaccagagctgtggggagtgcctgggcagcggggacccccactgcggctggtgtgtgctgcacaacacctgcaccaggaaggagcgctgtgagaggagcaaggagcccaggagatttgccagcgagatgaagcagtgtgtgcggctgactgtgcaccccaacaacatctctgtgtcccagtacaacgtgctgctggtgctggagacctacaacgtgcctgagctgtctgctggggtgaactgcacctttgaggacctgtctgagatggatggcctggtggtgggcaaccagatccagtgctacagccctgctgccaaggaggtgccccgcatcatcacagaaaatggagaccaccacgtggtgcagctgcagctgaagagcaaggagaccggcatgacctttgccagcaccagctttgtgttctacaactgcagcgtgcacaacagctgcctgagctgtgtggagagcccctaccgctgccactggtgcaagtacagacatgtgtgcacccatgaccccaagacctgcagcttccaggagggccgggtgaagctgcctgaggactgcccccagctgctgcgggtggacaagatcctggtgcctgtggaggtgatcaagcccatcaccctgaaggccaagaacctgccccagccccagagcggccagaggggctatgagtgcatcctgaacatccagggcagcgagcagagggtgcctgccctgcgcttcaacagcagctctgtgcagtgccagaacaccagctacagctatgagggcatggagatcaacaacctgcctgtggagctgactgtggtgtggaatggccacttcaacatcgacaacccagcccagaacaaggtgcacctgtacaagtgtggggccatgagggagagctgtggcctgtgcctgaaggctgaccctgactttgcctgtggctggtgccagggccctggccagtgcaccctgcggcagcactgcccagcccaggagagccagtggctggagctgagcggggccaagagcaagtgcaccaacccccgcatcacagagatcatccctgtgacaggcccccgggagggcggcaccaaggtgaccatcagaggagagaacctgggcctggagttccgggacatcgccagccacgtgaaggtggccggcgtggagtgcagccccctggtggatggctacatcccagctgagcagatcgtgtgtgagatgggagaggccaagcccagccagcacgccggctttgtggagatctgtgtggccgtgtgcaggcctgagttcatggcccggagcagccagctgtactacttcatgaccctgaccctgagtgacctgaagcccagccggggccccatgtctgggggcacccaggtgaccatcaccggcaccaacctgaatgccggcagcaatgtggtggtgatgtttgggaagcagccctgcctcttccaccggcgcagccccagctacatcgtgtgcaacaccaccagcagtgatgaggtgctggagatgaaggtgtctgtgcaggtggaccgggccaagatccaccaggacctggtgttccagtatgtggaggaccccaccatcgtgagaattgagcctgagtggagcatcgtgtctggcaacacccccatcgctgtgtggggcacccacctggacctgatccagaacccccagatccgggccaagcatggaggcaaggagcacatcaacatctgtgaggtgctgaatgccacagagatgacctgccaggccccagccctggccctgggccctgaccaccagagcgacctgacagagaggcctgaggagtttggcttcatcctggacaacgtgcagagcctgctgatcctgaacaagaccaacttcacctactaccccaaccctgtgtttgaggccttcggccccagcggcatcctggagctgaagccaggcacccccatcatcctgaagggcaagaacctgatcccccctgtggccggcggcaatgtgaagctgaactacacagtgctggtgggggagaagccctgcaccgtgacagtgtctgatgtgcagctgctgtgtgagagccccaacctgattggccgccacaaggtgatggcccgggtgggcggcatggagtacagccctggcatggtgtacatcgccccagacagccccctgagcctgcctgccatcgtgtccattgctgtggccggcggcctgctgatcatcttcatcgtggccgtgctgattgcctacaagaggaagagccgggagagtgacctgaccctgaagaggctgcagatgcagatggacaacctggagagccgggtggccctggagtgcaaggaggcctttgctgagctgcagacagacatccacgagctgaccagtgacctggatggagctggcatccccttcctggactaccgcacctacaccatgagggtgctcttccctggcatcgaggaccaccctgtgctgcgggacctggaggtgcccggctaccggcaggagcgggtggagaagggcctgaagctgtttgcccagctgatcaacaacaaggtgttcctgctgtccttcatccgcaccctggagagccagaggagcttctccatgagggacagaggaaatgtggccagcctcatcatgacagtgctgcagagcaagctggagtatgccacagatgtgctgaagcagctgctggccgacctgattgacaagaacctggagagcaagaaccaccccaagctgctgctgcggaggacagagagcgtggccgagaagatgctgaccaactggttcaccttcctgctgtacaagttcctgaaggaatgtgccggggagcccctcttcagcctcttctgtgccatcaagcagcagatggagaagggccccattgatgccatcaccggggaggcccgctacagcctgtctgaggacaagctgatccggcagcagattgactacaagaccctggtgctgagctgtgtgtccccagacaatgccaacagccctgaggtgcctgtgaagatcctgaactgtgacaccatcacccaggtgaaggagaagatcctggatgccatcttcaagaatgtgccctgcagccaccggcccaaggctgctgacatggacctggagtggaggcagggcagcggggccaggatgatcctgcaggatgaggacatcaccaccaagattgaaaatgactggaagaggctgaacaccctggcccactaccaggtgcctgatggctctgtggtggccctggtgtccaagcaggtgacagcctacaatgctgtgaacaacagcacagtgtccaggaccagcgccagcaaatatgagaacatgatccgctacacaggcagcccagacagcctgcggagcaggacccccatgatcaccccagacctggagagcggcgtgaagatgtggcacctggtgaagaaccacgagcacggggaccagaaggagggggaccggggcagcaagatggtgtctgagatctacctgacccggctgctggccaccaagggcaccctgcagaagtttgtggatgacctgtttgagaccatcttcagcacagcccaccggggcagcgccctgcccctggccatcaagtacatgtttgacttcctggatgagcaggccgacaagcacggcatccatgacccccacgtgcgccacacctggaagagcaactgcctgcccctgcgcttctgggtgaacatgatcaagaacccccagtttgtgtttgacatccacaagaacagcatcacagatgcctgcctgtctgtggtggcccagaccttcatggacagctgcagcaccagcgagcaccggctgggcaaggacagccccagcaacaagctgctgtatgccaaggacatccccagctacaagaactgggtggagcgctactacagcgacatcggcaagatgcctgccatcagtgaccaggacatgaatgcctacctggccgagcagagcaggatgcacatgaatgagttcaacaccatgtctgccctgtctgagatcttctcctatgtgggcaagtacagcgaggagatcctgggccccctggaccatgatgaccagtgtgggaagcagaagctggcctacaagctggagcaggtgatcaccctgatgagcctggacagctag

SEQ ID NO: 270504 - DNA, 5685 bp, Artificial Sequence
  derived and/or modified sequence
atgaaggccatgccctggaactggacctgcctgctgagccacctgttgatggtgggcatgggctcctcaaccctgcttactcgccaacccgctcctctttcccaaaaacaaagaagcttcgtcacctttagaggcgaaccagccgaaggtttcaaccacctggtagtggatgagcgcaccggccatatctatctgggtgcagtcaaccgaatttataagctctcctccgatcttaaagttcttgtaacacacgagaccgggccagacgaagataacccgaaatgctacccgccccggattgtccagacctgtaatgagcctctcactaccacaaacaacgtcaacaaaatgttactcatcgactataaggagaatcgcctgatcgcctgcgggagcctttatcaaggtatttgtaagctcttgaggttagaggatttgtttaagctaggtgagccttatcataagaaagaacattatctgtccggtgttaacgaatctggtagcgttttcggcgtgattgtctcatactcaaaccttgacgataagctctttatcgcgacagccgtcgacgggaagcctgaatacttccctaccattagctcacgcaagctgaccaaaaactccgaagcggacggcatgttcgcttacgtcttccacgacgaatttgtggcctccatgattaagatcccatccgacaccttcaccattatcccggactttgatatctactatgtgtacggattttcttccggaaacttcgtgtatttcctcactctgcagccagaaatggtcagcccaccaggatccacaacaaaagagcaggtgtatacatccaagctggtgcggctatgcaaggaggataccgccttcaactcctacgtggaggtgcctattgggtgtgaaagatctggggtggaatatcgtctcttacaggccgcgtatttgtcaaaggctggcgccgttcttgggaggacgttaggagtacacccggatgatgatctcctgtttacagtgtttagtaaaggccagaagaggaagatgaagtcgttggatgagagtgctctctgcatttttatcctgaagcaaatcaatgaccgaatcaaagagagattgcagtcttgctatcggggtgaaggcactctggatctcgcctggcttaaggttaaagacattccgtgtagctcagccctgctgaccattgatgacaacttttgtggcctcgatatgaacgcccccttgggcgtgagcgacatggtacgtggcatcccagtatttacagaagatcgcgatagaatgacttcagtgatcgcttacgtgtacaagaatcattctctcgccttcgttgggaccaaaagtggaaagttgaaaaaaatcagggtggatggcccaagaggcaatgcgctccaatatgaaactgtgcaggtcgtggacccggggccagtcctgcgagatatggcctttagtaaggaccatgagcaattgtacatcatgtctgagagacaacttacccgagttccggtcgaatcgtgcgggcagtatcagagttgtggtgagtgcttaggctctggggatccccactgtgggtggtgcgtcttgcacaacacatgtacccgtaaggagcgctgcgagcgtagtaaggaaccccgcaggttcgcatcggaaatgaaacaatgtgtccgtttgaccgttcatcctaacaacatctcagtgagccagtacaatgtcctattggttctagaaacatacaatgtgcctgagctatccgctggggtcaattgtacctttgaggacctgtctgaaatggatggactggtcgttgggaatcaaattcagtgttactctccagccgctaaggaagtgccaaggatcattacagagaacggagatcaccatgtggtccagttacagttaaaaagcaaagagactggaatgacatttgcctctacctcattcgtgttctacaactgctcagtgcataattcatgcctgtcctgcgttgagagtccataccggtgccactggtgtaagtatcgccatgtgtgcacccatgatcccaaaacgtgctcctttcaggagggacgcgtgaagcttccagaagattgccctcagctactccgtgtggacaaaattctggtgcctgtcgaagttattaaacctatcactctcaaggctaagaacttaccacagccacagtcagggcagcgcggttatgaatgcatcctaaatattcaaggttcagagcagagggtgcctgccctgagatttaattcttcgtccgtgcagtgccagaataccagttacagctacgaggggatggagatcaacaatttaccagttgagctgacggttgtctggaatgggcactttaacattgacaatcccgctcagaataaggtgcatttatataaatgtggggccatgagagaaagctgtggattatgtctgaaggccgaccctgattttgcctgcggatggtgtcagggtcccggccaatgtaccttaaggcagcactgtcctgcacaggaatcacagtggttagaattgtctggagcaaaaagcaaatgcacgaaccctagaatcacggaaattatccctgtgactggcccaagagagggaggtacaaaggtcaccattaggggagagaacctcgggttggaatttagagacattgcctcacacgtcaaagtggctggggtggaatgctccccgctagtcgatggatatatcccagccgaacagatcgtctgcgagatgggagaagccaaaccatctcagcacgctggctttgtcgagatctgtgtggctgtttgccgacccgagttcatggcccgctctagccagctgtattatttcatgaccctcactctgtcagatctgaagccttccagggggcctatgtcaggggggacacaggtcacgattacaggaactaacctgaatgctggcagcaacgtagttgtgatgttcggaaaacagccttgtctgtttcaccggcgcagtccaagttacatcgtatgtaataccacatcctccgacgaggtgctggaaatgaaggtgtcagtccaggtggaccgggctaaaattcatcaggatctggttttccagtatgttgaagatcccaccatagtgaggatcgagccggaatggagcatcgtgtccgggaacacgcctatcgccgtgtggggcacccatctagatctaattcagaatccccagatccgtgccaagcatggggggaaggagcacattaacatatgtgaagtcctgaatgctaccgagatgacctgtcaggctccagccttggctctcggacccgatcaccagtccgacctcactgagagaccagaagagttcggtttcatactggacaacgtgcaaagccttctcatcctgaataaaaccaactttacatactaccccaacccggtcttcgaggccttcgggcctagtggcatcctggaactaaagcctggtactccaataattctgaaaggaaaaaacctcattcccccagtcgcagggggaaatgtgaaacttaattacactgtcctggtgggtgagaagccttgcacagtaactgtgtctgacgtgcagctgctttgcgaatcacctaacctgattggtcggcataaagtgatggctcgggtcggcggtatggagtactcgccagggatggtgtatattgcgcctgactcaccgctgtcgctccccgccatcgtgtccatagctgtggcaggaggcttgctgataatcttcatcgtggccgtcctgattgcctacaaacgcaaatcaagagagtctgacctgacactgaagcgtctccagatgcagatggataatttggagtcccgggttgcgttagaatgcaaagaagcctttgcagaactgcaaacagatatccatgaactgacttccgatctggatggcgcaggcatccccttcctggactacaggacctacactatgcgtgttttgtttcccggtattgaggaccacccagtgctgcgcgatcttgaggtccccggctacagacaagaaagggtggagaaaggattgaaactattcgctcagcttatcaataacaaggtgttcctgctctctttcatcagaaccttagagtctcagcgctccttttcaatgcgtgatcgcggcaacgtcgccagcctaatcatgaccgtgctgcaatcaaagttggagtacgccaccgatgtactgaaacagctgctcgccgatctgattgataaaaatctcgagtctaagaaccacccaaagctcttgctcaggcgcacggagagcgtggctgaaaagatgctgacaaattggtttaccttcttgctttataagttcttaaaagaatgtgcaggggaacccctctttagcctattttgtgccattaaacagcagatggagaaggggccgatcgacgccatcaccggcgaagcacgatattctctgtctgaggacaagctgattcgacaacagatcgattacaaaaccctagtactaagctgcgtgagccctgataacgctaattcccctgaggtgccggtaaaaattctgaactgtgacaccataacacaggtcaaagaaaaaatcctcgacgcaatcttcaagaacgtcccttgctcccatcgtcccaaggcagctgatatggacctcgaatggagacaggggagcggtgcgagaatgattctgcaggacgaagatatcaccaccaagattgagaatgattggaaacggctgaataccctcgcacactaccaagtgccagacgggtccgtggtggctcttgtttctaaacaagtgaccgcctataacgcagttaataactcaaccgtgtctcgtacctcagcctcaaaatatgagaatatgattcgatacaccgggtccccagactccctccgttcccggacgcccatgatcacacccgatctcgagtctggcgtgaagatgtggcatctcgtgaagaaccacgaacatggggaccagaaggagggagatcggggttccaaaatggtgtcggagatctatttaacacgactgctggcaaccaagggcactctacagaagttcgtggatgacctttttgagaccattttttccacagcacatagaggatccgccttgcctctggcaatcaagtatatgttcgactttctggacgagcaagccgacaaacacggcatccatgatcctcatgtacgacacacctggaaaagcaattgcctccctctaaggttttgggtaaatatgataaagaacccccagttcgtgttcgatatacataagaatagtattaccgacgcttgcttgagtgtggttgctcagacctttatggatagctgctcaacgtctgaacaccgactcggtaaggacagtccatcaaataagctcctctacgcaaaggatatccctagctataagaactgggtcgaacgatattattccgacatcggaaaaatgcccgcgataagcgatcaggatatgaacgcctatttggccgagcagagtcgcatgcatatgaacgagtttaacactatgagtgccttatcagagatttttagttacgtcggcaaatacagcgaggagatcttaggtcccctggatcacgacgaccagtgcgggaaacaaaagcttgcctataagttggagcaggtcatcacactgatgagcctggatagttag

SEQ ID NO: 270505 - DNA, 5685 bp, Artificial Sequence
  derived and/or modified sequence
atgaaggccatgccctggaactggacctgcctgctgagccacctgctcatggtcggaatggggagcagcactttgctgactcgacaacccgcccctctgtctcagaagcagcgctcttttgtgactttcagaggagaacctgcagaaggattcaaccacctcgtcgtcgatgaaaggacaggccacatctatctcggtgctgttaatagaatttacaaactcagctctgatctgaaggtgctggtcacacatgagacaggacctgacgaagacaacccaaagtgctacccaccgcgtatcgtgcaaacttgcaacgaaccgctgactaccactaacaacgtcaataagatgttgctgattgattacaaggagaaccgccttattgcttgtggatccttataccagggaatctgcaaattattgcgattggaagatttgttcaaactaggagagccttaccacaagaaagagcattacttgtctggagtgaatgaatccggctctgtgttcggagtcatagtatcttacagcaacctggatgacaagcttttcatcgctactgccgttgacggcaaaccagaatatttccctactatctcctcacggaagcttaccaagaactcagaggccgatgggatgtttgcttatgttttccacgacgaatttgtggctagcatgatcaagatcccctcggatacctttactattataccagactttgacatctactacgtgtatggattctctagtggtaactttgtatatttcttgacgttgcagcccgagatggtgagccccccgggcagcacaaccaaggagcaggtgtacacctccaaactggttaggttgtgtaaggaggataccgctttcaatagctacgtcgaggtgcctatcgggtgtgagaggagcggagtcgagtaccgccttttacaggccgcttaccttagtaaggcgggggcggtcctgggacgcacactcggagttcaccctgatgatgacctgctcttcacagtgttcagcaaaggacagaaacggaaaatgaagtccctagacgagtcagctttgtgcatcttcattctaaagcagataaatgatagaatcaaggaacggcttcagtcctgctatcggggcgagggaacgcttgacctggcttggttaaaggtaaaagatatcccctgttcttctgcattgctcaccatagatgataacttttgtggcttggacatgaacgcgcctctcggtgtatccgacatggtgcgaggtatcccagtgttcaccgaggaccgcgataggatgactagtgtcattgcctatgtgtataagaaccacagcctggcgttcgtgggaacgaagagtggcaagttaaaaaagatcagggtcgacggacctaggggtaacgctctgcagtatgagaccgtacaagtggtcgatcccggcccggttctccgtgatatggcattttcaaaagaccacgagcagttatacatcatgagcgaacggcagctcacgagagttcctgtggagtcttgcggccagtaccagagctgcggtgagtgcctcggatccggagatccacattgtggctggtgcgtgttacacaacacttgtaccaggaaagaacggtgcgagcgctccaaagagccgcgtcgttttgctagtgaaatgaaacagtgtgttagactaaccgttcatcccaataatattagtgtttcacagtacaacgtactcctggtgctggaaacgtataatgttcctgagcttagcgcaggcgtgaattgtacctttgaggatttaagcgaaatggatggtttggttgtgggtaatcagatccagtgttatagccccgcagccaaagaagtaccgagaatcatcacagaaaacggcgaccaccatgtcgtgcagttgcagctgaaatccaaggaaacaggaatgactttcgcgagcacgagcttcgtcttttataattgttcagtgcacaatagctgtctgtcttgtgtcgaatcaccatacaggtgtcattggtgtaaatatcgtcacgtctgtacccatgaccccaagacttgctccttccaggagggcagagttaagctaccagaagattgcccccaacttttacgcgtcgacaagatcctagtgcccgttgaagtcatcaagcccattactctgaaagcgaaaaacttgccgcaaccccaatcaggtcagcgcggatatgagtgtatattgaacatccaggggtctgaacagagggtcccagctcttagatttaactcctccagcgtgcaatgccaaaatacctcgtacagctacgagggaatggagatcaataacctgccggttgaattgaccgtagtctggaacggtcatttcaacatagacaacccagcgcaaaataaggtccacctatacaaatgtggcgccatgagggagtcttgcggattgtgtctcaaggcagatcctgacttcgcctgcggttggtgtcagggcccaggacagtgtacactgagacagcactgtccagcccaagagtcacaatggctggagctttccggcgccaagagtaagtgcaccaatccccgaattaccgaaataataccagttaccggtccccgggaaggagggaccaaggttactattagaggagagaatttggggctggagttcagagacattgcatctcacgtgaaggtggccggagtggaatgctccccgcttgtggacggctatatccctgctgaacagatagtgtgtgagatgggagaggccaaaccatctcagcacgcagggtttgtggaaatttgtgtggcggtgtgtcgacccgagttcatggcccggtcctcccagctctattacttcatgaccctcaccctttctgatctgaagccatctagagggcccatgagtggtgggacccaggtcaccattacaggaactaacttgaacgctggatccaatgtggtggtgatgttcggcaagcaaccttgcctgtttcaccggaggagcccatcctatatcgtttgtaataccacttctagtgacgaagttttggagatgaaggtgagtgttcaggtcgacagagccaaaattcaccaggacctggtgtttcagtatgtcgaagatcctaccattgtgcgaattgagcccgagtggagcattgtgagcggtaatacgcctattgcggtttggggcacacatctagatttaatccaaaatccacagattagagcaaagcatggagggaaagaacacatcaacatctgtgaagtcttgaatgctaccgaaatgacctgccaagcgccagccctggccctgggccccgaccaccagtccgatctcactgagaggccagaggagttcgggtttatcctggacaatgtgcagagtcttcttatactgaacaaaacaaacttcacttattatcctaaccctgtttttgaagcctttgggccttcagggatactggagctgaaacctggcacccctatcatcctcaaaggaaagaaccttatccccccagtggcgggtggaaatgttaaactcaattacacggtccttgtgggcgaaaagccatgtacagtgaccgtctcagacgtgcaactgctttgcgaatccccaaacctcatcggcaggcataaggtcatggctcgtgtgggtggaatggagtattctcctggaatggtgtatattgcacccgactcccctctttctttacccgccattgtctctatagccgtggccggcggactgctgatcatctttattgtcgcagtgcttatcgcgtacaaacggaagagccgtgagtcagaccttacccttaagcggttacagatgcagatggacaacttggaatcccgggtggctctcgagtgtaaggaagcctttgctgaactccagactgacattcatgagctgactagtgaccttgacggtgcagggatacccttcctggactatcggacatataccatgagggtcctttttccaggaattgaggatcacccagtcttgagggacttggaggtgccggggtatcgacaagagagggttgagaagggacttaaactgtttgcgcaactgattaacaacaaagtttttctccttagctttataagaaccctggagagtcaacgttccttcagtatgagggaccggggcaacgtggcgtctcttataatgacagtgttgcaaagtaagctggaatatgcaacggatgtcctaaagcagctcctggcggatctgattgacaaaaatctggaatctaaaaaccatcctaagctcctgcttcgccgcaccgaatctgtggccgaaaaaatgctgacaaattggtttaccttcctcctgtataagttcctcaaggaatgtgcaggcgaaccgctctttagcctgttctgtgccataaaacaacagatggagaagggcccaattgatgccattacaggggaggcgcgatacagtctttcagaagataaactcatccgtcagcagatagactacaaaactcttgtcttaagttgtgtgagtcccgacaatgcaaattcacctgaagttccagtcaaaattcttaactgcgatacaatcacacaagtaaaggaaaaaatcttggatgccattttcaagaacgtcccttgttctcaccgacccaaagcggccgacatggatctggagtggaggcagggttctggcgcgcgcatgattcttcaggatgaagacatcaccacaaaaattgagaatgactggaagcgattaaataccctggcccactaccaggtgcccgacggatctgtcgtggcattagtatctaaacaagtgacagcttacaacgcagtcaacaactcaactgtctcgcggacaagcgcatccaaatacgaaaacatgatcagatataccggctcgccagactcacttcggagcagaacccctatgattacccccgacctggaatctggagtgaaaatgtggcacttggtgaaaaatcacgagcacggtgaccagaaggagggcgatcgtggctcaaagatggtgtccgagatctatctgacgcgcctgttagctacgaagggtaccctacaaaaatttgtcgacgatttatttgaaacaatcttctctaccgcgcatcgtggttctgcgctgccactggcaattaaatacatgtttgattttctcgacgagcaagcagataaacacggcattcacgaccctcacgtgaggcacacctggaagtctaattgcctacctctccgtttctgggtcaatatgattaagaatccccaatttgtatttgatatccacaaaaattccatcactgatgcttgcttgagcgtggtggcccagaccttcatggactcctgtagtacttcagaacacaggctgggaaaagatagcccatcaaacaagctactctacgctaaagacatcccttcttataagaactgggtggagcgatattactcagatatcggaaaaatgcctgccataagcgaccaagacatgaatgcataccttgccgaacaaagccgcatgcacatgaatgaattcaatactatgtcagcccttagcgagatcttcagctatgtgggcaagtatagcgaagagattcttggtcccctcgaccatgatgaccaatgtgggaaacagaaactggcttacaagttggaacaggtcattacactgatgtccctcgattcgtag

SEQ ID NO: 270506 - DNA, 13061 bp, Artificial Sequence
  derived and/or modified sequence
tgcgttcggggctggggctggaggaggcagccacacgcgcgcacacgcacacgttcagaggagggcgagaggcagcggcataggctccatctgcagtgtcaatgcggcgctcccgctgaaggagggaaacgcggcgcgtccagtaggggagactgcattgctgagtcctggccctctgaggggacgactgtgcctgagtgctgctgtgccactgggacccgcctctgccatgaaagccatgccctggaactggacctgccttctctcccacctcctcatggtgggcatgggctcctccactttgctcacccggcagccagccccgctgtcccagaagcagcggtcatttgtcacattccgaggagagcccgccgagggtttcaatcacctggtggtggatgagaggacaggacacatttacttgggggccgtcaatcggatttacaagctctccagcgacctgaaggtcttggtgacgcatgagacagggccggacgaggacaaccccaagtgttacccaccccgcatcgtccagacctgcaatgagcccctgaccaccaccaacaatgtcaacaagatgctcctcatagactacaaggagaacaggctgattgcctgtgggagcctgtaccaaggcatctgcaagctgctgaggctggaggacctcttcaagctgggggagccttatcataagaaggagcactatctgtcaggtgtcaacgagagcggctcagtctttggagtgatcgtctcctacagcaacctggatgacaagctgttcattgccacggcagtggatgggaagcccgagtattttcccaccatctccagccggaaactgaccaagaactctgaggcggatggcatgttcgcgtacgtcttccatgatgagttcgtggcctcgatgattaagatcccttcggacaccttcaccatcatccctgactttgatatctactatgtctatggttttagcagtggcaactttgtctactttttgaccctccaacctgagatggtgtctccaccaggctccaccaccaaggagcaggtgtatacatccaagctcgtgaggctttgcaaggaggacacagccttcaactcctatgtagaggtgcccattggctgtgagcgcagtggggtggagtaccgcctgctgcaggctgcctacctgtccaaagcgggggccgtgcttggcaggacccttggagtccatccagatgatgacctgctcttcaccgtcttctccaagggccagaagcggaaaatgaaatccctggatgagtcggccctgtgcatcttcatcttgaagcagataaatgaccgcattaaggagcggctgcagtcttgttaccggggcgagggcacgctggacctggcctggctcaaggtgaaggacatcccctgcagcagtgcgctcttaaccattgacgataacttctgtggcctggacatgaatgctcccctgggagtgtccgacatggtgcgtggaattcccgtcttcacggaggacagggaccgcatgacgtctgtcatcgcatatgtctacaagaaccactctctggcctttgtgggcaccaaaagtggcaagctgaagaagatccgggtggatggacccaggggcaacgccctccagtatgagacggtgcaggtggtggaccccggcccagtcctccgggatatggccttctccaaggaccacgagcaactctacatcatgtcagagaggcagctcaccagagtccctgtggagtcctgtggtcagtatcagagctgcggcgagtgccttggctcaggcgacccccactgtggctggtgtgtgctgcacaacacttgcacccggaaggagcggtgtgagcggtccaaggagccccgcaggtttgcctcggagatgaagcagtgtgtccggctgacggtccatcccaacaatatctccgtctctcagtacaacgtgctgctggtcctggagacgtacaatgtcccggagctgtcagctggcgtcaactgcacctttgaggacctgtcagagatggatgggctggtcgtgggcaatcagatccagtgctactcccctgcagccaaggaggtgccccggatcatcacagagaatggggaccaccatgtcgtacagcttcagctcaaatcaaaggagaccggcatgaccttcgccagcaccagctttgtcttctacaattgcagcgtccacaattcgtgcctgtcctgcgtggagagtccataccgctgccactggtgtaaataccggcatgtctgcacccatgaccccaagacctgctccttccaggaaggccgagtgaagctgcccgaggactgcccccagctgctgcgagtggacaagatcctggtgcccgtggaggtgatcaagcctatcacgctgaaggccaagaacctcccccagccccagtctgggcagcgtggctacgaatgcatcctcaacattcagggcagcgagcagcgagtgcccgccctgcgcttcaacagctccagcgtacagtgccagaacacctcttattcctatgaagggatggagatcaacaacctgcccgtggagttgacagtcgtgtggaatgggcacttcaacattgacaacccagctcagaataaagttcacctctacaagtgtggagccatgcgtgagagctgcgggctgtgcctcaaggctgacccagacttcgcatgtggctggtgccagggcccaggccagtgcaccctgcgccagcactgccctgcccaggagagccagtggctggagctgtctggtgccaaaagcaagtgcacaaacccccgcatcacagagataatcccggtgacaggcccccgggaagggggcaccaaggtcactatccgaggggagaacctgggcctggaatttcgcgacatcgcctcccatgtcaaggttgctggcgtggagtgcagccctttagtggatggttacatccctgcagaacagatcgtgtgtgagatgggggaggccaagcccagccagcatgcaggcttcgtggagatctgcgtggctgtgtgtcggcctgaattcatggcccggtcctcacagctctattacttcatgacactgactctctcagatctgaagcccagccgggggcccatgtccggagggacccaagtgaccatcacaggcaccaacctgaatgccggaagcaacgtggtggtgatgtttggaaagcagccctgtctcttccacaggcgatctccatcctacattgtctgcaacaccacatcctcagatgaggtgctagagatgaaggtgtcggtgcaggtggacagggccaagatccaccaggacctggtctttcagtatgtggaagaccccaccatcgtgcggattgagccagaatggagcattgtcagtggaaacacacccatcgccgtatgggggacccacctggacctcatacagaacccccagatccgtgccaagcatggagggaaggagcacatcaatatctgtgaggttctgaacgctactgagatgacctgtcaggcgcccgccctcgctctgggtcctgaccaccagtcagacctgaccgagaggcccgaggagtttggcttcatcctggacaacgtccagtccctgctcatcctcaacaagaccaacttcacctactatcccaacccggtgtttgaggcctttggtccctcaggaatcctggagctcaagcctggcacgcccatcatcctaaagggcaagaacctgatcccgcctgtggctgggggcaacgtgaagctgaactacactgtgctggttggggagaagccgtgcaccgtgaccgtgtcagatgtccagctgctctgcgagtcccccaacctcatcggcaggcacaaagtgatggcccgtgtcggtggcatggagtactccccggggatggtgtacattgccccggacagcccgctcagcctgcccgccatcgtcagcatcgcagtggctggcggcctcctcatcattttcatcgtggccgtgctcattgcctataaacgcaagtcccgcgaaagtgacctcacgctgaagcggctgcagatgcagatggacaacctggagtcccgtgtggccctggagtgcaaggaagcctttgccgagctgcagacggacatccatgagctgaccagtgacctggatggagccgggattccgttcctggactatagaacttacaccatgcgggtgctgttcccaggaattgaagaccaccctgtcctccgggaccttgaggtcccgggctaccggcaggagcgtgtggagaaaggcctgaagctcttcgcccagctcatcaacaacaaggtgttcctgctgtccttcatccgcacgcttgagtcccagcgtagcttctccatgcgcgaccgtggcaacgtggcctcactcatcatgaccgtgctgcagagcaagctggagtacgccactgatgtgctgaagcagctgctggccgacctcattgacaagaacctggagagcaagaaccaccctaagctgctgctcaggaggactgagtcagtggctgagaagatgctgaccaattggtttactttcctcctctacaagttcctcaaggagtgtgctggggagcccctcttctccctgttctgtgccatcaagcagcagatggagaagggccccattgacgccatcacgggcgaggcccgctactccttgagcgaggacaagctcatccgccagcagattgactacaaaaccctggtcctgagctgtgtcagcccagacaatgccaacagccccgaggtcccagtaaagatcctcaactgtgacaccatcactcaggtcaaggagaagattctggatgccatcttcaagaatgtgccttgctcccaccggcccaaagctgcagatatggatctggagtggcgacaaggaagtggggcaaggatgatcttgcaggatgaagacatcaccaccaagattgagaatgattggaagcgactgaacacactggcccactaccaggtgccagatggttccgtggtggcattagtgtccaagcaggtgacagcctataacgcagtgaacaactccaccgtctccaggacctcagcaagtaaatatgaaaacatgatccggtacacgggcagccccgacagcctccgctcacggacacctatgatcactcctgacctggagagtggagtcaagatgtggcacctagtgaagaaccacgagcacggagaccagaaggagggggaccgggggagcaagatggtgtctgaaatctacctgacccgactcctggccactaagggcacactgcagaagtttgtggatgacctctttgagaccatcttcagcacggcacaccgtggctctgccctgcccctggccatcaagtacatgtttgacttcctggatgagcaggctgataaacatggcattcatgacccgcacgtccgccatacctggaagagcaattgcctgcccctgaggttttgggtcaacatgatcaagaacccgcagtttgtgtttgacatccataagaacagcatcacagacgcctgcctctctgtggtggctcagaccttcatggactcttgctccacgtcagagcaccggctgggcaaggactcgccctccaacaagctgctgtatgccaaggacatccccagctacaagaattgggtggagaggtattactcagacatagggaagatgccagccatcagcgaccaagacatgaacgcatacctggctgagcagtcccggatgcacatgaatgagttcaacaccatgagtgcactctcagagatcttctcctatgtgggcaaatacagcgaggagatccttggacctctggaccacgatgaccagtgtgggaagcagaaactggcctacaaactagaacaagtcataaccctcatgagcttagacagctgagaaccgtccttccagggccgccctggagggggacacaccaagccgtgcctcagtctagattatcatctttaccaagtgcaagttccgactggcatcagcagcatcccctgagcagcgctgtttctctctctttctctctgcctctttccgtttctccctccttcctggatctcttctcttccagttgctctgccaacacgattggaccaagccactgaccctcagttagtccaagaatggccaggcccatggcaagggagctgaccagaagatgtcagagaggcctctgtctcccaggtgctcctgaccctgtgcatgtcagcagcagggtgcaaataacgaatgaggagccagggacaggggacatttctgtgctgctacttcaccttccactttggcagcccctgctttggtctgagccttggcctagggaagaggcaaggaaggacttcagtattatctttactgggaagacatcacctggctctcccttcccacagttccatctccagtggttcagccagtggtctgatcgctttgcagctgtgagaagaaaggctacacctcctgcatgtggctggagcagggcatgtgtgggcagctgggaggtgctccttgaggctccttctcccccactgggctggtgtccagaggcttcctgtccttttccaggtctccagagggacctgcctgccctgcctgctcccccgccagtagaaagccaggcaggagaaagaatagcaattacattccaccatggagatgctcctgaccttttcatctgaatcctagtagcagaaatgtaacacagggggagaaaaggaaagagagttgcatctaccctggaagcagaatttgttttccatttaccctcaaattcaaatgagtcacaatcatagtcataggtctagtccactaccagagccctgagtgctgtcaagagaaagcatctatctccaccctcctttgtcaaccttcatcaagggtcaacgtgaaatgcagagtgcatctaggagattctacctccagccatctccatggctccatccccatcatccttcctgagaactccatagacggctggggccaacagcctagtccctgttccctctgcagaatccggtgccattgctatgcagatgactttgtcactgggctgtccagacctctttgggaatgatttcatcaacatctcagctgtctctcatcattctccttcctcatctcttcagcagtcatccttgaaagaaacagacttaagcaaagcctcacggagacagcccaaaatgccagccaacctcagcctccagcttgtcagatctgggagggacaaagagtcgagctgatgggcctggctggaattaagaagagggacatacaaatgaccttggccttggcatccatctccccatctgttcttacatctacagatgcacgattttagccaggcaggcaaatgtgtgcctagaaattgatactaggtaagcagaggctatggggagagatggtctaatggagggttctaggaacctttcatcctaaggagaccttaggtgctgtctggtgcagtctcccatcctaagcaggagtctctgttggcacctctgctctggagttgttcaccactatgggagacaaggagaaacatcttaggtgaggttgaggagaaggattcacagtcttgccttcactccccaaacatcagacatcattccttgtcacccactcagaatgagccccccttggggaagaaaccacaccatttccagcaaagtccatggagcatccggtacttttaagaacacttgcccctttggatatgaatatgtgcacatgtgtgtgagcacatgtatgtgtgtgtgtgtgtctgccccaggtgtaggcggaaagctcaaaaggatttcttgtcctttgtaggaggatttttgaagtgttccccttctctttccccttgctcatccattcatcctgcagcttcaggacatttcaacacttacttgctttctatgctgagagctggtgggtggaaggagagggcgcttgtccataggaaatcagggtggtcgcctgccgaggcctggaccttggaacagggcatcatgtgacatcgcagaggacagatggtggaaaagacatgagcaacctaatgggaagaggaaaatgggaaacaatgcattggaagaggaagaaaaaaaataaataaccaaaggttttggcaagtgcagtaccaggtggagaagcttgacttttctatccttgatcattttattccctcccaagaagtcagtcacaggacctggaaggccagaaagggtacatgtgggagacggtctgaggaagtacctcggtcactacaatatttttgcacatataaagggttggggaggaaagagacacaaacgtatttaacacagatttgctggatggaagctgcgtgtgtgaacgtgtgtatgagtgagtgcattttgattttttttttttttttttgcacagttaagagaaaaaatcaaacaagcagaaaaaaaaaagaaaaaagacttatcacggttctgctgaagcttttattttttactggatgatgattattgttattgttactttggcggtacaggactttattttattccatgtttttgttataagaaaaatttcaaacacctcagagaaatagaaaggttaggaagaaagaggagacaaggacagacaaattttctggctgtccccatttctcctgggggaggggtttggggctggtttgactttaattggtgggtgggttgtttctgccgctctgtttgctgcagtccccgtggcctgcttggggactgagaaatttgagccaggtatccagagccacagcccatcttgcttataaaaattatcttctgctgtttgttttccatttcttccgtttggattcttggtgcacgtgtgatatggtatttaaaagcaaagacaagcaacattgtcaaaaagctgtccttgccccccatcccccacccaaatcttttttccaaactcccccagggatcttccttaccccactggcagagcaaacatccaggggctgtccatgtggcttgcgggctcccagagaaaggaattgggccaactttgtcctgtgggatggaggccccttcacggcctccctcgaggcaaagttaatttgtagggtcaccattatgttgagtcatgagcagacagaaggagagaaaaggccatcttccttaccttcccctccaacttatcccgtaccctcccagggaaaatggtaccagactgagccatcaaaatcactgacaaagtttaggtgggaattttttttgcatgttggagagagaagggcttaaggtagcagggaagaagggggctttgtggggtcctaaattttaaggaataagtagaggaagacaagaaacagagtggtaggctggtcatttctcctggccacaagtccccccagatgcagcttttacccattctttgtccttccccataaggagagaccctgacatttcttggtagctgcaaatagtgccactaagtgaaggtggccatcatgccagttacttcctcaggaaaatattttcttgccttcttctttcagtatggttttaaatttgggaacagtggataacccaagtgtcccacaggccaaggtacattccaatggcagcatgatccctgcacccaaagccagcccctaaagcctaccccttgtgcacccgcagcctggtaagtgagcttggctgcttgtgaggagctacaagtgaaagagaagttattttaaataaatcccaaagtttgaggcagactgtccaggactgttcccaggaagaagcaggagttacccacaggaaaagtctctgacctggtcccctcaggcccagctacctgcgcccaccagcagtgaaggttgatgtactggcccagcatctccacctcccccatgcaaccaggtccctggtaccgtgtctcccgttgcatgtctggcttctgcctgtgctcctcctgccacgagcatcctccctgtccctcctcattccaccgtgtctctcctgcacacatagcctctgtcccagggcgatttatccacttgagtacaggagctgctcagacctctcagcccagccctctgtgactgccccagccccatcctaccccacccaaagctgccttcctggctgtaggagctccctcgtctagccaaggccctatgggtccccatccgaggatccacaagcaatgacttcccaaatgacctccactgcaagaagaatccttaccactgtttccagagccgtgaacgatgctgtgatgggcccaggtctcagcaccaccctctgtgacctaaaaagaaaagctcaatttccatctgtcttctttcccaggaccaaggggacacagtaatgtgaagtcaaatacttaaccgagcaaagggccagtattgttatcagtcaaggacaaacctcccacctcacagacagccaagcagtgagggaaagacagacagacataggtaggaaggtgctctgcaggcacaaggcccagagaagcccctctccgggaacttcccctgctccttccaggaacagtgagcccagtgagcagccccagccagctcttcaaggccttcaaggggtctttccatgactgagtcacctccaggagctcacctgacccccagagaagacctaccccaggcagctccgtgccctggcttctccccatgccccaaatccccccccgccatccctcctggtcctcgtctacatcaagggcctcttcccctcttcctgccagctctcaggacaggtgactgggaggccttgaaccctcagcctcttcctttaaaaaaaacaaaacaaaacaaaactgtgggccatttatttgggattttggagttgtttggtttttgtttgtatatcttaatagttcgaaagtaagaagggagccctgctatggatgttaagtccaaattactcggttagtgggagcaaaacctatgacttccaaggggatgaggagaggttcagaggacaggaggagcctcccccattgaaaaaaaaaaatgggtcaggacattccctggatgaggacaatgctaggggtggcatctcacatggctgctgctattcctggtgcttccccacacttttgacagatggagtccttctcctaccgcctcctgccacctcaccctacaggcattctctatgtaggaaacaagagccttattttatagagtggggagctgagacacagcctcaggtaacactgacacagctcccgaatgaggctgggacactctgcaaacctctcctcatggtgctaagggtggcatgctcttgacaggaaacctaaatgaccactcctctcatttggaaagtaatccactgcagtaaaagtttcagacatgcaagagagagtttttttttttttactacaaatttttgctcccccataaaattattttattagagggagtatccaagttttaaaagtatatagaattttttggttgtaagagaaatacatactcattaggatcccgattaaattccttgagtagactggtgcctaccagaaagcaaagcaaagttaaacaaaacgaaacaaaatccttcatatacaaaaagaactttctgtttgtattggcagaggtagtgaggtgattcaggtaggctgaaaatcctgggttgcgggagcctcactttattccattcccacccgctttgatgtctatgcttggctctctgggctgcccctggtactgccgaatcctacacatctcttatcagctttcctcaaactttaaggaggctctgtgagggatgggtcatgggaagacccaagctttccctccgccaggattgcaaaagcaagtagacttggtctatgcagctcttcttccagcaatttctttatttggaattagaacttcctttgttagtatctttgatcttttgactcaagcacattttggaagggctcccttacaaaagtagaatttaaaacagaggatacagttaaagagcaacccaaaggacgcttaagaaaccgagaccacttcaccaaacaggactaaggaacactttcgtgcacagaagtcagccgcaatccaggcacaggacgaagatgggatacacgtgctcatctgtctgtcctcctttcctctccctccccgacgttctagttagcttgttgacttgttaaaccttctgttcttaaaatgaaaagctagcttacctcaaagaatcttgtttccattcggaaaccaacgattttgtgttttagaatggacagccctcccctcaccactccctaccttggcctggtgtccttgagacatacggtctttgcttagtcgtgtgttggctgctttgagcaggaacaaggcctccaggccctgaggtgggaaggaaggattggatgccactgccctcctccccactttagcatgtaggggccagcccatctcttccagcagggtcctgctgagttaccatagcaaccagcaactccagggtaccacaacagacaatggctcagcgagccgacgtgtggggatgatgcaggggttttggcccagccagaggacccagagttgagcttcaaatgctagagaaggggagaaacaggatggaagggtggtttaaggaaccggcaggggtctttgagtcacatagagaagccgttgaaggaggtagggcaggttatctctgttccagtcacccccttccagccccatcccacttctgtttcaaactaaagctcccacctcgaacattgaccctttgttagaacaaagcaaagcatatctttagacaacagtgttaaaatgagcctcaaatgtatgtggatgagatctctaagaagagggtcttctggttttgatttttaaagaagagtatcctagtaaaatattaaaaaaaaattaaaaagtttttaaaaaggaaacctgtgctatttaaattggagcccagttgtaacttggtaaaggcaagcttctgtacctttgttataattaattgtatacctgtgtatgtaaatataaggcattcctattttgcagttcagaacaaaaaaaacttatttgtaatatagaataaagtttattaaaaaataataaaaatgcagtttggga

SEQ ID NO: 270507 - DNA, 13786 bp, Artificial Sequence
  derived and/or modified sequence
gcgagccgcggcggcagcaggcagcccgggagctccggcggcggccgagccagcggcggccccgctccctgccccctgcaaactttgcgagcagcccgcccggggggccgggggcgcgcccgggaggcccggctcggcccgcggccgagctctccgccgccgcagcgccagccgccgcagccaccaccgccgcagccccgcgcctccccggggagcagccggcggctcccgcggccccccagccccggccccagggcactgcccggcgagtgtctcggcaagggtgggggctgccgcggcgcggccggccgcgggctgccggggggcggccgccgctacccagagaggcgcgcagaggcgccgagagcgctccccggcgggtcccccgcgcactcgccgcgcccgggcagcggcccgaccgggcgagcatgggcggcgcggagtgacgccgctgtgcccgcttggcatcaaggacattcagcccgcgggggtggggacgaaggggggcagcccggcgtcgccaccgcagcccccgagagccgccgccgctgctcgggctccggggctgggtggaggaaaggggtgttcggaatcgatccccattttccgacctttttgttggacattacgcccaccttggacgccgcaagagaagctgtcaagccccgcaggctctgattcggcgccctccgcgttcctcggctgctcccggcttccctgtgcctcggtggagtatttgcgttcggggctggggctggaggaggcagccacacgcgcgcacacgcacacgttcagaggagggcgagaggcagcggcataggctccatctgcagtgtcaatgcggcgctcccgctgaaggagggaaacgcggcgcgtccaggggagactgcattgctgagtcctggccctctgaggggacgactgtgcctgagtgctgctgtgccactgggacccgcctctgccatgaaagccatgccctggaactggacctgccttctctcccacctcctcatggtgggcatgggctcctccactttgctcacccggcagccagccccgctgtcccagaagcagcggtcatttgtcacattccgaggagagcccgccgagggtttcaatcacctggtggtggatgagaggacaggacacatttacttgggggccgtcaatcggatttacaagctctccagcgacctgaaggtcttggtgacgcatgagacagggccggacgaggacaaccccaagtgttacccaccccgcatcgtccagacctgcaatgagcccctgaccaccaccaacaatgtcaacaagatgctcctcatagactacaaggagaacaggctgattgcctgtgggagcctgtaccaaggcatctgcaagctgctgaggctggaggacctcttcaagctgggggagccttatcataagaaggagcactatctgtcaggtgtcaacgagagcggctcagtctttggagtgatcgtctcctacagcaacctggatgacaagctgttcattgccacggcagtggatgggaagcccgagtattttcccaccatctccagccggaaactgaccaagaactctgaggcggatggcatgttcgcgtacgtcttccatgatgagttcgtggcctcgatgattaagatcccttcggacaccttcaccatcatccctgactttgatatctactatgtctatggttttagcagtggcaactttgtctactttttgaccctccaacctgagatggtgtctccaccaggctccaccaccaaggagcaggtgtatacatccaagctcgtgaggctttgcaaggaggacacagccttcaactcctatgtagaggtgcccattggctgtgagcgcagtggggtggagtaccgcctgctgcaggctgcctacctgtccaaagcgggggccgtgcttggcaggacccttggagtccatccagatgatgacctgctcttcaccgtcttctccaagggccagaagcggaaaatgaaatccctggatgagtcggccctgtgcatcttcatcttgaagcagataaatgaccgcattaaggagcggctgcagtcttgttaccggggcgagggcacgctggacctggcctggctcaaggtgaaggacatcccctgcagcagtgcgctcttaaccattgacgataacttctgtggcctggacatgaatgctcccctgggagtgtccgacatggtgcgtggaattcccgtcttcacggaggacagggaccgcatgacgtctgtcatcgcatatgtctacaagaaccactctctggcctttgtgggcaccaaaagtggcaagctgaagaagatccgggtggatggacccaggggcaacgccctccagtatgagacggtgcaggtggtggaccccggcccagtcctccgggatatggccttctccaaggaccacgagcaactctacatcatgtcagagaggcagctcaccagagtccctgtggagtcctgtggtcagtatcagagctgcggcgagtgccttggctcaggcgacccccactgtggctggtgtgtgctgcacaacacttgcacccggaaggagcggtgtgagcggtccaaggagccccgcaggtttgcctcggagatgaagcagtgtgtccggctgacggtccatcccaacaatatctccgtctctcagtacaacgtgctgctggtcctggagacgtacaatgtcccggagctgtcagctggcgtcaactgcacctttgaggacctgtcagagatggatgggctggtcgtgggcaatcagatccagtgctactcccctgcagccaaggaggtgccccggatcatcacagagaatggggaccaccatgtcgtacagcttcagctcaaatcaaaggagaccggcatgaccttcgccagcaccagctttgtcttctacaattgcagcgtccacaattcgtgcctgtcctgcgtggagagtccataccgctgccactggtgtaaataccggcatgtctgcacccatgaccccaagacctgctccttccaggaaggccgagtgaagctgcccgaggactgcccccagctgctgcgagtggacaagatcctggtgcccgtggaggtgatcaagcctatcacgctgaaggccaagaacctcccccagccccagtctgggcagcgtggctacgaatgcatcctcaacattcagggcagcgagcagcgagtgcccgccctgcgcttcaacagctccagcgtacagtgccagaacacctcttattcctatgaagggatggagatcaacaacctgcccgtggagttgacagtcgtgtggaatgggcacttcaacattgacaacccagctcagaataaagttcacctctacaagtgtggagccatgcgtgagagctgcgggctgtgcctcaaggctgacccagacttcgcatgtggctggtgccagggcccaggccagtgcaccctgcgccagcactgccctgcccaggagagccagtggctggagctgtctggtgccaaaagcaagtgcacaaacccccgcatcacagagataatcccggtgacaggcccccgggaagggggcaccaaggtcactatccgaggggagaacctgggcctggaatttcgcgacatcgcctcccatgtcaaggttgctggcgtggagtgcagccctttagtggatggttacatccctgcagaacagatcgtgtgtgagatgggggaggccaagcccagccagcatgcaggcttcgtggagatctgcgtggctgtgtgtcggcctgaattcatggcccggtcctcacagctctattacttcatgacactgactctctcagatctgaagcccagccgggggcccatgtccggagggacccaagtgaccatcacaggcaccaacctgaatgccggaagcaacgtggtggtgatgtttggaaagcagccctgtctcttccacaggcgatctccatcctacattgtctgcaacaccacatcctcagatgaggtgctagagatgaaggtgtcggtgcaggtggacagggccaagatccaccaggacctggtctttcagtatgtggaagaccccaccatcgtgcggattgagccagaatggagcattgtcagtggaaacacacccatcgccgtatgggggacccacctggacctcatacagaacccccagatccgtgccaagcatggagggaaggagcacatcaatatctgtgaggttctgaacgctactgagatgacctgtcaggcgcccgccctcgctctgggtcctgaccaccagtcagacctgaccgagaggcccgaggagtttggcttcatcctggacaacgtccagtccctgctcatcctcaacaagaccaacttcacctactatcccaacccggtgtttgaggcctttggtccctcaggaatcctggagctcaagcctggcacgcccatcatcctaaagggcaagaacctgatcccgcctgtggctgggggcaacgtgaagctgaactacactgtgctggttggggagaagccgtgcaccgtgaccgtgtcagatgtccagctgctctgcgagtcccccaacctcatcggcaggcacaaagtgatggcccgtgtcggtggcatggagtactccccggggatggtgtacattgccccggacagcccgctcagcctgcccgccatcgtcagcatcgcagtggctggcggcctcctcatcattttcatcgtggccgtgctcattgcctataaacgcaagtcccgcgaaagtgacctcacgctgaagcggctgcagatgcagatggacaacctggagtcccgtgtggccctggagtgcaaggaagcctttgccgagctgcagacggacatccatgagctgaccagtgacctggatggagccgggattccgttcctggactatagaacttacaccatgcgggtgctgttcccaggaattgaagaccaccctgtcctccgggaccttgaggtcccgggctaccggcaggagcgtgtggagaaaggcctgaagctcttcgcccagctcatcaacaacaaggtgttcctgctgtccttcatccgcacgcttgagtcccagcgtagcttctccatgcgcgaccgtggcaacgtggcctcactcatcatgaccgtgctgcagagcaagctggagtacgccactgatgtgctgaagcagctgctggccgacctcattgacaagaacctggagagcaagaaccaccctaagctgctgctcaggaggactgagtcagtggctgagaagatgctgaccaattggtttactttcctcctctacaagttcctcaaggagtgtgctggggagcccctcttctccctgttctgtgccatcaagcagcagatggagaagggccccattgacgccatcacgggcgaggcccgctactccttgagcgaggacaagctcatccgccagcagattgactacaaaaccctggtcctgagctgtgtcagcccagacaatgccaacagccccgaggtcccagtaaagatcctcaactgtgacaccatcactcaggtcaaggagaagattctggatgccatcttcaagaatgtgccttgctcccaccggcccaaagctgcagatatggatctggagtggcgacaaggaagtggggcaaggatgatcttgcaggatgaagacatcaccaccaagattgagaatgattggaagcgactgaacacactggcccactaccaggtgccagatggttccgtggtggcattagtgtccaagcaggtgacagcctataacgcagtgaacaactccaccgtctccaggacctcagcaagtaaatatgaaaacatgatccggtacacgggcagccccgacagcctccgctcacggacacctatgatcactcctgacctggagagtggagtcaagatgtggcacctagtgaagaaccacgagcacggagaccagaaggagggggaccgggggagcaagatggtgtctgaaatctacctgacccgactcctggccactaagggcacactgcagaagtttgtggatgacctctttgagaccatcttcagcacggcacaccgtggctctgccctgcccctggccatcaagtacatgtttgacttcctggatgagcaggctgataaacatggcattcatgacccgcacgtccgccatacctggaagagcaattgcctgcccctgaggttttgggtcaacatgatcaagaacccgcagtttgtgtttgacatccataagaacagcatcacagacgcctgcctctctgtggtggctcagaccttcatggactcttgctccacgtcagagcaccggctgggcaaggactcgccctccaacaagctgctgtatgccaaggacatccccagctacaagaattgggtggagaggtattactcagacatagggaagatgccagccatcagcgaccaagacatgaacgcatacctggctgagcagtcccggatgcacatgaatgagttcaacaccatgagtgcactctcagagatcttctcctatgtgggcaaatacagcgaggagatccttggacctctggaccacgatgaccagtgtgggaagcagaaactggcctacaaactagaacaagtcataaccctcatgagcttagacagctgagaaccgtccttccagggccgccctggagggggacacaccaagccgtgcctcagtctagattatcatctttaccaagtgcaagttccgactggcatcagcagcatcccctgagcagcgctgtttctctctctttctctctgcctctttccgtttctccctccttcctggatctcttctcttccagttgctctgccaacacgattggaccaagccactgaccctcagttagtccaagaatggccaggcccatggcaagggagctgaccagaagatgtcagagaggcctctgtctcccaggtgctcctgaccctgtgcatgtcagcagcagggtgcaaataacgaatgaggagccagggacaggggacatttctgtgctgctacttcaccttccactttggcagcccctgctttggtctgagccttggcctagggaagaggcaaggaaggacttcagtattatctttactgggaagacatcacctggctctcccttcccacagttccatctccagtggttcagccagtggtctgatcgctttgcagctgtgagaagaaaggctacacctcctgcatgtggctggagcagggcatgtgtgggcagctgggaggtgctccttgaggctccttctcccccactgggctggtgtccagaggcttcctgtccttttccaggtctccagagggacctgcctgccctgcctgctcccccgccagtagaaagccaggcaggagaaagaatagcaattacattccaccatggagatgctcctgaccttttcatctgaatcctagtagcagaaatgtaacacagggggagaaaaggaaagagagttgcatctaccctggaagcagaatttgttttccatttaccctcaaattcaaatgagtcacaatcatagtcataggtctagtccactaccagagccctgagtgctgtcaagagaaagcatctatctccaccctcctttgtcaaccttcatcaagggtcaacgtgaaatgcagagtgcatctaggagattctacctccagccatctccatggctccatccccatcatccttcctgagaactccatagacggctggggccaacagcctagtccctgttccctctgcagaatccggtgccattgctatgcagatgactttgtcactgggctgtccagacctctttgggaatgatttcatcaacatctcagctgtctctcatcattctccttcctcatctcttcagcagtcatccttgaaagaaacagacttaagcaaagcctcacggagacagcccaaaatgccagccaacctcagcctccagcttgtcagatctgggagggacaaagagtcgagctgatgggcctggctggaattaagaagagggacatacaaatgaccttggccttggcatccatctccccatctgttcttacatctacagatgcacgattttagccaggcaggcaaatgtgtgcctagaaattgatactaggtaagcagaggctatggggagagatggtctaatggagggttctaggaacctttcatcctaaggagaccttaggtgctgtctggtgcagtctcccatcctaagcaggagtctctgttggcacctctgctctggagttgttcaccactatgggagacaaggagaaacatcttaggtgaggttgaggagaaggattcacagtcttgccttcactccccaaacatcagacatcattccttgtcacccactcagaatgagccccccttggggaagaaaccacaccatttccagcaaagtccatggagcatccggtacttttaagaacacttgcccctttggatatgaatatgtgcacatgtgtgtgagcacatgtatgtgtgtgtgtgtgtctgccccaggtgtaggcggaaagctcaaaaggatttcttgtcctttgtaggaggatttttgaagtgttccccttctctttccccttgctcatccattcatcctgcagcttcaggacatttcaacacttacttgctttctatgctgagagctggtgggtggaaggagagggcgcttgtccataggaaatcagggtggtcgcctgccgaggcctggaccttggaacagggcatcatgtgacatcgcagaggacagatggtggaaaagacatgagcaacctaatgggaagaggaaaatgggaaacaatgcattggaagaggaagaaaaaaaataaataaccaaaggttttggcaagtgcagtaccaggtggagaagcttgacttttctatccttgatcattttattccctcccaagaagtcagtcacaggacctggaaggccagaaagggtacatgtgggagacggtctgaggaagtacctcggtcactacaatatttttgcacatataaagggttggggaggaaagagacacaaacgtatttaacacagatttgctggatggaagctgcgtgtgtgaacgtgtgtatgagtgagtgcattttgattttttttttttttttttgcacagttaagagaaaaaatcaaacaagcagaaaaaaaaaagaaaaaagacttatcacggttctgctgaagcttttattttttactggatgatgattattgttattgttactttggcggtacaggactttattttattccatgtttttgttataagaaaaatttcaaacacctcagagaaatagaaaggttaggaagaaagaggagacaaggacagacaaattttctggctgtccccatttctcctgggggaggggtttggggctggtttgactttaattggtgggtgggttgtttctgccgctctgtttgctgcagtccccgtggcctgcttggggactgagaaatttgagccaggtatccagagccacagcccatcttgcttataaaaattatcttctgctgtttgttttccatttcttccgtttggattcttggtgcacgtgtgatatggtatttaaaagcaaagacaagcaacattgtcaaaaagctgtccttgccccccatcccccacccaaatcttttttccaaactcccccagggatcttccttaccccactggcagagcaaacatccaggggctgtccatgtggcttgcgggctcccagagaaaggaattgggccaactttgtcctgtgggatggaggccccttcacggcctccctcgaggcaaagttaatttgtagggtcaccattatgttgagtcatgagcagacagaaggagagaaaaggccatcttccttaccttcccctccaacttatcccgtaccctcccagggaaaatggtaccagactgagccatcaaaatcactgacaaagtttaggtgggaattttttttgcatgttggagagagaagggcttaaggtagcagggaagaagggggctttgtggggtcctaaattttaaggaataagtagaggaagacaagaaacagagtggtaggctggtcatttctcctggccacaagtccccccagatgcagcttttacccattctttgtccttccccataaggagagaccctgacatttcttggtagctgcaaatagtgccactaagtgaaggtggccatcatgccagttacttcctcaggaaaatattttcttgccttcttctttcagtatggttttaaatttgggaacagtggataacccaagtgtcccacaggccaaggtacattccaatggcagcatgatccctgcacccaaagccagcccctaaagcctaccccttgtgcacccgcagcctggtaagtgagcttggctgcttgtgaggagctacaagtgaaagagaagttattttaaataaatcccaaagtttgaggcagactgtccaggactgttcccaggaagaagcaggagttacccacaggaaaagtctctgacctggtcccctcaggcccagctacctgcgcccaccagcagtgaaggttgatgtactggcccagcatctccacctcccccatgcaaccaggtccctggtaccgtgtctcccgttgcatgtctggcttctgcctgtgctcctcctgccacgagcatcctccctgtccctcctcattccaccgtgtctctcctgcacacatagcctctgtcccagggcgatttatccacttgagtacaggagctgctcagacctctcagcccagccctctgtgactgccccagccccatcctaccccacccaaagctgccttcctggctgtaggagctccctcgtctagccaaggccctatgggtccccatccgaggatccacaagcaatgacttcccaaatgacctccactgcaagaagaatccttaccactgtttccagagccgtgaacgatgctgtgatgggcccaggtctcagcaccaccctctgtgacctaaaaagaaaagctcaatttccatctgtcttctttcccaggaccaaggggacacagtaatgtgaagtcaaatacttaaccgagcaaagggccagtattgttatcagtcaaggacaaacctcccacctcacagacagccaagcagtgagggaaagacagacagacataggtaggaaggtgctctgcaggcacaaggcccagagaagcccctctccgggaacttcccctgctccttccaggaacagtgagcccagtgagcagccccagccagctcttcaaggccttcaaggggtctttccatgactgagtcacctccaggagctcacctgacccccagagaagacctaccccaggcagctccgtgccctggcttctccccatgccccaaatccccccccgccatccctcctggtcctcgtctacatcaagggcctcttcccctcttcctgccagctctcaggacaggtgactgggaggccttgaaccctcagcctcttcctttaaaaaaaacaaaacaaaacaaaactgtgggccatttatttgggattttggagttgtttggtttttgtttgtatatcttaatagttcgaaagtaagaagggagccctgctatggatgttaagtccaaattactcggttagtgggagcaaaacctatgacttccaaggggatgaggagaggttcagaggacaggaggagcctcccccattgaaaaaaaaaaatgggtcaggacattccctggatgaggacaatgctaggggtggcatctcacatggctgctgctattcctggtgcttccccacacttttgacagatggagtccttctcctaccgcctcctgccacctcaccctacaggcattctctatgtaggaaacaagagccttattttatagagtggggagctgagacacagcctcaggtaacactgacacagctcccgaatgaggctgggacactctgcaaacctctcctcatggtgctaagggtggcatgctcttgacaggaaacctaaatgaccactcctctcatttggaaagtaatccactgcagtaaaagtttcagacatgcaagagagagtttttttttttttactacaaatttttgctcccccataaaattattttattagagggagtatccaagttttaaaagtatatagaattttttggttgtaagagaaatacatactcattaggatcccgattaaattccttgagtagactggtgcctaccagaaagcaaagcaaagttaaacaaaacgaaacaaaatccttcatatacaaaaagaactttctgtttgtattggcagaggtagtgaggtgattcaggtaggctgaaaatcctgggttgcgggagcctcactttattccattcccacccgctttgatgtctatgcttggctctctgggctgcccctggtactgccgaatcctacacatctcttatcagctttcctcaaactttaaggaggctctgtgagggatgggtcatgggaagacccaagctttccctccgccaggattgcaaaagcaagtagacttggtctatgcagctcttcttccagcaatttctttatttggaattagaacttcctttgttagtatctttgatcttttgactcaagcacattttggaagggctcccttacaaaagtagaatttaaaacagaggatacagttaaagagcaacccaaaggacgcttaagaaaccgagaccacttcaccaaacaggactaaggaacactttcgtgcacagaagtcagccgcaatccaggcacaggacgaagatgggatacacgtgctcatctgtctgtcctcctttcctctccctccccgacgttctagttagcttgttgacttgttaaaccttctgttcttaaaatgaaaagctagcttacctcaaagaatcttgtttccattcggaaaccaacgattttgtgttttagaatggacagccctcccctcaccactccctaccttggcctggtgtccttgagacatacggtctttgcttagtcgtgtgttggctgctttgagcaggaacaaggcctccaggccctgaggtgggaaggaaggattggatgccactgccctcctccccactttagcatgtaggggccagcccatctcttccagcagggtcctgctgagttaccatagcaaccagcaactccagggtaccacaacagacaatggctcagcgagccgacgtgtggggatgatgcaggggttttggcccagccagaggacccagagttgagcttcaaatgctagagaaggggagaaacaggatggaagggtggtttaaggaaccggcaggggtctttgagtcacatagagaagccgttgaaggaggtagggcaggttatctctgttccagtcacccccttccagccccatcccacttctgtttcaaactaaagctcccacctcgaacattgaccctttgttagaacaaagcaaagcatatctttagacaacagtgttaaaatgagcctcaaatgtatgtggatgagatctctaagaagagggtcttctggttttgatttttaaagaagagtatcctagtaaaatattaaaaaaaaattaaaaagtttttaaaaaggaaacctgtgctatttaaattggagcccagttgtaacttggtaaaggcaagcttctgtacctttgttataattaattgtatacctgtgtatgtaaatataaggcattcctattttgcagttcagaacaaaaaaaacttatttgtaatatagaataaagtttattaaaaaataataaaaatgc

SEQ ID NO: 270508 - DNA, 5684 bp, Artificial Sequence
  derived and/or modified sequence
atgaaggccatgccttggaactggacttgtttgcttagccacctgctcatggtcggtatggggtcctctacgcttcttacgcgccagccagcacctctctcccagaagcaaaggtctttcgtgactttcaggggtgaaccagctgaagggttcaatcatcttgtggtagacgagaggactggccatatttatttgggcgcagtgaacaggatctacaagctgagtagtgacttgaaagtgcttgtaactcacgaaaccggccctgacgaggacaatccaaaatgctacccacctcgtatcgtgcagacctgcaacgagcccctaaccactactaacaacgtgaacaaaatgctgctgatcgattacaaggaaaacaggctgatcgcctgtggatccctgtatcaaggtatatgtaagcttcttcgcctggaagacctgtttaaactgggagagccctaccataaaaaagagcactatctgtcaggggtgaatgagtcaggctccgtgttcggggtcatagtttcttacagcaatctggacgataaactttttatagccactgcagtagacggaaaaccggagtacttccccacgataagctctaggaaactgaccaagaactctgaggctgatggaatgttcgcttacgtctttcatgacgagttcgtggccagcatgattaagataccgtcggacacattcactatcatccctgattttgacatttactacgtatatgggttctcgtcaggaaactttgtttacttcttaacgctgcagcccgaaatggtttcccccccaggcagtactacaaaagaacaagtgtatacctcaaagcttgtaaggctgtgcaaagaggacacagccttcaactcctatgtggaagttccgattggatgtgagagaagcggagtggagtatcggttgctccaggccgcttatctgagcaaggcaggcgctgtgctcggacggaccctgggcgtgcatccagatgatgacctcctgtttacagtgttctctaaggggcagaaacgcaaaatgaagagcttggacgaatccgccttgtgtatcttcattcttaagcagataaacgaccggattaaggagaggttacagagttgctacaggggtgaagggaccctggatctcgcgtggctgaaagtgaaggacatcccatgtagctcagcgcttctgactatagacgacaacttttgtggcttggacatgaacgctcccttaggcgtctctgatatggttaggggaatcccagtatttaccgaagatcgtgatcgcatgacttcagtaatagcatatgtgtataagaatcactctctggctttcgtggggacaaagagtggaaagctgaagaaaatccgggtagatggtcctcgagggaatgcgctccagtatgagacagtgcaagtggtggaccccggacccgtgcttagggacatggcgttctccaaggatcacgagcagctgtatattatgagtgagcggcaactgacacgggttcctgtggaatcttgtgggcagtatcagtcctgcggtgagtgcctggggtccggtgatcctcactgtggatggtgcgtgcttcacaatacctgcaccaggaaagagcgttgcgagcgcagcaaagagcccaggaggtttgccagcgaaatgaaacagtgcgttcgcttaacagttcaccctaataatatctcagtttctcaatacaatgtgctgctggttctggagacctataacgtgcccgaactcagcgccggagtgaattgcaccttcgaggacctgtccgagatggacggcctggtcgtagggaaccagatccaatgctacagtcctgcagcaaaggaagtgcctcgcatcatcaccgaaaacggggaccatcatgtggtgcagctgcagcttaagagtaaagagacagggatgacatttgcttctacctcatttgtgttctacaattgttccgttcacaacagttgtctatcttgcgtcgagagtccttaccgctgccactggtgtaaatacagacatgtttgtacccacgatccaaagacttgcagtttccaggagggaagggtcaagttaccggaggattgccctcagctcttaagggtagacaagatactcgtgccagtggaggtgatcaaacccattactctgaaggcaaagaacttgccccagccgcagtctggacagaggggatacgaatgcatcctaaacatacagggaagcgaacagcgggtgcctgctctcagattcaattccagttctgttcaatgccagaacacttcgtattcatatgagggaatggagattaacaatttgccagttgaactcactgtcgtctggaacggccattttaacatcgataatcctgcacagaacaaggtacatctgtacaagtgtggcgctatgagggagagttgcggactgtgcctgaaagcggatccggactttgcctgtggctggtgccaggggccaggacagtgtacgctgcgccagcattgtccggctcaggaatcccaatggcttgaactgagtggagcaaagtccaaatgtaccaacccgaggattacagagattattcccgttaccgggcctcgcgagggaggaacaaaagtcactatccgcggagagaacctggggttggagttcagagatatcgcttcccacgtgaaggtggctggagttgagtgctcgcccctggtggacgggtatattccagctgaacagattgtgtgtgaaatgggcgaggccaaaccctcccagcacgcaggttttgtggaaatctgtgtggcagtttgtcgccctgaattcatggctagatcaagccagctctactattttatgacactgacactgtcggatctcaaacccagtcggggacccatgagcgggggaacacaggtcacaattacgggaaccaatcttaacgcaggctccaatgttgtcgtgatgtttggaaagcaaccctgtctgtttcacaggagatctccctcctacattgtttgtaacacgacctcatccgatgaggtgctggagatgaaagtcagtgtgcaagttgatagagccaaaatacaccaggacctcgtgttccagtatgtcgaggatcccacaattgtaagaatcgagcccgagtggtcgatcgtttccggtaatactccgatcgctgtgtggggtacacacctagatctgattcaaaatccacagataagagcgaagcacgggggtaaggagcatatcaatatctgcgaggtacttaacgcgacagagatgacttgccaggctcctgccctcgccctaggccctgaccaccaaagcgatctgactgagcggccagaagagtttggctttatactggataatgtgcagtccctcctgatcttgaacaaaacaaacttcacctattatccaaacccagtgtttgaagctttcggcccatcagggatcttagagctgaagccaggtacccctatcatcttaaagggcaagaacctcattccgcctgtggcagggggaaatgtgaagttgaactacacagttctcgtcggagaaaaaccatgtactgtcacggtgtctgatgtgcaactgttgtgtgaaagccctaacctgattggaaggcacaaggttatggctagggtcggcggaatggagtatagcccaggaatggtgtatattgcacctgactctcctttgtcactgccggcaattgtgagcatcgcagtagcaggcggtttgttaatcatatttatcgtcgccgtcctcatcgcatataagcgtaagagtcgtgaatccgacttaacattgaagaggcttcagatgcagatggataatctcgaatctcgagtagctctggaatgcaaagaagcattcgctgagctacaaactgatattcacgagctgacaagcgatctggatggtgctggcattcccttcctcgattatcggacttacactatgagagtactcttcccagggattgaagatcacccagtactcagagatctggaggtgccgggttaccgccaggagcgcgtggaaaagggtctgaagttgtttgctcagttaatcaacaacaaggtgtttctgctaagcttcattcgcactctggaatctcaaagatctttcagcatgcgcgaccgcggaaatgtggcctcactcataatgactgttctccagtcaaagctggaatacgcgacagatgtcttaaagcagctgctggctgatcttattgataaaaacctagagagtaagaaccatccaaaattgctcctgcggcgtacagaaagtgtggccgaaaagatgctgacaaactggtttacatttctactgtacaagtttcttaaagagtgcgccggagaacccctcttttcactcttctgcgcaatcaaacagcagatggaaaaaggaccaatcgatgccattaccggagaggccaggtatagtttatccgaggataagctcatacggcaacaaatagactataaaacgttagtactgagttgtgtttcccctgacaacgccaactcccccgaggtccccgtcaaaatattgaattgtgatacaataactcaagttaaggagaaaatattggatgcaatttttaagaatgtgccatgcagccacaggcccaaggcagctgacatggacctggagtggaggcaggggtcaggagctcgtatgatattgcaggatgaggatatcacaaccaaaattgagaacgactggaaacggctgaacactttggcccactaccaggtgcccgatggcagtgttgtggcgctcgtttctaagcaggtgaccgcctacaacgctgtcaataattccacagtatctcgtacctcagccagtaaatacgagaacatgatccggtacactggctctccagacagtctcagatcacgaacccccatgatcacacctgacctggagtcaggtgttaagatgtggcatcttgtgaagaaccacgaacatggcgaccagaaagagggagatcgaggcagcaagatggtttctgaaatctacctcacaagactgctcgcaaccaaaggcacattacaaaagtttgtagatgacctgtttgaaacaattttcagcaccgcccacaggggcagcgctttgccactcgctattaaatacatgttcgatttcttggacgaacaggctgacaaacacggcatccatgacccacacgtgaggcacacttggaagtctaattgcttgcctctgcgcttttgggtcaacatgataaaaaatccccagtttgtttttgatatccacaaaaattccatcacagatgcatgcctatcagtagttgcccagaccttcatggactcatgttctacatccgaacacaggttgggcaaagattccccttccaataagctgctctatgccaaggatataccatcctataagaactgggtagaaagatactacagcgacatcggcaaaatgccagctattagtgaccaggacatgaatgcatatctcgctgagcagtccagaatgcatatgaatgaattcaataccatgtccgctttgtccgagattttctcgtacgtagggaagtattcagaagaaatccttggtcccctagaccatgatgaccagtgcggcaaacagaagcttgcatataagttggagcaggtgattaccctgatgtctttggatagcta

SEQ ID NO: 270509 - DNA, 5684 bp, Artificial Sequence
  derived and/or modified sequence
atgaaagcaatgccatggaattggacatgtctgctgtcgcatttattaatggttggtatggggtcgtccactctgctgacccgacagcctgccccactgagtcagaagcagaggtctttcgtgacttttcggggagaacccgcagagggctttaaccatttggtggtcgacgagcggaccggccacatttacctcggcgctgtcaatcggatttacaagttgtcctccgacttaaaagtgctggtgacccacgaaactggccctgatgaagataatcccaagtgctatcctcctaggatcgtgcagacatgcaacgagccactgactactacgaacaacgtgaacaagatgttactgattgattataaagaaaacaggctcatcgcatgcggatcgctctaccaaggcatctgcaaacttctgcgcctggaggacctcttcaaactgggcgagccctaccacaagaaagaacactacctgtcaggcgtgaatgagtccgggtccgtctttggagtgattgtgtcttattcaaacctcgacgacaagttatttatcgccactgcagtagatggcaagcctgaatacttccctactatatcctcccgcaagttgactaaaaatagcgaggcagatggtatgttcgcctacgtatttcacgatgaatttgtcgctagtatgatcaaaatcccttccgacacctttaccatcatcccggacttcgatatctactacgtgtatggattctcttcaggaaactttgtgtactttctcactctgcagccggagatggtaagccctccaggaagcaccacaaaggagcaggtctacacaagcaagcttgtgcgactgtgcaaggaggacaccgcattcaacagctatgtagaggtgcccatcggatgtgagagatctggggtggaataccgcctcctgcaggccgcttacctttctaaggctggggcagtgctgggcagaactctgggcgtacaccccgatgacgatttgttattcaccgtctttagcaagggccagaaaaggaagatgaaatcacttgacgagtctgcactttgtattttcatcctgaaacaaattaatgaccggatcaaggagcggctgcagtcctgctaccggggtgaaggaacgctagatctagcctggctgaaagttaaagacattccttgtagttcagccctactcaccattgatgacaacttctgtggcctagatatgaatgcccctctcggggtgagtgacatggtgcgcggaatacctgtttttacggaggatagagatcggatgacctccgtgattgcgtatgtgtacaagaaccacagcctggctttcgtgggtacaaaaagtggcaagctgaagaaaatccgggtggatgggccacgcggaaacgccctgcagtatgaaaccgttcaggttgtggaccctggcccagtcctgagggatatggcattctctaaggatcacgaacaattatatatcatgtccgagcgacaattaacccgcgtcccagtcgaatcttgcggccaatatcagtcgtgtggtgaatgcctgggctcaggcgatccccattgcgggtggtgcgttctccacaacacgtgcacaaggaaggagcgatgcgaaagatctaaagagcctagacgttttgcatccgagatgaaacagtgcgtgcgactgaccgtacatcccaacaatatctctgtcagccagtataacgtgctgctcgtgcttgagacctataatgtaccggagctatccgccggtgtgaattgtactttcgaggacttatccgagatggatgggctggtcgtgggaaaccagattcagtgttattctcccgctgccaaggaagtccctagaattatcactgagaatggggatcaccatgttgtgcagctgcagttgaagtcaaaagagacaggcatgacattcgccagcacttcatttgtgttctataactgctcagtgcataacagttgcctgagttgtgtggaatctccatacaggtgtcactggtgtaaatacagacacgtgtgcacacacgaccccaagacatgcagttttcaggaggggcgtgtaaaactgcctgaagattgtccacagctgctgcgagtggacaaaatccttgttcccgtcgaggttatcaagccaatcacactcaaagcgaaaaacttgccgcagccccagtctggccagcggggatacgagtgcatcctcaatattcagggttcagagcagagagtcccggctttaagattcaacagctcctccgtgcagtgtcagaataccagttatagctatgaaggcatggaaatcaataacctgccggttgagctgacagtcgtatggaacggccatttcaacattgataacccagctcagaataaggtgcacttatataaatgtggcgcaatgagggagtcttgcggtctgtgcctcaaggctgaccccgacttcgcttgcggctggtgtcaaggcccaggacagtgcactcttcgccagcactgtcctgcgcaggagtctcagtggctcgagttatcgggagccaagtcaaagtgcacgaaccccagaatcactgagatcattcccgtgaccggtcctcgcgagggcggaacaaaagtaacaattagaggtgagaatctaggcttggagttcagggacatcgcttcgcatgtgaaggtggccggtgtagagtgtagtcccctcgtagatggctacataccggctgagcagatcgtctgcgagatgggggaggcaaaaccttcacagcacgcagggttcgttgagatttgtgttgcagtctgtcggcctgagtttatggcacggagctcccaactctactatttcatgactctcactcttagcgatctgaaaccaagcaggggccctatgtctgggggtacacaagtcaccatcacagggacaaacttgaacgccggatcaaacgtggtggttatgttcggcaagcagccttgtttgttccaccggaggtcccctagctatattgtatgcaataccaccagctccgatgaagtcctcgagatgaaagtaagtgtgcaggtggatagggccaagattcaccaggacctagtgtttcagtacgtggaggatccaaccatagtgagaatcgagccggaatggagcatagttagtgggaacacccctattgccgtttggggaactcacttagacctgattcagaacccacagatccgggctaagcacggcggtaaggaacacatcaatatctgcgaggtacttaacgctactgaaatgacctgtcaggcacctgccctagccttaggacccgaccaccagtctgatctgactgagcggccagaagaattcggttttatcctggacaatgtccagagcttacttatcctcaacaagactaattttacctattaccctaatcctgtgttcgaggcattcgggccttctgggattttggaactgaaacctggcaccccgatcatcttgaagggaaaaaatctcatcccaccagttgccggtggaaatgtgaaattgaattacaccgttctggtcggagagaaaccctgtacagtgacggttagtgatgtgcaattgctgtgcgagagcccaaatcttatcggccgacataaagttatggccagagttggcggtatggagtacagcccaggaatggtgtacattgccccagacagcccgctctcactacccgcaattgtatccatcgcggtagctggaggtcttctcatcatatttatagtggcagtactgatcgcctataagaggaagagcagggaatctgatttgaccctgaaaagactacagatgcaaatggataacctggaatctcgtgttgctttggaatgcaaagaggccttcgccgagctacagaccgacattcacgaactgacatctgatctggatggggcaggcattccatttctagattatagaacctataccatgagggtgctcttccccggtattgaagatcaccctgtgctgcgggacttggaggtcccgggatacaggcaggagcgcgtggaaaagggcttaaagctgtttgcacagttgatcaataacaaagtattcttgctgtctttcatccgaaccctggaaagccagcgcagcttctccatgcgcgaccggggaaatgtggcaagcctgattatgacagtcttacagagcaagctggaatacgcaacagacgtgctaaagcagctccttgccgatttaatcgacaagaaccttgaatctaaaaatcaccctaagctgctactccgcaggacagagagcgtggccgagaagatgcttactaattggttcacctttctactctataagtttttgaaagagtgtgccggagaacccctgttctctctgttctgtgccatcaaacaacagatggaaaaagggcctatcgatgccataacgggtgaagcaagatattcactgtcagaagataaactaatcagacaacaaatcgactacaaaacattagttctctcgtgtgtgagcccagacaacgcaaacagccccgaggtgcctgtaaagattctcaattgcgatactatcacacaagttaaagagaaaatcttggacgcaatcttcaagaatgttccgtgctctcatagacctaaggccgctgatatggacctggagtggcggcagggttcaggcgctcggatgatcttgcaagacgaggacattacaactaaaattgagaacgattggaagcggctgaacaccttggcgcactatcaagtccctgacggatccgtcgtcgcgctggtatccaagcaggtgacagcctacaatgccgtgaataattctactgtcagccgaaccagcgccagcaaatacgaaaacatgatccgttacacaggctctccagatagcctcagatctagaactcccatgatcacaccagatctggagtcgggggtaaagatgtggcacttagtcaagaatcatgaacacggcgaccaaaaggagggcgatcgagggagcaaaatggtgtctgagatatacctaactcggcttctggccacaaagggtactctgcagaagttcgtggatgacctgttcgaaaccatttttagcacagctcaccgcggtagtgctctgccattggcaatcaagtacatgtttgactttctggatgagcaggcagataagcacgggatccatgacccgcatgtacggcatacttggaagagtaattgtctccccctgcgcttctgggtaaatatgattaaaaatccgcagttcgtgttcgatattcacaaaaattctataacggatgcttgcctgagcgtggtagcacaaacctttatggacagctgctcaacctccgagcaccggttagggaaggactccccatctaacaaattgctgtacgctaaggatatcccctcctataaaaactgggtggagaggtactactccgacatcggtaaaatgccagccatatcggatcaggatatgaacgcttacttggccgagcaatcacgcatgcatatgaacgagtttaataccatgagcgctctgagtgagattttctcttacgtgggtaaatatagtgaggagattctcggtcccttagaccacgatgatcagtgtggcaaacagaagctcgcctacaaactagagcaagtcataacactgatgtccttagatagcta

SEQ ID NO: 270510 - DNA, 5685 bp, Artificial Sequence
  derived and/or modified sequence
atgaaggccatgccctggaactggacctgcctgctgagccacctgctgatggtgggcatgggcagcagcaccctgctgaccagacagcccgcccccctgagccagaagcagagaagcttcgtgaccttcagaggcgagcccgccgagggcttcaaccacctggtggtggacgagagaaccggccacatctacctgggcgccgtgaacagaatctacaagctgagcagcgacctgaaggtgctggtgacccacgagaccggccccgacgaggacaaccccaagtgctacccccccagaatcgtgcagacctgcaacgagcccctgaccaccaccaacaacgtgaacaagatgctgctgatcgactacaaggagaacagactgatcgcctgcggcagcctgtaccagggcatctgcaagctgctgagactggaggacctgttcaagctgggcgagccctaccacaagaaggagcactacctgagcggcgtgaacgagagcggcagcgtgttcggcgtgatcgtgagctacagcaacctggacgacaagctgttcatcgccaccgccgtggacggcaagcccgagtacttccccaccatcagcagcagaaagctgaccaagaacagcgaggccgacggcatgttcgcctacgtgttccacgacgagttcgtggccagcatgatcaagatccccagcgacaccttcaccatcatccccgacttcgacatctactacgtgtacggcttcagcagcggcaacttcgtgtacttcctgaccctgcagcccgagatggtgagcccccccggcagcaccaccaaggagcaggtgtacaccagcaagctggtgagactgtgcaaggaggacaccgccttcaacagctacgtggaggtgcccatcggctgcgagagaagcggcgtggagtacagactgctgcaggccgcctacctgagcaaggccggcgccgtgctgggcagaaccctgggcgtgcaccccgacgacgacctgctgttcaccgtgttcagcaagggccagaagagaaagatgaagagcctggacgagagcgccctgtgcatcttcatcctgaagcagatcaacgacagaatcaaggagagactgcagagctgctacagaggcgagggcaccctggacctggcctggctgaaggtgaaggacatcccctgcagcagcgccctgctgaccatcgacgacaacttctgcggcctggacatgaacgcccccctgggcgtgagcgacatggtgagaggcatccccgtgttcaccgaggacagagacagaatgaccagcgtgatcgcctacgtgtacaagaaccacagcctggccttcgtgggcaccaagagcggcaagctgaagaagatcagagtggacggccccagaggcaacgccctgcagtacgagaccgtgcaggtggtggaccccggccccgtgctgagagacatggccttcagcaaggaccacgagcagctgtacatcatgagcgagagacagctgaccagagtgcccgtggagagctgcggccagtaccagagctgcggcgagtgcctgggcagcggcgacccccactgcggctggtgcgtgctgcacaacacctgcaccagaaaggagagatgcgagagaagcaaggagcccagaagattcgccagcgagatgaagcagtgcgtgagactgaccgtgcaccccaacaacatcagcgtgagccagtacaacgtgctgctggtgctggagacctacaacgtgcccgagctgagcgccggcgtgaactgcaccttcgaggacctgagcgagatggacggcctggtggtgggcaaccagatccagtgctacagccccgccgccaaggaggtgcccagaatcatcaccgagaacggcgaccaccacgtggtgcagctgcagctgaagagcaaggagaccggcatgaccttcgccagcaccagcttcgtgttctacaactgcagcgtgcacaacagctgcctgagctgcgtggagagcccctacagatgccactggtgcaagtacagacacgtgtgcacccacgaccccaagacctgcagcttccaggagggcagagtgaagctgcccgaggactgcccccagctgctgagagtggacaagatcctggtgcccgtggaggtgatcaagcccatcaccctgaaggccaagaacctgccccagccccagagcggccagagaggctacgagtgcatcctgaacatccagggcagcgagcagagagtgcccgccctgagattcaacagcagcagcgtgcagtgccagaacaccagctacagctacgagggcatggagatcaacaacctgcccgtggagctgaccgtggtgtggaacggccacttcaacatcgacaaccccgcccagaacaaggtgcacctgtacaagtgcggcgccatgagagagagctgcggcctgtgcctgaaggccgaccccgacttcgcctgcggctggtgccagggccccggccagtgcaccctgagacagcactgccccgcccaggagagccagtggctggagctgagcggcgccaagagcaagtgcaccaaccccagaatcaccgagatcatccccgtgaccggccccagagagggcggcaccaaggtgaccatcagaggcgagaacctgggcctggagttcagagacatcgccagccacgtgaaggtggccggcgtggagtgcagccccctggtggacggctacatccccgccgagcagatcgtgtgcgagatgggcgaggccaagcccagccagcacgccggcttcgtggagatctgcgtggccgtgtgcagacccgagttcatggccagaagcagccagctgtactacttcatgaccctgaccctgagcgacctgaagcccagcagaggccccatgagcggcggcacccaggtgaccatcaccggcaccaacctgaacgccggcagcaacgtggtggtgatgttcggcaagcagccctgcctgttccacagaagaagccccagctacatcgtgtgcaacaccaccagcagcgacgaggtgctggagatgaaggtgagcgtgcaggtggacagagccaagatccaccaggacctggtgttccagtacgtggaggaccccaccatcgtgagaatcgagcccgagtggagcatcgtgagcggcaacacccccatcgccgtgtggggcacccacctggacctgatccagaacccccagatcagagccaagcacggcggcaaggagcacatcaacatctgcgaggtgctgaacgccaccgagatgacctgccaggcccccgccctggccctgggccccgaccaccagagcgacctgaccgagagacccgaggagttcggcttcatcctggacaacgtgcagagcctgctgatcctgaacaagaccaacttcacctactaccccaaccccgtgttcgaggccttcggccccagcggcatcctggagctgaagcccggcacccccatcatcctgaagggcaagaacctgatcccccccgtggccggcggcaacgtgaagctgaactacaccgtgctggtgggcgagaagccctgcaccgtgaccgtgagcgacgtgcagctgctgtgcgagagccccaacctgatcggcagacacaaggtgatggccagagtgggcggcatggagtacagccccggcatggtgtacatcgcccccgacagccccctgagcctgcccgccatcgtgagcatcgccgtggccggcggcctgctgatcatcttcatcgtggccgtgctgatcgcctacaagagaaagagcagagagagcgacctgaccctgaagagactgcagatgcagatggacaacctggagagcagagtggccctggagtgcaaggaggccttcgccgagctgcagaccgacatccacgagctgaccagcgacctggacggcgccggcatccccttcctggactacagaacctacaccatgagagtgctgttccccggcatcgaggaccaccccgtgctgagagacctggaggtgcccggctacagacaggagagagtggagaagggcctgaagctgttcgcccagctgatcaacaacaaggtgttcctgctgagcttcatcagaaccctggagagccagagaagcttcagcatgagagacagaggcaacgtggccagcctgatcatgaccgtgctgcagagcaagctggagtacgccaccgacgtgctgaagcagctgctggccgacctgatcgacaagaacctggagagcaagaaccaccccaagctgctgctgagaagaaccgagagcgtggccgagaagatgctgaccaactggttcaccttcctgctgtacaagttcctgaaggagtgcgccggcgagcccctgttcagcctgttctgcgccatcaagcagcagatggagaagggccccatcgacgccatcaccggcgaggccagatacagcctgagcgaggacaagctgatcagacagcagatcgactacaagaccctggtgctgagctgcgtgagccccgacaacgccaacagccccgaggtgcccgtgaagatcctgaactgcgacaccatcacccaggtgaaggagaagatcctggacgccatcttcaagaacgtgccctgcagccacagacccaaggccgccgacatggacctggagtggagacagggcagcggcgccagaatgatcctgcaggacgaggacatcaccaccaagatcgagaacgactggaagagactgaacaccctggcccactaccaggtgcccgacggcagcgtggtggccctggtgagcaagcaggtgaccgcctacaacgccgtgaacaacagcaccgtgagcagaaccagcgccagcaagtacgagaacatgatcagatacaccggcagccccgacagcctgagaagcagaacccccatgatcacccccgacctggagagcggcgtgaagatgtggcacctggtgaagaaccacgagcacggcgaccagaaggagggcgacagaggcagcaagatggtgagcgagatctacctgaccagactgctggccaccaagggcaccctgcagaagttcgtggacgacctgttcgagaccatcttcagcaccgcccacagaggcagcgccctgcccctggccatcaagtacatgttcgacttcctggacgagcaggccgacaagcacggcatccacgacccccacgtgagacacacctggaagagcaactgcctgcccctgagattctgggtgaacatgatcaagaacccccagttcgtgttcgacatccacaagaacagcatcaccgacgcctgcctgagcgtggtggcccagaccttcatggacagctgcagcaccagcgagcacagactgggcaaggacagccccagcaacaagctgctgtacgccaaggacatccccagctacaagaactgggtggagagatactacagcgacatcggcaagatgcccgccatcagcgaccaggacatgaacgcctacctggccgagcagagcagaatgcacatgaacgagttcaacaccatgagcgccctgagcgagatcttcagctacgtgggcaagtacagcgaggagatcctgggccccctggaccacgacgaccagtgcggcaagcagaagctggcctacaagctggagcaggtgatcaccctgatgagcctggacagctag

SEQ ID NO: 270511 - protein, 522 aa, Artificial Sequence
  derived and/or modified sequence
MKAMPWNWTCLLSHLLMVGMGSSTLLTRQPAPLSQKQRSFVTFRGEPAEGFNHLVVDERTGHIYLGAVNRIYKLSSDLKVLVTHETGPDEDNPKCYPPRIVQTCNEPLTTTNNVNKMLLIDYKENRLIACGSLYQGICKLLRLEDLFKLGEPYHKKEHYLSGVNESGSVFGVIVSYSNLDDKLFIATAVDGKPEYFPTISSRKLTKNSEADGMFAYVFHDEFVASMIKIPSDTFTIIPDFDIYYVYGFSSGNFVYFLTLQPEMVSPPGSTTKEQVYTSKLVRLCKEDTAFNSYVEVPIGCERSGVEYRLLQAAYLSKAGAVLGRTLGVHPDDDLLFTVFSKGQKRKMKSLDESALCIFILKQINDRIKERLQSCYRGEGTLDLAWLKVKDIPCSSALLTIDDNFCGLDMNAPLGVSDMVRGIPVFTEDRDRMTSVIAYVYKNHSLAFVGTKSGKLKKSFGTGPQGGITQEWIGVEGDPPGANIASQEQMLCVYLQCSSHKAISDQRVQPLLCCFLNVPGNSS

SEQ ID NO: 270512 - DNA, 1569 bp, Artificial Sequence
  derived and/or modified sequence
atgaaagcgatgccatggaactggacgtgtttactttcccatctgctcatggttggtatgggctctagtacattgttgactcgccagcctgctcccctgtcccagaagcagcgcagcttcgtgaccttccggggcgaaccagccgaaggttttaaccatctggttgtagacgaaagaactggacacatttacctgggggcggtgaatagaatttataaattatcctccgacttgaaagtccttgtcacccacgaaaccggcccagacgaagacaacccaaagtgctacccccctcggatagtgcagacgtgtaacgagcctcttacgaccacgaacaacgtgaataagatgctcctcatcgactataaagaaaatcgcctgatcgcttgcggctctctgtatcaggggatttgcaagctgctccggctggaagatctctttaagctgggagagccttaccataaaaaggaacactacctgtcaggggtcaatgaaagtggttctgtgttcggcgtcatagtgagctactcaaacctggacgataagctcttcatagcgaccgccgttgacggcaagccagaatacttcccaacaatatcatcccgaaagcttacgaagaatagcgaagcagacgggatgttcgcctatgttttccacgatgaatttgtcgcatccatgatcaaaataccgtctgatacttttaccattattcctgattttgatatttactacgtgtacgggttttcatcaggaaatttcgtttactttttgacattgcagccggaaatggtgtcccctccagggagcaccaccaaggagcaggtgtacaccagcaaactggtgcgtctgtgcaaggaagacaccgcatttaacagctatgtggaggtcccgataggttgtgagagatctggagtggaatataggctgctgcaggctgcctaccttagtaaagcgggggctgtcctgggtcggacgctcggagtgcacccggacgatgacctattattcaccgttttcagcaaaggccagaaacggaagatgaaaagtttggatgagtccgccctgtgcatttttatcctgaagcagataaacgatagaattaaagagcgcctccaatcctgttataggggtgaagggactcttgatctcgcatggctaaaagtgaaggatatcccttgcagctctgccctgcttacaatcgacgacaatttctgcggactggatatgaatgccccactaggcgtaagcgatatggttcgagggattcctgttttcaccgaggaccgcgaccgaatgactagcgtgatcgcgtacgtctataaaaatcacagccttgctttcgtaggaactaaatctggaaaactcaagaagtcctttggcacagggccacagggaggcatcactcaggagtggatcggagttgagggggatcccccaggcgcaaatatcgccagccaggagcagatgctgtgcgtgtacctgcagtgttcaagtcacaaggccatttctgatcagcgggtccaaccactgttgtgttgctttttaaacgtgccaggaaattcctcctag

SEQ ID NO: 270513 - DNA, 1569 bp, Artificial Sequence
  derived and/or modified sequence
atgaaggccatgccctggaactggacctgcctgctgagccacctgctgatggtgggcatgggcagcagcaccctgctgacccggcagcctgcccccctgagccagaagcagaggagctttgtgaccttccggggggagcctgctgagggcttcaaccacctggtggtggatgagaggacaggccacatctacctgggcgctgtgaaccgcatctacaagctgagcagtgacctgaaggtgctggtgacccatgagaccggcccagatgaggacaaccccaagtgctacccaccccgcatcgtgcagacctgcaatgagcccctgaccaccaccaacaacgtgaacaagatgctgctgattgactacaaggagaacagactcatcgcctgtggcagcctgtaccagggcatctgcaagctgctgcggctggaggacctcttcaagctgggggagccctaccacaagaaggagcactacctgtctggagtgaatgaaagtggctctgtgtttggagtgattgtgtcctacagcaacctggatgacaagctgttcatcgccacagctgtggatggcaagccagagtacttccccaccatcagcagcaggaagctgaccaagaacagcgaggctgatggcatgtttgcctacgtgttccatgatgaatttgtggcctccatgatcaagatccccagcgacaccttcaccatcatcccagactttgacatctactacgtgtatggcttcagcagcggcaactttgtgtacttcctgaccctgcagcctgagatggtgagccccccaggcagcaccaccaaggagcaggtgtacaccagcaagctggtgcggctgtgcaaggaggacacagccttcaacagctatgtggaggtgcccatcggctgtgagaggtctggagtggagtaccgcctgctgcaggccgcctacctgagcaaggccggggctgtgctgggccgcaccctgggcgtgcacccagatgatgacctgctcttcaccgtcttcagcaagggccagaagaggaagatgaagagcctggatgaaagtgccctgtgcatcttcatcctgaagcagatcaatgaccgcatcaaggagcggctgcagagctgctacagaggagagggcaccctggacctggcctggctgaaggtgaaggacatcccctgcagcagcgccctgctgaccattgatgacaacttctgtggcctggacatgaatgcccccctgggcgtgtctgacatggtgcggggcatccctgtgttcacagaagatcgggacaggatgaccagcgtcatcgcctacgtgtacaagaaccacagcctggcctttgtgggcaccaagagcggcaagctgaagaagagctttggaacaggcccccagggcggcatcacccaggagtggattggagtggagggggaccccccaggggccaacatcgccagccaggagcagatgctgtgtgtgtacctgcagtgcagcagccacaaggccatcagtgaccagagggtgcagcccctgctgtgctgcttcctgaatgtgcccggcaacagcagctag

SEQ ID NO: 270514 - DNA, 1569 bp, Artificial Sequence
  derived and/or modified sequence
atgaaggccatgccctggaactggacctgcctgctgagccacctgctaatggtcggtatgggttcctctacattgctgacccggcagccagccccgttgagccagaagcagcgctctttcgttactttccgtggggaaccagctgaaggttttaatcacctcgtggtcgacgagagaacaggtcacatctacctcggcgccgtgaaccggatttataaactgtcttccgacttgaaggtgctcgtcactcatgagaccggccctgacgaagacaatcctaaatgctatccacctcggatcgtgcagacatgcaatgaaccacttactaccacgaataatgtaaacaagatgttgttaatcgactacaaggagaaccgtttaatcgcttgcggaagcctctatcagggcatctgtaaactcttgcgcttagaggatcttttcaaactgggcgaaccttaccacaagaaggagcactacctcagcggggtgaacgagagcggcagcgtgtttggtgtgattgtttcatacagcaatttggatgataaactgtttatcgctacggctgtcgatggaaagcctgagtattttcccacgatctcctcaaggaaactcaccaagaattcagaagccgacggaatgttcgcctacgtgtttcacgacgaattcgttgcttccatgattaagatcccgtctgacacctttaccatcatccctgatttcgatatctattacgtatacggattttcttccggaaacttcgtttattttttgacactgcaacccgagatggtgagtccccccgggagtaccaccaaggagcaggtttatacctccaagctggtccgtctttgcaaggaagatactgccttcaatagttacgtggaagttccaattggatgcgaacggtccggggtggaatatcggttgctgcaggcagcttatctgtccaaagccggtgctgttctgggccgtactctaggagtccacccagacgacgatctcctttttacagtcttttcaaaaggccagaaaaggaagatgaagagcttggacgaatcagcactttgcatatttatactgaagcagatcaacgataggatcaaagagcgccttcaatcctgttaccgtggcgaggggacattggatttggcctggctcaaagtgaaggatatcccctgttcctctgccctgttgacaatcgacgataacttctgtggactggacatgaacgcgccacttggcgttagtgacatggtacgcggcatccccgtgtttactgaggatcgggacaggatgacttccgtaatcgcttacgtgtacaaaaatcattctctagccttcgtaggcactaaatctggtaaactaaaaaagagttttggtactggaccccagggcggcattacccaggaatggattggcgtggagggggaccctccaggcgccaatatcgcctcccaagagcagatgctctgcgtgtacctgcagtgctcttcccataaggccatttccgaccaaagggtgcagccactcctctgttgctttcttaacgtccccggtaactctagttag

SEQ ID NO: 270515 - DNA, 2004 bp, Artificial Sequence
  derived and/or modified sequence
atgagatgcagaccacatggagaccttaatgcatggagatcttgcccactagtagcgtggcccagcgttttgggacacagcccaatcagaccagtatttcccctctggagctggattgaggagggaacatggggactgaaaccttgaatgcttctgctttaattaccccgaaaagcaagtgccactgttagaaatggaaatcaggccagctgctggggcggcaagcagcaggaatgcaaatgtccatgacccctcagatccacacaaagccttctgaccttggaatttaagtaggggagactgcattgctgagtcctggccctctgaggggacgactgtgcctgagtgctgctgtgccactgggacccgcctctgccatgaaagccatgccctggaactggacctgccttctctcccacctcctcatggtgggcatgggctcctccactttgctcacccggcagccagccccgctgtcccagaagcagcggtcatttgtcacattccgaggagagcccgccgagggtttcaatcacctggtggtggatgagaggacaggacacatttacttgggggccgtcaatcggatttacaagctctccagcgacctgaaggtcttggtgacgcatgagacagggccggacgaggacaaccccaagtgttacccaccccgcatcgtccagacctgcaatgagcccctgaccaccaccaacaatgtcaacaagatgctcctcatagactacaaggagaacaggctgattgcctgtgggagcctgtaccaaggcatctgcaagctgctgaggctggaggacctcttcaagctgggggagccttatcataagaaggagcactatctgtcaggtgtcaacgagagcggctcagtctttggagtgatcgtctcctacagcaacctggatgacaagctgttcattgccacggcagtggatgggaagcccgagtattttcccaccatctccagccggaaactgaccaagaactctgaggcggatggcatgttcgcgtacgtcttccatgatgagttcgtggcctcgatgattaagatcccttcggacaccttcaccatcatccctgactttgatatctactatgtctatggttttagcagtggcaactttgtctactttttgaccctccaacctgagatggtgtctccaccaggctccaccaccaaggagcaggtgtatacatccaagctcgtgaggctttgcaaggaggacacagccttcaactcctatgtagaggtgcccattggctgtgagcgcagtggggtggagtaccgcctgctgcaggctgcctacctgtccaaagcgggggccgtgcttggcaggacccttggagtccatccagatgatgacctgctcttcaccgtcttctccaagggccagaagcggaaaatgaaatccctggatgagtcggccctgtgcatcttcatcttgaagcagataaatgaccgcattaaggagcggctgcagtcttgttaccggggcgagggcacgctggacctggcctggctcaaggtgaaggacatcccctgcagcagtgcgctcttaaccattgacgataacttctgtggcctggacatgaatgctcccctgggagtgtccgacatggtgcgtggaattcccgtcttcacggaggacagggaccgcatgacgtctgtcatcgcatatgtctacaagaaccactctctggcctttgtgggcaccaaaagtggcaagctgaagaagtccttcggcacaggtccacaagggggaatcacccaggagtggattggagtggagggagacccacctggggcgaacattgcttctcaggaacagatgctgtgtgtgtatcttcagtgctcaagtcacaaagcaatatcagatcagagagtccagcctctgctttgttgcttcctaaatgtacctgggaattcttcctaaaattactctggaaatttgaatccactttaactaaaaataaatattcatagcacagaaa

SEQ ID NO: 270516 - DNA, 1569 bp, Artificial Sequence
  derived and/or modified sequence
atgaaagcaatgccatggaactggacatgcctccttagccacctgttaatggtggggatgggcagcagtacactgcttacccgccaacctgctcctctgagccagaaacaaaggtccttcgtgacctttaggggggagcccgctgaggggtttaatcacttggtggtggatgagcgcaccggacacatttacctcggagccgtcaacagaatctacaagcttagttccgatctaaaagttcttgtgacccacgaaaccgggcctgacgaggataacccaaagtgctaccccccacgcatagtacagacatgtaatgaaccattgacgactactaataatgttaataagatgttgctcatcgattacaaagagaaccggttgatagcttgcgggagtctctaccagggcatttgtaagttactccggctggaggatctgtttaaactgggagagccatatcataagaaggaacattacttatcaggtgtcaacgagtccgggtccgttttcggtgtgatcgtctcctacagtaatctggacgataagctgtttatagctactgccgtcgacggcaagcccgagtatttccctaccataagctcccggaagctgaccaaaaacagcgaggcagacggaatgttcgcctacgtatttcacgatgagtttgtcgcctctatgataaagatccctagtgacacatttaccattattcctgactttgatatatattacgtatatggtttttcgtccggaaattttgtgtactttcttaccctgcagccagagatggtttcccctcccggatctaccaccaaggaacaagtgtatacgtcaaaacttgttaggttgtgtaaggaggacacggcttttaatagctacgtagaggttccaatagggtgcgagagatccggcgtggaatataggttgctgcaggctgcttacctgtcaaaagcaggtgccgtgcttggcaggacactgggcgttcatcctgacgacgatctgctcttcactgtgttcagcaaaggacaaaagagaaagatgaagagtctggatgaaagcgccctttgtatattcatactaaagcagatcaacgatcgaatcaaagagagactgcagtcttgctacaggggagaaggcaccctcgacttagcctggctgaaggtgaaagacatcccgtgtagttcggcattgctgacaattgatgacaacttctgcggccttgatatgaacgcgcctttgggagtgagcgacatggtcagaggtatccccgtttttaccgaggaccgggaccggatgacaagtgtaatagcctacgtatacaaaaatcatagtcttgccttcgtgggcacaaagtctgggaagttgaagaaatctttcgggactggaccccaggggggaatcactcaggaatggatcggcgtggagggtgaccccccaggggcaaacatagccagtcaggaacagatgctgtgcgtgtatctgcaatgttcaagtcacaaggcaatttcagatcagagagtgcagcccctgctgtgttgctttctcaatgtgccaggcaattcaagctag

SEQ ID NO: 270517 - DNA, 1569 bp, Artificial Sequence
  derived and/or modified sequence
atgaaggccatgccctggaactggacctgcctgctgagccacctgctgatggtgggcatgggcagcagcaccctgctgaccagacagcccgcccccctgagccagaagcagagaagcttcgtgaccttcagaggcgagcccgccgagggcttcaaccacctggtggtggacgagagaaccggccacatctacctgggcgccgtgaacagaatctacaagctgagcagcgacctgaaggtgctggtgacccacgagaccggccccgacgaggacaaccccaagtgctacccccccagaatcgtgcagacctgcaacgagcccctgaccaccaccaacaacgtgaacaagatgctgctgatcgactacaaggagaacagactgatcgcctgcggcagcctgtaccagggcatctgcaagctgctgagactggaggacctgttcaagctgggcgagccctaccacaagaaggagcactacctgagcggcgtgaacgagagcggcagcgtgttcggcgtgatcgtgagctacagcaacctggacgacaagctgttcatcgccaccgccgtggacggcaagcccgagtacttccccaccatcagcagcagaaagctgaccaagaacagcgaggccgacggcatgttcgcctacgtgttccacgacgagttcgtggccagcatgatcaagatccccagcgacaccttcaccatcatccccgacttcgacatctactacgtgtacggcttcagcagcggcaacttcgtgtacttcctgaccctgcagcccgagatggtgagcccccccggcagcaccaccaaggagcaggtgtacaccagcaagctggtgagactgtgcaaggaggacaccgccttcaacagctacgtggaggtgcccatcggctgcgagagaagcggcgtggagtacagactgctgcaggccgcctacctgagcaaggccggcgccgtgctgggcagaaccctgggcgtgcaccccgacgacgacctgctgttcaccgtgttcagcaagggccagaagagaaagatgaagagcctggacgagagcgccctgtgcatcttcatcctgaagcagatcaacgacagaatcaaggagagactgcagagctgctacagaggcgagggcaccctggacctggcctggctgaaggtgaaggacatcccctgcagcagcgccctgctgaccatcgacgacaacttctgcggcctggacatgaacgcccccctgggcgtgagcgacatggtgagaggcatccccgtgttcaccgaggacagagacagaatgaccagcgtgatcgcctacgtgtacaagaaccacagcctggccttcgtgggcaccaagagcggcaagctgaagaagagcttcggcaccggcccccagggcggcatcacccaggagtggatcggcgtggagggcgacccccccggcgccaacatcgccagccaggagcagatgctgtgcgtgtacctgcagtgcagcagccacaaggccatcagcgaccagagagtgcagcccctgctgtgctgcttcctgaacgtgcccggcaacagcagctag

SEQ ID NO: 270518 - protein, 469 aa, Artificial Sequence
  derived and/or modified sequence
MNQASPARKLEEILHLAELCIEVLQQNEEHHAELRHAFAWWPDLLAEHAEKFWALFTVDMDTALEAQPQDSWDSFPLFQLLNNFLRNDTLLCNGKFHKHLQEIFVPLVVRYVDLMESSIAQSIHRGFEQETWQPVKNIANSLPNVALPKVPSLPLNLPQIPNISTASWMPSLYESTNGSATSEDLFWKLDALQMFVFDLHWPEQEFAHHLEQRLKLMASDMLEACVKRTRTAFELKLQKASKTTDLRIPASVCTMFNVLVDAKKQSTKLCALDGGQEQQYHSKIDDLIDNSVKEIISLLVSKFVSVLEGVLSKLSRYDEGTFFSSILSFTVKAAAKYVDVPKPGMDLADTYIMFVRQNQDILREKVNEEMYIEKLFDQWYSSSMKVICVWLTDRLDLQLHIYQLKTLIKIVKKTYRDFRLQGVLEGTLNSKTYDTVHRRLTVEEATASVSEGGGLQGITMKDSDEEEEG

SEQ ID NO: 270519 - protein, 490 aa, Artificial Sequence
  derived and/or modified sequence
  misc_feature (1)..(1): Xaa can be any naturally occurring amino acid
XYTRLTEYAKIEGPAEKETETMNQASPARKLEEILHLAELCIEVLQQNEEHHAEGREAFAWWPDLLAEHAEKFWALFTVDMDTALEAQPQDSWDSFPLFQLLNNFLRNDTLLCNGKFHKHLQEIFVPLVVRYVDLMESSIAQSIHRGFEQETWQPVKNIANSLPNVALPKVPSLPLNLPQIPNISTASWMPSLYESTNGSATSEDLFWKLDALQMFVFDLHWPEQEFAHHLEQRLKLMASDMLEACVKRTRTAFELKLQKASKTTDLRIPASVCTMFNVLVDAKKQSTKLCALDGGQEQQYHSKIDDLIDNSVKEIISLLVSKFVSVLEGVLSKLSRYDEGTFFSSILSFTVKAAAKYVDVPKPGMDLADTYIMFVRQNQDILREKVNEEMYIEKLFDQWYSSSMKVICVWLTDRLDLQLHIYQLKTLIKIVKKTYRDFRLQGVLEGTLNSKTYDTVHRRLTVEEATASVSEGGGLQGITMKDSDEEEEG

SEQ ID NO: 270520 - DNA, 1473 bp, Artificial Sequence
  derived and/or modified sequence
taatatacacggctcaccgagtatgcgaagatcgaggggcctgcagaaaaagagacagaaacaatgaaccaggcctctcccgctcggaagttggaagaaatcctccacctagccgagctttgtattgaagttctgcaacagaacgaggagcatcacgcagagggcagggaggcgttcgcctggtggccagatcttctagccgagcacgctgagaagttctgggcactcttcaccgtggatatggataccgccctggaagcccaacctcaggacagttgggacagtttcccgctgttccagctgctgaacaacttcctgcggaacgacacattgttatgtaatggtaagtttcacaagcatctacaggaaattttcgtccccctggttgtcagatatgtagaccttatggaatcaagtattgctcaatccattcaccgcggcttcgagcaggagacatggcagcccgtgaaaaacattgccaattccctgcccaacgtggccctgcctaaggtaccctccctgccccttaatttgccacagatacccaatatttctaccgcttcctggatgccctctctgtatgaatccaccaatggatccgccacctcggaagatttattttggaagctggacgctttgcagatgttcgtgtttgacttgcattggcctgagcaggaatttgctcatcatctggaacagcggctgaaactgatggctagcgatatgttggaggcttgcgtgaagcgaacgagaacggcatttgagctgaagttgcagaaagcttctaaaacaactgatctgcgtataccagcctctgtgtgcaccatgtttaatgtcctcgtggatgccaaaaagcagtccactaaactctgcgccctcgacggcggccaggaacagcagtatcacagcaagatagacgacctgattgacaacagcgtcaaggagatcatttccctgcttgtcagtaagttcgtttctgttctggagggcgtgcttagcaaactgagccgctacgatgaggggactttcttctcctctatcctctcttttactgtgaaagcggccgcaaagtatgtggatgttcctaagcccggtatggacctagcagacacatacattatgtttgtgaggcagaatcaagacattctgcgcgaaaaggttaacgaagaaatgtacatcgagaagcttttcgatcagtggtacagctccagcatgaaagtgatctgcgtatggttaactgatagactcgacctgcagctacacatatatcagttgaagactctgattaagatagtaaagaagacctatcgggacttccgactgcaaggtgtgttggagggcacgctaaattctaagacttatgatacagtccacagaagattgactgttgaggaggcaactgccagtgtcagcgagggaggtggtctccagggcattactatgaaggatagcgatgaagaggaggagggctag

SEQ ID NO: 270521 - DNA, 1473 bp, Artificial Sequence
  derived and/or modified sequence
tgatacacccggctgacagaatatgccaagattgagggccctgctgagaaggagacagagaccatgaaccaggccagccctgccaggaagctggaggagatcctgcacctggccgagctgtgcatcgaggtgctgcagcagaatgaggagcaccacgccgagggccgggaggcctttgcctggtggccagacctgctggccgagcacgccgagaagttctgggccctcttcaccgtggacatggacacagccctggaggcccagccccaggacagctgggacagcttccccctcttccagctgctgaacaacttcctgagaaatgacaccctgctgtgcaatggcaagttccacaagcacctgcaggagatctttgtgcccctggtggtgcgctacgtggacctgatggagagcagcatcgcccagagcatccaccggggctttgagcaggagacctggcagcctgtgaagaacatcgccaacagcctgcccaacgtggccctgcccaaggtgcccagcctgcccctgaacctgccccagatccccaacatcagcacagcctcctggatgcccagcctgtatgagagcaccaacggcagcgccaccagcgaggacctcttctggaagctggatgccctgcagatgtttgtgtttgacctgcactggccagagcaggagtttgcccaccacctggagcagaggctgaagctgatggccagtgacatgctggaggcctgtgtgaagaggaccaggacagcctttgagctgaagctgcagaaggccagcaagaccacagacctgcgcatcccagcctctgtgtgcaccatgttcaacgtgctggtggatgccaagaagcagagcaccaagctgtgtgccctggatggcggccaggagcagcagtaccacagcaagattgatgacctgattgacaacagcgtgaaggagatcatcagcctgctggtgtccaagtttgtgtctgtgctggagggcgtgctgagcaagctgagccgctatgatgagggcaccttcttcagcagcatcctgtccttcaccgtgaaggctgctgccaagtatgtggatgtgcccaagccaggcatggacctggccgacacctacatcatgtttgtgcggcagaaccaggacatcctgcgggagaaggtgaatgaggagatgtacatcgagaagctgtttgaccagtggtacagcagctccatgaaggtgatctgtgtgtggctgacagaccggctggacctgcagctgcacatctaccagctgaagaccctcatcaagatcgtgaagaagacctacagagacttccggctgcagggcgtgctggagggcaccctgaacagcaagacctatgacacagtgcaccggcggctgactgtggaggaggccacagcctctgtgtctgagggcggcggcctgcagggcatcaccatgaaggacagtgatgaggaggaggagggctag

SEQ ID NO: 270522 - DNA, 1473 bp, Artificial Sequence
  derived and/or modified sequence
tgatacacccggctgaccgagtacgccaagatcgagggccccgccgagaaggaaactgaaacgatgaatcaagcctcgcctgctcgaaagctggaggagatcctacatctggcagaactgtgtatcgaagtgctccagcagaatgaagaacatcatgccgaaggcagagaagcgttcgcctggtggcccgacctgctggctgaacacgccgagaagttctgggctttattcaccgtcgatatggacactgctctcgaagcccagccacaggatagttgggactccttccccctttttcaactcctcaataacttcctgaggaacgataccctgttgtgtaacggcaagtttcataaacaccttcaggagatcttcgtccctttggtggtgcggtacgtagatctgatggaatcaagcatagctcagtctatccatcgcggattcgaacaggagacctggcagcccgttaagaacatcgctaactcattaccgaatgtagccctgcctaaagtgccctcgcttccactgaatttgccgcagatcccaaacatcagcactgcgtcctggatgccgtctctgtacgagtcgactaacgggagcgcgacttcggaggacctcttttggaaattggacgcccttcagatgttcgtttttgatctccactggcccgagcaagagtttgcccatcacctggagcagcggctcaagctcatggcctctgacatgctggaggcatgcgttaaaaggactcgaaccgctttcgagctgaagctccaaaaagcgtccaaaactactgacttacgaatcccagccagtgtgtgcacaatgttcaatgttctggtcgacgcaaaaaagcaaagtactaaactttgcgctttagatggaggccaggagcagcagtaccatagcaaaatcgacgatctgattgacaattccgtcaaagagattatcagcctcctcgtcagtaaattcgtgtcagtgctggaaggggtgctgtccaagctgtccagatacgacgagggtacgtttttttcatcaattctgtcatttacagtaaaagccgccgcaaagtacgtggatgtacctaagcccggtatggacttagcagacacctacatcatgttcgtgcggcaaaatcaagacatcttgcgcgaaaaggtgaatgaggagatgtacattgaaaaattatttgaccaatggtatagtagctcaatgaaggtgatctgtgtttggctgaccgataggctggacctgcagctccatatttaccagcttaaaacgcttattaagatcgtaaagaaaacgtaccgcgactttagattacaaggggttttggaggggactctaaatagcaagacatacgacacggtgcaccgaaggctgaccgtcgaagaggccacagccagtgtctcagagggggggggtctccagggcatcactatgaaggattcggacgaggaagaggaggggtag

SEQ ID NO: 270523 - DNA, 1473 bp, Artificial Sequence
  derived and/or modified sequence
tgatacacccggcttaccgagtacgctaagattgagggaccggctgagaaagagacggagactatgaaccaagcctcccccgcacgcaagttagaggaaattctccacctcgctgagctttgtatcgaggtactgcagcagaatgaggagcaccacgctgagggaagagaagcttttgcctggtggccagatctgctggctgaacacgccgagaaattttgggccttgttcaccgtggatatggatacagctctagaggctcagcctcaggattcttgggactcattccctctttttcaactgttaaataactttctgcgcaacgatactctcctgtgtaacggcaaattccataagcatttgcaggaaatttttgtccctcttgtggttcggtatgtggatcttatggaatctagtattgcccaaagcatccaccgtggcttcgaacaggaaacatggcagcccgtgaaaaacattgctaactctctcccaaacgtggccctaccaaaagtaccctctctacccctgaatctgcctcaaattcccaatataagcacggcaagctggatgccaagcctttatgagagcacgaatggtagtgctaccagcgaagatctcttttggaagttggatgccctgcagatgttcgtgttcgacttgcactggcctgaacaagagtttgcacatcacctggaacaaagacttaaattaatggcctcggatatgttggaggcctgcgttaagagaactcgaacagccttcgagcttaagcttcagaaggctagcaagacgacggacctgcggatccccgcatccgtatgcaccatgtttaatgttcttgtcgacgctaaaaagcagtctaccaagctgtgcgccctcgatgggggacaggagcagcaataccacagtaagattgacgacttaattgataactccgtcaaagagatcatcagtctgttagtgagcaagttcgtgtcagttctggagggtgtgctctctaagctcagtcgatatgacgaaggcactttcttttccagtattctaagtttcacggtgaaggctgccgctaaatacgtggacgtgccgaagccagggatggatctagcagatacttacatcatgtttgtgagacagaaccaagacatcctgcgcgagaaagtcaatgaggaaatgtacatagagaagctttttgaccaatggtatagcagctcaatgaaggtcatctgcgtgtggctgactgataggctcgatctgcagctgcacatctatcagctcaagactcttattaagattgtcaagaagacttatagagatttccgccttcagggtgtactggagggaaccctgaacagcaagacttacgataccgtccatagaaggctgacagtggaagaggcaaccgcgagtgtctcagagggtgggggtcttcaaggcattaccatgaaagattcggatgaagaagaagaaggctag

SEQ ID NO: 270524 - DNA, 2238 bp, Artificial Sequence
  derived and/or modified sequence
attacactagactcacagaatatgccaaaatagaaggcccagcagaaaaggaaacagagaccatgaaccaggcatctcctgctagaaagctggaagagattcttcatctggcagagctctgcatagaagtcttacagcagaatgaagagcatcatgcagagggaagagaggcatttgcctggtggcctgatttattggctgaacatgcagagaaattttgggctttatttacagtggatatggacactgcactagaggctcaaccgcaagactcctgggatagttttcctcttttccaactgcttaataatttcctccgaaatgacacacttttgtgtaatggaaaatttcacaaacacttgcaagaaatctttgtacccttggttgtccgctatgtggatctcatggagtcttccatcgcccagtcaattcacagaggttttgagcaggagacatggcagcctgtcaagaatatcgccaacagtcttcccaatgtagctcttccaaaagttccaagtctgcctcttaatcttccacagattcctaacatttctactgcttcgtggatgccttctttatatgagtccaccaatggctcagcaacatcagaagaccttttttggaagcttgatgcactgcaaatgtttgtctttgatctgcactggccagaacaggaatttgcccaccacttagagcaaagacttaaactaatggccagtgatatgctagaggcctgtgtcaaaagaacaagaactgcatttgaactcaagctacaaaaggcaagcaaaacaactgacttgcgcattccagcttccgtttgcactatgtttaatgtattagtcgatgccaaaaagcaaagcaccaaactctgtgccctggatggaggacaagagcaacagtaccattcaaaaatagatgatctgatcgacaacagtgtaaaagaaatcatttcactgttagtttcaaagtttgtttcagtgttggaaggcgtgttgtctaagctgtcaaggtatgatgaaggcactttcttttcatccattctgtcattcactgtgaaagcagctgcaaaatatgttgatgttccaaaaccaggaatggatctggcagacacctatattatgtttgttcggcaaaaccaagatattcttcgagaaaaggtcaatgaggaaatgtatatagaaaagttatttgatcaatggtacagcagttccatgaaagtcatttgcgtgtggttgactgatagattagacctccaactccatatttaccagctgaagacgctcatcaagattgtgaagaaaacctacagggactttcgattgcagggtgtgttggaaggaacactgaacagtaagacttatgatactgtgcacagacgtttaacagtagaggaggccacagcctctgtttcagaaggaggaggacttcagggcattactatgaaagacagtgacgaagaagaagaaggctgatatcacacagctttgcagaaggaaggaagaccttgatcgacattgttttttatttttttaaccttgtccttgtaattacattcattgtttgttttggccaaataaaaatgcttgtatttctttaaaaagtaagcctgaatgtagagtaaaaggggaaatgccaagattttggggtttttttgtttcctttttttgtttgtttgtttgtttgtttttttggagaagagcatcctcttttgtgtagtttgacctaaaaatgaaccttggctctgcttgtgatcagaacatgaacttttttttttaaagaagatttgagcatttttctgtaatcacatcaaaatgatgttttctgtgtaaagcgagatacatatttctcataatgcagcattgtgagaagtcagttcggaccactgcaccaacactgtcgtatccttgttaaaatggtgtgtaccttacaaattataatttatgtgccaggttcgttttgtacttaatttgctattattgtgatgtgtataaaatctttaatcttggttcttagtactttgaattggtctacaggtatattcctgggatgaaaggattgccaaacccaaatatagactagattatccaatgggtttgtgtctttgttccattctcaacatttcttctttcaactataagtaatccccaggtgtggggtagcaagtgtgcttccgtcaagataccatattctcctgctccagtataacagcttgcaggcaataaaaatctatttgctcat

SEQ ID NO: 270525 - DNA, 1473 bp, Artificial Sequence
  derived and/or modified sequence
tgatacaccagactgaccgagtacgccaagatcgagggccccgccgagaaggagaccgagaccatgaaccaggccagccccgccagaaagctggaggagatcctgcacctggccgagctgtgcatcgaggtgctgcagcagaacgaggagcaccacgccgagggcagagaggccttcgcctggtggcccgacctgctggccgagcacgccgagaagttctgggccctgttcaccgtggacatggacaccgccctggaggcccagccccaggacagctgggacagcttccccctgttccagctgctgaacaacttcctgagaaacgacaccctgctgtgcaacggcaagttccacaagcacctgcaggagatcttcgtgcccctggtggtgagatacgtggacctgatggagagcagcatcgcccagagcatccacagaggcttcgagcaggagacctggcagcccgtgaagaacatcgccaacagcctgcccaacgtggccctgcccaaggtgcccagcctgcccctgaacctgccccagatccccaacatcagcaccgccagctggatgcccagcctgtacgagagcaccaacggcagcgccaccagcgaggacctgttctggaagctggacgccctgcagatgttcgtgttcgacctgcactggcccgagcaggagttcgcccaccacctggagcagagactgaagctgatggccagcgacatgctggaggcctgcgtgaagagaaccagaaccgccttcgagctgaagctgcagaaggccagcaagaccaccgacctgagaatccccgccagcgtgtgcaccatgttcaacgtgctggtggacgccaagaagcagagcaccaagctgtgcgccctggacggcggccaggagcagcagtaccacagcaagatcgacgacctgatcgacaacagcgtgaaggagatcatcagcctgctggtgagcaagttcgtgagcgtgctggagggcgtgctgagcaagctgagcagatacgacgagggcaccttcttcagcagcatcctgagcttcaccgtgaaggccgccgccaagtacgtggacgtgcccaagcccggcatggacctggccgacacctacatcatgttcgtgagacagaaccaggacatcctgagagagaaggtgaacgaggagatgtacatcgagaagctgttcgaccagtggtacagcagcagcatgaaggtgatctgcgtgtggctgaccgacagactggacctgcagctgcacatctaccagctgaagaccctgatcaagatcgtgaagaagacctacagagacttcagactgcagggcgtgctggagggcaccctgaacagcaagacctacgacaccgtgcacagaagactgaccgtggaggaggccaccgccagcgtgagcgagggcggcggcctgcagggcatcaccatgaaggacagcgacgaggaggaggagggctag

SEQ ID NO: 270526 - DNA, 6042 bp, Artificial Sequence
  derived and/or modified sequence
attcaattccacgtgttgcttgttgtaggcgccacaggttccccacctgcgtccgggcgctcgggcggctccgcctctgccggcgggctctggggaaccgctgggtcggcgcgcccggggctggcggagcaattcctgaggcgcccaagctcacccccaacgctaactccgcctattcagtcccggcggctccccctctcccccctcccaatcctcctcccggctcctgcccgcccctttcgccctggtggtaggaaacactcctgaatctaactcgacgtgtccggaaagccctggccagttttcctttcgttctgcggccgctgcagccagccccgcggctccctcagacccgcgggcgcagccgccgggggtgaggcgcttggggaccgcgggccgagcggcggggatccccgagcaccatgctggacccgtcttccagcgaagaggagtcggacgaggggctggaagaggaaagccgcgatgtgctggtggcagccggcagctcgcagcgagctcctccagccccgactcgggaagggcggcgggacgcgccggggcgcgcgggcggcggcggcgcggccagatctgtgagcccgagcccctctgtgctcagcgaggggcgagacgagccccagcggcagctggacgatgagcaggagcggaggatccgcctgcagctctacgtcttcgtcgtgaggtgcatcgcgtaccccttcaacgccaagcagcccaccgacatggcccggaggcagcagaagcttaacaaacaacagttgcagttactgaaagaacggttccaggccttcctcaatggggaaacccaaattgtagctgacgaagcattttgcaacgcagttcggagttattatgaggtttttctaaagagtgaccgagtggccagaatggtacagagtggagggtgttctgctaatgacttcagagaagtatttaagaaaaacatagaaaaacgtgtgcggagtttgccagaaatagatggcttgagcaaagagacagtgttgagctcatggatagccaaatatgatgccatttacagaggtgaagaggacttgtgcaaacagccaaatagaatggccctaagtgcagtgtctgaacttattctgagcaaggaacaactctatgaaatgtttcagcagattctgggtattaaaaaactggaacaccagctcctttataatgcatgtcagctggataacgcagatgaacaagcagcccagatcagaagggaacttgatggccggctgcaattggcagataaaatggcaaaggaaagaaaattccccaaatttatagcaaaagatatggagaatatgtatatagaagagttgcggtcttcagtgaatttgctaatggccaatttggaaagtcttccagtttcgaaaggtggtccggaatttaaattacaaaaattaaaacgttcacagaactctgcatttttggacataggagatgagaatgagattcagctgtcaaagtccgacgtggtactgtcattcaccttagagattgtcataatggaagtgcaaggcctgaagtcagttgctcccaatcgaattgtttactgtacaatggaagtggaaggagaaaaacttcagacagaccaggccgaagcctcaaggccacaatgggggactcaaggagatttcaccaccacccatcctcggcctgtggtcaaagtgaaactcttcacagaaagcactggagttctggccctggaagataaagaactgggaagggtgatattatacccaacttctaatagctccaaatcagctgaattacaccgaatggtagttccaaaaaatagccaggattctgacttaaaaatcaaactggcagtgcgaatggataaaccagcacatatgaagcatagtggatatctgtatgcccttggacagaaggtttggaaaagatggaaaaaacgttactttgttctagttcaggttagccaatatacctttgctatgtgcagttatagagaaaagaagtctgaaccacaagaattaatgcagcttgaaggctatactgtggattataccgatccccacccaggccttcagggtggttgtatgttctttaatgctgttaaagaaggagatactgtaatctttgccagtgatgatgaacaggacagaatattatgggttcaagccatgtatagggccacaggtcaatcatataaaccagttcctgcaattcaaacccagaaactgaatcctaaaggaggaactctccatgcagatgctcagctttatgcagatcgttttcagaaacatggtatggatgagtttatttctgcaaacccctgcaagcttgatcatgccttcctttttagaatactccagaggcagactttggatcacagactgaatgattcctattcttgcttgggatggtttagccctggccaagtctttgtgttagatgagtactgtgcccgttatggtgtgagaggctgtcacagacatctctgctaccttgcagaactgatggaacattcagaaaatggtgctgtcattgaccctaccctgctccattacagctttgcattctgtgcctctcatgtgcacggcaacaggcctgatggaattgggactgtttcagtggaagaaaaagaaagatttgaggagataaaagagagactctcttcccttttagaaaatcagataagccatttcagatactgttttccctttggacgacctgaaggtgctctaaaagctacactttcattacttgaaagggttttaatgaaagatattgccactcccataccagcagaagaggtgaagaaagtggtcagaaaatgtctcgagaaagctgccttgatcaattacactagactcacagaatatgccaaaatagaagagaccatgaaccaggcatctcctgctagaaagctggaagagattcttcatctggcagagctctgcatagaagtcttacagcagaatgaagagcatcatgcagagctaagacatgcatttgcctggtggcctgatttattggctgaacatgcagagaaattttgggctttatttacagtggatatggacactgcactagaggctcaaccgcaagactcctgggatagttttcctcttttccaactgcttaataatttcctccgaaatgacacacttttgtgtaatggaaaatttcacaaacacttgcaagaaatctttgtacccttggttgtccgctatgtggatctcatggagtcttccatcgcccagtcaattcacagaggttttgagcaggagacatggcagcctgtcaagaatatcgccaacagtcttcccaatgtagctcttccaaaagttccaagtctgcctcttaatcttccacagattcctaacatttctactgcttcgtggatgccttctttatatgagtccaccaatggctcagcaacatcagaagaccttttttggaagcttgatgcactgcaaatgtttgtctttgatctgcactggccagaacaggaatttgcccaccacttagagcaaagacttaaactaatggccagtgatatgctagaggcctgtgtcaaaagaacaagaactgcatttgaactcaagctacaaaaggcaagcaaaacaactgacttgcgcattccagcttccgtttgcactatgtttaatgtattagtcgatgccaaaaagcaaagcaccaaactctgtgccctggatggaggacaagagcaacagtaccattcaaaaatagatgatctgatcgacaacagtgtaaaagaaatcatttcactgttagtttcaaagtttgtttcagtgttggaaggcgtgttgtctaagctgtcaaggtatgatgaaggcactttcttttcatccattctgtcattcactgtgaaagcagctgcaaaatatgttgatgttccaaaaccaggaatggatctggcagacacctatattatgtttgttcggcaaaaccaagatattcttcgagaaaaggtcaatgaggaaatgtatatagaaaagttatttgatcaatggtacagcagttccatgaaagtcatttgcgtgtggttgactgatagattagacctccaactccatatttaccagctgaagacgctcatcaagattgtgaagaaaacctacagggactttcgattgcagggtgtgttggaaggaacactgaacagtaagacttatgatactgtgcacagacgtttaacagtagaggaggccacagcctctgtttcagaaggaggaggacttcagggcattactatgaaagacagtgacgaagaagaagaaggctgatatcacacagctttgcagaaggaaggaagaccttgatcgacattgttttttatttttttaaccttgtccttgtaattacattcattgtttgttttggccaaataaaaatgcttgtatttctttaaaaagtaagcctgaatgtagagtaaaaggggaaatgccaagattttggggtttttttgtttcctttttttgtttgtttgtttgtttgtttttttggagaagagcatcctcttttgtgtagtttgacctaaaaatgaaccttggctctgcttgtgatcagaacatgaacttttttttttaaagaagatttgagcatttttctgtaatcacatcaaaatgatgttttctgtgtaaagcgagatacatatttctcataatgcagcattgtgagaagtcagttcggaccactgcaccaacactgtcgtatccttgttaaaatggtgtgtaccttacaaattataatttatgtgccaggttcgttttgtacttaatttgctattattgtgatgtgtataaaatctttaatcttggttcttagtactttgaattggtctacaggtatattcctgggatgaaaggattgccaaacccaaatatagactagattatccaatgggtttgtgtctttgttccattctcaacatttcttctttcaactataagtaatccccaggtgtggggtagcaagtgtgcttccgtcaagataccatattctcctgctccagtataacagcttgcaggcaataaaaatctatttgctcataactacttctgtatttattagacttatatagagcaaatgcagtaaaagaggtttgcagtgtttcaaacatcccaactatctgactctgtgtttttgtttcttgagttttttgtttgttttgtttgtaatattttgtttttaatcaaatgagtaaaagatagtaacactgactgttctttgtacctaataggcacatacattgttaaaagaattactatgacagcatatttccatagcagaggaaatatatatttcatatattattagttaatattagtaatcaatgttaactaataattagtaatgttagtaatattaactagtaattcacattattagtggttctctcaaaatattttcttgctagggtttgagagataattgtattatgttgcgtaagttctctatgaattatttttgtgatatttcccaaaacatattggcagattgtgctactgcatttattaataagtaatttttaaatgaaggcagttaatgcagaataagtggaggtatccctgcatttatgaaaacgtttattctgaaactttagaaatgaaacaacttggacctccagattcgttctcccatggtgtaataagtggtcgttaggtacctagactagccttaaaaatctatttaatctacagttactatttagcattgttttggctcattttctgggccctagggctaagataacaaacaaggaaatttcttccttcttccgggattaaagactaactctaccaactcactatctttgaaaggcagtttgggaatgttctccctccttttcttctctattcacacaccaaatactattttctccaaaccctcaaatgtccagtcatgctatcccaaactctccaatggcaccatccccaagcttgctgttccacgacacattgctctgtacttagtaattacccacccttcttttcctttcaataaaatgtccatttccttgat

SEQ ID NO: 270527 - protein, 899 aa, Artificial Sequence
  derived and/or modified sequence
  misc_feature (1)..(1): Xaa can be any naturally occurring amino acid
XEIQLSKSDVVLSFTLEIVIMEVQGLKSVAPNRIVYCTMEVEGEKLQTDQAEASRPQWGTQGDFTTTHPRPVVKVKLFTESTGVLALEDKELGRVILYPTSNSSKSAELHRMVVPKNSQDSDLKIKLAVRMDKPAHMKHSGYLYALGQKVWKRWKKRYFVLVQVSQYTFAMCSYREKKSEPQELMQLEGYTVDYTDPHPGLQGGCMFFNAVKEGDTVIFASDDEQDRILWVQAMYRATGQSYKPVPAIQTQKLNPKGGTLHADAQLYADRFQKHGMDEFISANPCKLDHAFLFRILQRQTLDHRLNDSYSCLGWFSPGQVFVLDEYCARYGVRGCHRHLCYLAELMEHSENGAVIDPTLLHYSFAFCASHVHGNRPDGIGTVSVEEKERFEEIKERLSSLLENQISHFRYCFPFGRPEGALKATLSLLERVLMKDIATPIPAEEVKKVVRKCLEKAALINYTRLTEYAKIEETMNQASPARKLEEILHLAELCIEVLQQNEEHHAEAFAWWPDLLAEHAEKFWALFTVDMDTALEAQPQDSWDSFPLFQLLNNFLRNDTLLCNGKFHKHLQEIFVPLVVRYVDLMESSIAQSIHRGFEQETWQPVNNGSATSEDLFWKLDALQMFVFDLHWPEQEFAHHLEQRLKLMASDMLEACVKRTRTAFELKLQKASKTTDLRIPASVCTMFNVLVDAKKQSTKLCALDGGQEQQYHSKIDDLIDNSVKEIISLLVSKFVSVLEGVLSKLSRYDEGTFFSSILSFTVKAAAKYVDVPKPGMDLADTYIMFVRQNQDILREKVNEEMYIEKLFDQWYSSSMKVICVWLTDRLDLQLHIYQLKTLIKIVKKTYRDFRLQGVLEGTLNSKTYDTVHRRLTVEEATASVSEGGGLQGITMKDSDEEEEG

SEQ ID NO: 270528 - DNA, 2700 bp, Artificial Sequence
  derived and/or modified sequence
tgagagatccagctttctaaatccgatgtagtgttgagtttcacactggagatcgtcatcatggaggtccaaggcctcaagtctgtggcaccaaacagaatagtgtattgtaccatggaagtggaaggggagaagcttcaaacagaccaggcggaggcatcgcgaccacaatggggcacccagggtgatttcacaacaacccacccccgccccgtcgtgaaagttaaactgttcacagaatccaccggagtcctggccttggaagacaaggaactgggccgggtaatattgtacccaacttccaacagttcaaagtccgccgaacttcacagaatggttgtccctaagaatagtcaggattctgacctgaaaataaaactggcagtgcgcatggataagcctgcgcacatgaagcattccggctacctgtacgcccttggacagaaggtttggaaacgctggaaaaaacggtattttgtgctggtccaggtctcccagtacacttttgccatgtgttcttatagggagaagaaatccgaacctcaggagctgatgcagctggaaggttacactgtggattacactgatccccatccgggcctacaaggaggctgcatgtttttcaacgccgtgaaagagggagataccgtaatatttgccagtgatgacgaacaggatcgaatactatgggttcaggcgatgtacagagctaccggccagtcttataagccggtccctgccattcagactcagaagctgaatcccaagggagggacactccatgccgatgctcaactgtacgcagatcgatttcagaagcatggcatggatgaattcatatcagccaatccctgtaagctcgatcatgccttcctgtttcgaatcctgcagcgacagacactggatcaccgtcttaatgacagttattcttgcttgggatggttttcgccagggcaggtttttgtgttagacgaatactgcgcccgatatggtgtcaggggatgtcatcgacacctatgttaccttgccgaattaatggagcacagtgagaatggcgccgtgatagaccctacactcctgcactatagctttgctttttgtgccagtcacgtgcacggaaacaggccggatggtatcggaacggtatccgtcgaagaaaaagagagatttgaggagatcaaagagcgcctgtcatcacttctcgagaatcagatatcacatttcaggtattgttttccgttcgggaggccagagggggccctgaaagccaccctctcactgctggaacgtgtcttgatgaaggacatcgccacccccatcccagcagaggaggttaaaaaggtggttagaaaatgcttggaaaaagctgctcttatcaactacaccagactgacggaatacgcgaaaatcgaagaaaccatgaatcaggcctcacctgccagaaaactggaggagattcttcacctggctgagctgtgcattgaggtgctgcaacagaatgaagaacaccatgctgaggccttcgcatggtggcctgatttactcgcggaacatgctgagaagttttgggccctgtttacggttgatatggatacagcattggaagcccagcctcaggactcttgggactctttccctctgtttcaactattaaacaatttcctcaggaatgataccctgctgtgtaacggaaagttccacaagcatctccaggagatctttgtccctctggtggttcgctacgtcgacctgatggagtctagtattgcacagagcatccatagaggctttgaacaggagacatggcagcctgtaaataacgggtccgcaacatctgaagacctgttttggaaattggacgcgctgcagatgtttgtcttcgacctgcactggcccgagcaggagttcgcgcatcatctggagcaacggcttaaactgatggcctctgatatgctggaagcttgcgtcaaacgaacaagaactgcattcgagttaaagctgcaaaaggcctcaaaaaccactgatcttcgcatccccgccagcgtctgtacaatgtttaacgtgcttgtggacgcaaaaaaacagtccacaaagctgtgcgctcttgacggcggccaggagcagcagtatcactctaaaattgatgacctcatagataacagtgtgaaggaaattatttcactgctggtgagtaaatttgtgtctgtactcgaaggcgtgctgagtaaactgagcaggtatgacgaaggaacgttctttagctcaatcctatcctttacagttaaagctgcagccaagtacgtggatgtgcctaagcccgggatggatctggccgatacatacataatgtttgttaggcagaaccaggacattttgcgcgagaaagttaacgaagagatgtacatcgagaagctatttgatcaatggtattcgagctccatgaaggtgatttgcgtttggctgactgacagactcgacctgcaactacatatctatcagctgaagacccttataaagattgtgaaaaaaacatatcgtgatttcagactgcaaggcgtgctggaggggaccctcaatagcaaaacatatgacacagttcatcgacgtctgacggttgaggaagccaccgctagcgtcagtgagggaggcgggctgcagggcattactatgaaggattcagatgaggaggaagaaggctag

SEQ ID NO: 270529 - DNA, 2700 bp, Artificial Sequence
  derived and/or modified sequence
tgagaaatccagctgagcaagagtgatgtggtgctgtccttcaccctggagatcgtcatcatggaggtgcagggcctgaagtctgtggcccccaaccgcatcgtgtactgcaccatggaggtggagggggagaagctgcagacagaccaggccgaggccagccggccccagtggggcacccagggcgacttcaccaccacccaccccaggcctgtggtgaaggtgaagctgttcacagagagcactggagtgctggccctggaggacaaggagctgggccgggtcatcctgtaccccaccagcaacagcagcaagtctgctgagctgcacaggatggtggtgcccaagaacagccaggacagcgacctgaagatcaagctggccgtgaggatggacaagccagcccacatgaagcacagcggctacctgtatgccctgggccagaaggtgtggaagcgctggaagaagcgctactttgtgctggtgcaggtgtcccagtacacctttgccatgtgcagctaccgggagaagaagtctgagccccaggagctgatgcagctggagggctacacagtggactacacagacccccaccctggcctgcagggcggctgcatgttcttcaatgctgtgaaggagggggacaccgtcatctttgccagtgatgatgagcaggaccgcatcctgtgggtgcaggccatgtaccgggccaccggccagagctacaagcctgtgcctgccatccagacccagaagctgaaccccaagggcggcaccctgcacgcagatgcccagctgtatgctgaccgcttccagaagcacggcatggatgagttcatcagcgccaacccctgcaagctggaccacgccttcctgttccgcatcctgcagaggcagaccctggaccaccggctgaatgacagctacagctgcctgggctggttcagccctggccaggtgtttgtgctggatgagtactgtgcccgctatggagtgcggggctgccaccgccacctgtgctacctggccgagctgatggagcacagtgaaaatggagctgtgattgaccccaccctgctgcactacagctttgccttctgtgccagccacgtgcacggcaacagaccagatggcattggaacagtgtctgtggaggagaaggagagatttgaggagatcaaggagcggctgagcagcctgctggagaaccagatcagccacttccgctactgcttccccttcggccggcctgagggcgccctgaaggccaccctgagcctgctggagcgggtgctgatgaaggacatcgccacccccatcccagctgaggaggtgaagaaggtggtgaggaagtgcctggagaaggccgccctgatcaactacacccggctgacagaatatgccaagattgaggagaccatgaaccaggccagccctgccaggaagctggaggagatcctgcacctggccgagctgtgcatcgaggtgctgcagcagaatgaggagcaccacgccgaggcctttgcctggtggccagacctgctggccgagcacgccgagaagttctgggccctcttcaccgtggacatggacacagccctggaggcccagccccaggacagctgggacagcttccccctcttccagctgctgaacaacttcctgagaaatgacaccctgctgtgcaatggcaagttccacaagcacctgcaggagatctttgtgcccctggtggtgcgctacgtggacctgatggagagcagcatcgcccagagcatccaccggggctttgagcaggagacctggcagcctgtgaacaatggaagtgccaccagtgaagatctcttctggaagctggatgccctgcagatgtttgtgtttgacctgcactggccagagcaggagtttgcccaccacctggagcagaggctgaagctgatggccagtgacatgctggaggcctgtgtgaagaggaccaggacagcctttgagctgaagctgcagaaggccagcaagaccacagacctgcgcatcccagcctctgtgtgcaccatgtttaatgtgctggtggatgccaagaagcagagcaccaagctgtgtgccctggatggcggccaggagcagcagtaccacagcaagattgatgacctgattgacaacagcgtgaaggagatcatcagcctgctggtgtccaagtttgtgtctgtgctggagggcgtgctgagcaagctgagccgctatgatgagggcaccttcttcagcagcatcctgtccttcaccgtgaaggccgccgccaagtatgtggatgtgcccaagccaggcatggacctggccgacacctacatcatgtttgtgcggcagaaccaggacatcctgcgggagaaggtgaatgaggagatgtacatcgagaagctgtttgaccagtggtacagcagctccatgaaggtgatctgtgtgtggctgacagaccggctggacctgcagctgcacatctaccagctgaagaccctcatcaagatcgtgaagaagacctacagagacttccggctgcagggcgtgctggagggcaccctgaacagcaagacctatgacacagtgcaccggcggctgactgtggaggaggccacagcctctgtgtctgagggcggcggcctgcagggcatcaccatgaaggacagtgatgaggaggaggagggctag

SEQ ID NO: 270530 - DNA, 2700 bp, Artificial Sequence
  derived and/or modified sequence
tgagagatccagctgagcaagagcgacgtggtgctgagcttcaccctcgaaatcgtgattatggaggtgcaggggctcaagtctgtggctcccaatcggatcgtgtattgtaccatggaggtggagggggaaaaattgcaaactgatcaggccgaggctagccggcctcagtggggaactcagggcgacttcacaactacgcatcctcgacccgttgtaaaagtgaaactgttcaccgagtctacaggggtgctggccttagaagacaaggagttaggacgtgtcatcctgtatcccacatccaacagtagcaagagcgcagaacttcatcgtatggttgtccccaaaaactcgcaagactcggatctgaaaattaagctggccgttcgaatggataagccagcccacatgaaacattctgggtatctgtatgcattggggcagaaggtttggaagagatggaagaagaggtatttcgttctcgttcaggtgagccaatacacgtttgcaatgtgctcttacagagagaaaaaatccgagccacaggagttgatgcagctggagggttacaccgtagattacacagacccgcaccctggccttcaggggggttgcatgttctttaacgccgtaaaagaaggcgatacggtgatcttcgctagtgacgacgaacaggataggattttgtgggttcaagcgatgtatcgggcaaccggacaatcctataagcccgtgcctgcgatccaaactcaaaagcttaacccaaagggaggcacactccacgctgatgcacagctatatgccgaccgatttcaaaagcacggcatggacgaattcatttcagctaacccttgcaagttggatcacgcctttctgtttcggatcctacagcgccaaactctggaccatcgcctgaacgattcctactcatgcttgggatggtttagtcctgggcaggtgtttgtcctggacgagtattgcgcaaggtatggggtcagggggtgtcatcgccacttatgttacctcgccgaattgatggaacactccgagaatggtgctgtaatcgatccaacgcttctacattattcctttgccttttgcgcatctcatgtccacggtaataggcctgatgggatcggcactgtgtcggttgaggagaaggaacggtttgaggagattaaagaaagactcagctcactcctggagaatcaaattagccacttccgttactgtttccccttcgggagacctgagggagcacttaaggctaccttgtccttactcgaacgagtattaatgaaagacattgcgacacctatcccagcggaagaagtgaaaaaagttgtgcgaaagtgtttggagaaggcagccctgataaattataccagactcacagaatacgctaaaatcgaggagactatgaatcaggcgagccctgctcgaaaactggaggaaattctccacctcgccgaactgtgtatcgaagtactgcagcaaaacgaagagcaccatgctgaggcttttgcttggtggcccgacctgctggctgaacacgctgagaagttttgggctttgttcacagtggacatggatacagccctggaagcacagccacaggattcttgggactcattcccactctttcaactgttgaacaatttcctcagaaacgatacgttgttgtgcaatggaaaattccacaagcacttgcaggaaattttcgtgccactggtcgtacggtatgtggatttaatggaatcaagtattgcacaatctatccacaggggttttgaacaggagacctggcaacctgtcaataatggctctgctaccagtgaggacctgttctggaagctggacgcactgcagatgttcgtattcgacctgcattggccggaacaagagttcgctcaccacctggaacagcgccttaagctcatggcatccgatatgctggaggcttgcgtcaagcgaacaagaacagctttcgaactcaagctgcagaaggcctctaagaccaccgatctaaggatccctgcttccgtttgtacaatgttcaatgtgctcgttgatgcaaaaaaacaaagcacaaagttatgcgctctcgatggtggacaggaacagcagtaccactccaagatcgatgacctgatagacaacagcgtcaaggagatcatctctctgctagtcagtaaattcgtgtctgtgcttgagggcgttctgagcaagctctcacgatacgacgagggtaccttcttctcttcgatcctgagcttcacagtaaaggctgccgccaagtatgtggacgtgccaaaacccggcatggatctggccgatacctacatcatgtttgttcgacaaaatcaagacattctgcgcgagaaggtgaatgaagaaatgtatattgagaagctgtttgatcagtggtattcttcttctatgaaggtaatttgcgtgtggttgacggataggctggatctgcaattgcacatttaccaactgaagaccctgattaaaatcgtgaaaaaaacctacagggatttccgacttcaaggggtgctcgaaggcacgctgaatagcaaaacctatgatactgttcatcggcgcctaactgtagaggaagcaacagctagcgtcagtgagggcggcggattgcagggaataacaatgaaagactctgacgaagaggaagagggatag

SEQ ID NO: 270531 - DNA, 2700 bp, Artificial Sequence
  derived and/or modified sequence
tgagaaatccagctgtctaaatctgacgttgtgctgtcgttcaccctggaaattgtgattatggaggtgcagggccttaaaagcgtggctcctaatcgcatcgtatattgtaccatggaggtcgaaggcgagaagctccagactgaccaagctgaggcgagccggccacagtggggtacacagggcgactttacaacaacccacccaaggccagtagttaaagtcaaactatttacagagagcaccggtgtgctggcactcgaagataaagagctaggtagggtgattctctaccccacatctaacagcagcaagtcagccgaactgcacaggatggtagtccctaagaactcccaggatagtgatctcaagataaaattagcagtccggatggacaagcccgctcacatgaagcactcaggatacctgtacgcactgggtcagaaggtgtggaaacggtggaagaagagatactttgtgttagtgcaagtgtctcagtatacttttgccatgtgtagctacagagagaagaagtccgagccacaggaactgatgcagcttgaagggtacaccgtagattatacagatcctcatcccggactacaaggcggttgcatgttctttaatgctgttaaggagggagacactgttatttttgcctcagatgatgagcaagatagaatcctgtgggtccaggctatgtaccgtgcgaccggacagtcctataagccagtgcctgcaattcagactcagaagctcaatccgaagggcggaacgctccatgctgatgcgcagttatatgccgaccgctttcagaagcacggtatggatgagttcatatcggctaacccttgcaaattagatcatgccttcctcttccggatcctgcaaaggcagactcttgatcatcgcctgaatgacagctacagttgcctcgggtggttcagtcctggccaggtgtttgtgctggatgagtactgtgctcgctacggagtgaggggctgccaccgacacttgtgctacctggcggaactgatggaacattccgaaaacggggctgttatcgaccccacgctgctgcactattctttcgctttctgcgcatcccacgttcacgggaatcggccagacgggataggcactgtcagcgtcgaagagaaggagcgcttcgaggagataaaagagaggctgagttctcttcttgagaatcagatatcccactttaggtactgtttcccattcgggagacctgaaggggctctcaaggctaccctgtctctgctggagagagttctaatgaaggacattgccacccccattccagccgaagaagtgaagaaggtggttcgaaaatgcctcgagaaggccgctctgatcaattacaccaggctcaccgagtatgcaaaaatcgaggagacgatgaatcaggctagtccagcaaggaagcttgaggaaattttacacctggcagaactgtgtattgaagtccttcaacaaaacgaagagcatcatgccgaagccttcgcatggtggccagatctcctggctgagcacgcagaaaaattctgggctttattcactgtggatatggacacagcactagaggcacaaccgcaggactcctgggactccttccccttatttcaactgctgaataattttctaagaaatgacactttgctctgcaatggaaaatttcacaaacatctccaggagattttcgtcccgctggtcgttcgctacgtggatctgatggagtcctcaatagcacagtccattcaccggggtttcgagcaggagacctggcaaccggtcaataacggctccgccacctccgaggacctgttttggaagctcgacgctttgcagatgtttgtgtttgatctacattggccagagcaagaattcgcccaccatctggagcagagactgaaactcatggccagcgacatgctggaggcctgcgtaaagcgcacccgcacagccttcgagctgaaactccagaaggcgtctaagacaacagatttgagaatccctgcttccgtgtgcacaatgtttaatgtgttggtagatgccaagaaacaaagtactaagctctgcgccctggatggtgggcaagaacagcagtaccatagcaaaatagatgatctgatcgataattcggtcaaagaaataatctcactgctcgtatcaaaatttgtgagtgtgctggaaggagtgctgagtaaattgagccgatacgatgagggaacattctttagctccatcctgtccttcacagtcaaggccgcagcaaagtacgtggatgtgcccaaacctggtatggacctggccgatacctacatcatgttcgtgcggcaaaaccaggacatcctaagggaaaaggtgaacgaagaaatgtacattgagaaactgttcgaccagtggtactcctccagtatgaaggtgatttgcgtgtggctgacggatcggcttgatctgcagctgcacatctaccaattgaagactttgattaagatcgttaagaagacctatcgggattttcgcttgcagggggtgctggagggaactttgaacagcaaaacttacgacaccgtgcaccggaggcttactgtggaggaggccacagccagtgtgtccgaaggaggtggattacaaggaataactatgaaggattctgatgaggaagaggaagggtag

SEQ ID NO: 270532 - DNA, 2826 bp, Artificial Sequence
  derived and/or modified sequence
tgagattcagctgtcaaagtccgacgtggtactgtcattcaccttagagattgtcataatggaagtgcaaggcctgaagtcagttgctcccaatcgaattgtttactgtacaatggaagtggaaggagaaaaacttcagacagaccaggccgaagcctcaaggccacaatgggggactcaaggagatttcaccaccacccatcctcggcctgtggtcaaagtgaaactcttcacagaaagcactggagttctggccctggaagataaagaactgggaagggtgatattatacccaacttctaatagctccaaatcagctgaattacaccgaatggtagttccaaaaaatagccaggattctgacttaaaaatcaaactggcagtgcgaatggataaaccagcacatatgaagcatagtggatatctgtatgcccttggacagaaggtttggaaaagatggaaaaaacgttactttgttctagttcaggttagccaatatacctttgctatgtgcagttatagagaaaagaagtctgaaccacaagaattaatgcagcttgaaggctatactgtggattataccgatccccacccaggccttcagggtggttgtatgttctttaatgctgttaaagaaggagatactgtaatctttgccagtgatgatgaacaggacagaatattatgggttcaagccatgtatagggccacaggtcaatcatataaaccagttcctgcaattcaaacccagaaactgaatcctaaaggaggaactctccatgcagatgctcagctttatgcagatcgttttcagaaacatggtatggatgagtttatttctgcaaacccctgcaagcttgatcatgccttcctttttagaatactccagaggcagactttggatcacagactgaatgattcctattcttgcttgggatggtttagccctggccaagtctttgtgttagatgagtactgtgcccgttatggtgtgagaggctgtcacagacatctctgctaccttgcagaactgatggaacattcagaaaatggtgctgtcattgaccctaccctgctccattacagctttgcattctgtgcctctcatgtgcacggcaacaggcctgatggaattgggactgtttcagtggaagaaaaagaaagatttgaggagataaaagagagactctcttcccttttagaaaatcagataagccatttcagatactgttttccctttggacgacctgaaggtgctctaaaagctacactttcattacttgaaagggttttaatgaaagatattgccactcccataccagcagaagaggtgaagaaagtggtcagaaaatgtctcgagaaagctgccttgatcaattacactagactcacagaatatgccaaaatagaagagaccatgaaccaggcatctcctgctagaaagctggaagagattcttcatctggcagagctctgcatagaagtcttacagcagaatgaagagcatcatgcagaggcatttgcctggtggcctgatttattggctgaacatgcagagaaattttgggctttatttacagtggatatggacactgcactagaggctcaaccgcaagactcctgggatagttttcctcttttccaactgcttaataatttcctccgaaatgacacacttttgtgtaatggaaaatttcacaaacacttgcaagaaatctttgtacccttggttgtccgctatgtggatctcatggagtcttccatcgcccagtcaattcacagaggttttgagcaggagacatggcagcctgtcaacaatggctcagcaacatcagaagaccttttttggaagcttgatgcactgcaaatgtttgtctttgatctgcactggccagaacaggaatttgcccaccacttagagcaaagacttaaactaatggccagtgatatgctagaggcctgtgtcaaaagaacaagaactgcatttgaactcaagctacaaaaggcaagcaaaacaactgacttgcgcattccagcttccgtttgcactatgtttaatgtattagtcgatgccaaaaagcaaagcaccaaactctgtgccctggatggaggacaagagcaacagtaccattcaaaaatagatgatctgatcgacaacagtgtaaaagaaatcatttcactgttagtttcaaagtttgtttcagtgttggaaggcgtgttgtctaagctgtcaaggtatgatgaaggcactttcttttcatccattctgtcattcactgtgaaagcagctgcaaaatatgttgatgttccaaaaccaggaatggatctggcagacacctatattatgtttgttcggcaaaaccaagatattcttcgagaaaaggtcaatgaggaaatgtatatagaaaagttatttgatcaatggtacagcagttccatgaaagtcatttgcgtgtggttgactgatagattagacctccaactccatatttaccagctgaagacgctcatcaagattgtgaagaaaacctacagggactttcgattgcagggtgtgttggaaggaacactgaacagtaagacttatgatactgtgcacagacgtttaacagtagaggaggccacagcctctgtttcagaaggaggaggacttcagggcattactatgaaagacagtgacgaagaagaagaaggctgatatcacacagctttgcagaaggaaggaagaccttgatcgacattgttttttatttttttaaccttgtccttgtaattacattcattgtttgttttggccaaataaaaatgcttgtatttctttaaaaa

SEQ ID NO: 270533 - DNA, 2700 bp, Artificial Sequence
  derived and/or modified sequence
tgagagatccagctgagcaagagcgacgtggtgctgagcttcaccctggagatcgtgatcatggaggtgcagggcctgaagagcgtggcccccaacagaatcgtgtactgcaccatggaggtggagggcgagaagctgcagaccgaccaggccgaggccagcagaccccagtggggcacccagggcgacttcaccaccacccaccccagacccgtggtgaaggtgaagctgttcaccgagagcaccggcgtgctggccctggaggacaaggagctgggcagagtgatcctgtaccccaccagcaacagcagcaagagcgccgagctgcacagaatggtggtgcccaagaacagccaggacagcgacctgaagatcaagctggccgtgagaatggacaagcccgcccacatgaagcacagcggctacctgtacgccctgggccagaaggtgtggaagagatggaagaagagatacttcgtgctggtgcaggtgagccagtacaccttcgccatgtgcagctacagagagaagaagagcgagccccaggagctgatgcagctggagggctacaccgtggactacaccgacccccaccccggcctgcagggcggctgcatgttcttcaacgccgtgaaggagggcgacaccgtgatcttcgccagcgacgacgagcaggacagaatcctgtgggtgcaggccatgtacagagccaccggccagagctacaagcccgtgcccgccatccagacccagaagctgaaccccaagggcggcaccctgcacgccgacgcccagctgtacgccgacagattccagaagcacggcatggacgagttcatcagcgccaacccctgcaagctggaccacgccttcctgttcagaatcctgcagagacagaccctggaccacagactgaacgacagctacagctgcctgggctggttcagccccggccaggtgttcgtgctggacgagtactgcgccagatacggcgtgagaggctgccacagacacctgtgctacctggccgagctgatggagcacagcgagaacggcgccgtgatcgaccccaccctgctgcactacagcttcgccttctgcgccagccacgtgcacggcaacagacccgacggcatcggcaccgtgagcgtggaggagaaggagagattcgaggagatcaaggagagactgagcagcctgctggagaaccagatcagccacttcagatactgcttccccttcggcagacccgagggcgccctgaaggccaccctgagcctgctggagagagtgctgatgaaggacatcgccacccccatccccgccgaggaggtgaagaaggtggtgagaaagtgcctggagaaggccgccctgatcaactacaccagactgaccgagtacgccaagatcgaggagaccatgaaccaggccagccccgccagaaagctggaggagatcctgcacctggccgagctgtgcatcgaggtgctgcagcagaacgaggagcaccacgccgaggccttcgcctggtggcccgacctgctggccgagcacgccgagaagttctgggccctgttcaccgtggacatggacaccgccctggaggcccagccccaggacagctgggacagcttccccctgttccagctgctgaacaacttcctgagaaacgacaccctgctgtgcaacggcaagttccacaagcacctgcaggagatcttcgtgcccctggtggtgagatacgtggacctgatggagagcagcatcgcccagagcatccacagaggcttcgagcaggagacctggcagcccgtgaacaacggcagcgccaccagcgaggacctgttctggaagctggacgccctgcagatgttcgtgttcgacctgcactggcccgagcaggagttcgcccaccacctggagcagagactgaagctgatggccagcgacatgctggaggcctgcgtgaagagaaccagaaccgccttcgagctgaagctgcagaaggccagcaagaccaccgacctgagaatccccgccagcgtgtgcaccatgttcaacgtgctggtggacgccaagaagcagagcaccaagctgtgcgccctggacggcggccaggagcagcagtaccacagcaagatcgacgacctgatcgacaacagcgtgaaggagatcatcagcctgctggtgagcaagttcgtgagcgtgctggagggcgtgctgagcaagctgagcagatacgacgagggcaccttcttcagcagcatcctgagcttcaccgtgaaggccgccgccaagtacgtggacgtgcccaagcccggcatggacctggccgacacctacatcatgttcgtgagacagaaccaggacatcctgagagagaaggtgaacgaggagatgtacatcgagaagctgttcgaccagtggtacagcagcagcatgaaggtgatctgcgtgtggctgaccgacagactggacctgcagctgcacatctaccagctgaagaccctgatcaagatcgtgaagaagacctacagagacttcagactgcagggcgtgctggagggcaccctgaacagcaagacctacgacaccgtgcacagaagactgaccgtggaggaggccaccgccagcgtgagcgagggcggcggcctgcagggcatcaccatgaaggacagcgacgaggaggaggagggctag

SEQ ID NO: 270534 - protein, 403 aa, Artificial Sequence
  derived and/or modified sequence
MAFKGTKKRSQLDLELEIENMGAHLNAYTSREQTVYYAKAFSKDLPRAVEILADIIQNSTLGEAEIERERGVILREMQEVETNLQEVVFDYLHATAYQNTALGRTILGPTENIKSISRKDLVDYITTHYKGPRIVLAAAGGVSHDELLDLAKFHFGDSLCTHKGEIPALPPCKFTGSEIRVRDDKMPLAHLAIAVEAVGWAHPDTICLMVANTLIGNWDRSFGGGMNLSSKLAQLTCHGNLCHSFQSFNTSYTDTGLWGLYMVCESSTVADMLHVVQKEWMRLCTSVTESEVARARNLLKTNMLLQLDGSTPICEDIGRQMLCYNRRIPIPELEARIDAVNAETIREVCTKYIYNRSPAIAAVGYNHRSELHEWKWNKLFSKRQTISYSYVNILLPQPQPQYV

SEQ ID NO: 270535 - DNA, 1212 bp, Artificial Sequence
  derived and/or modified sequence
atggccttcaagggcaccaagaagagaagccagctggacctggagctggagatcgagaacatgggcgcccacctgaacgcctacaccagcagagagcagaccgtgtactacgccaaggccttcagcaaggacctgcccagagccgtggagatcctggccgacatcatccagaacagcaccctgggcgaggccgagatcgagagagagagaggcgtgatcctgagagagatgcaggaggtggagaccaacctgcaggaggtggtgttcgactacctgcacgccaccgcctaccagaacaccgccctgggcagaaccatcctgggccccaccgagaacatcaagagcatcagcagaaaggacctggtggactacatcaccacccactacaagggccccagaatcgtgctggccgccgccggcggcgtgagccacgacgagctgctggacctggccaagttccacttcggcgacagcctgtgcacccacaagggcgagatccccgccctgcccccctgcaagttcaccggcagcgagatcagagtgagagacgacaagatgcccctggcccacctggccatcgccgtggaggccgtgggctgggcccaccccgacaccatctgcctgatggtggccaacaccctgatcggcaactgggacagaagcttcggcggcggcatgaacctgagcagcaagctggcccagctgacctgccacggcaacctgtgccacagcttccagagcttcaacaccagctacaccgacaccggcctgtggggcctgtacatggtgtgcgagagcagcaccgtggccgacatgctgcacgtggtgcagaaggagtggatgagactgtgcaccagcgtgaccgagagcgaggtggccagagccagaaacctgctgaagaccaacatgctgctgcagctggacggcagcacccccatctgcgaggacatcggcagacagatgctgtgctacaacagaagaatccccatccccgagctggaggccagaatcgacgccgtgaacgccgagaccatcagagaggtgtgcaccaagtacatctacaacagaagccccgccatcgccgccgtgggctacaaccacagaagcgagctgcacgagtggaagtggaacaagctgttcagcaagagacagaccatcagctacagctacgtgaacatcctgctgccccagccccagccccagtacgtgtag

SEQ ID NO: 270536 - DNA, 1212 bp, Artificial Sequence
  derived and/or modified sequence
atggctttcaaggggacaaagaaacgatctcaattagacctggagctcgagatagagaacatgggggcccatttaaacgcctacacttcaagggagcagactgtatactacgctaaggctttcagcaaagatctcccccgcgcagttgagattctcgctgatatcatccagaattctacattaggcgaggccgaaatcgagcgcgaacggggcgtcattctaagggagatgcaggaggttgagacaaacctccaggaagtggtgttcgattacctgcacgccaccgcctaccagaatacagcattgggccgtaccatcctcggacccaccgaaaatatcaagtccatctcaaggaaggacctggtggattatataaccactcactataaggggccccgaatagtgcttgctgccgctggcggggtgtctcacgacgagttgctggacttggccaagttccactttggagatagtttgtgtacccataaaggcgaaattcctgcgctccctccttgcaagttcaccggcagcgagatcagggtgcgcgatgacaagatgcccctggctcacctcgctatagctgtggaagctgtcggctgggctcacccagacaccatctgcctgatggttgccaatacattgattggaaattgggataggagcttcggtggcggcatgaatctgtcttctaagctcgcccagctgacatgtcatgggaatctctgtcactctttccagtctttcaatacatcatataccgatactgggctgtggggcctctacatggtgtgtgagtccagcaccgtggctgacatgttgcacgtggtccagaaggagtggatgcgcctctgtacctcagtgaccgaatccgaggtcgctcgtgccagaaacttgctgaagacaaacatgctgctccagctggacgggtccacacccatctgtgaggatattgggaggcagatgctttgctacaataggcgaatcccaatccccgagctggaggcacgaattgatgccgtgaatgcagaaactattcgagaggtgtgcactaaatacatctacaatcgatcacccgccattgccgctgttggatataaccatagaagtgaactccacgagtggaagtggaataagctgttctccaagcgtcaaactatcagctattcatacgtgaatattctgttaccccaacctcagccccaatacgtctag

SEQ ID NO: 270537 - DNA, 1212 bp, Artificial Sequence
  derived and/or modified sequence
atggccttcaagggcaccaagaagaggagccagctggacctggagctggagattgagaacatgggcgcccacctgaatgcctacaccagccgggagcagacagtgtactatgccaaggccttcagcaaggacctgcccagggctgtggagatcctggccgacatcatccagaacagcaccctgggggaggccgagattgaaagagagcggggcgtcatcctgcgggagatgcaggaggtggagaccaacctgcaggaggtggtgtttgactacctgcacgccacagcctaccagaacacagccctgggccgcaccatcctgggccccacagagaacatcaagagcatcagcaggaaggacctggtggactacatcaccacccactacaagggcccccgcatcgtgctggccgctgctggaggagtgtcccatgatgagctgctggacctggccaagttccactttggagacagcctgtgcacccacaagggggagatcccagccctgcccccctgcaagttcaccggcagcgagatccgggtgagagatgacaagatgcccctggcccacctggccatcgctgtggaggccgtgggctgggcccacccagacaccatctgcctgatggtggccaacaccctgattggcaactgggacaggagctttggaggcggcatgaacctgagcagcaagctggcccagctgacctgccacggcaacctgtgccacagcttccagagcttcaacaccagctacacagacaccggcctgtggggcctgtacatggtgtgtgagagcagcacagtggccgacatgctgcacgtggtgcagaaggagtggatgaggctgtgcacctctgtgacagagagcgaggtggcccgggccaggaacctgctgaagaccaacatgctgctgcagctggatggcagcacccccatctgtgaagatattggccggcagatgctgtgctacaacagacgcatccccatccctgagctggaggccagaattgatgctgtgaatgctgagaccatccgggaggtgtgcaccaagtacatctacaacagaagccctgccatcgctgctgtgggctacaaccacaggtctgagctgcacgagtggaagtggaacaagctgttcagcaagaggcagaccatctcctacagctatgtgaacatcctgctgccccagccccagccccagtatgtgtag

SEQ ID NO: 270538 - DNA, 1212 bp, Artificial Sequence
  derived and/or modified sequence
atggccttcaagggcaccaagaagcggagccagctggacctggagcttgaaatcgagaatatgggcgcccatttgaatgcctacacttctcgagaacagaccgtatactatgcaaaggcatttagtaaggacttaccaagggcagtggagattctggcagatattatccaaaacagcacgctcggggaggcagagatcgagcgcgagcggggagttatcctgagagagatgcaggaggtggaaaccaacctccaggaagtcgtttttgactacctccatgccactgcataccagaatacggctctgggtagaaccatattgggtcccacagagaatataaaaagtatctcaagaaaagatctagtggattatatcactacacattataaaggcccacgaatcgttttggcagccgctggcggtgttagccatgacgagcttctcgatttggcaaagtttcactttggggattctctgtgtactcacaaaggggagatccccgcgctgcccccgtgtaagtttactggctcagaaatccgagtgagagacgataagatgccactggcccacttagccattgcggttgaggcagtaggatgggcacacccagacaccatttgcctcatggtcgcgaataccctgatcggaaactgggaccgatccttcgggggtggaatgaatttgtcatccaagctggctcagctgacctgtcacggtaacctgtgtcactctttccagagctttaatacaagttacacagacacaggcctttggggtctgtatatggtctgtgaaagctcgacagtcgcagacatgcttcacgtggtgcaaaaagaatggatgcgtctctgtacgagcgtgacagagtcggaggttgcccgggctcgcaacctgttaaagacaaatatgctcctccagctcgatgggagcacacccatctgcgaggacatcgggagacaaatgttgtgctataaccgcaggattcctatcccagaactggaagcgagaattgatgcagtgaacgcagagacaatcagagaagtttgtaccaagtacatctataacaggtcaccagccatcgccgcagtgggatacaaccaccgatcagagctacacgaatggaaatggaataaacttttctctaagagacagacaatttcatattcatacgttaacatcttgttgccacagccccagccccaatatgtctag

SEQ ID NO: 270539 - DNA, 2385 bp, Artificial Sequence
  derived and/or modified sequence
agaaatggcggctgcggcggctcgagtggtgttgtcatccgcggcgcggcggcggctctggggtttcagcgagagtcttctaatccgaggcgctgcgggacgggtgagcttccctccaggccggtcctgtcctcgagatctcgccagacccggcgcagcgcacctgagagtcggcgccacagatccgaacagtgggtcgggcagggcctcctcgacccggacccgccgggcgccaggcggcctggggctgctgaactggccgggggtgactggcttgtggccacccgccaggagacctgctagtgacgtgtgggatgaccctggttttcggctcctcccgccagctactgaggagtgcatgtttgaccactaaaaacgtagtgcttgcaaattggggaaaactaaaaagtgaaatgggtaccgctccagagttctatttttgcctaagactgaacttcgtcctcagctgggcttcccgcgaacctggacatcaatgaatcattatattttggagagaacagattaagaagtacacaggctgctacccaagttgttctgaatgttcctgaaacaagagtaacatgtttagaaagtggactcagagtagcttcggaagactctgggctctcaacatgcacagttggactctggattgatgctggaagtagatacgaaaatgagaagaacaatggaacagcacactttctggagcatatggctttcaagggcaccaagaagagatcccagttagatctggaacttgagattgaaaatatgggtgctcatctcaatgcctatacctccagagagcagactgtatactatgccaaagcattctctaaagacttgccaagagctgtagaaattcttgctgatataatacaaaacagcacattgggagaagcagagattgaacgtgagcgtggagtaatccttagagagatgcaggaagttgaaaccaatttacaagaagttgtttttgattatcttcatgccacagcttatcaaaatactgcacttggacggacaattttgggaccaactgaaaatatcaaatctataagtcgtaaggacttagtggattatataaccacacattataaggggccaagaatagtgcttgctgctgctggaggtgtttcccatgatgaattgcttgacttagcaaagtttcatttcggtgactctttatgcacacacaaaggagaaataccagctctgcctccctgcaaattcacaggaagtgagattcgtgtgagggatgacaagatgcctttggcgcaccttgcaatagctgttgaagctgttggttgggcacatccagatacaatctgtctcatggttgcaaacacgctgattggcaactgggatcgctcttttgggggaggaatgaatttatctagcaagctggcccagctcacttgtcatggcaatctttgccatagctttcagtctttcaacacttcctacacagatacaggattatggggactgtatatggtttgtgaatcatccactgttgcagacatgctacatgttgttcaaaaagaatggatgcgactctgtacaagtgtcacagaaagtgaggttgcacgagccagaaatcttctgaaaacaaacatgttgttgcagcttgatggttcaactccaatttgtgaagatattggtaggcaaatgttatgctataatagaaggattcccatccctgagcttgaagcaagaattgatgctgtgaatgctgagacaattcgagaagtatgtaccaaatacatttataataggagtccagctattgctgctgttggatataatcacagaagtgaacttcatgaatggaaatggaacaagttattttccaaaaggcaaactatttcatactcctacgtgaacatccttttaccacagcctcagccacagtacgtctaattatttaaaatttgtgattatcgctggtggtcaacaatttttttgtttttcatcctttaactggaaaaaggaggggctgtctcagtttttcttctgactctgtgtgtcacttacaattaataatgctagctgttaacatctacatagcagttgacatgtgccaggcctgtttaccagttaatcttctccatgatcctatgaggaaagtgctattgctgtctccatttcatagatgaggaaaatgaggcacagaggagacgttatgtagccactaccactgcaacttgctcaaacttccggccaagtcggctctagtccagacagcctgactcctcagcctgcgtctgtatgctgcctctcctaattcattatgtttattaataatttttccccgttttgttaacacttatgtttcaaaaacagtcatctttatttacattgactgatcatttcttttgt

SEQ ID NO: 270540 - DNA, 1212 bp, Artificial Sequence
  derived and/or modified sequence
atggcctttaagggcacgaaaaagagatcacagctggacctcgagctggagatcgagaacatgggcgctcatctaaatgcgtatactagtagagagcagacggtgtattacgctaaggcttttagcaaagacctccctagagccgtcgaaatccttgcagatattatccagaatagtaccctgggagaggccgagattgagcgggagcgaggtgtgattcttagggagatgcaggaagtggagaccaatcttcaggaagtggttttcgactatcttcacgctacggcttaccaaaatactgcactgggcaggaccattctgggtccaactgaaaacatcaaatcaatttcccggaaggacctggttgactacattaccacacactacaagggcccaaggattgtgctggctgctgccggaggagtgtcccacgatgaacttctggatctggccaagtttcacttcggtgactccctgtgtactcacaagggggaaattccagccttacctccctgtaaattcaccggctcagagatacgggttcgggatgataagatgcctttggcacacctcgcaattgccgtcgaagctgttggatgggctcacccagataccatttgcctgatggtggcaaacactctgatcggaaactgggatcgaagctttgggggaggcatgaatctttcatcgaagctcgctcagttgacttgtcatggcaatctttgtcactctttccaaagcttcaacaccagctatacggataccggcctgtggggcctgtacatggtgtgcgaatcaagtacggtggcggatatgctgcacgtcgtccaaaaagagtggatgcgcctgtgcaccagtgtgaccgagtccgaggtggctcgcgcaaggaacctgctaaagacaaatatgctcctgcagttggatgggtcaacgccgatctgcgaggatatcggaaggcagatgttgtgttacaacaggcgcatcccgatccccgaacttgaggcccgaattgacgcagtcaacgcagaaactattagagaagtgtgcactaaatatatctataatagatccccagcaatcgctgccgtcggatataatcacaggagtgagctgcacgaatggaaatggaataaactgttttcgaagcgccagacaattagttacagctacgttaatatcctgttaccacagccccagccccaatacgtgtag

SEQ ID NO: 270541 - protein, 1249 aa, Artificial Sequence
  derived and/or modified sequence
MSPAAAAAGAGERRRPIASVRDGRGRGCGGPARAVLLGLSLVGLLLYLVPAAAALAWLTVGATAAWWGLSREPRGSRPLSSFVRKARHRRPLSSFVRKARHRRTLFASPLAKSTANGNLLEPRTLLEGPDPAELLLMGSYLGKPGPPQPAAAPEGQDLRDRPGRRPPARPAPRSPPPRSPPPRSPPPSPPTHRAHHVYPSLPTPLLRPSRRPSPRDCGTLPNRFVITPRRRYPIHQAQYSCLGVLPTVCWNGYHKKAVLSPRNSRMVCSPVTVRIAPPDRRFSRSAIPEQIISSTLSSPSSNAPDPCAKETVLSALKEKEKKRTVEEEDQIFLDGQENKRRRHDSSGSGHSAFEPLVANGVPASFVPKPGSLKRGLNSQSSDDHLNKRSRSSSMSSLTGAYASGIPSSSRNAITSSYSSTRGISQLWKRNGPSSSPFSSPASSRSQTPERPAKKIREEELCHHSSSSTPLAADRESQGEKAADTTPRKKQNSNSQSTPGSSGQRKRKVQLLPSRRGEQLTLPPPPQLGYSITAEDLDLEKKASLQWFNQALEDKSDAASNSVTETPPITQPSFTFTLPAAAPASPPTSLLAPSTNPLLESLKKMQTPPSLPPCPESAGAATTEALSPPKTPSLLPPLGLSQSGPPGLLPSPSFDSKPPTTLLGLIPAPSMVPATDTKAPPTLQAETATKPQATSAPSPAPKQSFLFGTQNTSPSSPAAPAASSAPPMFKPIFTAPPKSEKEGPTPPGPSVTATAPSSSSLPTTTSTTAPTFQPVFSSMGPPASVPLPAPFFKQTTTPATAPTTTAPLFTGLASATSAVAPITSASPSTDSASKPAFGFGINSVSSSSVSTTTSTATAASQPFLFGAPQASAASFTPAMGSIFQFGKPPALPTTTTVTTFSQSLHTAVPTATSSSAADFSGFGSTLATSAPATSSQPTLTFSNTSTPTFNIPFGSSAKSPLPSYPGANPQPAFGAAEGQPPGAAKPALAPSFGSSFTFGNSAAPAAAPTPAPPSMIKVVPAYVPTPIHPIFGGATHSAFGLKATASAFGAPASSQPAFGGSTAVFFGAATSSGFGATTQTASSGSSSSVFGSTTPSPFTFGGSAAPAGSGSFGINVATPGSSTTTGAFSFGAGQSGSTATSTPFAGGLGQNALGTTGQSTPFAFNVSSTTESKPVFGGTATPTFGLNTPAPGVGTSGSSLSFGASSAPAQGFVGVAPFGSAALSFSIGAGSKTPGARQRLQARRQHTRKK

SEQ ID NO: 270542 - DNA, 3750 bp, Artificial Sequence
  derived and/or modified sequence
atgagccccgccgccgccgccgccggcgccggcgagagaagaagacccatcgccagcgtgagagacggcagaggcagaggctgcggcggccccgccagagccgtgctgctgggcctgagcctggtgggcctgctgctgtacctggtgcccgccgccgccgccctggcctggctgaccgtgggcgccaccgccgcctggtggggcctgagcagagagcccagaggcagcagacccctgagcagcttcgtgagaaaggccagacacagaagacccctgagcagcttcgtgagaaaggccagacacagaagaaccctgttcgccagccccctggccaagagcaccgccaacggcaacctgctggagcccagaaccctgctggagggccccgaccccgccgagctgctgctgatgggcagctacctgggcaagcccggccccccccagcccgccgccgcccccgagggccaggacctgagagacagacccggcagaagaccccccgccagacccgcccccagaagccccccccccagaagccccccccccagaagccccccccccagcccccccacccacagagcccaccacgtgtaccccagcctgcccacccccctgctgagacccagcagaagacccagccccagagactgcggcaccctgcccaacagattcgtgatcacccccagaagaagataccccatccaccaggcccagtacagctgcctgggcgtgctgcccaccgtgtgctggaacggctaccacaagaaggccgtgctgagccccagaaacagcagaatggtgtgcagccccgtgaccgtgagaatcgccccccccgacagaagattcagcagaagcgccatccccgagcagatcatcagcagcaccctgagcagccccagcagcaacgcccccgacccctgcgccaaggagaccgtgctgagcgccctgaaggagaaggagaagaagagaaccgtggaggaggaggaccagatcttcctggacggccaggagaacaagagaagaagacacgacagcagcggcagcggccacagcgccttcgagcccctggtggccaacggcgtgcccgccagcttcgtgcccaagcccggcagcctgaagagaggcctgaacagccagagcagcgacgaccacctgaacaagagaagcagaagcagcagcatgagcagcctgaccggcgcctacgccagcggcatccccagcagcagcagaaacgccatcaccagcagctacagcagcaccagaggcatcagccagctgtggaagagaaacggccccagcagcagccccttcagcagccccgccagcagcagaagccagacccccgagagacccgccaagaagatcagagaggaggagctgtgccaccacagcagcagcagcacccccctggccgccgacagagagagccagggcgagaaggccgccgacaccacccccagaaagaagcagaacagcaacagccagagcacccccggcagcagcggccagagaaagagaaaggtgcagctgctgcccagcagaagaggcgagcagctgaccctgcccccccccccccagctgggctacagcatcaccgccgaggacctggacctggagaagaaggccagcctgcagtggttcaaccaggccctggaggacaagagcgacgccgccagcaacagcgtgaccgagaccccccccatcacccagcccagcttcaccttcaccctgcccgccgccgcccccgccagcccccccaccagcctgctggcccccagcaccaaccccctgctggagagcctgaagaagatgcagaccccccccagcctgcccccctgccccgagagcgccggcgccgccaccaccgaggccctgagcccccccaagacccccagcctgctgccccccctgggcctgagccagagcggcccccccggcctgctgcccagccccagcttcgacagcaagccccccaccaccctgctgggcctgatccccgcccccagcatggtgcccgccaccgacaccaaggccccccccaccctgcaggccgagaccgccaccaagccccaggccaccagcgcccccagccccgcccccaagcagagcttcctgttcggcacccagaacaccagccccagcagccccgccgcccccgccgccagcagcgccccccccatgttcaagcccatcttcaccgccccccccaagagcgagaaggagggccccaccccccccggccccagcgtgaccgccaccgcccccagcagcagcagcctgcccaccaccaccagcaccaccgcccccaccttccagcccgtgttcagcagcatgggcccccccgccagcgtgcccctgcccgcccccttcttcaagcagaccaccacccccgccaccgcccccaccaccaccgcccccctgttcaccggcctggccagcgccaccagcgccgtggcccccatcaccagcgccagccccagcaccgacagcgccagcaagcccgccttcggcttcggcatcaacagcgtgagcagcagcagcgtgagcaccaccaccagcaccgccaccgccgccagccagcccttcctgttcggcgccccccaggccagcgccgccagcttcacccccgccatgggcagcatcttccagttcggcaagccccccgccctgcccaccaccaccaccgtgaccaccttcagccagagcctgcacaccgccgtgcccaccgccaccagcagcagcgccgccgacttcagcggcttcggcagcaccctggccaccagcgcccccgccaccagcagccagcccaccctgaccttcagcaacaccagcacccccaccttcaacatccccttcggcagcagcgccaagagccccctgcccagctaccccggcgccaacccccagcccgccttcggcgccgccgagggccagccccccggcgccgccaagcccgccctggcccccagcttcggcagcagcttcaccttcggcaacagcgccgcccccgccgccgcccccacccccgccccccccagcatgatcaaggtggtgcccgcctacgtgcccacccccatccaccccatcttcggcggcgccacccacagcgccttcggcctgaaggccaccgccagcgccttcggcgcccccgccagcagccagcccgccttcggcggcagcaccgccgtgttcttcggcgccgccaccagcagcggcttcggcgccaccacccagaccgccagcagcggcagcagcagcagcgtgttcggcagcaccacccccagccccttcaccttcggcggcagcgccgcccccgccggcagcggcagcttcggcatcaacgtggccacccccggcagcagcaccaccaccggcgccttcagcttcggcgccggccagagcggcagcaccgccaccagcacccccttcgccggcggcctgggccagaacgccctgggcaccaccggccagagcacccccttcgccttcaacgtgagcagcaccaccgagagcaagcccgtgttcggcggcaccgccacccccaccttcggcctgaacacccccgcccccggcgtgggcaccagcggcagcagcctgagcttcggcgccagcagcgcccccgcccagggcttcgtgggcgtggcccccttcggcagcgccgccctgagcttcagcatcggcgccggcagcaagacccccggcgccagacagagactgcaggccagaagacagcacaccagaaagaagtag

SEQ ID NO: 270543 - DNA, 3690 bp, Artificial Sequence
  derived and/or modified sequence
atgagccccgccgccgccgccgccggcgccggcgagagaagaagacccatcgccagcgtgagagacggcagaggcagaggctgcggcggccccgccggcgccgccctgctgggcctgagcctggtgggcctgctgctgtacctggtgcccgccgccgccgccctggcctggctggccgtgggcaccaccgccgcctggtggggcctgagcagagagcccagaggcagcagacccctgagcagcttcgtgcagaaggccagacacagaagaaccctgttcgccagcccccccgccaagagcaccgccaacggcaacctgctggagcccagaaccctgctggagggccccgaccccgccgagctgctgctgatgggcagctacctgggcaagcccggccccccccagcccgcccccgcccccgagggccaggacctgagaaacagacccggcagaagaccccccgccagacccgcccccagaagcaccccccccagcccccccacccacagagtgcaccacttctaccccagcctgcccacccccctgctgagacccagcggcagacccagccccagagacagaggcaccctgcccgacagattcgtgatcacccccagaagaagataccccatccaccagacccagtacagctgccccggcgtgctgcccaccgtgtgctggaacggctaccacaagaaggccgtgctgagccccagaaacagcagaatggtgtgcagccccgtgaccgtgagaatcgccccccccgacagaagattcagcagaagcgccatccccgagcagatcatcagcagcaccctgagcagccccagcagcaacgcccccgacccctgcgccaaggagaccgtgctgagcgccctgaaggagaagaagaagaagagaaccgtggaggaggaggaccagatcttcctggacggccaggagaacaagagaagaagacacgacagcagcggcagcggccacagcgccttcgagcccctggtggccagcggcgtgcccgccagcttcgtgcccaagcccggcagcctgaagagaggcctgaacagccagagcagcgacgaccacctgaacaagagaagcagaagcagcagcatgagcagcctgaccggcgcctacaccagcggcatccccagcagcagcagaaacgccatcaccagcagctacagcagcaccagaggcatcagccagctgtggaagagaaacggccccagcagcagccccttcagcagccccgccagcagcagaagccagacccccgagagacccgccaagaagatcagagaggaggagctgtgccaccacagcagcagcagcacccccctggccgccgacaaggagagccagggcgagaaggccgccgacaccacccccagaaagaagcagaacagcaacagccagagcacccccggcagcagcggccagagaaagagaaaggtgcagctgctgcccagcagaagaggcgagcagctgaccctgcccccccccccccagctgggctacagcatcaccgccgaggacctggacctggagaagaaggccagcctgcagtggttcaaccaggccctggaggacaagagcgacgccgccagcaacagcgtgaccgagaccccccccaccacccagcccagcttcaccttcaccctgcccgccgccgccaccgccagcccccccaccagcctgctggcccccagcaccaaccccctgctggagagcctgaagaagatgcagaccccccccagcctgcccccctgccccgagagcgccggcgccgccaccaccgaggccctgagcccccccaagacccccagcctgctgccccccctgggcctgagccagagcggcccccccggcctgctgcccagccccagcttcgacagcaagccccccaccaccctgctgggcctgatccccgcccccagcatggtgcccgccaccgacaccaaggccccccccaccctgcaggccgagaccgccaccaagccccaggccaccagcgcccccagccccgcccccaagcagagcttcctgttcggcacccagaacaccagccccagcagccccgccgcccccgccgccagcagcgccagccccatgttcaagcccatcttcaccgccccccccaagagcgagaaggagggccccaccccccccggccccagcgtgaccgccaccgcccccagcagcagcagcctgcccaccaccaccagcaccaccgcccccaccttccagcccgtgttcagcagcatgggcccccccgccagcgtgcccctgcccgcccccttcttcaagcagaccaccacccccgccaccgcccccaccaccaccgcccccctgttcaccggcctggccagcgccaccagcgccgtggcccccatcaccagcgccagccccagcaccgacagcgccagcaagcccgccttcggcttcggcatcaacagcgtgagcagcagcagcgtgagcaccaccaccagcaccgccaccgccgccagccagcccttcctgttcggcgccccccaggccagcgccgccagcttcacccccgccatgggcagcatcttccagttcggcaagccccccgccctgcccaccaccaccaccgtgaccaccttcagccagagcctgcccaccgccgtgcccaccgccaccagcagcagcgccgccgacttcagcggcttcggcagcaccctggccaccagcgcccccgccaccagcagccagcccaccctgaccttcagcaacaccagcacccccaccttcaacatccccttcggcagcagcgccaagagccccctgcccagctaccccggcgccaacccccagcccgccttcggcgccgccgagggccagccccccggcgccgccaagcccgccctgacccccagcttcggcagcagcttcaccttcggcaacagcgccgcccccgcccccgccaccgcccccacccccgcccccgccagcaccatcaagatcgtgcccgcccacgtgcccacccccatccagcccaccttcggcggcgccacccacagcgccttcggcctgaaggccaccgccagcgccttcggcgcccccgccagcagccagcccgccttcggcggcagcaccgccgtgttcagcttcggcgccgccaccagcagcggcttcggcgccaccacccagaccgccagcagcggcagcagcagcagcgtgttcggcagcaccacccccagccccttcaccttcggcggcagcgccgcccccgccggcagcggcagcttcggcatcaacgtggccacccccggcagcagcgccaccaccggcgccttcagcttcggcgccggccagagcggcagcaccgccaccagcacccccttcaccggcggcctgggccagaacgccctgggcaccaccggccagagcacccccttcgccttcaacgtgggcagcaccaccgagagcaagcccgtgttcggcggcaccgccacccccaccttcggccagaacacccccgcccccggcgtgggcaccagcggcagcagcctgagcttcggcgccagcagcgcccccgcccagggcttcgtgggcgtgggccccttcggcagcgccgcccccagcttcagcatcggcgccggcagcaagacccccggcgccagacagagactgcaggccagaagacagcacaccagaaagaagtag

SEQ ID NO: 270544 - DNA, 3750 bp, Artificial Sequence
  derived and/or modified sequence
atgtctcctgccgccgcggccgcaggcgccggcgaacgccgcaggccgattgccagtgtgagagatgggaggggccgcggctgtggaggacccgcccgcgccgtcctgctgggtctctccctggtggggttactgctctacttggtgccggctgcggcggctctcgcttggctgacggtgggggccacggcagcctggtggggactgtcccgagaaccccggggttcacgaccgttatcctcattcgtcagaaaggctcgccacagaagaccattgtccagttttgtcaggaaagccagacatcggcgcacccttttcgcttcacccctggctaagtcaaccgccaatggcaacctgctggagccccgcacactcctagaaggacctgatcctgctgaattgctgctaatggggagttatctcggtaaacctgggcctcctcagcctgctgcggctccagaggggcaggaccttagggatcgccccggaagaagaccacccgcacgccctgcaccacggtccccacctccccgaagtcccccaccacgtagcccgcctccttctcctccaacacaccgagcccaccacgtctaccccagcctgcctacaccccttctgcgcccttcaagacgaccttcccccagggattgcgggacactgcccaaccgatttgtgattacgccgcgaaggcgctatcctattcatcaggctcagtatagctgcttgggagtactgcctacggtgtgttggaacggttaccacaagaaggctgtgcttagcccccggaactctcgaatggtgtgcagccccgttactgtcagaattgctcccccggaccgtagattctcgcgctctgccatacccgaacagatcatctcctctactctttcttctcccagttctaacgctcccgatccgtgtgctaaagagacggtgctgagcgcgttgaaggaaaaggaaaagaagcgtaccgtggaggaggaggatcaaatttttttggatggccaagagaacaagcggcggcgccacgactccagcggatcaggccattctgcgttcgagcctctggtggcaaatggagtaccagcttcctttgtgcctaaaccaggtagtctgaagcgggggttgaattcccagtcatcagatgaccatctgaataagcgctccagaagctcaagcatgagtagcctaaccggggcctatgcttctggcataccgtcttcctcccggaatgctataacgtcctcctattcgagcacacgggggatcagccagctctggaaacgaaacgggcccagctctagcccattctccagccccgcctcatcccgatcacaaactcccgagagaccagctaaaaagatccgagaggaggaactttgtcaccactctagctcaagtacccctctggctgctgatagagaaagccagggtgagaaagcggccgatacaacaccaagaaaaaaacagaattctaactcccagtccaccccagggagcagcggccaacgcaaaagaaaggtacaacttctgccctcccggagaggtgaacagcttacgctgccccctccacctcagttagggtactccatcactgccgaggacctcgatctcgaaaagaaggccagcctccagtggtttaatcaggcacttgaggacaaaagcgacgctgctagcaactctgtcaccgagacaccccctattacacagccaagcttcacgttcacactgccagccgctgctccagcctctccccccacttcactgctagcaccttccactaatccactgctggaaagcctcaagaagatgcagacaccgccaagcctaccgccttgccccgaatccgccggcgccgccacaactgaagcgctcagtccaccaaagaccccgtcgctgctcccccctctaggcctctcccaaagcggccctcccggattgcttccaagccctagttttgactccaaaccaccaacaaccctccttggattgattcccgccccgagcatggtgcccgccactgacaccaaggcaccaccaactctgcaggctgagactgccacaaagcctcaggctacttcggccccatcacccgctcctaagcagtctttcctgtttggaacccagaataccagcccctcctctcctgccgcccccgccgcctcctccgctccacccatgtttaagccgattttcactgcccctcctaagtccgaaaaggaagggcctaccccacccggtccctccgtgactgcaacagccccctccagctcaagtctgcctacaaccacctccacaaccgcacccactttccagcccgtgttctctagcatgggtcccccagcttcagtccctctccccgctccgttcttcaagcagaccactacacccgccacagcacctacgaccacggctccactctttactggactggcctccgcgacatccgcagtggccccaattaccagtgcaagcccctctactgactcagctagtaagcccgcatttggatttggaattaactcagtctcttcttcaagcgtcagcacgaccacctcgacggcgaccgctgcatcccaaccctttttgttcggggccccgcaggcgagcgctgcctcttttacacctgccatgggctctatctttcagttcggcaagccacccgcacttcccaccaccacgaccgtgactaccttctcgcagagtctgcataccgccgtccccaccgctacctcttcctctgccgctgacttctcagggtttgggtcaaccctcgcaacatccgcccctgccacatcctcccagcccacgctgacattcagcaacacctccacaccaaccttcaatatcccttttggaagttccgctaagagtcctctgccttcatacccaggtgccaaccctcaacctgcatttggcgctgctgaaggacagccaccaggggccgctaaaccggcgctggccccaagtttcggatcctcattcacttttggcaactctgcagctcctgccgccgctcccacacccgctcccccctcaatgattaaagtggtacctgcctatgtaccaactcccattcatccgattttcgggggagctacacattcagccttcggtctgaaagcaactgctagcgcctttggcgccccggccagctcccagcccgcatttggtggcagcactgcggtttttttcggtgctgcaacttctagcggctttggagcgaccactcagaccgctagctctggctcttctagctcggtattcgggtctaccaccccatccccctttacctttggtggatccgccgctcctgccggctcgggtagcttcgggataaacgtggccacaccaggatcgtccaccaccacgggtgcgttctcctttggggccggccagagcggctcaacagccacttctacccctttcgctggaggccttgggcagaacgcgcttggaacaacgggacagtctactccattcgcctttaatgtgagttcaacaaccgaaagcaaacctgtgttcggaggcaccgctacaccgaccttcggactgaatacgccggctcctggcgtgggtacgtcgggctcttcgttgagcttcggagcatcgtctgcaccagcccaaggattcgtaggggtggcccccttcggctccgctgcacttagcttctcgattggagccggcagcaaaaccccaggtgctagacaacgcctccaggcaaggaggcagcatacacgaaagaagtag

SEQ ID NO: 270545 - DNA, 3690 bp, Artificial Sequence
  derived and/or modified sequence
atgtcccccgcagcagccgccgctggcgccggtgaaagaaggcgacctatcgcctccgtgcgggatggtcggggtcgcggttgtgggggacctgctggagccgctctgctcggactcagcctggtcggtctgctgctctacctcgtcccagccgccgccgcccttgcctggctcgcagtcggtacaacagcagcgtggtggggcctctcccgcgagccacgtgggtccaggccactgtccagtttcgtccagaaggctcggcatcggcggacactgttcgcgtcaccacccgctaagtccacagctaatggaaatcttcttgagcccaggaccttgctggaagggccagatccggctgagctactactgatgggctcctatctcgggaaacccggccctccacaacctgctcctgcccctgagggacaagaccttcgtaatcggccagggaggaggcctccagctcgaccagcccccaggtccaccccgccgtcaccgcccacccaccgcgtacaccacttttacccctctttaccaacacccctactgaggccatcaggtcgcccttcaccacgggatcgcggaactctgccagacaggtttgtgataacaccccgaaggcgatacccaatccatcagactcagtatagctgcccaggcgtcctgcccaccgtttgttggaacggctaccacaaaaaggcagttctctcgccacgcaattcgcgtatggtgtgctcacccgtgaccgtgaggatcgcgcccccagatagacggttttcgcgctctgctatccctgaacaaatcatcagttctaccttgtctagccccagctcaaacgcccctgacccctgcgctaaagagactgtcctgtctgctctgaaagagaaaaaaaagaaacggactgtagaggaggaagaccagatatttctcgacggccaggaaaacaagcgaagaaggcacgactccagcgggagcggccactccgctttcgaaccccttgtagcctcaggagtgcccgcttcattcgttccaaaacccggaagcctcaaacgggggcttaattcccagtcttctgatgaccatctcaacaagaggagtcgttcgtccagtatgtccagcctgacgggagcctatacgtctggcattccatccagctcgcgtaacgcaattacatcctcttattcttcaacgcgcggcatctcccagctttggaagaggaatggtccaagctctagtcccttttcatcacccgctagctctcggtcacagacacccgaacgacctgccaaaaaaatcagggaagaagagttatgtcatcactcaagttcatccaccccacttgccgccgataaagaaagccagggtgagaaggccgccgacactacccccaggaaaaaacagaactctaatagccagagcacccctggatctagtgggcagcgtaaacggaaagtgcagctcctgccgtcacgtcggggagaacagcttacactgccgccacccccacagctgggttactccatcaccgccgaggatttggaccttgagaagaaagccagtcttcagtggttcaaccaggcactggaggacaagagtgatgccgcatctaactccgtgaccgagaccccgcctacaacacaaccctcttttactttcacgctccctgctgcagctactgcctccccccccacgtctctgctggcccccagcaccaaccctctgttggagtccctcaaaaaaatgcagaccccaccaagcctgccgccgtgcccagagtctgccggtgccgcgaccaccgaggctcttagcccacccaagacaccatccttgctgcctccactcggcctgtctcagtctggaccgcccggcttgttgcctagccctagttttgattctaaaccccccacgaccctgttgggccttattccagccccttcgatggttccagcaaccgacacgaaagctcctcccacactacaagccgaaaccgctactaagccccaggctacaagcgcaccaagtccagcacctaaacagtccttcctcttcggtactcaaaatacatctccttcatccccagccgcccccgccgcgtcctctgcgtcacctatgtttaagcctatcttcactgcgcctcccaagtcagaaaaagagggcccaaccccaccgggaccaagcgtgactgcaactgccccatcttcctcatctctgcccaccaccacttctaccacagctcccacttttcagccggtcttctcttccatgggaccacccgcaagtgtgccactcccggctccgttttttaaacagactacaacacctgcaacagctcctacaactacagccccgcttttcactgggctggctagtgctacgtccgccgtggcacctatcacttccgcatcgccctcgaccgatagtgcatctaagccggcatttggattcggtattaattcagtatccagctcctccgtcagcacaaccactagcacggcgactgctgctagccagcccttcttgtttggggctccacaggccagtgctgcctcgtttacccctgccatgggtagcatcttccagttcggtaagccgcctgcactacccactaccaccaccgtcactaccttctcccaatccctaccaacagccgtgcccaccgcgacctcgtcgtctgctgctgacttcagcggcttcggatctaccctcgcaacttctgctcctgccactagttcacagccaaccttgactttttccaacacatctacaccaaccttcaatatccccttcgggagcagtgctaaatccccgctccccagctaccccggcgctaacccccagccagcttttggagctgcagagggtcagccccccggagccgctaaaccggccctcacaccttcattcgggtcttcctttactttcggtaattctgccgctcccgcaccagccaccgcccctacccccgcgccagcgagcacaatcaagatcgttcctgcacatgttcctacaccaatccaacctacctttgggggtgctacccatagcgcattcggcctgaaagctactgcctcggctttcggtgcgccggcgtcgtcacagcctgcatttggcggaagcacagcagtattttcttttggagcagcgactagctcagggtttggggcgaccacacaaaccgcaagttccgggtcaagctcctcggttttcggctccactacgccttcaccctttactttcggaggtagtgctgcccccgcgggaagcgggagttttgggatcaacgtggctacaccaggtagcagtgctactacaggcgcgttcagtttcggagccgggcagtctgggtcaaccgccacttccacccccttcaccggaggactcgggcagaacgctctgggcacgactgggcagagcaccccctttgcctttaacgtgggcagcaccactgagtccaagcctgtattcggtggcacggccacccccaccttcggacagaacactcccgcccccggtgtcggaacatctggatctagcctcagctttggcgcatcctctgcaccggcccaagggtttgtcggcgtcggcccctttgggtctgctgctcccagcttttccatcggcgctggttccaagacaccaggcgcaaggcagcgactgcaggccagacgccagcatactcgaaaaaagtag

SEQ ID NO: 270546 - DNA, 3750 bp, Artificial Sequence
  derived and/or modified sequence
atgagccctgctgctgctgctgctggggccggggagcggcggcggcccatcgcctctgtgagagatggccggggccggggctgcggcggccctgcccgggctgtgctgctgggcctgagcctggtgggcctgctgctgtacctggtgcctgctgctgctgccctggcctggctgactgtgggcgccacagctgcctggtggggcctgagccgggagccccggggcagccggcccctgagcagctttgtgaggaaggcccggcacagaagacccctgagcagctttgtgaggaaggcccggcacaggaggaccctgtttgccagccccctggccaagagcacagccaacggcaacctgctggagcccaggaccctgctggagggccctgaccctgctgagctgctgctgatgggcagctacctgggcaagccaggccccccccagcctgctgctgcccctgagggccaggacctgcgggaccggcccggccggcggcccccagcccggcctgcccccaggagccccccacccaggagccccccacccaggagccccccacccagcccccccacccaccgggcccaccacgtgtaccccagcctgcccacccccctgctgcggcccagccggcggcccagcccccgggactgtggcaccctgcccaaccgcttcgtcatcaccccaagaagacgctaccccatccaccaggcccagtacagctgcctgggcgtgctgcccaccgtgtgctggaatggctaccacaagaaggctgtgctgagccccaggaacagcaggatggtgtgcagccctgtgacagtgagaattgcccccccagaccggcgcttcagccgcagcgccatccctgagcagatcatcagcagcaccctgagcagccccagcagcaatgccccagacccctgtgccaaggagaccgtgctgagcgccctgaaggagaaggagaagaagaggacagtggaggaggaggaccagatcttcctggatggccaggagaacaagagaagaagacatgacagcagcggcagcggccacagcgcctttgagcccctggtggccaatggagtgcctgccagctttgtgcccaagccaggcagcctgaagaggggcctgaacagccagagcagtgatgaccacctgaacaagaggagccgcagcagctccatgagcagcctgaccggggcctatgccagcggcatccccagcagcagcagaaatgccatcaccagcagctacagcagcacccggggcatcagccagctgtggaagagaaatggccccagcagcagccccttcagcagccctgccagcagccgcagccagaccccagagaggcctgccaagaagatccgggaggaggagctgtgccaccacagcagcagcagcacccccctggccgctgaccgggagagccagggcgagaaggctgctgacaccacccccaggaagaagcagaacagcaacagccagagcaccccaggcagcagcggccagaggaagaggaaggtgcagctgctgcccagccggcggggggagcagctgaccctgcccccaccaccccagctgggctacagcatcacagctgaggacctggacctggagaagaaggccagcctgcagtggttcaaccaggccctggaggacaagagtgatgctgccagcaacagcgtgacagagaccccacccatcacccagcccagcttcaccttcaccctgcctgctgctgccccagccagcccccccaccagcctgctggcccccagcaccaaccccctgctggagagcctgaagaagatgcagaccccacccagcctgcccccctgcccagagagcgctggagctgccaccacagaggccctgagcccccccaagacccccagcctgctgccccccctgggcctgagccagagcggccccccaggcctgctgcccagccccagctttgacagcaagccacccaccaccctgctgggcctcatcccagcccccagcatggtgcctgccacagacaccaaggccccacccaccctgcaggccgagacagccaccaagccccaggccaccagcgcccccagccctgcccccaagcagagcttcctgtttggcacccagaacaccagccccagcagccctgctgccccagctgccagcagcgccccacccatgttcaagcccatcttcaccgccccacccaagtctgagaaggagggccccaccccacctggccccagcgtgacagccacagcccccagcagcagcagcctgcccaccaccaccagcaccacagcccccaccttccagcctgtgttcagctccatgggccccccagcctctgtgcccctgcctgcccccttcttcaagcagaccaccaccccagccacagcccccaccaccacagcccccctcttcaccggcctggccagcgccaccagcgctgtggcccccatcaccagcgccagccccagcacagacagcgccagcaagccagccttcggcttcggcatcaacagcgtgagcagcagctctgtgtccaccaccaccagcacagccacagctgccagccagcccttcctgtttggagccccccaggccagcgctgccagcttcaccccagccatgggcagcatcttccagtttgggaagcccccagccctgcccaccaccaccaccgtgaccaccttcagccagagcctgcacacagctgtgcccacagccaccagcagcagcgctgctgacttcagcggcttcggcagcaccctggccaccagcgccccagccaccagcagccagcccaccctgaccttcagcaacaccagcacccccaccttcaacatccccttcggcagcagcgccaagagccccctgcccagctacccaggggccaacccccagcctgccttcggggctgctgagggccagcccccaggggccgccaagccagccctggcccccagctttggcagcagcttcacctttggaaacagcgctgccccagctgctgcccccaccccagcccctccttccatgatcaaggtggtgcctgcctacgtgcccacccccatccaccccatctttggaggagccacccacagcgccttcggcctgaaggccacagccagcgcctttggagccccagccagcagccagcctgcctttggaggcagcacagctgtgttctttggagctgccaccagcagcggctttggagccaccacccagacagccagcagcggcagcagcagctctgtgtttggcagcaccacccccagccccttcacctttggaggcagcgctgccccagctggcagcggcagctttggcatcaacgtggccaccccaggcagcagcaccaccaccggggccttctcctttggagctggccagagcggcagcacagccaccagcaccccatttgctgggggcctgggccagaatgccctgggcaccaccggccagagcaccccatttgccttcaacgtgagcagcaccacagagagcaagcctgtgtttggaggaacagccacccccaccttcggcctgaacaccccagcccctggggtgggcaccagcggcagcagcctgagctttggagccagcagcgccccagcccagggctttgtgggcgtggccccctttggatctgctgccctgtccttcagcatcggggccggcagcaagacccctggggcccggcagaggctgcaggcccggcggcagcacaccaggaagaagtag

SEQ ID NO: 270547 - DNA, 3690 bp, Artificial Sequence
  derived and/or modified sequence
atgagccctgctgctgctgctgctggggccggggagcggcggcggcccatcgcctctgtgagagatggccggggccggggctgcggcggccctgctggggccgccctgctgggcctgagcctggtgggcctgctgctgtacctggtgcctgctgctgctgccctggcctggctggccgtgggcaccacagctgcctggtggggcctgagccgggagccccggggcagccggcccctgagcagctttgtgcagaaggcccggcacaggaggaccctgtttgccagccccccagccaagagcacagccaatggaaacctgctggagcccaggaccctgctggagggccctgaccctgctgagctgctgctgatgggcagctacctgggcaagccaggccccccccagcctgccccagcccctgagggccaggacctgaggaacagacctggaagaagacctccagcccggcctgcccccaggagcaccccacccagcccccccacccaccgggtgcaccacttctaccccagcctgcccacccccctgctgcggcccagcggccggcccagcccccgggaccggggcaccctgcctgacagatttgtgatcaccccccggcggcgctaccccatccaccagacccagtacagctgccctggggtgctgcccaccgtgtgctggaatggctaccacaagaaggctgtgctgagccccaggaacagcaggatggtgtgcagccctgtgacagtgcgcatcgcccccccagaccggcgcttcagccgcagcgccatccctgagcagatcatcagcagcaccctgagcagccccagcagcaatgccccagacccctgtgccaaggagaccgtgctgagcgccctgaaggagaagaagaagaagaggacagtggaggaggaggaccagatcttcctggatggccaggagaacaagagaagaagacatgacagcagcggcagcggccacagcgcctttgagcccctggtggccagcggcgtgcctgccagctttgtgcccaagccaggcagcctgaagaggggcctgaacagccagagcagtgatgaccacctgaacaagaggagccgcagcagctccatgagcagcctgactggagcctacaccagcggcatccccagcagcagcagaaatgccatcaccagcagctacagcagcacccggggcatcagccagctgtggaagagaaatggccccagcagcagccccttcagcagccctgccagcagccgcagccagaccccagagaggcctgccaagaagatccgggaggaggagctgtgccaccacagcagcagcagcacccccctggccgctgacaaggagagccagggcgagaaggctgctgacaccacccccaggaagaagcagaacagcaacagccagagcaccccaggcagcagcggccagaggaagaggaaggtgcagctgctgcccagcagaagaggagagcagctgaccctgcccccaccaccccagctgggctacagcatcacagctgaggacctggacctggagaagaaggccagcctgcagtggttcaaccaggccctggaggacaagagtgatgctgccagcaacagcgtgacagagaccccacccaccacccagcccagcttcaccttcaccctgcctgctgctgccacagccagcccccccaccagcctgctggcccccagcaccaaccccctgctggagagcctgaagaagatgcagaccccacccagcctgcccccctgcccagagagcgctggggccgccaccacagaggccctgagcccccccaagacccccagcctgctgccccccctgggcctgagccagagcggccccccaggcctgctgcccagccccagctttgacagcaagccacccaccaccctgctgggcctcatcccagcccccagcatggtgcctgccacagacaccaaggccccacccaccctgcaggccgagacagccaccaagccccaggccaccagcgcccccagccctgcccccaagcagagcttcctgtttggcacccagaacaccagccccagcagccctgctgccccagctgccagcagcgccagccccatgttcaagcccatcttcaccgccccacccaagtctgagaaggagggccccaccccacctggccccagcgtgacagccacagcccccagcagcagcagcctgcccaccaccaccagcaccacagcccccaccttccagcccgtcttcagctccatgggccccccagcctctgtgcccctgcctgcccccttcttcaagcagaccaccaccccagccacagcccccaccaccacagcccccctcttcaccggcctggccagcgccaccagcgctgtggcccccatcaccagcgccagccccagcacagattctgccagcaagccagcctttggatttggcatcaacagcgtgagcagcagctctgtgtccaccaccaccagcacagccacagctgccagccagcccttcctgtttggagccccccaggccagcgctgccagcttcaccccagccatgggcagcatcttccagtttgggaagcccccagccctgcccaccaccaccaccgtgaccaccttcagccagagcctgcccacagctgtgcccacagccaccagcagcagcgctgctgacttcagcggcttcggcagcaccctggccaccagcgccccagccaccagcagccagcccaccctgaccttcagcaacaccagcacccccaccttcaacatccccttcggcagcagcgccaagagccccctgcccagctacccaggggccaacccccagcctgcctttggagctgctgagggccagcccccaggagctgccaagccagccctgacccccagctttggcagcagcttcaccttcggcaacagcgctgccccagccccagccacagcccccaccccagccccagccagcaccatcaagatcgtgcctgcccacgtgcccacccccatccagcccacctttggaggagccacccacagcgccttcggcctgaaggccacagccagcgccttcggggccccagccagcagccagcctgccttcggcggcagcacagctgtgttctcctttggagctgccaccagcagcggctttggagccaccacccagacagccagcagcggcagcagcagctctgtgtttggcagcaccacccccagccccttcacctttggaggcagcgctgccccagctggcagcggcagctttggcatcaacgtggccaccccaggcagcagcgccaccaccggggccttctcctttggagctggccagagcggcagcacagccaccagcacccccttcaccggcggcctgggccagaatgccctgggcaccaccggccagagcaccccatttgccttcaacgtgggcagcaccacagagagcaagcctgtgtttggaggaacagccacccccaccttcggccagaacaccccagcccctggggtgggcaccagcggcagcagcctgagctttggagccagcagcgccccagcccagggctttgtgggcgtgggcccctttggatctgctgcccccagcttcagcatcggggccggcagcaagacccctggggcccggcagaggctgcaggcccggcggcagcacaccaggaagaagtag

SEQ ID NO: 270548 - DNA, 3750 bp, Artificial Sequence
  derived and/or modified sequence
atgagccccgccgccgccgccgccggcgccggcgagcggcggcggcctatagccagcgtacgggacggaagggggcgagggtgcggcggacctgcgcgggccgtgcttttgggcctctctctggttgggttgttgctgtatctggtgccagccgccgcggcgctcgcctggttaactgtgggcgctaccgctgcctggtggggtctgtctcgtgagcccagaggctctcgccctctgtctagcttcgtgaggaaggctcgacatcgacggccgctctcgagttttgtgcggaaggctcggcataggagaactctgtttgcttctcctctggccaaatcaaccgctaatggtaaccttctagagccccggacgctgttggagggaccagaccccgctgagttgctcttgatgggctcctacctggggaagccgggcccaccgcagcctgcggcagccccagagggccaggatctgcgggatcgccccggacggagacctccagccagacccgctccccgcagtccacccccccggagcccgccaccccgctcccccccaccatcacccccaacgcaccgtgcccaccacgtatatccgagcctgcctactcctcttcttcggccatcgagacgccctagtccccgtgattgcggaacactgcccaatcgctttgttatcaccccaaggagaaggtacccgatccaccaggctcaatacagctgtctaggggtgctgcccaccgtctgctggaacgggtaccacaagaaagccgtgctgtcacccaggaatagtcggatggtctgttcacccgttacagtccggatcgcgccacctgatagaagattcagtcgctccgccattcccgagcagatcattagctccacactgtcctccccatctagcaatgctccagatccatgcgcaaaagaaactgtcctgtccgccctcaaggagaaagagaagaagaggacggtggaggaggaggatcaaatctttctggatggacaggaaaataagcgcagaaggcatgacagctccggctcaggtcacagcgctttcgagcctttggtagccaacggtgtgcctgcaagttttgtccccaagcccggtagtttaaaacgtggtttaaactctcagagcagtgacgatcacttgaacaagagaagccgctcttcatctatgagcagcctcactggggcctacgcaagcggcattccatcttcttcccgaaatgcaattacgtcttcttactcaagtaccaggggcattagccaactctggaagagaaacggtccaagttcctccccattctcctcccccgctagctcccgctctcagacgccagaacgaccagccaaaaagataagagaagaagagctgtgccatcattcctcttcctcaacccccctcgcagctgaccgtgagtcacagggtgagaaagccgccgacactactccacgcaaaaagcaaaactcgaattcacaaagtacaccagggtcttccggacagcgcaaacgaaaagtgcaacttcttccctcccggaggggagagcaacttacactgcctcctcctccccagctcgggtactcaatcactgcagaggatttggacctggaaaagaaggctagtttgcaatggtttaatcaagctttagaggacaagtctgacgcagcctccaatagtgtaaccgagactccaccaattacccagccctcttttacattcacactgcctgcggccgcgccagcatctccccctacatccttgctggctcccagtaccaaccctttactcgagtcacttaaaaagatgcagaccccacccagcttgccaccatgtcccgagtccgccggcgctgcaactaccgaggcactctctccacctaagacaccttcgctgcttcctccactggggctaagtcagagcggaccacctgggctgctgccctccccttcattcgattccaagccacctaccaccctactcggcttaatccctgccccatctatggtgccagctacagacacgaaagcaccaccaacattgcaggctgaaacagccaccaagccccaggccacaagtgcaccatccccggcacctaaacagagctttctgttcgggactcagaacacctcccctagttcacctgctgcccccgccgcctcatctgctcctcctatgttcaaaccaatcttcacggctcccccgaagagcgagaaagagggaccgacgcctcccggccctagcgtcaccgcaacggcacccagctcatcatcgttaccaacaactacctctacgacagccccaacatttcagccagtgttctcctccatgggcccccctgcgtcagtgcccctgccggctccatttttcaagcagactaccacgccagccaccgcccccacaacgacagcgccattgttcactggactggcctccgcaacctcagcagtggcaccgatcacaagcgcttccccttcaaccgacagtgcatcgaagcccgcctttgggttcggtatcaattcggtgtcttctagctctgtgagcaccactacaagtactgctacagcagcttctcagccctttctttttggagcccctcaggcgtcagccgccagctttacaccagctatgggaagcatcttccaattcggaaagcctccggctctgcccaccactaccaccgtgacgacattcagccagagtttgcacacggcagtgcccactgctacctcctccagcgcagctgatttttctgggttcggatcgacactggcaacctctgctccagcaaccagttcccagccaactctgactttcagtaataccagcaccccaaccttcaatattccttttggttcaagcgcgaaatcacccttacccagttaccccggggccaacccccaacccgctttcggcgcagctgagggccagcccccaggggccgcgaagcctgccctcgcacccagttttggaagttcctttaccttcgggaacagcgccgcccctgccgcagctcctacccccgccccgccgtccatgattaaagtggtgcctgcgtatgtaccaactcccatccaccccatctttgggggcgccacccactccgcattcggactgaaagccaccgcctcagcattcggcgcaccagccagcagccagcctgcgtttggggggagtaccgccgtattcttcggcgccgccacctcatccggcttcggagctactactcagactgccagttcaggatctagtagttccgtctttggtagtaccactccgagtcccttcaccttcggcgggtctgccgccccggccggaagtggctccttcggcatcaacgtggcgacccctgggtcctctacaaccacaggcgcctttagctttggcgccgggcagagtggcagcacagccacgtcgactccatttgccggggggttggggcagaatgctctggggactactggacagagcaccccctttgcgtttaatgtttcttccacgacggagtccaagcccgtttttggcggtactgccacacccacgtttggcctcaacactcctgcgcccggggtggggacctctgggtcctccctgtctttcggggcatcctctgcccctgctcagggatttgttggagtggcaccatttggatcagccgctctgtcttttagtatcggggccggcagcaaaacacccggcgctaggcagagactgcaggctaggcgacagcatactagaaagaagtag

SEQ ID NO: 270549 - DNA, 3690 bp, Artificial Sequence
  derived and/or modified sequence
atgagccccgccgccgccgccgccggcgccggcgagcggcggcggcctatcgcttctgtgagagatggcaggggtaggggttgtgggggccccgctggtgctgccctgcttgggctgtcccttgtcggtttgctgctatacctcgtacccgccgctgccgccctagcttggcttgcggtgggtacgaccgcagcttggtggggcctatctcgtgagcctagaggcagtcgccctttatcctcgttcgtccaaaaagctaggcatcgcagaactctgttcgcatctccacctgccaaaagcactgccaatggcaatttgctggaaccacgaacacttctcgagggtcccgatccagcagagcttctcctcatgggttcctacctggggaaaccagggcctcctcagccagctccagcccccgagggtcaggaccttaggaacaggcctggacgcagaccgccagctcgcccagccccccggtccacaccccctagccccccgacccatcgcgtccaccatttttacccctctcttcccaccccgctgctgagacccagtggcaggccttcgccaagagatagaggtaccctcccggatagattcgtgatcacgcccagacgccgctatcccatccaccagacacagtactcttgcccgggagtgctcccaacagtctgttggaatggttaccataagaaagccgtgttatccccccgaaactcgcggatggtgtgcagcccagtgaccgtgcgaattgctccacccgatagaagattctcacggtccgctattcccgagcagattatcagcagtaccttgtcttctccatccagtaacgctcccgacccctgtgccaaggaaacggtgcttagtgccctaaaagagaaaaagaagaagcggacagtagaagaggaagaccaaatctttctggatggacaggaaaacaagcgacgaaggcatgatagcagtggaagcggccacagtgcctttgagccactggtggctagcggcgttcccgcaagtttcgtgcccaaaccagggtctctgaagagaggtctcaattctcagagtagcgatgaccatctgaacaaacgatccaggtcatcctcaatgtcatccttgacaggagcatacacatcagggatccctagtagcagtaggaacgctattacctctagctattcatccactcgaggaatttctcaactgtggaagcgcaatggtccaagctcctcacccttcagcagcccagcttcatcgcgaagtcaaacacctgagaggcccgccaagaaaattcgcgaggaagagctctgtcaccactcctcaagctccacaccactcgccgccgataaagaaagtcagggagagaaagccgctgatacaacaccccggaagaagcagaattccaactcccagtccacccctggctcatcgggtcaacgaaaaaggaaagtgcagctactgccttcaagaaggggggaacagcttacgctaccccctcccccccagcttggatactccattacagctgaggatttagacctggaaaaaaaggcaagcctccagtggtttaatcaggcattagaagacaagtctgatgccgctagcaattcggtgacagaaactccaccgaccacccaaccatcatttactttcacactgccggccgcagcaactgcgagccccccaacctcgctcctcgcgcccagtactaaccctctgttagagagcttgaagaaaatgcagacccccccctctttgccaccctgccccgagagtgctggtgccgcaactactgaggcactaagcccgccaaagaccccttccctcctgccacctctgggactgagtcaatcaggccctcccgggctccttccatccccgagttttgacagtaagcctccaaccacgcttttaggcctgatccctgctccaagcatggtgccagcgacagacacaaaagctccacccactctacaggcagagactgccacgaagccccaggcgactagtgctccgagccccgctcctaagcaaagttttctgttcggcacacagaacacttcgccttcctcccctgcagcccccgcagcctccagcgcatctcccatgtttaagcccattttcaccgcccctccaaagtcggagaaagagggccccaccccacctgggccctcagtgaccgcaacagccccaagctcatcctcactcccaaccacgacctccactaccgcgccaactttccagcctgtgttcagtagcatgggcccccccgcctcggtgcccttgcctgccccattcttcaagcaaactactacacccgcgactgcaccaaccacaacagccccactgtttacaggtctggcctccgccacctccgccgtggcccctattacgagcgcctcaccttcaacagactcggcctctaagcccgcattcggatttggaattaactctgtgtcgtcatccagcgtaagtacaactacctccacggcgactgccgcctctcagcctttcctatttggcgccccccaggcctccgccgccagcttcacaccagcaatgggcagcatctttcagttcggcaaaccaccagccttacctactactactaccgtcacaactttctctcaatctctcccaactgctgtgcctactgctacctcttcgtctgcagccgatttctctgggttcgggagcacgctggccacatctgcccctgctacctcgagccaacctacactgacattttcaaatactagtaccccgacttttaacattcccttcggttcctcggcaaaatcccctctcccatcatatcccggggccaatccacagcctgctttcggggccgcagaaggccaaccgcccggagccgcaaaacccgctctgacaccctcctttgggagttctttcacctttggaaattcagccgcacctgcccccgctaccgcccctacccctgcacccgcctcaacgatcaaaatcgtgccagctcacgtgcccacccccattcagccaacttttggcggggccacccacagtgccttcggacttaaggccaccgcttctgccttcggggcccctgctagttctcagcccgcctttggcggctccacagcagtcttcagcttcggagccgccactagctctggcttcggcgctacaacgcagacggcctcgagcggttcctcgtctagcgtctttggatcaaccaccccgtctccgtttaccttcggtggtagcgccgcgccagctgggtccgggtctttcggcattaacgtagccacacccggtagctccgctaccacaggggcctttagcttcggagccggacaaagtggtagcacagctactagtacaccgttcacagggggattggggcagaacgccctaggaactaccggacagagtacaccattcgctttcaacgtgggttccacgacagagagtaaaccggtatttggcgggaccgccacacccactttcggtcagaacacccccgcaccaggggtgggaaccagtgggtccagcctctcatttggggcaagctcggcccctgcccaaggatttgtgggcgtgggcccgtttggatccgctgcgccatcatttagcattggggccggatccaagactcccggcgcgagacagagactccaggcaaggagacagcatacacggaagaaatag

SEQ ID NO: 270550 - DNA, 5997 bp, Artificial Sequence
  derived and/or modified sequence
cgcttcctgcgcctcttcaggtcaccgcttgctctagttcccaggctttggcctctagtggatgagaatcaccgagtctgcggggctggacgctgaccgcccgggccagcacctaggcgggcgggagctgtgcggcccagggttcgcgcgggccgggtagaggctcgagccgggacccccgagcgtgaaccccggagccagcggcgctggggccagaggggccaggcgggaggtggtggcggaggcgaaggggcgacgggacctgggcctggcccgtgtgtgtcctcggcggcctggcgccggccgtcgctgtacggtgagccccagggaggcggatctgggccccgagaaggacacccgcctggatttgccccgtaggcccggcccgggcccctcgggagcagaacagccttggtgaggtggacgggaggggacttcgcgagcagacgcgcgcgccagcgacagcagcccgccccggcctctcgggagccgtggggcagaggctgcagagccccaggagggggccagtgtcattcaaagatgtggctgtggatttcacccaggaggagtggtggcaactggaccctgatgagaagataacatacggggatgtgatgttggagaactacagccatctagtttccctggcttatgaggtggcaacatcttgtacttcggagatctgaagccgagcaacttgcccaagtccttcttcttttcccattaacaagatatgatatcaccaagccaaacgtcatcattaagttggagcagggagaggagctgtggataacgggaggtgaatttccatgtcaacatagtccagggattgtgggactttaccaaatcggtttgtaataacacctagaagacgctatccgatccatcaggcccagtattcctgtctgggggtacttcccaccgtgtgctggaatggttatcacaagaaggctgtgctgtcccctcgcaactccaggatggtgtgtagcccagtgactgtgaggatcgcccctcctgacagaagattttcgcgttctgcgataccagagcagataatcagctcaacactgtcctcaccatcaagtaacgccccagacccatgtgcaaaggagacagtactgagtgccctcaaagagaaggagaagaaaaggacagtggaggaagaagaccaaatattccttgatggccaggaaaataaaagaaggcgccatgatagcagtggcagtggacattcagcatttgagcccctggtggccaatggagtccccgcttcttttgtgcctaagcctgggtctctgaagagaggcctcaattctcagagctcagatgaccacttgaataagagatcccgaagctcttccatgagctccttgacaggcgcttacgcaagtggcatccctagctccagccgcaatgccattaccagttcctacagctccactcgaggcatctcacagctctggaagagaaatggccccagttcatcacccttctctagcccagcctcctcccgctcccagacaccggagaggccagcaaagaaaataagagaagaggagctgtgtcatcattccagttcttcaactccattggcagcagacagggagtcccagggagaaaaggctgcagatacaaccccaaggaagaaacaaaactcgaattctcagtctacacctggcagctctgggcagcgtaagcggaaagttcagctgctgccttctcggcgaggggaacagctgaccttgcctccacctccccagcttggctattcgatcactgccgaggacctagacttagagaagaaggcttcattacagtggttcaaccaggccttggaggacaagagcgatgctgcctcgaactctgtcactgagaccccacctatcactcagccttcatttacctttaccctgcctgctgctgcacctgcctccccacccacctccctcctggccccaagcaccaacccactgttagagagcttgaagaagatgcagactcccccgagcctgccaccctgcccagaatctgctggagcagcaaccactgaggccctctcacctccaaagacacccagcctcctacccccgctgggtttatcacagtcagggccgccagggctgctccccagcccctcctttgactccaaacccccgaccactttgctggggctgatccctgctccatccatggtaccagccactgacaccaaggcacctccaacccttcaggcagagacggctaccaaaccccaagccacatctgccccgtcccccgcccccaagcaaagcttcctgtttggaacacagaacacctcaccttccagccctgccgcccctgctgcatcttcagcacctcccatgttcaagcccattttcacggctccacccaagagtgagaaggaaggccccacaccgcctggcccttcagtcacagccacagcgccctccagctcctccctccccacgaccaccagcaccacagccccgaccttccagcctgtctttagcagcatggggccacctgcatctgtgcccttgcctgctcccttcttcaagcagacaactactcccgccactgctcccaccacaactgccccgctcttcactggcctggccagcgccacctctgctgtggctcccatcacctctgccagtccatccacagactctgcttcgaagcctgcgtttggctttggcataaacagtgtgagcagcagcagtgtgagtaccacgaccagcaccgccactgccgcctcacagcctttcctcttcggggcgccccaggcctctgctgccagcttcaccccggccatgggctccatattccagtttggcaaacctcctgccttgcccacaaccaccacagtcaccaccttcagccagtccctgcacactgccgtgccaacggccaccagcagcagcgctgccgactttagtggttttggcagcaccctcgccacctccgccccggccaccagcagccagcccactctgacgttcagtaacacgagcacccccacgttcaacattccctttggctcaagcgccaagtccccgctcccatcatatccgggagccaacccccagcccgcatttggggccgctgaggggcagccaccgggggccgccaagccggcccttgcccccagctttggcagctctttcacttttggaaactctgcagccccggctgctgcacccacacctgcacctccgtccatgatcaaggtcgtgcctgcgtacgtgcctacgcccatccatcctatctttggcggtgccacgcactcggcgtttgggttgaaagccacggcttcggccttcggcgctcccgccagctcacagcccgcctttggcggctccactgctgtcttcttcggtgcagccaccagctccggctttggagccaccacccagaccgccagcagcgggagcagcagctcggtgtttggcagcacaacaccatcacccttcacgtttgggggttcggcagcccccgctggcagtgggagctttgggatcaatgtggccaccccaggctccagcaccaccaccggagctttcagctttggagcaggacagagtgggagcacagccacctccacccccttcgcagggggcttaggtcagaacgccctgggcaccaccggccagagcacaccgtttgccttcaacgtgagcagcacaactgagagcaaacctgtgtttggaggcaccgccacccccacctttggtctgaacacccctgcgcctggagtgggcacatcaggcagcagcctctcctttggggcatcctcagcacccgcccaaggctttgttggtgttgcacctttcggatcggcggccctttcattttccattggtgcgggatccaagaccccaggggctcgacagcgactgcaggcccgaaggcagcacacccgcaaaaagtagcctttgtcccctgtccctgttccccccaccccttccctaaatctggaccttggcacctgctaggaagagccttggacccttccagttgcgtaaagcaaacctaccccggatctctggcttcagccgccagggggcagtggcagccctggggccctttcccttctggaggaagcacaagcctcagggaaggggaagcaggatgcggagggccaaagcccgggacctctacttgaacagttctactggggaggctggagaactaaggaaacacctgtacatagtgtccgctgccctgactcccgcttagcacacccttaggcaggcgccccttccacctttccccgagaccgtcgtcgctggagggggcagggtccagcccgcctggatcggtggtgtgcacctgatgggatttgggaaatgggctatccgtaaagctttatcttgcttggcttagctgtgagaagtggttctcttcctctggtcccttctggggactctgtttccccatttcttgctgctgtgtccctcaccagttccttgcaggattccttcgtttttaaatgcccttgaatctagctttgccttggagaccccagtgggtgctgctcctgccgttttcttcctgccaagcctgaatcaatgtttcatctccaaccctctgccagtttggcccctcagagcttggtggctcaagactgttagcctggcagagccaggggtgaagggagaagctcttggagcaggcaggatgcccaccgctgcttcagctgcctcctcgcccagctaccctttggccccattgggccctcgtctgcctctccaggattgtatgtttcaagccttgtcctgtgttcctttgtctgacgctctgtgtattgctctttgaatcgagtttggaggaagagttgagttgtatgagtggcggcatgttggtagtgccggacttcctgtttcaagttttctggggcctcgctaattgaatgtggaaagtagcaccacttgacggctacaagtgccgactcctgaattttcccatggtgttctgacttcaagggctggcagccagggagaatgggcccaggggaagcaaagacctcttccctctgccgtttctgtcccacttaactgacctcactggaggctacatcacccaaagtagatgttagaaaacctaaattaatgaaccatatttttaaaatcctatttttcccaaacagggccctctgcagcccatcctttccttccgtccttctgaaaccacataccccaggcccaagcgccttgctgccacgcccaacctctttgggagaagtatgaatgcgtgtgtctaaattaaaagaaaaaaatatttaaacgttttttaacaaaaatttatttttgtatttaagctaaattgccttttaaattccttcaagcttggttcattgaggtggttaagtataaatgctattaactaggaattagctgtatagttaagttatgcctgtgcaaagaagaggctcaaatgctgtccccggcagctttcctgggggactagagctccttctggccatgttatatgaaatgtaattcttattttataaataatgtgatgtaaatgtaactggtgccccctccccgatgtgactgagggtgagtgagtggtggcggggctgctccttcccacccctcagaacagctctgatcctcgttaatacctggctgcgtgtgcagctgaggagggagtgaacctcaagcctaaatacctgttaggattggagggtctgggtgggcctgggcctagcaatcaagcttctacctgtaccttatgtaaggtagaccctcctagtgtcagtacctgagctagtttacctcagttccgcaggcaggacagccggtccgggaaccctgagtgagaatgagtgtggatgtgtacagtacacgcactggacggcagcgggaggctgggactttccattacaaatagagacttcattcctgttgagtctagttggaatttttagtatgaatgtgagatttttctcctgcttgtgacattaagaataaaaaactgtgatctatcgta

SEQ ID NO: 270551 - DNA, 5320 bp, Artificial Sequence
  derived and/or modified sequence
gagatctgaagccgagcaacttgcccaagtccttcttcttttcccattaacaagatatgatatcaccaagccaaacgtcatcattaagttggagcagggagaggagctgtggataacgggaggtgaatttccatgtcaacatagtccagggattgtgggactttaccaaatcggtttgtaataacacctagaagacgctatccgatccatcaggcccagtattcctgtctgggggtacttcccaccgtgtgctggaatggttatcacaagaaggctgtgctgtcccctcgcaactccaggatggtgtgtagcccagtgactgtgaggatcgcccctcctgacagaagattttcgcgttctgcgataccagagcagataatcagctcaacactgtcctcaccatcaagtaacgccccagacccatgtgcaaaggagacagtactgagtgccctcaaagagaaggagaagaaaaggacagtggaggaagaagaccaaatattccttgatggccaggaaaataaaagaaggcgccatgatagcagtggcagtggacattcagcatttgagcccctggtggccaatggagtccccgcttcttttgtgcctaagcctgggtctctgaagagaggcctcaattctcagagctcagatgaccacttgaataagagatcccgaagctcttccatgagctccttgacaggcgcttacgcaagtggcatccctagctccagccgcaatgccattaccagttcctacagctccactcgaggcatctcacagctctggaagagaaatggccccagttcatcacccttctctagcccagcctcctcccgctcccagacaccggagaggccagcaaagaaaataagagaagaggagctgtgtcatcattccagttcttcaactccattggcagcagacagggagtcccagggagaaaaggctgcagatacaaccccaaggaagaaacaaaactcgaattctcagtctacacctggcagctctgggcagcgtaagcggaaagttcagctgctgccttctcggcgaggggaacagctgaccttgcctccacctccccagcttggctattcgatcactgccgaggacctagacttagagaagaaggcttcattacagtggttcaaccaggccttggaggacaagagcgatgctgcctcgaactctgtcactgagaccccacctatcactcagccttcatttacctttaccctgcctgctgctgcacctgcctccccacccacctccctcctggccccaagcaccaacccactgttagagagcttgaagaagatgcagactcccccgagcctgccaccctgcccagaatctgctggagcagcaaccactgaggccctctcacctccaaagacacccagcctcctacccccgctgggtttatcacagtcagggccgccagggctgctccccagcccctcctttgactccaaacccccgaccactttgctggggctgatccctgctccatccatggtaccagccactgacaccaaggcacctccaacccttcaggcagagacggctaccaaaccccaagccacatctgccccgtcccccgcccccaagcaaagcttcctgtttggaacacagaacacctcaccttccagccctgccgcccctgctgcatcttcagcacctcccatgttcaagcccattttcacggctccacccaagagtgagaaggaaggccccacaccgcctggcccttcagtcacagccacagcgccctccagctcctccctccccacgaccaccagcaccacagccccgaccttccagcctgtctttagcagcatggggccacctgcatctgtgcccttgcctgctcccttcttcaagcagacaactactcccgccactgctcccaccacaactgccccgctcttcactggcctggccagcgccacctctgctgtggctcccatcacctctgccagtccatccacagactctgcttcgaagcctgcgtttggctttggcataaacagtgtgagcagcagcagtgtgagtaccacgaccagcaccgccactgccgcctcacagcctttcctcttcggggcgccccaggcctctgctgccagcttcaccccggccatgggctccatattccagtttggcaaacctcctgccttgcccacaaccaccacagtcaccaccttcagccagtccctgcacactgccgtgccaacggccaccagcagcagcgctgccgactttagtggttttggcagcaccctcgccacctccgccccggccaccagcagccagcccactctgacgttcagtaacacgagcacccccacgttcaacattccctttggctcaagcgccaagtccccgctcccatcatatccgggagccaacccccagcccgcatttggggccgctgaggggcagccaccgggggccgccaagccggcccttgcccccagctttggcagctctttcacttttggaaactctgcagccccggctgctgcacccacacctgcacctccgtccatgatcaaggtcgtgcctgcgtacgtgcctacgcccatccatcctatctttggcggtgccacgcactcggcgtttgggttgaaagccacggcttcggccttcggcgctcccgccagctcacagcccgcctttggcggctccactgctgtcttcttcggtgcagccaccagctccggctttggagccaccacccagaccgccagcagcgggagcagcagctcggtgtttggcagcacaacaccatcacccttcacgtttgggggttcggcagcccccgctggcagtgggagctttgggatcaatgtggccaccccaggctccagcaccaccaccggagctttcagctttggagcaggacagagtgggagcacagccacctccacccccttcgcagggggcttaggtcagaacgccctgggcaccaccggccagagcacaccgtttgccttcaacgtgagcagcacaactgagagcaaacctgtgtttggaggcaccgccacccccacctttggtctgaacacccctgcgcctggagtgggcacatcaggcagcagcctctcctttggggcatcctcagcacccgcccaaggctttgttggtgttgcacctttcggatcggcggccctttcattttccattggtgcgggatccaagaccccaggggctcgacagcgactgcaggcccgaaggcagcacacccgcaaaaagtagcctttgtcccctgtccctgttccccccaccccttccctaaatctggaccttggcacctgctaggaagagccttggacccttccagttgcgtaaagcaaacctaccccggatctctggcttcagccgccagggggcagtggcagccctggggccctttcccttctggaggaagcacaagcctcagggaaggggaagcaggatgcggagggccaaagcccgggacctctacttgaacagttctactggggaggctggagaactaaggaaacacctgtacatagtgtccgctgccctgactcccgcttagcacacccttaggcaggcgccccttccacctttccccgagaccgtcgtcgctggagggggcagggtccagcccgcctggatcggtggtgtgcacctgatgggatttgggaaatgggctatccgtaaagctttatcttgcttggcttagctgtgagaagtggttctcttcctctggtcccttctggggactctgtttccccatttcttgctgctgtgtccctcaccagttccttgcaggattccttcgtttttaaatgcccttgaatctagctttgccttggagaccccagtgggtgctgctcctgccgttttcttcctgccaagcctgaatcaatgtttcatctccaaccctctgccagtttggcccctcagagcttggtggctcaagactgttagcctggcagagccaggggtgaagggagaagctcttggagcaggcaggatgcccaccgctgcttcagctgcctcctcgcccagctaccctttggccccattgggccctcgtctgcctctccaggattgtatgtttcaagccttgtcctgtgttcctttgtctgacgctctgtgtattgctctttgaatcgagtttggaggaagagttgagttgtatgagtggcggcatgttggtagtgccggacttcctgtttcaagttttctggggcctcgctaattgaatgtggaaagtagcaccacttgacggctacaagtgccgactcctgaattttcccatggtgttctgacttcaagggctggcagccagggagaatgggcccaggggaagcaaagacctcttccctctgccgtttctgtcccacttaactgacctcactggaggctacatcacccaaagtagatgttagaaaacctaaattaatgaaccatatttttaaaatcctatttttcccaaacagggccctctgcagcccatcctttccttccgtccttctgaaaccacataccccaggcccaagcgccttgctgccacgcccaacctctttgggagaagtatgaatgcgtgtgtctaaattaaaagaaaaaaatatttaaacgttttttaacaaaaatttatttttgtatttaagctaaattgccttttaaattccttcaagcttggttcattgaggtggttaagtataaatgctattaactaggaattagctgtatagttaagttatgcctgtgcaaagaagaggctcaaatgctgtccccggcagctttcctgggggactagagctccttctggccatgttatatgaaatgtaattcttattttataaataatgtgatgtaaatgtaactggtgccccctccccgatgtgactgagggtgagtgagtggtggcggggctgctccttcccacccctcagaacagctctgatcctcgttaatacctggctgcgtgtgcagctgaggagggagtgaacctcaagcctaaatacctgttaggattggagggtctgggtgggcctgggcctagcaatcaagcttctacctgtaccttatgtaaggtagaccctcctagtgtcagtacctgagctagtttacctcagttccgcaggcaggacagccggtccgggaaccctgagtgagaatgagtgtggatgtgtacagtacacgcactggacggcagcgggaggctgggactttccattacaaatagagacttcattcctgttgagtctagttggaatttttagtatgaatgtgagatttttctcctgcttgtgacattaagaataaaaaactgtgatctatcgta

SEQ ID NO: 270552 - DNA, 7011 bp, Artificial Sequence
  derived and/or modified sequence
cgcttcctgcgcctcttcaggtcaccgcttgctctagttcccaggctttggcctctagtggatgagaatcaccgagtctgcggggctggacgctgaccgcccgggccagcacctaggcgggcgggagctgtgcggcccagggttcgcgcgggccgggtagaggctcgagccgggacccccgagcgtgaaccccggagccagcggcgctggggccagaggggccaggcgggaggtggtggcggaggcgaaggggcgacgggacctgggcctggcccgtgtgtgtcctcggcggcctggcgccggccgtcgctgtacggtgagccccagggaggcggatctgggccccgagaaggacacccgcctggatttgccccgtaggcccggcccgggcccctcgggagcagaacagccttggtgaggtggacgggaggggacttcgcgagcagacgcgcgcgccagcgacagcagcccgccccggcctctcgggagccgtggggcagaggctgcagagccccaggagggggccagtgtcattcaaagatgtggctgtggatttcacccaggaggagtggtggcaactggaccctgatgagaagataacatacggggatgtgatgttggagaactacagccatctagtttccctggcttatgaggtggcaacatcttgtacttcggagatctgaagccgagcaacttgcccaagtccttcttcttttcccattaacaagatatgatatcaccaagccaaacgtcatcattaagttggagcagggagaggagctgtggataacgggaggtgaatttccatgtcaacatagtccagcccttcacatcctcagccgaagatctcacttcctcccagaggcctttgctgactgacccctcagggattgtgggactttaccaaatcggtttgtaataacacctagaagacgctatccgatccatcaggcccagtattcctgtctgggggtacttcccaccgtgtgctggaatggttatcacaagaaggctgtgctgtcccctcgcaactccaggatggtgtgtagcccagtgactgtgaggatcgcccctcctgacagaagattttcgcgttctgcgataccagagcagataatcagctcaacactgtcctcaccatcaagtaacgccccagacccatgtgcaaaggagacagtactgagtgccctcaaagagaaggagaagaaaaggacagtggaggaagaagaccaaatattccttgatggccaggaaaataaaagaaggcgccatgatagcagtggcagtggacattcagcatttgagcccctggtggccaatggagtccccgcttcttttgtgcctaagcctgggtctctgaagagaggcctcaattctcagagctcagatgaccacttgaataagagatcccgaagctcttccatgagctccttgacaggcgcttacgcaagtggcatccctagctccagccgcaatgccattaccagttcctacagctccactcgaggcatctcacagctctggaagagaaatggccccagttcatcacccttctctagcccagcctcctcccgctcccagacaccggagaggccagcaaagaaaataagagaagaggagctgtgtcatcattccagttcttcaactccattggcagcagacagggagtcccagggagaaaaggctgcagatacaaccccaaggaagaaacaaaactcgaattctcagtctacacctggcagctctgggcagcgtaagcggaaagttcagctgctgccttctcggcgaggggaacagctgaccttgcctccacctccccagcttggctattcgatcactgccgaggacctagacttagagaagaaggcttcattacagtggttcaaccaggccttggaggacaagagcgatgctgcctcgaactctgtcactgagaccccacctatcactcagccttcatttacctttaccctgcctgctgctgcacctgcctccccacccacctccctcctggccccaagcaccaacccactgttagagagcttgaagaagatgcagactcccccgagcctgccaccctgcccagaatctgctggagcagcaaccactgaggccctctcacctccaaagacacccagcctcctacccccgctgggtttatcacagtcagggccgccagggctgctccccagcccctcctttgactccaaacccccgaccactttgctggggctgatccctgctccatccatggtaccagccactgacaccaaggcacctccaacccttcaggcagagacggctaccaaaccccaagccacatctgccccgtcccccgcccccaagcaaagcttcctgtttggaacacagaacacctcaccttccagccctgccgcccctgctgcatcttcagcacctcccatgttcaagcccattttcacggctccacccaagagtgagaaggaaggccccacaccgcctggcccttcagtcacagccacagcgccctccagctcctccctccccacgaccaccagcaccacagccccgaccttccagcctgtctttagcagcatggggccacctgcatctgtgcccttgcctgctcccttcttcaagcagacaactactcccgccactgctcccaccacaactgccccgctcttcactggcctggccagcgccacctctgctgtggctcccatcacctctgccagtccatccacagactctgcttcgaagcctgcgtttggctttggcataaacagtgtgagcagcagcagtgtgagtaccacgaccagcaccgccactgccgcctcacagcctttcctcttcggggcgccccaggcctctgctgccagcttcaccccggccatgggctccatattccagtttggcaaacctcctgccttgcccacaaccaccacagtcaccaccttcagccagtccctgcacactgccgtgccaacggccaccagcagcagcgctgccgactttagtggttttggcagcaccctcgccacctccgccccggccaccagcagccagcccactctgacgttcagtaacacgagcacccccacgttcaacattccctttggctcaagcgccaagtccccgctcccatcatatccgggagccaacccccagcccgcatttggggccgctgaggggcagccaccgggggccgccaagccggcccttgcccccagctttggcagctctttcacttttggaaactctgcagccccggctgctgcacccacacctgcacctccgtccatgatcaaggtcgtgcctgcgtacgtgcctacgcccatccatcctatctttggcggtgccacgcactcggcgtttgggttgaaagccacggcttcggccttcggcgctcccgccagctcacagcccgcctttggcggctccactgctgtcttcttcggtgcagccaccagctccggctttggagccaccacccagaccgccagcagcgggagcagcagctcggtgtttggcagcacaacaccatcacccttcacgtttgggggttcggcagcccccgctggcagtgggagctttgggatcaatgtggccaccccaggctccagcaccaccaccggagctttcagctttggagcaggacagagtgggagcacagccacctccacccccttcgcagggggcttaggtcagaacgccctgggcaccaccggccagagcacaccgtttgccttcaacgtgagcagcacaactgagagcaaacctgtgtttggaggcaccgccacccccacctttggtctgaacacccctgcgcctggagtgggcacatcaggcagcagcctctcctttggggcatcctcagcacccgcccaaggctttgttggtgttgcacctttcggcaacacttttgctcaccagcaagaacacagcccgaggaagggacccaataacctttcaaaacgcaaactgctgcctgcggtgagggcccagggtcttccacggagaggacaggcatcttcctttcccaccaggaaggagtgagcccggagcctctgctatgtgcaaggcggtgtgcaagcaccggctgcagctttttgctctcttctttctctttggggctgggctgggtgtgcgttctggtgctgatgctttggcctgtgaggctgagctagagaaatgtagatgttagatgtgccagtaccatcctgcgcctcccaagcatgcccccactcactcacgtcggcatctcgacccgttcaattacagcaacgaagaagccaccgctaagcgtggtcttgggggaagcccggaggcagtgctcggcacccgggaacgtgctcaggcctcggtggggccgggcaggcagggcgggagctagcctgcaagagaaacagccccaatgctgggtaagagagcagttcaccccatccccccctccacgaccctggcgcacgccctgtacctgaaggcgcccgggttctgctgcagcgcatcttgtaccatgtcttcattctcctcctggcagagggagcacatggagtagacgagccgctgcagggaagggaaagtgagcgcgtggcacagggctcgctgctggaaccctgccagggcatgcagacgcaccgggctaggtgtccctgccccgggctcctccagctgtctgctcggcatacctaaggaaaagcgtgtctcggttacacagcttcacaggctgcctcagtcctgaaatcctcgctcctgaaatcctcgcttcacagaggagaacttttgctccagggtcccaagcccattaaagtgtcagaactaagaccaaaacagatgactccaggtctaagctgctgtggacctctgagtccctcagccacgccttctcaccatctcacccgagccactgcaggaaggatccagcaggacatagtggacctcacgatagcgcggatctaagggggagaccgccaggaagtcctcctcagccagctcacagcaggagacgccagcccaggccagcagcgtggccatggatgccagccgcctggcatccaggtcaaaggcaaagatcttcctagggcagagggcagagcaggggtgagctgagcatgcatggagcagctaagggcctgtcacagctgacacagacaaccagaacatgcaggttaagccaggacacacaatattgaaacagcctatatttaaagggcccagggtcagaggtaactggcctggggtctctgccccaagggctaagggatccacatctcacacctgcagtggggaaagcttagcttggggcaaataccgtgaactactttggtgcagcaggaaagagttaagcgaaagtcatcctttcagccttcattacccactgaaaggcacaaaatcaaaccccatgtcctcctcctcctcctgtggcactcacccttggttcttcagaagagcagccaagtgactggtctttattgcctggggtggcacaggcatccatgacatgggagcctggcgggggtccagcagcatggctgggagacagctggcctggcaggcagaacacaggggccgggtaaacagagaccccaggctaggcccttcccgtgcctacacattcttcccttttctattcctcttgcctaccctgtcctgcagaatgaggtgtccggcccggtacagtgggtgttcatgcagatctgtctgggcgggaaacaccagcagctccggcatcaaggggtccaggagaaaatgcttccccttgagggctcgtaagtcatcgaggctgccagggaagaaccattcattcatcatttcctgaatttctccctgccaggccctatttcaacggtccattcatgcaacaaatgttaccacagctatggagaaatcaacagggtgataagggaatccgggatccgcagttgagggaatgggttgtcaagccagacttatgggtcaggagccccctctactgtttaccagcagtgggagcctgggcaagtgattcaatctcaagccccactggcatctctgtaaaatagtaggtgtgaggattcaatgagccaatatatccaagatacttacgtgccacaatttaataaatgttagctattcctgttgaagcataaccttggagaaaggttactttacaggggggtgaggagtggggaagtgagagctgagctcattcttgatggatgaggagttagtcatgtgaggcgcttaggttaaaactacattcactataactcagtaaagcagtcccgcccactctccgacccatgcagaaataggcctagggagtcacatgtctcagttcagaaatctatcgaagtggcagagctggaattcaaacacaagcagccgttctctgctattccaccctggtgtccaagcaacatggtagggcagaaggaagaggatcttacaaagagtaagggaaagggagaggggcagaggctgcttctcagagccaccaaaggacaaaataagacaggtgtgagcccagtggaggaggcacggggcagagaccagccactgttgctggcacgctggtgcacgtagcactgtggcagatggacctggagaggaagcaggagggacagcacaatggagccaagaaaggacttagcatggccgggcgcggtggttcatgcctgtaatcccagcattttgggaggccaaggtgggcagatcacctgaggtcaggagtttgagaccagcctggccaacatggagaaatcccgtctctactaaaaatacaaaattagccaggcatggtgctgcatgcctgcaatcctgtagggaaaagaaagagagatcagactgttactgtgtctgtgtagaaagggaagacataagaaattccattttgacctgtaccttgaacaattggttggctgagatgctgttaatttgtgactttgccccaaatttgagctcacaaaaacatgtgttgtatggaatcaaggtttaaaggatctagggctgtgcaggacatgccttgttaataaaacgtttacaagc

SEQ ID NO: 270553 - DNA, 3750 bp, Artificial Sequence
  derived and/or modified sequence
atgtctccggcggctgcggcggctggagcaggcgagcggcggcggcccatagcgagtgtcagggacggccggggccggggctgcggcgggccggccagggcggtgctcctgggcctgtcgctggttggcctcttactgtacctcgtgccggctgcggctgcactggcctggctgaccgtgggggctaccgcggcctggtggggactgagccgcgagccccgaggttcgcgccccttgtcctccttcgttcggaaggcgcgtcatcggcgccccttgtcctccttcgttcggaaggcgcgtcatcggcgaacactgttcgcttcgcctctggccaagtcgacagccaacggaaacctcctagagccgcggaccctgctcgaaggacctgaccctgcggaactgctactcatgggcagttacctgggcaagcccgggccgccgcagcccgccgccgctccggagggccaggacctgcgggataggcctggccgccgcccacctgcccgcccggcgccgcgctccccaccgccgcgctccccaccgccgcgctcccccccgccctccccgccgacccatcgcgctcaccacgtttacccctctctgcccactcctcttctccgaccctccaggaggccttccccacgggattgtgggactttaccaaatcggtttgtaataacacctagaagacgctatccgatccatcaggcccagtattcctgtctgggggtacttcccaccgtgtgctggaatggttatcacaagaaggctgtgctgtcccctcgcaactccaggatggtgtgtagcccagtgactgtgaggatcgcccctcctgacagaagattttcgcgttctgcgataccagagcagataatcagctcaacactgtcctcaccatcaagtaacgccccagacccatgtgcaaaggagacagtactgagtgccctcaaagagaaggagaagaaaaggacagtggaggaagaagaccaaatattccttgatggccaggaaaataaaagaaggcgccatgatagcagtggcagtggacattcagcatttgagcccctggtggccaatggagtccccgcttcttttgtgcctaagcctgggtctctgaagagaggcctcaattctcagagctcagatgaccacttgaataagagatcccgaagctcttccatgagctccttgacaggcgcttacgcaagtggcatccctagctccagccgcaatgccattaccagttcctacagctccactcgaggcatctcacagctctggaagagaaatggccccagttcatcacccttctctagcccagcctcctcccgctcccagacaccggagaggccagcaaagaaaataagagaagaggagctgtgtcatcattccagttcttcaactccattggcagcagacagggagtcccagggagaaaaggctgcagatacaaccccaaggaagaaacaaaactcgaattctcagtctacacctggcagctctgggcagcgtaagcggaaagttcagctgctgccttctcggcgaggggaacagctgaccttgcctccacctccccagcttggctattcgatcactgccgaggacctagacttagagaagaaggcttcattacagtggttcaaccaggccttggaggacaagagcgatgctgcctcgaactctgtcactgagaccccacctatcactcagccttcatttacctttaccctgcctgctgctgcacctgcctccccacccacctccctcctggccccaagcaccaacccactgttagagagcttgaagaagatgcagactcccccgagcctgccaccctgcccagaatctgctggagcagcaaccactgaggccctctcacctccaaagacacccagcctcctacccccgctgggtttatcacagtcagggccgccagggctgctccccagcccctcctttgactccaaacccccgaccactttgctggggctgatccctgctccatccatggtaccagccactgacaccaaggcacctccaacccttcaggcagagacggctaccaaaccccaagccacatctgccccgtcccccgcccccaagcaaagcttcctgtttggaacacagaacacctcaccttccagccctgccgcccctgctgcatcttcagcacctcccatgttcaagcccattttcacggctccacccaagagtgagaaggaaggccccacaccgcctggcccttcagtcacagccacagcgccctccagctcctccctccccacgaccaccagcaccacagccccgaccttccagcctgtctttagcagcatggggccacctgcatctgtgcccttgcctgctcccttcttcaagcagacaactactcccgccactgctcccaccacaactgccccgctcttcactggcctggccagcgccacctctgctgtggctcccatcacctctgccagtccatccacagactctgcttcgaagcctgcgtttggctttggcataaacagtgtgagcagcagcagtgtgagtaccacgaccagcaccgccactgccgcctcacagcctttcctcttcggggcgccccaggcctctgctgccagcttcaccccggccatgggctccatattccagtttggcaaacctcctgccttgcccacaaccaccacagtcaccaccttcagccagtccctgcacactgccgtgccaacggccaccagcagcagcgctgccgactttagtggttttggcagcaccctcgccacctccgccccggccaccagcagccagcccactctgacgttcagtaacacgagcacccccacgttcaacattccctttggctcaagcgccaagtccccgctcccatcatatccgggagccaacccccagcccgcatttggggccgctgaggggcagccaccgggggccgccaagccggcccttgcccccagctttggcagctctttcacttttggaaactctgcagccccggctgctgcacccacacctgcacctccgtccatgatcaaggtcgtgcctgcgtacgtgcctacgcccatccatcctatctttggcggtgccacgcactcggcgtttgggttgaaagccacggcttcggccttcggcgctcccgccagctcacagcccgcctttggcggctccactgctgtcttcttcggtgcagccaccagctccggctttggagccaccacccagaccgccagcagcgggagcagcagctcggtgtttggcagcacaacaccatcacccttcacgtttgggggttcggcagcccccgctggcagtgggagctttgggatcaatgtggccaccccaggctccagcaccaccaccggagctttcagctttggagcaggacagagtgggagcacagccacctccacccccttcgcagggggcttaggtcagaacgccctgggcaccaccggccagagcacaccgtttgccttcaacgtgagcagcacaactgagagcaaacctgtgtttggaggcaccgccacccccacctttggtctgaacacccctgcgcctggagtgggcacatcaggcagcagcctctcctttggggcatcctcagcacccgcccaaggctttgttggtgttgcacctttcggatcggcggccctttcattttccattggtgcgggatccaagaccccaggggctcgacagcgactgcaggcccgaaggcagcacacccgcaaaaagtag

SEQ ID NO: 270554 - DNA, 3977 bp, Artificial Sequence
  derived and/or modified sequence
cgcttcctgcgcctcttcaggtcaccgcttgctctagttcccaggctttggcctctagtggatgagaatcaccgagtctgcggggctggacgctgaccgcccgggccagcacctaggcgggcgggagctgtgcggcccagggttcgcgcgggccgggtagaggctcgagccgggacccccgagcgtgaaccccggagccagcggcgctggggccagaggggccaggcgggaggtggtggcggaggcgaaggggcgacgggacctgggcctggcccgtgtgtgtcctcggcggcctggcgccggccgtcgctgtacggtgagccccagggaggcggatctgggccccgagaaggacacccgcctggatttgccccgtaggcccggcccgggcccctcgggagcagaacagccttggtgaggtggacgggaggggacttcgcgagcagacgcgcgcgccagcgacagcagcccgccccggcctctcgggagccgtggggcagaggctgcagagccccaggagggggccagtgtcattcaaagatgtggctgtggatttcacccaggaggagtggtggcaactggaccctgatgagaagataacatacggggatgtgatgttggagaactacagccatctagtttccctggcttatgaggtggcaacatcttgtacttcggagatctgaagccgagcaacttgcccaagtccttcttcttttcccattaacaagatatgatatcaccaagccaaacgtcatcattaagttggagcagggagaggagctgtggataacgggaggtgaatttccatgtcaacatagtccagggattgtgggactttaccaaatcggtttgtaataacacctagaagacgctatccgatccatcaggcccagtattcctgtctgggggtacttcccaccgtgtgctggaatggttatcacaagaaggctgtgctgtcccctcgcaactccaggatggtgtgtagcccagtgactgtgaggatcgcccctcctgacagaagattttcgcgttctgcgataccagagcagataatcagctcaacactgtcctcaccatcaagtaacgccccagacccatgtgcaaaggagacagtactgagtgccctcaaagagaaggagaagaaaaggacagtggaggaagaagaccaaatattccttgatggccaggaaaataaaagaaggcgccatgatagcagtggcagtggacattcagcatttgagcccctggtggccaatggagtccccgcttcttttgtgcctaagcctgggtctctgaagagaggcctcaattctcagagctcagatgaccacttgaataagagatcccgaagctcttccatgagctccttgacaggcgcttacgcaagtggcatccctagctccagccgcaatgccattaccagttcctacagctccactcgaggcatctcacagctctggaagagaaatggccccagttcatcacccttctctagcccagcctcctcccgctcccagacaccggagaggccagcaaagaaaataagagaagaggagctgtgtcatcattccagttcttcaactccattggcagcagacagggagtcccagggagaaaaggctgcagatacaaccccaaggaagaaacaaaactcgaattctcagtctacacctggcagctctgggcagcgtaagcggaaagttcagctgctgccttctcggcgaggggaacagctgaccttgcctccacctccccagcttggctattcgatcactgccgaggacctagacttagagaagaaggcttcattacagtggttcaaccaggccttggaggacaagagcgatgctgcctcgaactctgtcactgagaccccacctatcactcagccttcatttacctttaccctgcctgctgctgcacctgcctccccacccacctccctcctggccccaagcaccaacccactgttagagagcttgaagaagatgcagactcccccgagcctgccaccctgcccagaatctgctggagcagcaaccactgaggccctctcacctccaaagacacccagcctcctacccccgctgggtttatcacagtcagggccgccagggctgctccccagcccctcctttgactccaaacccccgaccactttgctggggctgatccctgctccatccatggtaccagccactgacaccaaggcacctccaacccttcaggcagagacggctaccaaaccccaagccacatctgccccgtcccccgcccccaagcaaagcttcctgtttggaacacagaacacctcaccttccagccctgccgcccctgctgcatcttcagcacctcccatgttcaagcccattttcacggctccacccaagagtgagaaggaaggccccacaccgcctggcccttcagtcacagccacagcgccctccagctcctccctccccacgaccaccagcaccacagccccgaccttccagcctgtctttagcagcatggggccacctgcatctgtgcccttgcctgctcccttcttcaagcagacaactactcccgccactgctcccaccacaactgccccgctcttcactggcctggccagcgccacctctgctgtggctcccatcacctctgccagtccatccacagactctgcttcgaagcctgcgtttggctttggcataaacagtgtgagcagcagcagtgtgagtaccacgaccagcaccgccactgccgcctcacagcctttcctcttcggggcgccccaggcctctgctgccagcttcaccccggccatgggctccatattccagtttggcaaacctcctgccttgcccacaaccaccacagtcaccaccttcagccagtccctgcacactgccgtgccaacggccaccagcagcagcgctgccgactttagtggttttggcagcaccctcgccacctccgccccggccaccagcagccagcccactctgacgttcagtaacacgagcacccccacgttcaacattccctttggctcaagcgccaagtccccgctcccatcatatccgggagccaacccccagcccgcatttggggccgctgaggggcagccaccgggggccgccaagccggcccttgcccccagctttggcagctctttcacttttggaaactctgcagccccggctgctgcacccacacctgcacctccgtccatgatcaaggtcgtgcctgcgtacgtgcctacgcccatccatcctatctttggcggtgccacgcactcggcgtttgggttgaaagccacggcttcggccttcggcgctcccgccagctcacagcccgcctttggcggctccactgctgtcttcttcggtgcagccaccagctccggctttggagccaccacccagaccgccagcagcgggagcagcagctcggtgtttggcagcacaacaccatcacccttcacgtttgggggttcggcagcccccgctggcagtgggagctttgggatcaatgtggccaccccaggctccagcaccaccaccggagctttcagctttggagcaggacagagtgggagcacagccacctccacccccttcgcagggggcttaggtcagaacgccctgggcaccaccggccagagcacaccgtttgccttcaacgtgagcagcacaactgagagcaaacctgtgtttggaggcaccgccacccccacctttggtctgaacacccctgcgcctggagtgggcacatcaggcagcagcctctcctttggggcatcctcagcacccgcccaaggctttgttggtgttgcacctttcggcaacacttttgctcaccagcaagaacacagcccgaggaagggacccaataacctttcaaaacgcaaactgctgcctgcggtgagggcccagggtcttccacggagaggacaggcatcttcctttcccaccaggaaggagtga

SEQ ID NO: 270555 - DNA, 5700 bp, Artificial Sequence
  derived and/or modified sequence
atgtctccggcggctgcggcggctggagcaggcgagcggcggcggccgatagcgagtgtcagggacggccggggccggggctgcggcgggccggccggggcggcgcttctcggcctgtcgctggtcggcctcctactgtacctcgtgcctgctgcggctgcgctggcctggctggccgtggggactaccgcggcctggtggggactgagccgcgagccccgaggttcgcgccccttgtcctccttcgttcagaaggcgcgacatcggcgaacactgttcgcttcgcctccggccaagtcgacagccaacggaaacctcctagagccgcggaccctgctcgaaggacctgaccctgccgaactgctcctcatgggcagttacctgggcaagcccgggccgccgcagcccgcccccgctccggagggccaggacctgcggaataggcctggccgccgcccacccgcccgcccggcgccgcgctccacaccgccctccccgccgacccatcgcgttcaccacttttacccctctctccccactcctcttctccgaccctccgggaggccttccccacgggatcgtgggactttaccagatcggtttgtaataacacctcgaagacgctatccgatccatcagacccagtattcctgtccgggggtacttcccacagtgtgctggaatggttatcacaagaaggctgtgctgtcccctcgcaactccaggatggtgtgtagcccagtgactgtgaggatcgcccctcctgacagaagattttcacgttctgcgataccagagcagataatcagctcaacactgtcgtcaccatcaagtaatgccccagacccatgtgcaaaggagactgtactgagtgccctcaaagagaagaagaagaaaaggacagtggaggaagaagaccaaatattccttgatggccaggaaaataaaagaaggcgccatgatagcagtggcagtggacattcagcatttgagcccctggtggccagtggagtccccgcttcttttgtgcctaagcctgggtctctgaagagaggcctcaattctcagagctcagatgaccacttgaataagagatcccgaagctcttccatgagctccttgacaggcgcttacacaagtggcatccctagctccagccgcaatgccattaccagttcctacagctccactcgaggcatctcacagctctggaagagaaatggccccagttcatcacccttctctagcccagcctcatcccgctcccagacaccggagaggccagcaaagaaaataagagaagaagagctgtgtcatcattccagttcttcaactccattggcagcagacaaggagtcccagggagaaaaggctgcagatacaaccccaaggaagaaacaaaactcgaattctcagtctacacctggcagctctgggcagcgtaagcggaaagttcagctgctgccttctcggcgaggggaacagctgaccttgcctccacctccccagcttggctattcgatcactgccgaggacctagacttagagaagaaggcttcattacagtggttcaaccaggccttggaggacaagagtgatgctgcctcgaactctgtcactgagaccccacctaccactcagccttcatttacctttaccctgcctgctgctgcaactgcctccccacccacctccctcctggccccaagcaccaacccactgttagagagcttgaagaagatgcagactcccccgagcctgccaccctgcccagaatctgctggagcagcaaccactgaggccctctcacctccaaagacacccagcctcctacccccgctgggtttatcacagtcagggccgccagggctgctccccagcccctcctttgactccaaacccccgaccactttgctggggctgatccctgctccatccatggtaccagccactgacaccaaggcacctccaacccttcaagcagagacggctaccaaaccccaagccacatctgccccgtcccccgcccccaagcaaagcttcctgtttggaacacagaacacctcaccttccagccctgccgcccctgctgcatcttcagcatctcccatgttcaagcccattttcacggctccacccaagagtgagaaggaaggccccacaccgcctggcccttcagtcacagccacagcgccctccagctcctccctccccacgaccaccagcaccacagccccgaccttccagcctgtctttagcagcatggggccacctgcatctgtgcccttgcctgctcccttcttcaagcagacaactactcccgccactgctcccaccacaactgccccgctcttcactggcctggccagcgccacctctgctgtggctcccatcacctctgccagtccatccacagactctgcttcgaagcctgcgtttggctttggcataaacagtgtgagcagcagcagtgtgagtaccacgaccagcaccgccactgccgcctcacagcctttcctcttcggggcgccccaggcctctgctgccagcttcaccccggccatgggctccatattccagtttggcaaacctcctgccttgcccacaaccaccacagtcaccaccttcagccagtccctgcccactgccgtgccaacggccaccagcagcagcgctgccgactttagtggttttggcagcaccctcgccacctccgccccggccaccagcagccagcccactctgacgttcagtaacacgagcacccccacgttcaacattccctttggctcaagcgccaagtccccgctcccatcatatccgggagccaacccccagcccgcatttggggccgctgaggggcagccaccgggggccgccaagccagcccttacccccagctttggcagctctttcacttttggaaactctgcagccccggccccggctactgcacccacacctgcacctgcgtccacgatcaagatcgtgcctgcgcacgtgcctacgcccatccagcctacctttggcggtgccacgcactcggcgtttggattgaaagccacggcttccgccttcggcgctcccgccagctcacagcccgcctttggcggctccactgctgtcttctccttcggtgcagccaccagctccggctttggagccaccacccagaccgccagcagcgggagcagcagctcggtgtttggcagcacaacaccatcacccttcacgtttgggggttcggcagcccccgctggcagtgggagctttgggatcaacgtggccaccccaggctccagcgccaccaccggagctttcagctttggagcaggacagagtgggagcacagccacctccacccccttcacagggggcttaggtcagaacgccctgggcaccaccggccagagcacaccgtttgccttcaacgtgggcagcacaactgagagcaaacctgtgtttggaggcaccgccacccccacctttggtcagaacacccctgcgcctggagtgggcacatcgggcagcagcctctcctttggggcatcttcagcacccgcccaaggctttgttggtgttggaccgttcggatcggcggccccttcattttccattggtgcgggatccaagaccccaggggctcgacagcgactgcaggcccgaaggcagcacacccgcaaaaagtagcctttgtcccctgtccctgttccccccaccccttccctaaatctggaccttggcacgtgctagaaagagccttggacccttccagctgcgtaaagcaaacctaccccggatctctggcttcagccgccagggggcagtggcagccctggggccctttcccttctggaggaagcacaagcctcagggaaggggaagcaggatgcggagggccaaagcccgggacctctacttgaacagttccactggggaggctggagaactaaggacctgtacatagtgtccgctgccctgactcccgcttagcgcacccttaggcaggcgccccttccacctttccccgagagccgtcgtcgctggagggggcagggtccagcccgcctggatcggtggtgtgcacctgatgggatttgggaaatgggttatccctaaagctttatcttgcttggcttagctgtgagaagtggttctcttcctctggtcccttctggggactctgtttccccatttcttgctgctgtgtccctcaccggttccttgcaggattccctcctttttaaatgcccttgaatctagctttgccttggagaccccagtgggtgctgctcctgccgttttcttcctgccaagcctgaatcaatgtttcatctccaaccctctgccagtttggcccctcagagcttggtggctcaagactgttagcctggcagagccaggggtgaagggagaagctcttggagcaggcaggatgcccaccgctgcttcagctgcctcctcgcccagctaccctttggccccattgggccctcgtctgcctctccaggattgtatgtttcaagccttgtcctgtgttcctttgtctgacgctctgtgtattgctctttgaatcgagtttggaggaagagttgagttgtatgagtggcggcatgttggtagtgccggacttcctgtttcaagttttctggggcctcgctaattgaatgtggaaagtagcaccacttgacggctacaagtgccgactcctgaattttcccatggtgttctgacttcaagggctggcagccagggagaatgggcccaggggaagcaaagacctcttccctctgcggtttctgtcccacttaactgacctcactggaggctacgtcacccaaagtagatgttagaaaacctaaattaatgaaccatatttttaaaatcctatttttcccaaacagggccctctgcagcccatcctttccttccgtccttctgaaaccacataccccaggcccaagcgccttgctgtcacgcccaacctctttgggagaagtatgaatgcgtgtgtctaaattaaaagaaaaaaatatttaaacgttttttaacaaaaatttatttttgtatttaagctaaattgccttttaaattccttcaagcttggttcattgaggtggttaagtataaatgctattaactaggaattagctgtatagttaagttatgcctgtgcaaagaagaggctcaaatgctgtccccggcagctttcctgggggactagagctccttctggccatgttatatgaaatgtaattcttattttataaataatgtgatgtagatgtaaccggtgccccctccccgttgtgactgagggcgagtgttatacctggctgcgtgtgcagctgaggagggagtgaacctcaagcctaaatacctgttaggattggagggtctgggtgggcctgggcctagcaatcaatcaagcttctacctgtaccttatgtaaggtagaccctcctagtgtcagtacctgagcttgtttacctcagttccgcaggcaggacagccggtccgggaaccctgagtgagagtgagtgtggatgtgtacagtacacacactggacggcagcgggaggctgggactttccattacaaatagagacttcattcctgttgagtctagttggaatttttagtatgaatgtgagatttttctcctgcttgtgacattaagaataaaaaactgtgatctat

SEQ ID NO: 270556 - DNA, 5839 bp, Artificial Sequence
  derived and/or modified sequence
gtcatcgcttgctctcgttcccaggctttggcttctagtggacgagaatcaccgagtctgcggggctggatgctgaccgcccggaccagcacctaggcgggcgggagctgtgcggcccagggttcgcgcgggccgggtagaggctcgagctgggacccccgagcgtgaaccccggagccggcggcgctggggccagaggggccgggagccccagggaggcggatctgggccccgagaaggacacccgcctggatttgccccgtaggcccggcccgggcccctcgggagcagaacagccttggtgaggtggacaggaggggacctcgcgagcagacgcgcgcgccagcgacagcagcccgccccggcctctcgggagccgtggggcagaggctgcggagccccaggagggggccagtgtcattcaaagatgtggctgtggatttcacccaggaggagtggcggcaactggaccctgatgagaagataacatacggggatgtgatgttggagaactacagccatctagtttccttggcttatgaggtggcaacatcttgtacttcggagattctgaagccgagcaacttgcccaagtccttcttcttttcccattaacaagatatgatatcaccaagccaaacgtcatcattaagttggagcagggagaggagctgtggataacgggaggtgaatttccatgtcaacatagtcctgggatcgtgggactttaccagatcggtttgtaataacacctcgaagacgctatccgatccatcagacccagtattcctgtccgggggtacttcccacagtgtgctggaatggttatcacaagaaggctgtgctgtcccctcgcaactccaggatggtgtgtagcccagtgactgtgaggatcgcccctcctgacagaagattttcacgttctgcgataccagagcagataatcagctcaacactgtcgtcaccatcaagtaatgccccagacccatgtgcaaaggagactgtactgagtgccctcaaagagaagaagaagaaaaggacagtggaggaagaagaccaaatattccttgatggccaggaaaataaaagaaggcgccatgatagcagtggcagtggacattcagcatttgagcccctggtggccagtggagtccccgcttcttttgtgcctaagcctgggtctctgaagagaggcctcaattctcagagctcagatgaccacttgaataagagatcccgaagctcttccatgagctccttgacaggcgcttacacaagtggcatccctagctccagccgcaatgccattaccagttcctacagctccactcgaggcatctcacagctctggaagagaaatggccccagttcatcacccttctctagcccagcctcatcccgctcccagacaccggagaggccagcaaagaaaataagagaagaagagctgtgtcatcattccagttcttcaactccattggcagcagacaaggagtcccagggagaaaaggctgcagatacaaccccaaggaagaaacaaaactcgaattctcagtctacacctggcagctctgggcagcgtaagcggaaagttcagctgctgccttctcggcgaggggaacagctgaccttgcctccacctccccagcttggctattcgatcactgccgaggacctagacttagagaagaaggcttcattacagtggttcaaccaggccttggaggacaagagtgatgctgcctcgaactctgtcactgagaccccacctaccactcagccttcatttacctttaccctgcctgctgctgcaactgcctccccacccacctccctcctggccccaagcaccaacccactgttagagagcttgaagaagatgcagactcccccgagcctgccaccctgcccagaatctgctggagcagcaaccactgaggccctctcacctccaaagacacccagcctcctacccccgctgggtttatcacagtcagggccgccagggctgctccccagcccctcctttgactccaaacccccgaccactttgctggggctgatccctgctccatccatggtaccagccactgacaccaaggcacctccaacccttcaagcagagacggctaccaaaccccaagccacatctgccccgtcccccgcccccaagcaaagcttcctgtttggaacacagaacacctcaccttccagccctgccgcccctgctgcatcttcagcatctcccatgttcaagcccattttcacggctccacccaagagtgagaaggaaggccccacaccgcctggcccttcagtcacagccacagcgccctccagctcctccctccccacgaccaccagcaccacagccccgaccttccagcctgtctttagcagcatggggccacctgcatctgtgcccttgcctgctcccttcttcaagcagacaactactcccgccactgctcccaccacaactgccccgctcttcactggcctggccagcgccacctctgctgtggctcccatcacctctgccagtccatccacagactctgcttcgaagcctgcgtttggctttggcataaacagtgtgagcagcagcagtgtgagtaccacgaccagcaccgccactgccgcctcacagcctttcctcttcggggcgccccaggcctctgctgccagcttcaccccggccatgggctccatattccagtttggcaaacctcctgccttgcccacaaccaccacagtcaccaccttcagccagtccctgcccactgccgtgccaacggccaccagcagcagcgctgccgactttagtggttttggcagcaccctcgccacctccgccccggccaccagcagccagcccactctgacgttcagtaacacgagcacccccacgttcaacattccctttggctcaagcgccaagtccccgctcccatcatatccgggagccaacccccagcccgcatttggggccgctgaggggcagccaccgggggccgccaagccagcccttacccccagctttggcagctctttcacttttggaaactctgcagccccggccccggctactgcacccacacctgcacctgcgtccacgatcaagatcgtgcctgcgcacgtgcctacgcccatccagcctacctttggcggtgccacgcactcggcgtttggattgaaagccacggcttccgccttcggcgctcccgccagctcacagcccgcctttggcggctccactgctgtcttctccttcggtgcagccaccagctccggctttggagccaccacccagaccgccagcagcgggagcagcagctcggtgtttggcagcacaacaccatcacccttcacgtttgggggttcggcagcccccgctggcagtgggagctttgggatcaacgtggccaccccaggctccagcgccaccaccggagctttcagctttggagcaggacagagtgggagcacagccacctccacccccttcacagggggcttaggtcagaacgccctgggcaccaccggccagagcacaccgtttgccttcaacgtgggcagcacaactgagagcaaacctgtgtttggaggcaccgccacccccacctttggtcagaacacccctgcgcctggagtgggcacatcgggcagcagcctctcctttggggcatcttcagcacccgcccaaggctttgttggtgttggaccgttcggatcggcggccccttcattttccattggtgcgggatccaagaccccaggggctcgacagcgactgcaggcccgaaggcagcacacccgcaaaaagtagcctttgtcccctgtccctgttccccccaccccttccctaaatctggaccttggcacgtgctagaaagagccttggacccttccagctgcgtaaagcaaacctaccccggatctctggcttcagccgccagggggcagtggcagccctggggccctttcccttctggaggaagcacaagcctcagggaaggggaagcaggatgcggagggccaaagcccgggacctctacttgaacagttccactggggaggctggagaactaaggacctgtacatagtgtccgctgccctgactcccgcttagcgcacccttaggcaggcgccccttccacctttccccgagagccgtcgtcgctggagggggcagggtccagcccgcctggatcggtggtgtgcacctgatgggatttgggaaatgggttatccctaaagctttatcttgcttggcttagctgtgagaagtggttctcttcctctggtcccttctggggactctgtttccccatttcttgctgctgtgtccctcaccggttccttgcaggattccctcctttttaaatgcccttgaatctagctttgccttggagaccccagtgggtgctgctcctgccgttttcttcctgccaagcctgaatcaatgtttcatctccaaccctctgccagtttggcccctcagagcttggtggctcaagactgttagcctggcagagccaggggtgaagggagaagctcttggagcaggcaggatgcccaccgctgcttcagctgcctcctcgcccagctaccctttggccccattgggccctcgtctgcctctccaggattgtatgtttcaagccttgtcctgtgttcctttgtctgacgctctgtgtattgctctttgaatcgagtttggaggaagagttgagttgtatgagtggcggcatgttggtagtgccggacttcctgtttcaagttttctggggcctcgctaattgaatgtggaaagtagcaccacttgacggctacaagtgccgactcctgaattttcccatggtgttctgacttcaagggctggcagccagggagaatgggcccaggggaagcaaagacctcttccctctgcggtttctgtcccacttaactgacctcactggaggctacgtcacccaaagtagatgttagaaaacctaaattaatgaaccatatttttaaaatcctatttttcccaaacagggccctctgcagcccatcctttccttccgtccttctgaaaccacataccccaggcccaagcgccttgctgtcacgcccaacctctttgggagaagtatgaatgcgtgtgtctaaattaaaagaaaaaaatatttaaacgttttttaacaaaaatttatttttgtatttaagctaaattgccttttaaattccttcaagcttggttcattgaggtggttaagtataaatgctattaactaggaattagctgtatagttaagttatgcctgtgcaaagaagaggctcaaatgctgtccccggcagctttcctgggggactagagctccttctggccatgttatatgaaatgtaattcttattttataaataatgtgatgtagatgtaaccggtgccccctccccgttgtgactgagggcgagtgttatacctggctgcgtgtgcagctgaggagggagtgaacctcaagcctaaatacctgttaggattggagggtctgggtgggcctgggcctagcaatcaatcaagcttctacctgtaccttatgtaaggtagaccctcctagtgtcagtacctgagcttgtttacctcagttccgcaggcaggacagccggtccgggaaccctgagtgagagtgagtgtggatgtgtacagtacacacactggacggcagcgggaggctgggactttccattacaaatagagacttcattcctgttgagtctagttggaatttttagtatgaatgtgagatttttctcctgcttgtgacattaagaataaaaaactgtgatctat

SEQ ID NO: 270557 - DNA, 3750 bp, Artificial Sequence
  derived and/or modified sequence
atgagtcctgcagcagcggcagcaggagcaggggaaaggcgacgtcctatcgcttctgtcagagatgggcgtgggagaggatgtgggggtcccgctcgagctgttcttcttggcctgtctctagtagggctcctcctgtacctcgtgccggctgccgctgcccttgcgtggcttaccgtcggggctaccgccgcatggtggggactgtcccgcgaaccccgtggatctagacctctgtcctcctttgtgcggaaggctcgccatcgcagacccctcagttccttcgtaagaaaggccaggcaccggagaacactctttgccagcccactggctaaatccaccgccaacggaaaccttttggagccccgtacgctgctagaaggacccgaccccgctgagctcctgctcatgggcagttatcttggaaagcctgggccaccacagccagcagctgccccagaaggccaggacctgcgggatcggcctggacggaggcctccagcccgacccgctcctaggtcacccccaccacgctcccctccaccaagatccccacctcccagtccaccaactcaccgtgcgcaccacgtgtacccctcgttgcccacgcctctgctccgaccttcaaggcggccttctcctcgtgactgtggcaccctgcctaacagatttgtgatcactcccaggcggcgataccccatacatcaggcccagtacagttgtctgggcgtgcttcccaccgtgtgttggaacgggtatcataagaaagcggtgcttagccccaggaactcgcgcatggtgtgttctcccgttactgtgcgaattgccccacctgatcggagattcagtcgaagcgcaattccagagcagatcattagcagcacgttgagctctccaagctcgaacgcacccgacccttgcgcaaaggaaacggtcctgagtgcccttaaggagaaggagaaaaagaggactgttgaagaggaagatcaaattttcctggatgggcaagaaaataagaggcgaaggcacgactcttcgggatccggccattctgcatttgagccgctcgtggcaaatggggtgcctgcctcgtttgttcctaaacctggctcccttaagagaggccttaacagccagagctctgatgaccatttaaacaaaaggtcccgcagcagcagtatgagtagcctgaccggtgcatatgcctctgggatcccctctagctctcggaacgccattacaagctcctattcgtcaacgaggggtatctctcaactgtggaaacgcaacggacccagctctagtccattctcctcacctgccagttctaggtcacagacccccgaacgtcctgctaaaaagatccgcgaagaggagctctgtcaccacagcagctcgtctactcctctggcagcagatcgtgaatcccagggcgagaaggctgctgacacaactccacgaaaaaaacagaacagcaacagccagtcgacacctggatcatcaggccaaaggaagcgaaaagttcagctgttgccaagccggcgtggcgagcagttaacacttccaccccctccccagcttgggtactctatcaccgcagaagacctcgacctggagaagaaggctagcttgcagtggtttaaccaggccctggaggataagtcagatgccgcttccaatagcgtgacagaaactccaccaattacacagccatcattcacatttacactacctgccgcagccccagcgtcacctcctacctcactcctggccccatctacaaaccctcttctcgaatctctgaagaagatgcagacacctccaagtctgcccccatgccctgagtcagcgggtgcagcgaccactgaggcacttagccctcctaagacacccagcctgttgcctcctctcggacttagccaaagtggacctcctggactcctgccatcgccgagtttcgacagcaaaccgccaaccacactattagggctgatcccggctcctagcatggtgcctgccaccgacacgaaagccccacccacactgcaggccgagacagccaccaagccccaggccacttccgccccttcccctgcccctaagcagtcctttctgtttggcacccagaatacatctccctcctctcccgctgcgcctgcagcctccagtgcccctcctatgttcaagcccattttcacagcccctccgaagagcgagaaggaggggcctacacccccaggtccctccgtgacggctaccgcaccgtcctccagttctctgcctacaactacatccacaaccgcacccacttttcaaccagtgttttcctcaatggggccacctgccagcgtgcccttgccagcaccattttttaaacaaaccacaacccccgctactgcaccaacaacaactgcacctctgtttacaggtttagcctcagctactagtgctgtcgcacctattacatcagcatccccctctacggacagcgcctctaagccagccttcgggtttggcattaactccgtctcgagttccagcgtctccacaacaacatcaaccgccaccgccgcatcacagcctttcctttttggtgctcctcaagcttccgccgcttcctttacccccgcaatgggaagtatcttccaattcgggaaacccccagcactgccgactactacaaccgtgacgacttttagccagtccctacatacggccgtccccacagccaccagcagcagtgcagcggacttctctggattcggctctactctggctacttcggcacctgcgaccagctcccagccaaccctgacattttctaatacttctacacctacattcaacattcctttcggatctagcgcaaaaagtccactgccttcctaccccggagcaaacccccaacctgcgtttggcgcagccgagggacagccccctggcgcagccaagcctgctctcgctccctcattcggctcttcctttacatttgggaactccgccgctcccgctgccgcacctactcctgcccctccgtcaatgatcaaggtggtgcctgcctatgtacccacacccatccatcccatatttggcggtgctacccactctgcctttggattgaaggcaactgcctcagcattcggcgcaccagcctcctctcagcctgcttttggcggttctacggctgtcttcttcggggctgccacatcttcaggttttggcgctacgacgcaaaccgcaagctccggctcgtcttcaagcgtcttcgggagcacgacgccgtccccattcacttttggcggtagtgccgcacctgctggctcaggatcattcggaatcaatgtagcaaccccaggctctagcactaccaccggtgccttctcattcggcgcaggccaaagcggcagcacagccacctccacgcctttcgcaggaggcctgggtcagaatgccctgggtactaccggacagtcaactccatttgcgtttaatgtgtcgtccactacagagtccaagcccgtgttcggagggacagcgactccaaccttcggattgaatacccccgctccaggggtgggcacctcagggtcctccttgtccttcggcgcaagcagcgctccggctcaggggttcgtgggagtcgcaccattcggatccgctgctctcagcttttccatcggcgctggctctaagaccccgggagcaaggcagcgcttacaggcgcgacgtcaacatacaaggaagaagtag

SEQ ID NO: 270558 - DNA, 3690 bp, Artificial Sequence
  derived and/or modified sequence
atgagccccgcagcagccgcagcaggtgccggtgagcggcgacggcctatcgccagtgtgcgggatggcagagggagaggctgtggcggacctgcaggcgctgcactgcttggcttgagcctcgttggcctgctgctctatttagtgcccgctgcggcagccctggcttggctcgctgtgggcaccactgcggcttggtggggcctgtctcgcgaacccagggggtcacgtccgctgagcagtttcgtacagaaggccaggcatcgccgtaccctgtttgcctcccctcccgcaaaatcgaccgcaaacggtaacctgctggagccgaggaccctcctcgagggcccagaccctgcggagctgcttcttatgggctcatatttaggtaaaccaggtcctccacagcccgctccggcaccggaaggccaggacctgcgtaatcgacctggacggcgtcccccagctaggcccgcacctcggtcaacgcccccttctccacccacacatcgggtccaccacttttacccttcccttccgacccccctgttacgtccgtctggcagaccctccccacgtgaccggggtacgcttcccgatcgatttgtgattacgccaaggcggcgatatcccatacatcagacacagtactcttgtcccggagtccttcccaccgtgtgctggaacggctaccataagaaagcggtactcagcccaaggaatagcaggatggtgtgttcccccgtgaccgtgcgcattgcacctccagatcgcagatttagtaggtcagcaatcccggaacagattatctcatccacgttgtctagccccagtagtaatgcccctgacccatgtgcaaaggaaacggtcttaagcgcactgaaagagaaaaagaagaaacgaacggttgaagaggaagaccagatcttccttgatgggcaggaaaacaaaagaagacgacacgatagctctggctcaggccattctgcctttgagcctctggtggcatcaggcgtcccagccagctttgttccgaaacctggctcattgaagcgcggactgaattcgcagagcagcgacgatcatctcaacaaacgcagcaggtctagtagcatgagctctctcactggggcttacacaagcgggattccatcatcgagccggaatgcaatcaccagtagttactcaagcactagaggaatctcacaactgtggaaaaggaatggcccaagctcaagtccattttcaagcccggcatcttctcggagtcagaccccagagagacctgccaaaaagattcgtgaggaagaactgtgccatcactcctccagctctaccccattggcagcggacaaggagtcacagggcgaaaaagctgccgacactacccccagaaaaaagcaaaacagtaattctcagtccactcctgggtcatcaggtcagcgcaagcggaaagtgcagcttctcccatctcgtaggggggagcaactgaccctgccgccaccgccacagcttggatatagcatcactgctgaagatttggacttggaaaagaaagcgtctcttcagtggtttaaccaggcactagaagataagtcagacgccgcaagcaattctgttaccgaaaccccacctaccacacagccctcattcacctttacattacccgctgccgcaaccgcttctccgccaaccagtttactggccccttcaaccaatcccctactggaatccctgaagaaaatgcagaccccaccttctcttcctccttgccccgagtccgcaggtgccgcaacaaccgaggcactatcccctcctaagacaccttcccttctgcctcctctgggactttcccagagcgggccacccggtttgctgccctcaccatcatttgattcaaagcctccaacaaccctcctgggtcttatcccagccccaagcatggtgcccgctacagacactaaggcccctccgactctgcaagcagagacagctaccaagcctcaggccaccagcgcacctagcccagcccctaaacagtcatttctatttggcacccagaacacatcaccttcttcccccgcagctcccgcagcctcgagtgcctctcccatgtttaagcctatcttcacagctccacctaaatccgagaaagagggtccaacccctcccggaccgtccgtcacggccaccgctccctccagttctagtctgccgaccaccacctcaactacagcaccaaccttccagccagttttttcttccatggggccaccagccagcgtcccattgcccgcacctttttttaaacaaactaccacaccagctaccgccccaactacgaccgcacctctctttacagggctcgcctctgctacatcggctgttgcccctataacctccgcatcgccctcaacagatagtgccagcaagcccgctttcggcttcggaataaatagtgtgagctcttcttctgtatccacaacaactagcaccgccacagccgcatctcagcccttcctcttcggagctcctcaggcctctgcggcatccttcacccccgcaatgggatcgatttttcagtttggtaagcctccggcactgccgaccacgaccaccgtgactacctttagccaatcattgccaactgctgtacctactgcgacctcctcctctgcagcagacttttcaggatttggatctaccctagccacttctgctccggctacatcttcccagccaacattgactttttccaataccagcacacccacatttaacatacctttcgggtcatctgccaagagtcctctgccttcataccctggcgctaatccacaacctgcgttcggtgccgctgagggacaaccccctggagccgctaaacccgcactcacaccttcatttggttcttcctttactttcggaaattcagccgctccagcacccgctaccgccccaacccctgcacctgcctccactattaagatcgtccccgctcatgtcccgactccaatccagcctaccttcgggggagctacgcattcagctttcggactgaaggccaccgcgtcagccttcggagctccagcctcctcgcagcccgcatttggagggtctactgcagtgttttcgtttggggctgcgacctcgtccggcttcggcgctactacacagacagcatcttctgggagctcatcgtcagttttcggaagtactaccccctcaccctttacttttgggggaagcgccgctcccgcaggcagcggctcattcggtatcaacgtcgctacccctggctcctctgccactacgggggctttttcattcggggcaggccaatcagggtccacagccacaagcaccccatttaccggaggattggggcaaaacgcgctagggactactggccaaagtacccctttcgcattcaatgtgggcagcacaactgagagcaagccagttttcgggggaacagccactcccactttcgggcaaaacacaccggctcctggggtcggcacgtcaggttcaagtctgtcattcggcgcaagcagtgcacctgcccaggggtttgtcggagtgggacctttcgggagcgcagccccatccttctccattggggctggctcaaaaacaccgggtgcgagacagcggttgcaggcccgacggcagcacacacgtaagaagtag

SEQ ID NO: 270559 - protein, 922 aa, Artificial Sequence
  derived and/or modified sequence
MATASPRSDTSNNHSGRLQLQVTVSSAKLKRKKNWFGTAIYTEVVVDGEITKTAKSSSSSNPKWDEQLTVNVTPQTTLEFQVWSHRTLKADALLGKATIDLKQALLIHNRKLERVKEQLKLSLENKNGIAQTGELTVVLDGLVIEQENITNCSSSPTIEIQENGDALHENGEPSARTTARLAVEGTNGIDNHVPTSTLVQNSCCSYVVNGDNTPSSPSQVAARPKNTPAPKPLASEPADDTVNGESSSFAPTDNASVTGTPVVSEENALSPNCTSTTVEDPPVQEILTSSENNECIPSTSAELESEARSILEPDTSNSRSSSAFEAAKSRQPDGCMDPVRQQSGNANTETLPSGWEQRKDPHGRTYYVDHNTRTTTWERPQPLPPGWERRVDDRRRVYYVDHNTRTTTWQRPTMESVRNFEQWQSQRNQLQGAMQQFNQRYLYSASMLAAENDPYGPLPPGWEKRVDSTDRVYFVNHNTKTTQWEDPRTQGLQNEEPLPEGWEIRYTREGVRYFVDHNTRTTTFKDPRNGKSSVTKGGPQIAYERGFRWKLAHFRYLCQSNALPSHVKINVSRQTLFEDSFQQIMALKPYDLRRRLYVIFRGEEGLDYGGLAREWFFLLSHEVLNPMYCLFEYAGKNNYCLQINPASTINPDHLSYFCFIGRFIAMALFHGKFIDTGFSLPFYKRMLSKKLTIKDLESIDTEFYNSLIWIRDNNIEECGLEMYFSVDMEILGKVTSHDLKLGGSNILVTEENKDEYIGLMTEWRFSRGVQEQTKAFLDGFNEVVPLQWLQYFDEKELEVMLCGMQEVDLADWQRNTVYRHYTRNSKQIIWFWQFVKETDNEVRMRLLQFVTGTCRLPLGGFAELMGSNGPQKFCIEKVGKDTWLPRSHTCFNRLDLPPYKSYEQLKEKLLFAIEETEGFGQE

SEQ ID NO: 270560 - protein, 704 aa, Artificial Sequence
  derived and/or modified sequence
MATASPRSDTSNNHSGRLQLQVTVNGESSSFAPTDNASVTGTPVVSEENALSPNCTSTTVEDPPVQEILTSSENNECIPSTSAELESEARSILEPDTSNSRSSSAFEAAKSRQPDGCMDPVRQQSGNANTETLPSGWEQRKDPHGRTYYVDHNTRTTTWERPQPLPPGWERRVDDRRRVYYVDHNTRTTTWQRPTMESVRNFEQWQSQRNQLQGAMQQFNQRYLYSASMLAAENDPYGPLPPGWEKRVDSTDRVYFVNHNTKTTQWEDPRTQGLQNEEPLPEGWEIRYTREGVRYFVDHNTRTTTFKDPRNGKSSVTKGGPQIAYERGFRWKLAHFRYLCQSNALPSHVKINVSRQTLFEDSFQQIMALKPYDLRRRLYVIFRGEEGLDYGGLAREWFFLLSHEVLNPMYCLFEYAGKNNYCLQINPASTINPDHLSYFCFIGRFIAMALFHGKFIDTGFSLPFYKRMLSKKLTIKDLESIDTEFYNSLIWIRDNNIEECGLEMYFSVDMEILGKVTSHDLKLGGSNILVTEENKDEYIGLMTEWRFSRGVQEQTKAFLDGFNEVVPLQWLQYFDEKELEVMLCGMQEVDLADWQRNTVYRHYTRNSKQIIWFWQFVKETDNEVRMRLLQFVTGTCRLPLGGFAELMGSNGPQKFCIEKVGKDTWLPRSHTCFNRLDLPPYKSYEQLKEKLLFAIEETEGFGQE

SEQ ID NO: 270561 - protein, 111 aa, Artificial Sequence
  derived and/or modified sequence
MATASPRSDTSNNHSGRLQLQVTVSSAKLKRKKNWFGTAIYTEVVVDGEITKTAKSSSSSNPKWDEQLTVNVTPQTTLEFQVWSHRTLKADALLGKATIDLKQALLIHNRK

SEQ ID NO: 270562 - DNA, 2769 bp, Artificial Sequence
  derived and/or modified sequence
atggccaccgccagccccagaagcgacaccagcaacaaccacagcggcagactgcagctgcaggtgaccgtgagcagcgccaagctgaagagaaagaagaactggttcggcaccgccatctacaccgaggtggtggtggacggcgagatcaccaagaccgccaagagcagcagcagcagcaaccccaagtgggacgagcagctgaccgtgaacgtgaccccccagaccaccctggagttccaggtgtggagccacagaaccctgaaggccgacgccctgctgggcaaggccaccatcgacctgaagcaggccctgctgatccacaacagaaagctggagagagtgaaggagcagctgaagctgagcctggagaacaagaacggcatcgcccagaccggcgagctgaccgtggtgctggacggcctggtgatcgagcaggagaacatcaccaactgcagcagcagccccaccatcgagatccaggagaacggcgacgccctgcacgagaacggcgagcccagcgccagaaccaccgccagactggccgtggagggcaccaacggcatcgacaaccacgtgcccaccagcaccctggtgcagaacagctgctgcagctacgtggtgaacggcgacaacacccccagcagccccagccaggtggccgccagacccaagaacacccccgcccccaagcccctggccagcgagcccgccgacgacaccgtgaacggcgagagcagcagcttcgcccccaccgacaacgccagcgtgaccggcacccccgtggtgagcgaggagaacgccctgagccccaactgcaccagcaccaccgtggaggacccccccgtgcaggagatcctgaccagcagcgagaacaacgagtgcatccccagcaccagcgccgagctggagagcgaggccagaagcatcctggagcccgacaccagcaacagcagaagcagcagcgccttcgaggccgccaagagcagacagcccgacggctgcatggaccccgtgagacagcagagcggcaacgccaacaccgagaccctgcccagcggctgggagcagagaaaggacccccacggcagaacctactacgtggaccacaacaccagaaccaccacctgggagagaccccagcccctgccccccggctgggagagaagagtggacgacagaagaagagtgtactacgtggaccacaacaccagaaccaccacctggcagagacccaccatggagagcgtgagaaacttcgagcagtggcagagccagagaaaccagctgcagggcgccatgcagcagttcaaccagagatacctgtacagcgccagcatgctggccgccgagaacgacccctacggccccctgccccccggctgggagaagagagtggacagcaccgacagagtgtacttcgtgaaccacaacaccaagaccacccagtgggaggaccccagaacccagggcctgcagaacgaggagcccctgcccgagggctgggagatcagatacaccagagagggcgtgagatacttcgtggaccacaacaccagaaccaccaccttcaaggaccccagaaacggcaagagcagcgtgaccaagggcggcccccagatcgcctacgagagaggcttcagatggaagctggcccacttcagatacctgtgccagagcaacgccctgcccagccacgtgaagatcaacgtgagcagacagaccctgttcgaggacagcttccagcagatcatggccctgaagccctacgacctgagaagaagactgtacgtgatcttcagaggcgaggagggcctggactacggcggcctggccagagagtggttcttcctgctgagccacgaggtgctgaaccccatgtactgcctgttcgagtacgccggcaagaacaactactgcctgcagatcaaccccgccagcaccatcaaccccgaccacctgagctacttctgcttcatcggcagattcatcgccatggccctgttccacggcaagttcatcgacaccggcttcagcctgcccttctacaagagaatgctgagcaagaagctgaccatcaaggacctggagagcatcgacaccgagttctacaacagcctgatctggatcagagacaacaacatcgaggagtgcggcctggagatgtacttcagcgtggacatggagatcctgggcaaggtgaccagccacgacctgaagctgggcggcagcaacatcctggtgaccgaggagaacaaggacgagtacatcggcctgatgaccgagtggagattcagcagaggcgtgcaggagcagaccaaggccttcctggacggcttcaacgaggtggtgcccctgcagtggctgcagtacttcgacgagaaggagctggaggtgatgctgtgcggcatgcaggaggtggacctggccgactggcagagaaacaccgtgtacagacactacaccagaaacagcaagcagatcatctggttctggcagttcgtgaaggagaccgacaacgaggtgagaatgagactgctgcagttcgtgaccggcacctgcagactgcccctgggcggcttcgccgagctgatgggcagcaacggcccccagaagttctgcatcgagaaggtgggcaaggacacctggctgcccagaagccacacctgcttcaacagactggacctgcccccctacaagagctacgagcagctgaaggagaagctgctgttcgccatcgaggagaccgagggcttcggccaggagtag

SEQ ID NO: 270563 - DNA, 2769 bp, Artificial Sequence
  derived and/or modified sequence
atggccacagcatcgcccagatccgacacttctaacaatcatagtgggagactccagctgcaggtgacagtgtcctcagccaaactcaagcgcaagaagaactggtttggcacagcgatttacacggaagtagtggtggacggagaaataactaaaacagctaaaagcagctcatcaagcaaccctaaatgggatgagcagcttacagttaacgttaccccacaaactacgctggagtttcaggtatggtctcataggacactgaaagccgacgctttgctgggcaaggcgactattgatctcaaacaggccctgctgatccacaatcgaaagctggaaagagtgaaggagcaactcaagctttcactggagaacaagaatggaatcgcacagacaggcgagctcaccgttgtgctcgacggcctcgtcatcgaacaggagaacattaccaactgctccagttctccaacaatcgaaatccaagaaaatggggatgcacttcatgagaacggggaaccctctgctagaacaactgctcggttagcagtagagggaaccaatggtatagataaccatgtccctacatcgacgctggtgcagaacagctgctgctcgtacgtcgtcaatggcgacaacacccccagcagcccttcccaagtggcagcgcggcccaaaaatacacctgccccgaagccactggcttctgagcccgctgacgacacagtgaacggagaatctagtagctttgccccaacagataatgcgtccgtcacagggacaccggtagtttctgaagagaatgcactctccccgaattgcaccagtactaccgtcgaggatccaccagtgcaggagatacttacctcaagtgagaacaacgagtgtatccccagcacatctgctgagctggagagcgaggcccggagcattcttgaacctgacacctccaattccaggtcttcctcagcatttgaagccgcgaagtcgcgccagcccgatggatgtatggatccggtaagacagcagagcggcaatgccaataccgaaaccctgccatccggctgggaacagaggaaggatccacacggacggacttactatgtagaccacaatacaagaacgaccacgtgggagagaccacaaccactgcctcccggctgggaaagaagagtcgatgatcgccgccgcgtctactacgtggaccacaacacaagaacgacaacctggcagcgaccaaccatggagagtgtgaggaacttcgaacagtggcaatctcagcggaaccaactgcagggggcgatgcagcagtttaaccagcgctatctgtacagtgcctcaatgcttgccgccgagaacgatccatatggacccctgcctcctgggtgggaaaaacgtgttgactcaactgaccgggtatattttgtgaaccataacaccaagacaacccagtgggaggatccgcgcactcagggtctgcagaacgaggagccgttacccgaaggatgggaaatccggtacacaagagagggcgtgcgatactttgtcgatcataatacccggacgaccaccttcaaagacccccggaatgggaaatcctccgtcaccaaaggcggtccacaaatagcctacgaaaggggcttccgctggaagctggcacatttcaggtacctttgtcagagcaacgctctgccctcccacgttaagattaacgtgtcccggcaaactttgttcgaggactcatttcagcaaataatggcattgaagccatacgacctgcgtaggcggctctatgtgatcttcaggggcgaggaagggctcgactatgggggtctggctcgtgagtggtttttcttgctgtcccatgaggtgctcaaccccatgtactgcctgttcgagtatgctggcaaaaacaattactgcctgcagattaaccctgcttctacaattaaccctgaccatctatcgtatttttgctttatcggtagatttattgctatggccctctttcacggtaagttcatcgataccgggtttagcttgcccttctacaaacgaatgctgtcaaaaaagcttaccataaaggacctcgagtctatagacacagaattctacaatagtttgatatggatacgtgataataacattgaggagtgcggccttgagatgtatttttctgtggacatggaaatcttaggcaaagtcacctcccatgatttgaaactgggcggatcaaatatccttgtaactgaggagaacaaagatgaatacattggactgatgactgaatggcggttcagcagaggagtccaagaacagacgaaagcatttctggacggcttcaacgaggttgtgcccctgcaatggctgcaatacttcgatgaaaaggagctggaagtgatgttgtgtggcatgcaggaggtggatcttgcagattggcagcggaataccgtgtatcgccactacacccggaactctaagcagataatttggttttggcagttcgtgaaggaaacagacaacgaagtcaggatgcgcctcttgcagttcgtgacaggcacttgtcgtctcccgctgggcgggttcgcagaactgatggggagcaatggcccacaaaaattctgcatagagaaggtagggaaggatacctggctgccaaggtcccacacttgctttaacagactcgacctgcctccctacaagtcctacgaacagctgaaggaaaaactcttgttcgctattgaggagacagagggcttcgggcaggagtag

SEQ ID NO: 270564 - DNA, 2769 bp, Artificial Sequence
  derived and/or modified sequence
atggcaacggcatcacccagaagtgacaccagtaacaaccattccggtaggttgcagctccaagttaccgtgtcatctgccaaactgaaaagaaaaaagaactggttcgggactgccatctacactgaggtcgtagtggacggagagataactaaaacggcaaagtcttctagctccagcaaccccaagtgggacgagcaactcactgtgaatgtaactccacaaactacactcgagttccaggtgtggagtcacagaaccctgaaggccgacgccctactaggcaaagctacaatagatctgaagcaagctctcctcatccataaccgaaagttggagcgtgtcaaggaacaattgaagttgagcttggaaaataaaaatggcatcgcgcaaaccggggaactcactgtggtcctggacggccttgtcatcgagcaggaaaatatcacaaattgctcttcgagtccaactatcgagattcaggaaaacggcgatgcccttcacgaaaacggtgagccttctgcaaggacaactgccagactggcagtcgaaggaacaaatggtatagataaccacgtgcccacatccaccctggtgcagaatagttgctgtagctatgtagtgaatggagataataccccatcgtccccttcgcaggtggcggcccgcccaaaaaatacacccgcccctaaacccctggcatcagagccagctgacgacactgtgaatggcgagtcaagctcttttgcccctacagataatgcaagtgttaccggtactccggtggtgtcagaggagaacgccttgtcacccaactgcacctccacgaccgtggaggaccccccagtgcaggaaatcctcacttcgagcgagaacaacgaatgtattccctcaacaagtgcagagctcgaaagtgaagcccggagcatactggagcccgatacctctaatagccgatctagctctgcctttgaagccgccaagagtcgtcagccagatggatgtatggatcccgtaaggcagcagtcaggaaacgctaacaccgaaacgctcccaagcggctgggaacagcgaaaggatcctcatggtaggacttattacgtggatcataatacgcgtactacaacatgggaacgacctcagcccttgccgccggggtgggaacgaagagtggacgacagaaggcgagtttactatgtggaccacaacaccaggactacaacatggcagaggcccacaatggaatcggtgcgtaactttgagcagtggcagagtcagagaaaccagcttcagggggcaatgcaacaattcaatcagaggtacctttacagtgccagcatgctcgccgcagaaaacgacccgtatggccccttaccgcctggatgggagaaaagagtagattctactgacagggtttacttcgtaaatcacaacactaagaccacccagtgggaggatcctcgcacgcagggccttcagaatgaggaacccttgcccgaggggtgggaaataagatatacacgggagggcgtcaggtattttgtcgaccataacacccgtacaactaccttcaaggatcccagaaacggcaagtcgagtgtcacgaaggggggtccccagattgcctatgagaggggatttagatggaaactggctcacttcagatatctctgccagtcgaacgcacttccgtcacatgttaagattaatgtgagtcgacagaccttattcgaggatagttttcagcaaatcatggctctcaagccatacgatctgcggaggcgtctgtatgtgatctttcgcggcgaggagggattggactacggggggttagcccgagagtggttcttcctactgtcacatgaagtgttgaacccgatgtattgcctctttgaatatgctggcaaaaataactactgcctccagattaaccccgcaagcaccattaaccctgaccacttgagctacttctgctttatcggcaggtttatcgccatggcgctgttccacgggaagtttattgacactggcttctccttgccattttataagaggatgctgtcaaaaaagctgactattaaggacttagaatccatagacaccgaattctacaacagcttaatttggatccgggataataacatagaggagtgcggcctggaaatgtacttctctgtggacatggagatactggggaaggtcacttcacatgaccttaagctgggaggtagtaatatacttgtgaccgaggagaataaagacgaatatatcggtcttatgacagaatggagattctctcggggggtgcaagagcagacaaaggcttttttagacggtttcaacgaagtcgtgccactacagtggctgcagtactttgatgaaaaagaactggaagtgatgctctgcggcatgcaagaagtggatttggcagattggcaaagaaacaccgtttatcggcactatactcgaaattctaaacagatcatatggttctggcagttcgtaaaagaaacagacaatgaggtgcggatgcgcctgctgcagttcgttaccggcacttgtcgtctgcctcttggaggtttcgcagagttgatgggatcaaacgggccccagaaattttgtattgagaaggtcggaaaggatacatggttgccacgttcacatacgtgctttaatcgtttggacttgccaccttataagtcctatgaacagctgaaggagaagctactttttgcgattgaggaaacagaggggtttggccaggagtag

SEQ ID NO: 270565 - DNA, 2769 bp, Artificial Sequence
  derived and/or modified sequence
atggccacagccagccccaggagtgacaccagcaacaaccacagcggccgcctgcagctgcaggtgacagtgagcagcgccaagctgaagaggaagaagaactggtttggaacagccatctacacagaggtggtggtggatggagagatcaccaagacagccaagagcagcagcagcagcaaccccaagtgggatgagcagctgactgtgaatgtgaccccccagaccaccctggagttccaggtgtggagccacaggaccctgaaggcagatgccctgctgggcaaggccaccatcgacctgaagcaggccctgctgatccacaacaggaagctggagcgggtgaaggagcagctgaagctgagcctggagaacaagaatggaattgcccagacaggagagctgactgtggtgctggatggcctggtgattgagcaggagaacatcaccaactgcagcagcagccccaccatcgagatccaggagaatggagatgccctgcatgaaaatggagagcccagcgcccggaccacagcccggctggccgtggagggcaccaatggaattgacaaccacgtgcccaccagcaccctggtgcagaacagctgctgcagctatgtggtgaatggagacaacacccccagcagccccagccaggtggccgcccggcccaagaacaccccagcccccaagcccctggccagcgagccagcagatgacacagtgaatggagagagcagcagctttgcccccacagacaatgcctctgtgacaggcacccctgtggtgtctgaggagaatgccctgagccccaactgcaccagcaccaccgtggaggacccccctgtgcaggagatcctgaccagcagtgaaaataatgaatgcatccccagcaccagcgctgagctggagagcgaggcccggagcatcctggagccagacaccagcaacagccgcagcagcagcgcctttgaggccgccaagagccggcagccagatggctgcatggaccctgtgcggcagcagagcggaaatgccaacacagagaccctgcccagcggctgggagcagaggaaggacccccacggccgcacctactacgtggaccacaacaccaggaccaccacctgggagcggccccagcccctgcccccaggctgggagaggagagtggatgacagaagaagagtgtactacgtggaccacaacaccaggaccaccacctggcagaggcccaccatggagagcgtgaggaactttgagcagtggcagagccagaggaaccagctgcagggcgccatgcagcagttcaaccagcgctacctgtacagcgcctccatgctggccgcagaaaatgacccctacggccccctgcccccaggctgggagaagagggtggacagcacagacagagtgtactttgtgaaccacaacaccaagaccacccagtgggaggaccccaggacccagggcctgcagaatgaggagcccctgcctgagggctgggagatccgctacacccgggagggcgtgcgctactttgtggaccacaacaccaggaccaccaccttcaaggaccccagaaatggcaagagctctgtgaccaagggcggcccccagatcgcctatgagcggggcttccgctggaagctggcccacttccgctacctgtgccagagcaatgccctgcccagccacgtgaagatcaacgtgtcccggcagaccctgtttgaggacagcttccagcagatcatggccctgaagccctatgacctgcggcggcggctgtatgtgatcttccggggggaggagggcctggactatggaggcctggcccgggagtggttcttcctgctgagccatgaggtgctgaaccccatgtactgcctgtttgaatatgctgggaagaacaactactgcctgcagatcaacccagccagcaccatcaacccagaccacctgagctacttctgcttcatcggccgcttcatcgccatggccctcttccacggcaagttcatcgacaccggcttcagcctgcccttctacaagaggatgctgagcaagaagctgaccatcaaggacctggagagcattgacacagagttctacaacagcctcatctggatccgggacaacaacattgaagaatgtggcctggagatgtacttctctgtggacatggagatcctgggcaaggtgaccagccatgacctgaagctgggcggcagcaacatcctggtgacagaggagaacaaggatgagtacatcggcctgatgacagagtggaggttcagccggggcgtgcaggagcagaccaaggccttcctggatggcttcaatgaggtggtgcccctgcagtggctgcagtactttgatgagaaggagctggaggtgatgctgtgtggcatgcaggaggtggacctggccgactggcagaggaacacagtgtaccgccactacaccaggaacagcaagcagatcatctggttctggcagtttgtgaaggagacagacaatgaggtgaggatgaggctgctgcagtttgtgacaggcacctgccgcctgcccctgggcggctttgctgagctgatgggcagcaatggcccccagaagttctgcatcgagaaggtgggcaaggacacctggctgcccaggagccacacctgcttcaaccggctggacctgcccccctacaagagctatgagcagctgaaggagaagctgctgtttgccatcgaggagacagagggcttcggccaggagtag

SEQ ID NO: 270566 - DNA, 2769 bp, Artificial Sequence
  derived and/or modified sequence
atggccaccgccagcccccggagcgacaccagcaacaaccacagcggccggctccagctgcaggtgaccgtgagtagtgccaagctgaagcggaaaaaaaattggtttggaaccgcaatttatacagaagtggtggttgatggagaaataactaagacggccaagtctagttcctcttcaaatcccaagtgggacgaacagttaacagtcaacgtgaccccacaaacgaccttggaattccaggtatggtcccacaggactttgaaggcagacgcactactggggaaggcaaccatcgaccttaagcaggcgctgctgatacacaaccggaaactggaacgcgtgaaggaacagcttaagctgtcactggagaataaaaacgggattgctcagacaggcgaactcacagtggttctagacggtctggttattgagcaggagaatatcacgaattgctcaagtagtcctactattgagattcaggaaaatggagatgcactccacgagaatggagaacctagtgctaggactacagccagattagccgtagaaggcactaacggcatagacaaccacgtccccacttcaactctcgtacagaacagttgttgcagttacgtagtgaatggagacaatacaccatcaagcccctctcaggtggccgcgcgaccaaagaacactccagcacccaagcccttagccagcgagcctgccgatgatacagtgaatggggagtcttcttcgtttgcccctaccgataatgcaagtgttacaggaactcccgtcgtctccgaagaaaatgccttatctcccaactgcactagtaccacggtcgaggatcctcccgttcaggagattttgacgtcttctgagaacaatgagtgcatcccaagcacgtcagcagaacttgagtctgaagctcgcagcatcctcgagcctgacacgtcaaatagtagatcatccagcgccttcgaggctgccaagtcacgccagcccgatggctgtatggacccagtgcgacaacagagcggcaatgcgaatacagaaactctgccgagcggatgggaacagaggaaggacccacatggcagaacatactatgttgaccacaatactaggaccacgacttgggagaggccacagcctcttccccccggatgggaacggcgggtggacgataggagacgggtctattatgtggatcataacaccagaaccaccacctggcagcggccaacaatggaatcagtccgtaacttcgagcagtggcagtctcagagaaatcagctgcagggggctatgcaacaattcaatcagcgctatctctattccgcctccatgctggctgccgagaatgacccctacgggcccctgccccccgggtgggaaaagcgggtagactctaccgatcgggtgtattttgtcaatcataatactaagacaactcaatgggaggatcctagaacccaggggttacagaacgaggagcctctgcctgagggatgggaaattcgatacaccagagagggcgtacgatactttgtggaccacaacacacgcacaaccacctttaaggatcctagaaacggaaaatctagcgtaactaagggaggaccacagatcgcttacgagagaggattcaggtggaagcttgcccactttagatatctctgtcagagcaacgctctgccatcccatgtgaagatcaatgtgtctcgacagacactatttgaagattcgtttcagcaaattatggccctgaagccctatgatcttcgacgccgtctttacgtcatatttaggggagaagaagggctcgattatgggggtttggcgcgagaatggttcttcctgctgtcccatgaggtcctcaaccctatgtactgcctattcgagtacgccgggaagaacaactattgcctacagataaacccagcttccacaattaatccagaccatctgagttacttttgttttattggtagattcatagctatggccctctttcacgggaagttcattgatactgggtttagtctccccttctacaagcggatgttgtccaagaagttgactattaaagatttggagtctatcgacacagagttctataactctctgatctggattagggacaacaatatcgaggagtgtggcttggagatgtatttcagtgttgacatggagatccttggcaaggtgacaagccacgacttgaaactcggtggatcaaacatccttgttaccgaggagaataaggacgagtatattggattgatgacagagtggcgctttagcaggggagtccaggaacagacaaaggcgtttttggacggattcaatgaagtggtccctttgcagtggctgcagtactttgatgagaaagagctggaagtaatgctctgcggtatgcaggaggtcgatttggccgattggcagcgtaacacagtttacaggcactacactagaaacagtaaacagatcatttggttctggcaatttgtcaaagagacagacaacgaagtccgaatgcgcttactccagtttgttactggcacatgcagactgccgctgggggggttcgctgaactgatgggctctaacggtccccaaaagttttgcatcgagaaagttggtaaggatacttggctgcccagaagccatacctgctttaacagactcgacttgcctccctataaatcatatgaacagctgaaggaaaagctgttgttcgctatcgaagagacagaaggcttcggtcaggagtag

SEQ ID NO: 270567 - DNA, 2769 bp, Artificial Sequence
  derived and/or modified sequence
atggccaccgccagcccccggagcgacaccagcaacaaccacagcgggcgattgcagctccaggttactgtgtcatccgctaaacttaagcggaagaagaattggttcggtacagccatctacaccgaagtggtggtggatggagaaatcactaagacggcaaagtcaagcagttcttccaatcctaaatgggacgagcagctgacggtaaatgtgacgcctcaaaccaccttggagttccaggtatggtcgcatcgcactttaaaggcggatgcactgctaggaaaggctaccatagacctgaaacaggcactgttgattcataatcgcaaactcgagagagtgaaagaacagctcaagctgagcctcgagaacaagaatggcatcgcccagactggcgagctgactgtggtgctagatggcctcgttatcgagcaagagaatatcacgaattgtagctctagtcccacaattgaaatccaggaaaatggagacgccctgcatgaaaacggagagcccagcgcccggaccacagcaagactagctgtggagggcaccaacggcatagataatcatgttcctacttccacactcgtccaaaacagctgttgctcatatgtcgtgaatggcgataatactccaagttctccttcccaggtcgcggctaggcccaaaaatacacctgcccctaaaccactggcatctgagccagctgatgacaccgtgaatggtgagagctcgtctttcgcacctacagacaatgctagtgtcacgggtactccagtcgtctctgaagagaacgctttgagtcctaattgtacctccaccaccgtagaggatcctccggttcaggaaatattgacttcttctgagaacaacgagtgcatccctagtacctcagccgaactggagagcgaagccaggtccattctggaacccgacacttcaaactccaggagttcatctgcgttcgaggcagctaaaagccgtcagcctgacggttgtatggaccccgtgcgtcaacagtctggaaacgcaaacactgagactctcccctccggctgggaacagcgcaaagacccgcatggtcggacatattacgtcgatcacaatacgcggactaccacatgggagcgccctcagcctctgcctcctggctgggagcggagggttgatgatcgcagacgagtatattacgtcgaccataacactcgaaccactacctggcagcgtcccacaatggagtctgttcgtaacttcgaacaatggcagagtcaacgtaatcagctgcagggcgccatgcagcaattcaaccagagatacctctattccgcttccatgctggccgcagaaaatgatccgtatggccctctccctccaggctgggaaaagcgcgtggattctactgatagagtttattttgtcaatcacaataccaagacgacgcagtgggaggatccacgtacccagggactgcagaatgaagaacccctgcccgagggttgggagattcggtacacaagggaaggtgtccgctatttcgtggaccacaacacccggaccactacgttcaaagatcctagaaatggcaagtcttctgtgactaaaggcggcccacagatcgcttatgagcgggggttcaggtggaaactcgctcatttccgctatctatgtcaatcgaatgcactcccttctcacgtaaagattaacgtgtctcgccagaccctgttcgaggacagcttccagcagattatggccctcaagccgtacgacctcaggcggaggctgtacgtgatctttcggggcgaagaagggttggactacggcgggctcgcaagagagtggttctttctgctaagccacgaggtgcttaatcccatgtattgcctgtttgaatacgccggcaagaataattactgccttcaaataaaccccgccagcaccatcaatcccgatcacctcagttatttctgtttcattgggaggtttatagcaatggccttgtttcacggcaagtttattgatacaggtttctcattgccattttacaaacgcatgttaagtaagaagctgacgatcaaggatctggaatcaatcgatactgagttttataattctcttatttggataagggataacaatattgaagaatgtggactagagatgtatttcagcgtcgatatggaaatcctcggcaaggtcactagccatgatttgaagctggggggatccaacattctcgtcaccgaagagaataaggacgaatacattgggctgatgactgaatggaggtttagccggggcgttcaggaacaaaccaaggccttcctggatggtttcaatgaagtggtgccactccagtggctccagtattttgatgagaaggagctggaagttatgctctgcggtatgcaagaggtggacctggcggactggcagcgcaacaccgtgtataggcattatacacggaacagtaagcaaatcatctggttctggcagttcgtcaaagagacagacaacgaagtgagaatgcggctcttgcaattcgtgactgggacatgccggttgcccctcgggggctttgccgagctgatgggcagcaacggcccccagaagttctgcatcgaaaaggttggcaaggatacatggctgcccagaagccacacctgttttaatcggctggatctccccccttataaatcttacgagcaactgaaggaaaaactcctgttcgctattgaagagaccgaaggctttggtcaggaatag

SEQ ID NO: 270568 - DNA, 2769 bp, Artificial Sequence
  derived and/or modified sequence
atggctaccgcctccccacgatccgataccagcaacaatcatagcggcaggttgcagctgcaggtaacggtgtctagtgccaagctcaaacgcaagaaaaattggttcggaaccgccatctatactgaggtcgtcgtggacggggaaatcacaaaaactgcaaagtcttcctccagtagcaacccaaaatgggatgaacagctcacagtcaatgtaacaccacagactaccctggagtttcaggtgtggtctcatagaacactgaaggcagacgctcttctgggcaaggcaacgattgacctgaaacaggcactgttgattcataatcgcaaactggagagggtgaaggagcagctaaagttgtcattagagaataagaacggtattgcccaaactggcgaactaactgtcgttctggatgggttggtgatcgaacaggagaatatcactaattgttcttcctcgcctactatcgagatccaggaaaatggcgacgccctacacgagaacggagagccaagtgcaagaactacagccaggctcgccgtagagggcaccaatggtatcgataaccacgtacctaccagtaccctggtccaaaattcttgttgcagttatgtcgttaatggagataatacaccaagtagcccttcccaagtggcggcacgtcccaagaacacccccgctccgaaaccattagcatctgaacccgctgatgacacagtgaacggggagtcttcatcatttgccccaactgataatgcctccgtaaccggaactcccgtcgtgagtgaagaaaatgcactgtctcccaattgtactagcaccacggttgaagaccctcctgtccaagaaatccttacatcttcggagaataacgagtgtattccctccacaagcgccgagctggaatccgaagctcggtcaattcttgagcctgatacctccaattctagatcatccagtgctttcgaggctgccaagtcaagacagccagacgggtgtatggaccctgtcagacagcagtcaggtaacgccaatacagagaccttgccttcaggatgggaacagcgaaaggacccgcacggacggacatattacgttgatcacaatactcgaaccaccacttgggagcggccacaacctctcccacccggatgggagagacgcgtggacgatcgtaggagggtatactatgttgatcacaacacaaggaccacaacctggcagcgtccaactatggaaagtgtccggaacttcgaacagtggcaatctcaaagaaaccagctccagggcgcaatgcagcagtttaatcagaggtatctctattctgccagtatgctggccgctgaaaatgacccatatggcccactgccgcctggatgggaaaaacgcgtggacagtactgatcgagtctatttcgttaaccacaatacgaagacaacacaatgggaggaccctagaactcagggattgcagaacgaggagccactgcctgaggggtgggagatacgatatactagggaaggagtaagatacttcgtggaccacaatactagaaccactaccttcaaggaccctcggaacgggaagtccagcgtcacaaaggggggacctcaaatcgcctatgagcggggtttcagatggaagttggcccacttccgctatctgtgtcagtctaacgccttgccatcccacgttaaaatcaacgtctctagacagacgctgttcgaggattctttccagcagattatggctctgaagccctacgatttaagaaggcgcctttacgttatttttcggggagaggaaggcctcgattatggcggtctggcaagagagtggttcttccttctcagccatgaagtgctaaatccaatgtattgtctttttgagtatgccggaaagaacaactattgcctccagattaatcctgctagtacgatcaatcctgatcacctgagttacttttgtttcattggcagatttatcgcgatggccctcttccacggcaagtttatagatactgggttctctctgccattctataagcggatgctgtctaagaagttgaccatcaaggacctcgagagtatcgacacagaattctataatagcctgatttggattagggacaacaacattgaggagtgcgggctggagatgtattttagtgtcgatatggagatcctcgggaaagtgacttcccacgatctcaaactagggggtagcaacatcctggtgacagaagaaaataaagacgaatacattggcctgatgaccgagtggaggttttctagaggggttcaggaacagacgaaggcattcttagacggcttcaacgaggtggttccactacagtggcttcagtattttgatgagaaggagctggaggtgatgctgtgcggtatgcaggaggtggaccttgcagattggcagcgaaataccgtgtaccggcactatacacggaattctaagcagattatatggttctggcaattcgtcaaggagaccgataacgaagtgcgcatgaggttgttgcagttcgtaaccggaacttgccggctccctctggggggatttgctgaattaatgggctccaatggtccccaaaaattttgtattgaaaaggtgggaaaagacacatggctgcctcgatctcacacctgctttaacaggctggatttaccaccgtacaaatcgtacgaacagctcaaggaaaaacttctattcgccatcgaggagacagaaggcttcgggcaggagtag

SEQ ID NO: 270569 - DNA, 2769 bp, Artificial Sequence
  derived and/or modified sequence
atggccaccgccagtcccaggtctgacacgtctaacaaccattctgggagactccagttgcaagtgaccgtttcaagtgccaaactcaaaaggaagaagaactggttcgggaccgcaatctataccgaggtagtggtcgatggtgaaattactaaaactgccaaatcatccagctcttccaacccgaaatgggatgaacagctgactgtcaacgtgacccctcagaccacactggaattccaagtgtggagccatagaactctgaaggccgacgcactgctggggaaggcaactatcgacctgaaacaggcattattaatccacaacaggaagctggagagggtgaaagaacagttaaagttgtcgctggagaacaagaatgggatcgcccagaccggagaactgaccgtcgtgctcgatggactggtgatagaacaggaaaatatcaccaactgctccagctcccctactattgagattcaggagaacggcgacgcactgcatgaaaacggggagccgagtgcaagaacgactgctcgccttgctgtggaaggaaccaacgggattgacaaccacgtccccactagtacactggttcagaacagttgctgttcatacgtagtgaacggcgacaatactccttcttcccccagccaggtggcggcaaggcccaagaacactcctgcccctaaacctcttgcttcagaacctgccgatgacacagttaacggcgaatcatcatccttcgcgcctaccgataatgcttccgtcactggcacacctgtcgtttccgaggaaaacgcacttagtcctaactgcaccagcaccaccgtagaggatccaccagtgcaggaaattctaacgtcctcagagaacaatgaatgtattccaagtacctcagcggaactggaatcagaagccagaagtattctggagccagatacgtctaattcacgatcgagctctgcatttgaggcggctaaaagtaggcagcctgatggatgcatggatcccgtgaggcagcagtctggaaatgcgaatacagagaccctgccctccggctgggaacagagaaaggacccacacggccgtacctattacgttgatcacaacactagaactactacttgggaaagaccacaaccactgcctccgggatgggaacggagggtggatgatcgcagacgcgtgtactacgtggatcacaacaccagaaccactacgtggcagcggcctaccatggaaagcgttaggaacttcgaacagtggcagtctcaacgcaatcagttgcagggggctatgcagcagttcaatcaacggtacctgtactctgcttctatgctggctgcagagaacgatccatatggtcccctgcccccaggatgggagaagcgagtggacagtacggatcgcgtttattttgttaaccacaacacaaaaaccactcagtgggaggacccaaggacccaaggtttacagaacgaagaacctcttcccgagggatgggaaatccgatatacacgcgagggggttagatatttcgtggatcacaatacgagaactactacgtttaaggatcctagaaatggcaagagctccgtcaccaaggggggaccccaaatcgcctacgaacggggtttcagatggaaattagcccactttcgatacctgtgccagagcaacgctctgccatcacacgtcaaaattaacgtctcccgccagacactcttcgaggattcctttcagcagattatggcgttgaagccatatgatctccggagaaggctgtatgtgatttttcgcggagaggaaggtctcgattacggcggactcgcgagggaatggttcttcttgctctcacatgaggttttaaaccctatgtactgcttgtttgaatacgccggaaagaacaattactgcttacagattaatcccgcttccacgatcaaccccgatcatttgtcatacttttgtttcattggacgctttattgctatggccctatttcatggcaaatttatcgacaccggcttttctctccccttttataaacgtatgctcagtaagaaactgactataaaggatctcgagtccatcgatactgaattttacaactccctcatctggataagagataataatatcgaggagtgtggcttggaaatgtacttctccgtagacatggaaatcctgggcaaggttacgtctcacgacctgaaactggggggatcaaatatcctggtgactgaagaaaacaaggacgaatatattggtctgatgaccgaatggcgcttttctcggggagttcaagagcaaacaaaagcatttctggatggtttcaacgaagtggttcccctccagtggctgcagtactttgatgaaaaggagctcgaggtgatgctttgtggaatgcaagaagttgacttggcagactggcagagaaacacagtgtaccggcactatacgaggaactcaaagcagattatctggttctggcagtttgttaaggaaactgacaatgaagtgcggatgaggttgcttcagtttgttacaggaacgtgcaggctccccctggggggattcgccgaactaatgggctccaatggccctcagaagttctgtattgaaaaagtcggtaaggacacttggctgcctcgcagtcacacatgcttcaataggctggatctgcctccctataaatcctacgagcagttaaaggagaagctgctgttcgcaattgaagagactgagggtttcggtcaggagtag

SEQ ID NO: 270570 - DNA, 3362 bp, Artificial Sequence
  derived and/or modified sequence
attttgggacatggccactgcttcaccaaggtctgatactagtaataaccacagtggaaggttgcagttacaggtaactgtttctagtgccaaacttaaaagaaaaaagaactggttcggaacagcaatatatacagaagtagttgtagatggagaaattacgaaaacagcaaaatccagtagttcttctaatccaaaatgggatgaacagctaactgtaaatgttacgccacagactacattggaatttcaagtttggagccatcgcactttaaaagcagatgctttattaggaaaagcaacgatagatttgaaacaagctctgttgatacacaatagaaaattggaaagagtgaaagaacaattaaaactttccttggaaaacaagaatggcatagcacaaactggtgaattgacagttgtgcttgatggattggtgattgagcaagaaaatataacaaactgcagctcatctccaaccatagaaatacaggaaaatggtgatgccttacatgaaaatggagagccttcagcaaggacaactgccaggttggctgttgaaggcacgaatggaatagataatcatgtacctacaagcactctagtccaaaactcatgctgctcgtatgtagttaatggagacaacacaccttcatctccgtctcaggttgctgccagacccaaaaatacaccagctccaaaaccactcgcatctgagcctgccgatgacactgttaatggagaatcatcctcatttgcaccaactgataatgcgtctgtcacgggtactccagtagtgtctgaagaaaatgccttgtctccaaattgcactagtactactgttgaagatcctccagttcaagaaatactgacttcctcagaaaacaatgaatgtattccttctaccagtgcagaattggaatctgaagctagaagtatattagagcctgacacctctaattctagaagtagttctgcttttgaagcagccaaatcaagacagccagatgggtgtatggatcctgtacggcagcagtctgggaatgccaacacagaaaccttgccatcagggtgggaacaaagaaaagatcctcatggtagaacctattatgtggatcataatactcgaactaccacatgggagagaccacaacctttacctccaggttgggaaagaagagttgatgatcgtagaagagtttattatgtggatcataacaccagaacaacaacgtggcagcggcctaccatggaatctgtccgaaattttgaacagtggcaatctcagcggaaccaattgcagggagctatgcaacagtttaaccaacgatacctctattcggcttcaatgttagctgcagaaaatgacccttatggacctttgccaccaggctgggaaaaaagagtggattcaacagacagggtttactttgtgaatcataacacaaaaacaacccagtgggaagatccaagaactcaaggcttacagaatgaagaacccctgccagaaggctgggaaattagatatactcgtgaaggtgtaaggtactttgttgatcataacacaagaacaacaacattcaaagatcctcgcaatgggaagtcatctgtaactaaaggtggtccacaaattgcttatgaacgcggctttaggtggaagcttgctcacttccgttatttgtgccagtctaatgcactacctagtcatgtaaagatcaatgtgtcccggcagacattgtttgaagattccttccaacagattatggcattaaaaccctatgacttgaggaggcgcttatatgtaatatttagaggagaagaaggacttgattatggtggcctagcgagagaatggtttttcttgctttcacatgaagttttgaacccaatgtattgcttatttgagtatgcgggcaagaacaactattgtctgcagataaatccagcatcaaccattaatccagaccatctttcatacttctgtttcattggtcgttttattgccatggcactatttcatggaaagtttatcgatactggtttctctttaccattctacaagcgtatgttaagtaaaaaacttactattaaggatttggaatctattgatactgaattttataactcccttatctggataagagataacaacattgaagaatgtggcttagaaatgtacttttctgttgacatggagattttgggaaaagttacttcacatgacctgaagttgggaggttccaatattctggtgactgaggagaacaaagatgaatatattggtttaatgacagaatggcgtttttctcgaggagtacaagaacagaccaaagctttccttgatggttttaatgaagttgttcctcttcagtggctacagtacttcgatgaaaaagaattagaggttatgttgtgtggcatgcaggaggttgacttggcagattggcagagaaatactgtttatcgacattatacaagaaacagcaagcaaatcatttggttttggcagtttgtgaaagagacagacaatgaagtaagaatgcgactattgcagttcgtcactggaacctgccgtttacctctaggaggatttgctgagctcatgggaagtaatgggcctcaaaagttttgcattgaaaaagttggcaaagacacttggttaccaagaagccatacatgttttaatcgcttggatctaccaccatataagagttatgaacaactaaaggaaaaacttctttttgcaatagaagagacagagggatttggacaagaatgaatgtggcttcttattttggaggagctcttgcatttaaataccccagccaagaaaaattgcacagatagtgtatataagctgttcattctgtacagtgaattttccgaacctctcaaagtatgttttccgttcttccacagaaatatgcaaaacagttcatccttttctactttatttattgttcccttgaaatgactgaccaggaaaaagatcatccttaaattttgaagcaagtgagagactttattaaaaatacatatatatctatataaacatatatgatagtggctctagttttatagagctccaagtgtattaaacatgacagccattcattcataaagatctggatttgctttaccttgttaatattatctaggggaaaaagtgcaaattgctccatgttcttctctcccttatgtaacatctcctgagggtgtttagttgcatggctgttcagaaaggtattaagggcttaggccaaatcttactttgagtatgttaaaaaaaaaaaaatgctgctggcttttctgaagacaggtgcttgaacttgtcagtttgttttaaataaatacaatagttg

SEQ ID NO: 270571 - DNA, 4686 bp, Artificial Sequence
  derived and/or modified sequence
ggcgagctccgcgtgcgggttccgagtggctgctggcggcctgggctgccggggccgacgcctgggtggctgctgccgccgcgcctgctgcgagatggcgatcttgggcgcggaagggtgagggcgcccgccgcaggaggaggtgccgctgccgtggccgcccggctgccgggagccgacagcttcgcgccggggttgtctcctcacagactatgagctccttgaaagagggaatcgtgtcttactcatctttgtatccccagtgtctagcagttcctgatacatagttttagctgaattttgggacatggccactgcttcaccaaggtctgatactagtaataaccacagtggaaggttgcagttacaggtaactgtttctagtgccaaacttaaaagaaaaaagaactggttcggaacagcaatatatacagaagtagttgtagatggagaaattacgaaaacagcaaaatccagtagttcttctaatccaaaatgggatgaacagctaactgtaaatgttacgccacagactacattggaatttcaagtttggagccatcgcactttaaaagcagatgctttattaggaaaagcaacgatagatttgaaacaagctctgttgatacacaatagaaaattggaaagagtgaaagaacaattaaaactttccttggaaaacaagaatggcatagcacaaactggtgaattgacagttgtgcttgatggattggtgattgagcaagaaaatataacaaactgcagctcatctccaaccatagaaatacaggaaaatggtgatgccttacatgaaaatggagagccttcagcaaggacaactgccaggttggctgttgaaggcacgaatggaatagataatcatgtacctacaagcactctagtccaaaactcatgctgctcgtatgtagttaatggagacaacacaccttcatctccgtctcaggttgctgccagacccaaaaatacaccagctccaaaaccactcgcatctgagcctgccgatgacactgttaatggagaatcatcctcatttgcaccaactgataatgcgtctgtcacgggtactccagtagtgtctgaagaaaatgccttgtctccaaattgcactagtactactgttgaagatcctccagttcaagaaatactgacttcctcagaaaacaatgaatgtattccttctaccagtgcagaattggaatctgaagctagaagtatattagagcctgacacctctaattctagaagtagttctgcttttgaagcagccaaatcaagacagccagatgggtgtatggatcctgtacggcagcagtctgggaatgccaacacagaaaccttgccatcagggtgggaacaaagaaaagatcctcatggtagaacctattatgtggatcataatactcgaactaccacatgggagagaccacaacctttacctccaggttgggaaagaagagttgatgatcgtagaagagtttattatgtggatcataacaccagaacaacaacgtggcagcggcctaccatggaatctgtccgaaattttgaacagtggcaatctcagcggaaccaattgcagggagctatgcaacagtttaaccaacgatacctctattcggcttcaatgttagctgcagaaaatgacccttatggacctttgccaccaggctgggaaaaaagagtggattcaacagacagggtttactttgtgaatcataacacaaaaacaacccagtgggaagatccaagaactcaaggcttacagaatgaagaacccctgccagaaggctgggaaattagatatactcgtgaaggtgtaaggtactttgttgatcataacacaagaacaacaacattcaaagatcctcgcaatgggaagtcatctgtaactaaaggtggtccacaaattgcttatgaacgcggctttaggtggaagcttgctcacttccgttatttgtgccagtctaatgcactacctagtcatgtaaagatcaatgtgtcccggcagacattgtttgaagattccttccaacagattatggcattaaaaccctatgacttgaggaggcgcttatatgtaatatttagaggagaagaaggacttgattatggtggcctagcgagagaatggtttttcttgctttcacatgaagttttgaacccaatgtattgcttatttgagtatgcgggcaagaacaactattgtctgcagataaatccagcatcaaccattaatccagaccatctttcatacttctgtttcattggtcgttttattgccatggcactatttcatggaaagtttatcgatactggtttctctttaccattctacaagcgtatgttaagtaaaaaacttactattaaggatttggaatctattgatactgaattttataactcccttatctggataagagataacaacattgaagaatgtggcttagaaatgtacttttctgttgacatggagattttgggaaaagttacttcacatgacctgaagttgggaggttccaatattctggtgactgaggagaacaaagatgaatatattggtttaatgacagaatggcgtttttctcgaggagtacaagaacagaccaaagctttccttgatggttttaatgaagttgttcctcttcagtggctacagtacttcgatgaaaaagaattagaggttatgttgtgtggcatgcaggaggttgacttggcagattggcagagaaatactgtttatcgacattatacaagaaacagcaagcaaatcatttggttttggcagtttgtgaaagagacagacaatgaagtaagaatgcgactattgcagttcgtcactggaacctgccgtttacctctaggaggatttgctgagctcatgggaagtaatgggcctcaaaagttttgcattgaaaaagttggcaaagacacttggttaccaagaagccatacatgttttaatcgcttggatctaccaccatataagagttatgaacaactaaaggaaaaacttctttttgcaatagaagagacagagggatttggacaagaatgaatgtggcttcttattttggaggagctcttgcatttaaataccccagccaagaaaaattgcacagatagtgtatataagctgttcattctgtacagtgaattttccgaacctctcaaagtatgttttccgttcttccacagaaatatgcaaaacagttcatccttttctactttatttattgttcccttgaaatgactgaccaggaaaaagatcatccttaaattttgaagcaagtgagagactttattaaaaatacatatatatctatataaacatatatgatagtggctctagttttatagagctccaagtgtattaaacatgacagccattcattcataaagatctggatttgctttaccttgttaatattatctaggggaaaaagtgcaaattgctccatgttcttctctcccttatgtaacatctcctgagggtgtttagttgcatggctgttcagaaaggtattaagggcttaggccaaatcttactttgagtatgttaaaaaaaaaaaaatgctgctggcttttctgaagacaggtgcttgaacttgtcagtttgttttaaataaatacaatagttgaaaatttttctctgttacatcagtaatattgttaaagtaatggatagaaccataacttacacatgaaagtcatatactagatccaatactatttagtttattatcgaaattggaaggattcattgagcagcatagaagtttgtttacatgttactttgagatgctaggtatttgtggaattaaaaagaatcaggctcttttgtactttgtttttaaatctgtgatgcttttcaaatttaattcataataaattgatgcaatttcatacttaggaacatacaaaaggtaatgtaaactctgccacttttttgtgttcaaaattttggtttttatgaagccagatggattgaagagttacataagcatttgaatgctctaatataaggctaatgattttctgttagtgtttgaatatcttcattcctctcaaattcataacagttctatttaactgaattaaataaccatatgaaaaatcttttgggtctccccctttttacacagataattatttttgtcataacactttttaattgtttttcatcataggggcctttgctgaactacaaaaatgtgtaacaaattaaaatctgatgtgaatgatattaatgctacttttagcaaactgggcttcctaatacaaaattttaaatttccatttgtatcatgcttttaatatgcactgtaaatttcattaacttaaacattttttaatagccatggaactgacttcttaaaatctgttgcctataaatatttcactgctaagtacatacagaaaaacagtaattattgttttgccaaaattttatttttctacatattgagagtgtgttctccattttattcagaattcatagtaaagacgaaagaaaggcagagatctgcttggttgaatagactccttttccaaatccttattatgaacactctggtaattttcaagcctaaagaattaaaaaaaaaattctaatgtatgtgacaggttatgtgatagagggaaactggccttcaaaaaggactgcgt

SEQ ID NO: 270572 - protein, 792 aa, Artificial Sequence
  derived and/or modified sequence
MATASPRSDTSNNHSGRLQLQVTVSSAKLKRKKNWFGTAIYTEVVVDGEITKTAKSSSSSNPKWDEQLTVNVTPQTTLEFQVWSHRTLKADALLGKATIDLKQALLIHNRKFNGESSSFAPTDNASVTGTPVVSEENALSPNCTSTTVEDPPVQEILTSSENNECIPSTSAELESEARSILEPDTSNSRSSSAFEAAKSRQPDGCMDPVRQQSGNANTETLPSGWEQRKDPHGRTYYVDHNTRTTTWERPQPLPPGWERRVDDRRRVYYVDHNTRTTTWQRPTMESVRNFEQWQSQRNQLQGAMQQFNQRYLYSASMLAAENDPYGPLPPGWEKRVDSTDRVYFVNHNTKTTQWEDPRTQGLQNEEPLPEGWEIRYTREGVRYFVDHNTRTTTFKDPRNGKSSVTKGGPQIAYERGFRWKLAHFRYLCQSNALPSHVKINVSRQTLFEDSFQQIMALKPYDLRRRLYVIFRGEEGLDYGGLAREWFFLLSHEVLNPMYCLFEYAGKNNYCLQINPASTINPDHLSYFCFIGRFIAMALFHGKFIDTGFSLPFYKRMLSKKLTIKDLESIDTEFYNSLIWIRDNNIEECGLEMYFSVDMEILGKVTSHDLKLGGSNILVTEENKDEYIGLMTEWRFSRGVQEQTKAFLDGFNEVVPLQWLQYFDEKELEVMLCGMQEVDLADWQRNTVYRHYTRNSKQIIWFWQFVKETDNEVRMRLLQFVTGTCRLPLGGFAELMGSNGPQKFCIEKVGKDTWLPRSHTCFNRLDLPPYKSYEQLKEKLLFAIEETEGFGQE

SEQ ID NO: 270573 - DNA, 2379 bp, Artificial Sequence
  derived and/or modified sequence
atggccaccgccagccccagaagcgacaccagcaacaaccacagcggcagactgcagctgcaggtgaccgtgagcagcgccaagctgaagagaaagaagaactggttcggcaccgccatctacaccgaggtggtggtggacggcgagatcaccaagaccgccaagagcagcagcagcagcaaccccaagtgggacgagcagctgaccgtgaacgtgaccccccagaccaccctggagttccaggtgtggagccacagaaccctgaaggccgacgccctgctgggcaaggccaccatcgacctgaagcaggccctgctgatccacaacagaaagttcaacggcgagagcagcagcttcgcccccaccgacaacgccagcgtgaccggcacccccgtggtgagcgaggagaacgccctgagccccaactgcaccagcaccaccgtggaggacccccccgtgcaggagatcctgaccagcagcgagaacaacgagtgcatccccagcaccagcgccgagctggagagcgaggccagaagcatcctggagcccgacaccagcaacagcagaagcagcagcgccttcgaggccgccaagagcagacagcccgacggctgcatggaccccgtgagacagcagagcggcaacgccaacaccgagaccctgcccagcggctgggagcagagaaaggacccccacggcagaacctactacgtggaccacaacaccagaaccaccacctgggagagaccccagcccctgccccccggctgggagagaagagtggacgacagaagaagagtgtactacgtggaccacaacaccagaaccaccacctggcagagacccaccatggagagcgtgagaaacttcgagcagtggcagagccagagaaaccagctgcagggcgccatgcagcagttcaaccagagatacctgtacagcgccagcatgctggccgccgagaacgacccctacggccccctgccccccggctgggagaagagagtggacagcaccgacagagtgtacttcgtgaaccacaacaccaagaccacccagtgggaggaccccagaacccagggcctgcagaacgaggagcccctgcccgagggctgggagatcagatacaccagagagggcgtgagatacttcgtggaccacaacaccagaaccaccaccttcaaggaccccagaaacggcaagagcagcgtgaccaagggcggcccccagatcgcctacgagagaggcttcagatggaagctggcccacttcagatacctgtgccagagcaacgccctgcccagccacgtgaagatcaacgtgagcagacagaccctgttcgaggacagcttccagcagatcatggccctgaagccctacgacctgagaagaagactgtacgtgatcttcagaggcgaggagggcctggactacggcggcctggccagagagtggttcttcctgctgagccacgaggtgctgaaccccatgtactgcctgttcgagtacgccggcaagaacaactactgcctgcagatcaaccccgccagcaccatcaaccccgaccacctgagctacttctgcttcatcggcagattcatcgccatggccctgttccacggcaagttcatcgacaccggcttcagcctgcccttctacaagagaatgctgagcaagaagctgaccatcaaggacctggagagcatcgacaccgagttctacaacagcctgatctggatcagagacaacaacatcgaggagtgcggcctggagatgtacttcagcgtggacatggagatcctgggcaaggtgaccagccacgacctgaagctgggcggcagcaacatcctggtgaccgaggagaacaaggacgagtacatcggcctgatgaccgagtggagattcagcagaggcgtgcaggagcagaccaaggccttcctggacggcttcaacgaggtggtgcccctgcagtggctgcagtacttcgacgagaaggagctggaggtgatgctgtgcggcatgcaggaggtggacctggccgactggcagagaaacaccgtgtacagacactacaccagaaacagcaagcagatcatctggttctggcagttcgtgaaggagaccgacaacgaggtgagaatgagactgctgcagttcgtgaccggcacctgcagactgcccctgggcggcttcgccgagctgatgggcagcaacggcccccagaagttctgcatcgagaaggtgggcaaggacacctggctgcccagaagccacacctgcttcaacagactggacctgcccccctacaagagctacgagcagctgaaggagaagctgctgttcgccatcgaggagaccgagggcttcggccaggagtag

SEQ ID NO: 270574 - DNA, 2115 bp, Artificial Sequence
  derived and/or modified sequence
atggccaccgccagccccagaagcgacaccagcaacaaccacagcggcagactgcagctgcaggtgaccgtgaacggcgagagcagcagcttcgcccccaccgacaacgccagcgtgaccggcacccccgtggtgagcgaggagaacgccctgagccccaactgcaccagcaccaccgtggaggacccccccgtgcaggagatcctgaccagcagcgagaacaacgagtgcatccccagcaccagcgccgagctggagagcgaggccagaagcatcctggagcccgacaccagcaacagcagaagcagcagcgccttcgaggccgccaagagcagacagcccgacggctgcatggaccccgtgagacagcagagcggcaacgccaacaccgagaccctgcccagcggctgggagcagagaaaggacccccacggcagaacctactacgtggaccacaacaccagaaccaccacctgggagagaccccagcccctgccccccggctgggagagaagagtggacgacagaagaagagtgtactacgtggaccacaacaccagaaccaccacctggcagagacccaccatggagagcgtgagaaacttcgagcagtggcagagccagagaaaccagctgcagggcgccatgcagcagttcaaccagagatacctgtacagcgccagcatgctggccgccgagaacgacccctacggccccctgccccccggctgggagaagagagtggacagcaccgacagagtgtacttcgtgaaccacaacaccaagaccacccagtgggaggaccccagaacccagggcctgcagaacgaggagcccctgcccgagggctgggagatcagatacaccagagagggcgtgagatacttcgtggaccacaacaccagaaccaccaccttcaaggaccccagaaacggcaagagcagcgtgaccaagggcggcccccagatcgcctacgagagaggcttcagatggaagctggcccacttcagatacctgtgccagagcaacgccctgcccagccacgtgaagatcaacgtgagcagacagaccctgttcgaggacagcttccagcagatcatggccctgaagccctacgacctgagaagaagactgtacgtgatcttcagaggcgaggagggcctggactacggcggcctggccagagagtggttcttcctgctgagccacgaggtgctgaaccccatgtactgcctgttcgagtacgccggcaagaacaactactgcctgcagatcaaccccgccagcaccatcaaccccgaccacctgagctacttctgcttcatcggcagattcatcgccatggccctgttccacggcaagttcatcgacaccggcttcagcctgcccttctacaagagaatgctgagcaagaagctgaccatcaaggacctggagagcatcgacaccgagttctacaacagcctgatctggatcagagacaacaacatcgaggagtgcggcctggagatgtacttcagcgtggacatggagatcctgggcaaggtgaccagccacgacctgaagctgggcggcagcaacatcctggtgaccgaggagaacaaggacgagtacatcggcctgatgaccgagtggagattcagcagaggcgtgcaggagcagaccaaggccttcctggacggcttcaacgaggtggtgcccctgcagtggctgcagtacttcgacgagaaggagctggaggtgatgctgtgcggcatgcaggaggtggacctggccgactggcagagaaacaccgtgtacagacactacaccagaaacagcaagcagatcatctggttctggcagttcgtgaaggagaccgacaacgaggtgagaatgagactgctgcagttcgtgaccggcacctgcagactgcccctgggcggcttcgccgagctgatgggcagcaacggcccccagaagttctgcatcgagaaggtgggcaaggacacctggctgcccagaagccacacctgcttcaacagactggacctgcccccctacaagagctacgagcagctgaaggagaagctgctgttcgccatcgaggagaccgagggcttcggccaggagtag

SEQ ID NO: 270575 - DNA, 2379 bp, Artificial Sequence
  derived and/or modified sequence
atggccaccgctagtccacggagcgacacctcaaataaccacagcgggcggcttcaattgcaggttaccgtttctagcgcaaagctgaaacgcaaaaaaaactggttcggcacagctatatataccgaggttgtggtcgacggtgagataactaagaccgcaaagtctagcagttccagtaaccccaaatgggatgaacagctgacagtcaacgtgactccccagaccaccctagagtttcaagtatggagccacaggacgctcaaagctgatgccctgttgggaaaggctactattgacttgaaacaggcgttactgattcataaccgaaagttcaatggggagtcttcatctttcgctccaaccgacaacgcctccgtaactggaaccccggtcgtgagtgaggagaacgccctgtctcccaactgtacttcaacaacggtcgaggatcctcccgttcaagagattttgaccagttcggagaataatgaatgcatcccttcaacctccgccgagctcgagtccgaggccagaagtatccttgagccggatacatcaaactcaagaagttcgtcagctttcgaagccgccaagtcccggcagccagatggatgtatggaccccgtcagacagcaatctggcaatgcgaacacggagacacttccctcaggctgggagcagcgaaaagacccccatggtcggacttattatgttgatcataataccaggacgacgacatgggaacgccctcagccattgccacccgggtgggagagaagggtagatgaccggcggagagtgtattatgttgatcacaatactagaactactacatggcaaagaccaacaatggagagcgtcagaaattttgaacaatggcagtcccaacgcaatcagcttcagggggccatgcagcagttcaaccagcgctacctgtactcggcctcgatgctggcagccgagaatgatccttatggtcccctgccacctggctgggagaagcgggtggattccacagatagggtgtattttgttaaccacaatacaaaaaccacacagtgggaggatcctaggacacagggcctgcaaaacgaagagccactccctgaaggctgggagatcagatacacccgagaaggcgtgcggtatttcgtagatcacaacactagaactaccactttcaaagaccccaggaacggaaagtcttcagtcactaagggggggcctcaaattgcctacgagagggggtttcggtggaagctggcccattttaggtatctgtgtcaatctaatgctctgccctctcatgtaaaaataaatgtcagtcggcagactttgtttgaggacagctttcagcaaataatggcactgaagccgtacgatctccgccgtaggctgtatgtgattttccgcggcgaagagggcttggactatgggggactggcacgggagtggttcttcctcttatctcatgaggtacttaacccaatgtactgtctttttgagtatgccggcaagaataactactgcttgcaaatcaacccagctagcaccataaatccagatcatctaagttatttctgctttatcggcaggttcatcgccatggccctgttccacgggaagttcatcgacaccgggttttccctccccttctataagagaatgctctccaaaaagctaactattaaagacttggagtcaatagacaccgaattctataattctctgatctggatccgggacaataacatcgaggaatgtggcctggagatgtacttttcagtggacatggaaattcttggtaaagtgaccagtcacgatttaaaactcggcgggtccaacattctggtcactgaagaaaacaaagacgaatacatcgggcttatgactgaatggcggttctctcgaggtgttcaggagcagaccaaggcctttcttgacggattcaatgaagtggtacctctgcagtggttgcagtatttcgacgaaaaagagctggaggtgatgctgtgtggcatgcaggaggtcgatctcgccgactggcagcgaaacactgtgtaccgacactatacaaggaacagcaagcagattatctggttttggcaattcgtgaaagaaacagacaacgaggttaggatgcggctgcttcagttcgtcacggggacctgcagactaccgctgggagggttcgcggagctgatgggttctaacggcccgcaaaaattttgcatcgagaaggttggaaaggacacctggctcccacgctctcacacctgttttaaccggctcgatctgcctccctacaagagctacgagcaactaaaggagaagctgctgttcgcaattgaggagacggaggggttcggtcaggaatag

SEQ ID NO: 270576 - DNA, 2115 bp, Artificial Sequence
  derived and/or modified sequence
atggctaccgcctcccctcgtagtgacacctctaacaatcattccggcagactgcagttacaggtaactgtgaacggggaaagttcaagctttgcccctaccgataacgcttctgtgaccggcactcccgtggttagtgaggagaacgccctgtccccgaactgtacgtcaaccactgtcgaggacccgcccgttcaggagatcctgacgtcctccgaaaataacgagtgcatcccaagtacgtccgctgagctggaatctgaggcccgcagcatcctggagcccgataccagcaactctagaagcagttccgccttcgaagcagcaaagagccgacaacctgatggctgcatggatccggttcgccagcagtcaggcaacgctaatactgagacgctgccctctggctgggaacagaggaaggatccacacgggcggacctattacgtcgaccacaataccagaactaccacctgggagaggcctcagccgctgcctcccggatgggagaggagagttgacgacagaagacgcgtatactacgtcgatcataacacacggaccactacatggcagcggccaacaatggagagtgtccgcaactttgaacaatggcagagccagcgcaaccaactgcagggtgctatgcagcagttcaaccagaggtatctttactcagcatctatgctcgcagctgaaaacgacccatatggacccctgcctccaggctgggaaaaaagggtggacagtacagatcgcgtgtactttgtaaatcacaataccaagacgacacagtgggaagacccgcggacacaagggctccagaatgaagagcctctgcccgagggctgggagattcggtatactcgggaaggcgtccgctatttcgtggatcataatacacgaactactacttttaaagacccccggaacggcaaatcttccgtgacaaaaggcggcccgcaaatagcctacgaacggggctttcgatggaagcttgcacatttccgctacctttgtcagagtaatgcgttgccgagccacgtcaaaattaacgtaagccgccagacactgtttgaggactctttccagcagatcatggccctgaagccttatgatttaaggcggcggctgtatgtaattttccggggcgaagaaggcctggattatggcgggcttgcacgggaatggttttttcttctttctcatgaggtgctaaatcctatgtactgccttttcgaatacgccggaaagaacaactactgtctccagatcaaccccgccagcacaattaacccagatcatctctcctacttctgctttatcggacggttcattgccatggcactcttccatggcaaattcatagataccggattcagcctgcctttttataaaaggatgctgtctaaaaagctcacgatcaaggacctagaatccattgataccgagttttacaattccctgatttggatcagagacaacaacattgaggagtgcggtttagaaatgtacttctcggtcgacatggagatccttggtaaggtgacaagtcatgatctgaagctcggggggagcaatattcttgtaactgaggagaacaaggacgagtacatcgggctcatgactgaatggcggtttagccgaggggtgcaggagcagactaaggctttcttagacgggttcaacgaagtcgtgccattgcagtggctccaatacttcgacgagaaagagttagaggtgatgctgtgcgggatgcaggaggtagaccttgcagactggcaaagaaacactgtttacagacattacacgagaaactccaagcagatcatatggttttggcagttcgtaaaagaaaccgataatgaagttaggatgaggctcctgcagtttgtgactggcacttgtagactgccgcttggaggcttcgctgaactcatgggatcaaacggcccacagaagttctgtatcgagaaagtgggcaaggatacgtggttgcctcgcagtcacacgtgtttcaatagactggacttaccgccctataagtcttacgagcagctcaaagagaagctgcttttcgccatcgaggagacggagggattcggacaggaatag

SEQ ID NO: 270577 - DNA, 2379 bp, Artificial Sequence
  derived and/or modified sequence
atggccacagccagccccaggagtgacaccagcaacaaccacagcggccgcctgcagctgcaggtgacagtgagcagcgccaagctgaagaggaagaagaactggtttggaacagccatctacacagaggtggtggtggatggagagatcaccaagacagccaagagcagcagcagcagcaaccccaagtgggatgagcagctgactgtgaatgtgaccccccagaccaccctggagttccaggtgtggagccacaggaccctgaaggcagatgccctgctgggcaaggccaccatcgacctgaagcaggccctgctgatccacaacaggaagttcaatggagagagcagcagctttgcccccacagacaatgcctctgtgacaggcacccctgtggtgtctgaggagaatgccctgagccccaactgcaccagcaccaccgtggaggacccccctgtgcaggagatcctgaccagcagtgaaaataatgaatgcatccccagcaccagcgctgagctggagagcgaggcccggagcatcctggagccagacaccagcaacagccgcagcagcagcgcctttgaggccgccaagagccggcagccagatggctgcatggaccctgtgcggcagcagagcggaaatgccaacacagagaccctgcccagcggctgggagcagaggaaggacccccacggccgcacctactacgtggaccacaacaccaggaccaccacctgggagcggccccagcccctgcccccaggctgggagaggagagtggatgacagaagaagagtgtactacgtggaccacaacaccaggaccaccacctggcagaggcccaccatggagagcgtgaggaactttgagcagtggcagagccagaggaaccagctgcagggcgccatgcagcagttcaaccagcgctacctgtacagcgcctccatgctggccgcagaaaatgacccctacggccccctgcccccaggctgggagaagagggtggacagcacagacagagtgtactttgtgaaccacaacaccaagaccacccagtgggaggaccccaggacccagggcctgcagaatgaggagcccctgcctgagggctgggagatccgctacacccgggagggcgtgcgctactttgtggaccacaacaccaggaccaccaccttcaaggaccccagaaatggcaagagctctgtgaccaagggcggcccccagatcgcctatgagcggggcttccgctggaagctggcccacttccgctacctgtgccagagcaatgccctgcccagccacgtgaagatcaacgtgtcccggcagaccctgtttgaggacagcttccagcagatcatggccctgaagccctatgacctgcggcggcggctgtatgtgatcttccggggggaggagggcctggactatggaggcctggcccgggagtggttcttcctgctgagccatgaggtgctgaaccccatgtactgcctgtttgaatatgctgggaagaacaactactgcctgcagatcaacccagccagcaccatcaacccagaccacctgagctacttctgcttcatcggccgcttcatcgccatggccctcttccacggcaagttcatcgacaccggcttcagcctgcccttctacaagaggatgctgagcaagaagctgaccatcaaggacctggagagcattgacacagagttctacaacagcctcatctggatccgggacaacaacattgaagaatgtggcctggagatgtacttctctgtggacatggagatcctgggcaaggtgaccagccatgacctgaagctgggcggcagcaacatcctggtgacagaggagaacaaggatgagtacatcggcctgatgacagagtggaggttcagccggggcgtgcaggagcagaccaaggccttcctggatggcttcaatgaggtggtgcccctgcagtggctgcagtactttgatgagaaggagctggaggtgatgctgtgtggcatgcaggaggtggacctggccgactggcagaggaacacagtgtaccgccactacaccaggaacagcaagcagatcatctggttctggcagtttgtgaaggagacagacaatgaggtgaggatgaggctgctgcagtttgtgacaggcacctgccgcctgcccctgggcggctttgctgagctgatgggcagcaatggcccccagaagttctgcatcgagaaggtgggcaaggacacctggctgcccaggagccacacctgcttcaaccggctggacctgcccccctacaagagctatgagcagctgaaggagaagctgctgtttgccatcgaggagacagagggcttcggccaggagtag

SEQ ID NO: 270578 - DNA, 2115 bp, Artificial Sequence
  derived and/or modified sequence
atggccacagccagccccaggagtgacaccagcaacaaccacagcggccgcctgcagctgcaggtgacagtgaatggagagagcagcagctttgcccccacagacaatgcctctgtgacaggcacccctgtggtgtctgaggagaatgccctgagccccaactgcaccagcaccaccgtggaggacccccctgtgcaggagatcctgaccagcagtgaaaataatgaatgcatccccagcaccagcgctgagctggagagcgaggcccggagcatcctggagccagacaccagcaacagccgcagcagcagcgcctttgaggccgccaagagccggcagccagatggctgcatggaccctgtgcggcagcagagcggaaatgccaacacagagaccctgcccagcggctgggagcagaggaaggacccccacggccgcacctactacgtggaccacaacaccaggaccaccacctgggagcggccccagcccctgcccccaggctgggagaggagagtggatgacagaagaagagtgtactacgtggaccacaacaccaggaccaccacctggcagaggcccaccatggagagcgtgaggaactttgagcagtggcagagccagaggaaccagctgcagggcgccatgcagcagttcaaccagcgctacctgtacagcgcctccatgctggccgcagaaaatgacccctacggccccctgcccccaggctgggagaagagggtggacagcacagacagagtgtactttgtgaaccacaacaccaagaccacccagtgggaggaccccaggacccagggcctgcagaatgaggagcccctgcctgagggctgggagatccgctacacccgggagggcgtgcgctactttgtggaccacaacaccaggaccaccaccttcaaggaccccagaaatggcaagagctctgtgaccaagggcggcccccagatcgcctatgagcggggcttccgctggaagctggcccacttccgctacctgtgccagagcaatgccctgcccagccacgtgaagatcaacgtgtcccggcagaccctgtttgaggacagcttccagcagatcatggccctgaagccctatgacctgcggcggcggctgtatgtgatcttccggggggaggagggcctggactatggaggcctggcccgggagtggttcttcctgctgagccatgaggtgctgaaccccatgtactgcctgtttgaatatgctgggaagaacaactactgcctgcagatcaacccagccagcaccatcaacccagaccacctgagctacttctgcttcatcggccgcttcatcgccatggccctcttccacggcaagttcatcgacaccggcttcagcctgcccttctacaagaggatgctgagcaagaagctgaccatcaaggacctggagagcattgacacagagttctacaacagcctcatctggatccgggacaacaacattgaagaatgtggcctggagatgtacttctctgtggacatggagatcctgggcaaggtgaccagccatgacctgaagctgggcggcagcaacatcctggtgacagaggagaacaaggatgagtacatcggcctgatgacagagtggaggttcagccggggcgtgcaggagcagaccaaggccttcctggatggcttcaatgaggtggtgcccctgcagtggctgcagtactttgatgagaaggagctggaggtgatgctgtgtggcatgcaggaggtggacctggccgactggcagaggaacacagtgtaccgccactacaccaggaacagcaagcagatcatctggttctggcagtttgtgaaggagacagacaatgaggtgaggatgaggctgctgcagtttgtgacaggcacctgccgcctgcccctgggcggctttgctgagctgatgggcagcaatggcccccagaagttctgcatcgagaaggtgggcaaggacacctggctgcccaggagccacacctgcttcaaccggctggacctgcccccctacaagagctatgagcagctgaaggagaagctgctgtttgccatcgaggagacagagggcttcggccaggagtag

SEQ ID NO: 270579 - DNA, 2379 bp, Artificial Sequence
  derived and/or modified sequence
atggccaccgccagcccccggagcgacaccagcaacaaccacagcggccgcctgcaacttcaggtgacggtgtcatcagccaagttgaagcggaagaagaattggttcgggactgctatttacactgaggtggttgtggacggcgaaattactaagacagcaaaatcctccagcagctctaaccctaagtgggatgaacagcttactgtcaatgtcactccacagaccacccttgagtttcaagtgtggagccatcggaccctgaaggcagacgctctgctggggaaagccaccattgacctcaaacaggccctgctgattcacaataggaaatttaatggggagtcttcttcctttgcccctaccgacaacgctagcgttactgggacaccggtggttagcgaagagaacgccctgagtcctaactgtaccagcaccaccgtggaggatcctccggtgcaagagattctgacttcctcggagaataacgaatgcatcccatccaccagcgccgagttggagagtgaagcgcgatcgatcctcgagcccgacacatccaactctaggtcatcatctgcctttgaggcggccaaatccaggcagccagatggctgcatggatccagtgagacagcagtcgggtaatgccaacactgagacactgcccagcgggtgggagcaacggaaggacccacacggacgcacgtactatgtcgaccataatactcggactaccacctgggagcgcccacaaccattgccccccggctgggagcgcagggtcgacgatcgccgcagagtttattatgtcgatcacaatactcgcaccactacctggcagaggcccaccatggaatccgtgagaaatttcgagcagtggcagagccagagaaaccaactccagggggccatgcagcagtttaatcagaggtatctgtactcagcaagcatgctggccgccgaaaatgatccttacggtcccttgccccctgggtgggagaagagagtggactccactgaccgggtttatttcgttaatcacaacacaaagaccacacaatgggaggacccccggacccagggactccagaatgaagaaccgctgcctgaaggctgggagattagatataccagggaaggggtgcgctatttcgttgatcataacactaggaccactacctttaaagacccacggaatggaaagtcatccgtgactaaaggcggacctcagatcgcctatgaacgaggtttccgctggaagctggcccactttcgatatctttgccagtcaaacgccctccccagccacgtgaaaattaatgtttccagacagactctcttcgaggatagcttccagcagattatggctttgaagccctacgacctgcgacgccggctgtatgtcatttttcgaggagaagaggggttagactatggaggcctggcacgggagtggttttttttacttagccacgaggtgcttaatcctatgtactgtcttttcgagtacgcaggcaagaataactattgtcttcagatcaaccctgcctccactatcaatcccgaccatctgtcgtatttttgtttcattggcagattcatcgccatggctcttttccatggcaagtttatcgacactggcttctcactccctttctacaagcgtatgctctctaagaagctcacaattaaagacctggagtccattgacacagaattctacaattcactgatttggattcgggataataatattgaggagtgtgggcttgaaatgtacttctccgtggacatggaaatcctgggaaaggtgacaagccacgatcttaagttagggggcagcaacatactggtcaccgaggagaacaaagacgagtacattggcttaatgacagagtggagattttctagaggagtacaggagcagacaaaggcatttctggatgggtttaacgaggtggttccactgcagtggctgcaatactttgacgaaaaagagctcgaggtcatgctttgcggaatgcaggaggtcgacctagccgactggcagagaaacacagtctatagacactacacgcgaaactcgaagcagattatttggttttggcaatttgttaaggagaccgacaacgaagtcaggatgcgcttgttacagttcgtgaccggaacatgccgtctgcccctcggcgggttcgcagaattgatgggatccaacgggcctcagaaattttgtatcgaaaaagtgggaaaagatacttggctgccgagatcacacacgtgttttaaccggctcgatctgcctccgtataaatcatacgagcagctaaaggagaaactgctgtttgctatcgaggaaaccgagggctttggccaggagtag

SEQ ID NO: 270580 - DNA, 2115 bp, Artificial Sequence
  derived and/or modified sequence
atggccaccgccagcccccggagcgacaccagcaacaaccacagcgggaggctccagctccaggttacagtgaatggtgaatcctcttcttttgcccctactgataatgccagcgtgacaggtaccccagtcgtgagtgaggagaacgccctgtcgccaaactgcaccagtaccacagtggaagaccccccagtacaggagatcctgacttccagtgagaacaatgagtgtatcccctctacaagtgctgagctggaaagtgaggcgcgtagcatcctcgagcccgacactagtaactcccgctctagtagtgcattcgaggcggctaagtctagacagcctgatggatgcatggatcccgtaagacagcagagcgggaacgccaacaccgagacgctgccttccggctgggaacagcgcaaggatccacacggccggacgtactatgtggatcataatacccgcacgacaacttgggagcgaccacagcccttgccccccggatgggagagaagagttgatgatagaaggcgggtttattatgttgatcacaatactaggaccactacctggcagagacccactatggaaagtgtaaggaattttgaacagtggcaatcccagcgtaaccaactgcagggagctatgcagcagtttaaccagagatacttgtattctgcctccatgcttgctgccgagaatgacccttacgggcccttgcctccaggctgggagaagcgcgtggactccacagatcgagtttatttcgtgaaccacaatacaaagactactcagtgggaagacccaaggacccaagggctgcagaatgaggaacctttgcctgagggatgggaaatacgctatacaagagagggggttcgctatttcgtagatcacaacacaagaacaacgacattcaaagatcctcgcaatggtaagagctcagtcaccaagggcggtccccagatagcttatgagcggggttttagatggaaactggcccattttcggtatctgtgtcagtccaacgctttgcccagtcatgtcaaaatcaatgtgtctagacagaccctttttgaggatagttttcagcagataatggccctcaagccatatgacttgaggagaaggctatacgttatcttccgcggagaagagggcctggattatggaggactggcaagggagtggttcttcctcctaagccacgaggtcctcaacccaatgtactgcctgttcgaatatgctggaaagaacaactattgcctgcaaatcaatcccgcctctacaattaatccagatcatctctcatacttttgctttattggcaggttcatcgccatggcactctttcatgggaaattcattgacactggcttttcgctgcctttctataagcgaatgctgtccaagaaactgaccattaaagacctggaaagtattgatacggaattttacaactctctgatctggatacgggataacaacattgaggagtgtggtctggaaatgtatttctccgtcgacatggaaatattgggaaaagttacgagccacgacctaaagctggggggctccaatatcctggtcactgaagagaataaggatgaatatattggcttgatgaccgagtggcgatttagccgcggcgtccaagaacagacaaaggcctttcttgacggattcaatgaggtggtaccgttacagtggcttcagtactttgacgagaaagagcttgaggtgatgttgtgtgggatgcaggaagtggacttagccgactggcagcgaaatactgtgtatagacactataccagaaatagtaaacaaattatttggttttggcagttcgtgaaagagaccgataatgaagttcgcatgaggctgctccagtttgtcaccggaacctgtcggctgccccttggcggtttcgccgagttgatgggctccaacgggcctcagaaattctgtatcgaaaaggtggggaaggatacatggctgccccggtcacacacctgcttcaataggctggacctaccaccatacaaatcctacgaacagttgaaagagaagcttctctttgccatagaggaaacagaaggctttggccaggaatag

SEQ ID NO: 270581 - DNA, 2379 bp, Artificial Sequence
  derived and/or modified sequence
atggcaaccgcatctccccgaagcgatacatctaacaaccactctgggaggctccagcttcaggtgactgtgtcttccgccaaacttaagagaaagaaaaattggtttggaacagcaatctacactgaagttgtcgtcgatggagagataactaagaccgccaagagtagcagtagcagcaatcctaagtgggacgaacagttgactgtaaacgtcactcctcagaccaccttggaatttcaggtgtggtcccatcgaaccttgaaggctgatgccctgctgggcaaggctactatcgatctcaaacaggccctcttgattcacaaccgcaagtttaacggagagtcatccagcttcgcccctaccgacaatgcctctgtgacaggcacgcccgtggtgagcgaggagaacgccttgtcgcctaattgcacgtccaccacggttgaggatcctccagtccaggaaatcttgacctcttcagagaataatgagtgcatcccatcaactagcgcggaactagagtcagaagccaggtctatcttggagcctgatacttccaatagtcgaagttcatccgcttttgaagccgcaaagagccggcagcctgatggatgcatggaccctgtaagacagcagtcgggaaatgccaacacagagactttgccctctggttgggagcagaggaaggacccccacgggaggacgtattacgtggatcataacacgcgtaccacgacatgggaacgcccacagccattgcctcccggatgggagagacgtgtcgacgaccgccgacgtgtgtactatgtagatcacaatacccgtacgactacctggcagagacccacaatggagagcgttcggaattttgaacagtggcagtcccagcggaatcagctgcaaggagcaatgcaacagtttaaccaaaggtatctgtatagtgcaagtatgcttgccgctgagaatgatccctatggccctctcccgccaggatgggagaagcgggtggatagcacggatagagtgtacttcgtcaaccataacacaaagacaacacagtgggaggaccccaggactcaggggttacagaacgaggagcccctgcctgagggctgggaaatcagatacacaagggaaggtgtgcgctattttgtggatcacaatactagaacaactacattcaaagacccaagaaacggaaagagcagtgttacaaagggcggaccccagattgcgtacgagcggggatttcggtggaagctcgctcattttcgttatttgtgccagtctaacgccctgccatcccatgtgaagatcaatgtctcaagacagaccctattcgaagacagttttcagcagattatggccttgaagccctacgacctgagacgtagactctacgtaatctttcgcggagaggaaggtttggactacgggggattggcaagggaatggtttttcctgctctctcacgaggtcctaaatccgatgtactgtctgtttgagtacgctgggaagaacaactattgcctgcaaatcaatcccgcttcaacaatcaaccccgaccacctcagctatttctgctttatcgggaggtttatcgccatggccttattccatggaaaattcattgatacaggtttctcacttcctttctacaaacggatgttatcaaaaaaacttaccattaaggacctcgagagcatcgacactgagttctacaacagtctcatttggatcagagacaacaacatagaagaatgcggtttagagatgtatttttccgtggacatggagatcctgggaaaggtcacatcccatgatcttaagttgggcggatccaatatcctggtaacagaagagaataaagatgagtacatcggccttatgacagaatggagattcagccgaggagtccaggaacagacaaaagctttcctcgacggcttcaacgaggtagtgcctctgcagtggcttcagtatttcgatgaaaaagagctggaagtcatgctctgtggaatgcaagaggtggacctcgccgactggcagagaaacactgtctatcgccactatactcggaactctaagcaaatcatatggttttggcagttcgtgaaagagaccgacaacgaggtcaggatgcgcctcttacagtttgtgaccggaacatgcaggctccccttgggtggattcgccgagctgatggggtctaacgggccacagaagttctgtatagagaaggtcgggaaggatacatggcttccccgttcacatacctgttttaaccggctcgatcttccaccatacaagtcttacgagcagctcaaggagaagctgctattcgcaatcgaggagacggaggggtttggtcaggaatag

SEQ ID NO: 270582 - DNA, 2115 bp, Artificial Sequence
  derived and/or modified sequence
atggccacggctagcccacgtagcgacacctctaataaccattccggacggttgcagctacaggtgacagtgaacggcgaatctagctctttcgcacccactgataatgcatctgttactggaacccccgtggtgtccgaagagaacgccttgtccccaaattgcacctcaaccactgtggaggatccacctgtccaagagatcttgacatcaagcgagaataatgaatgcatccctagcactagcgctgaactggaatcagaggctagaagtattttagaacccgacacatccaactcccggagttctagcgcgtttgaagccgctaaaagcagacagcccgacggctgcatggatcctgtgcgtcaacaatccgggaatgcgaataccgagactttgccctccggttgggagcagcggaaggatccacacggtcgcacatactatgtcgaccacaacactcggacaacaacttgggagcgccctcaaccgctgcctccgggatgggagagacgtgtggacgaccgcaggagagtatattatgttgaccacaacactcggactaccacttggcagagacctactatggagagcgtgagaaattttgagcagtggcagtcacagaggaatcagctgcagggagctatgcagcagtttaatcagcgatacctgtattctgcctccatgctcgctgccgaaaacgacccctacgggcctctcccgcctggctgggaaaagagggtggactcaacagaccgcgtatacttcgtgaatcataacacaaagaccacgcagtgggaagatccccgtacacaaggactgcagaatgaagaacctctacccgagggatgggagatcagatatactcgagagggagtgcgctactttgtcgaccacaacacgaggacgaccacattcaaggacccgcgaaatgggaaaagctctgtaacaaaagggggtccacaaatagcctacgagcgaggcttccgctggaaactcgctcacttccggtacctatgtcagtccaacgcactgccctcacatgtcaaaataaatgtgtctaggcagacgctgtttgaagacagcttccaacaaatcatggccctgaagccctacgacctgagacgccgtctgtacgtcattttccgcggtgaggaagggctggactatgggggacttgcacgggagtggtttttcctcctcagtcacgaagtgctcaacccaatgtactgcctctttgagtacgctggcaagaataattattgtttacagataaatcccgctagtacaatcaaccctgaccacctgtcctatttttgcttcattggtagattcatagccatggccctgtttcacggcaaattcatcgacaccggattttcattgcccttctataaacggatgctctctaagaagctaacgataaaagatctagaatccattgacacggaattctacaattcgcttatctggattagagacaataacattgaggagtgtggtttggagatgtatttttcagtcgacatggaaatactcggcaaggttacgagtcacgaccttaaactgggcggtagcaatatactcgtgaccgaggagaacaaggatgaatacatcgggttaatgactgagtggcggttctccagaggagttcaggagcagacaaaggcattcctcgatgggtttaacgaggtcgtgccactgcagtggttgcaatattttgatgagaaagagttagaggtaatgctgtgcggcatgcaggaagtcgatttagctgattggcaacgtaataccgtgtacaggcattacactagaaattctaaacagattatctggttctggcagtttgtcaaggaaacagataatgaggtgcgtatgcgactcctgcagtttgtgactggtacatgcaggctcccgctaggaggcttcgctgaactgatgggctcgaacgggccacagaagttctgcattgaaaaggtgggaaaagatacttggctcccacggagccatacctgctttaatcggctggacctgcctccatacaaatcctatgaacaacttaaagagaaattgctatttgccattgaagagaccgagggctttggccaggaatag

SEQ ID NO: 270583 - DNA, 2972 bp, Artificial Sequence
  derived and/or modified sequence
attttgggacatggccactgcttcaccaaggtctgatactagtaataaccacagtggaaggttgcagttacaggtaactgtttctagtgccaaacttaaaagaaaaaagaactggttcggaacagcaatatatacagaagtagttgtagatggagaaattacgaaaacagcaaaatccagtagttcttctaatccaaaatgggatgaacagctaactgtaaatgttacgccacagactacattggaatttcaagtttggagccatcgcactttaaaagcagatgctttattaggaaaagcaacgatagatttgaaacaagctctgttgatacacaatagaaaatttaatggagaatcatcctcatttgcaccaactgataatgcgtctgtcacgggtactccagtagtgtctgaagaaaatgccttgtctccaaattgcactagtactactgttgaagatcctccagttcaagaaatactgacttcctcagaaaacaatgaatgtattccttctaccagtgcagaattggaatctgaagctagaagtatattagagcctgacacctctaattctagaagtagttctgcttttgaagcagccaaatcaagacagccagatgggtgtatggatcctgtacggcagcagtctgggaatgccaacacagaaaccttgccatcagggtgggaacaaagaaaagatcctcatggtagaacctattatgtggatcataatactcgaactaccacatgggagagaccacaacctttacctccaggttgggaaagaagagttgatgatcgtagaagagtttattatgtggatcataacaccagaacaacaacgtggcagcggcctaccatggaatctgtccgaaattttgaacagtggcaatctcagcggaaccaattgcagggagctatgcaacagtttaaccaacgatacctctattcggcttcaatgttagctgcagaaaatgacccttatggacctttgccaccaggctgggaaaaaagagtggattcaacagacagggtttactttgtgaatcataacacaaaaacaacccagtgggaagatccaagaactcaaggcttacagaatgaagaacccctgccagaaggctgggaaattagatatactcgtgaaggtgtaaggtactttgttgatcataacacaagaacaacaacattcaaagatcctcgcaatgggaagtcatctgtaactaaaggtggtccacaaattgcttatgaacgcggctttaggtggaagcttgctcacttccgttatttgtgccagtctaatgcactacctagtcatgtaaagatcaatgtgtcccggcagacattgtttgaagattccttccaacagattatggcattaaaaccctatgacttgaggaggcgcttatatgtaatatttagaggagaagaaggacttgattatggtggcctagcgagagaatggtttttcttgctttcacatgaagttttgaacccaatgtattgcttatttgagtatgcgggcaagaacaactattgtctgcagataaatccagcatcaaccattaatccagaccatctttcatacttctgtttcattggtcgttttattgccatggcactatttcatggaaagtttatcgatactggtttctctttaccattctacaagcgtatgttaagtaaaaaacttactattaaggatttggaatctattgatactgaattttataactcccttatctggataagagataacaacattgaagaatgtggcttagaaatgtacttttctgttgacatggagattttgggaaaagttacttcacatgacctgaagttgggaggttccaatattctggtgactgaggagaacaaagatgaatatattggtttaatgacagaatggcgtttttctcgaggagtacaagaacagaccaaagctttccttgatggttttaatgaagttgttcctcttcagtggctacagtacttcgatgaaaaagaattagaggttatgttgtgtggcatgcaggaggttgacttggcagattggcagagaaatactgtttatcgacattatacaagaaacagcaagcaaatcatttggttttggcagtttgtgaaagagacagacaatgaagtaagaatgcgactattgcagttcgtcactggaacctgccgtttacctctaggaggatttgctgagctcatgggaagtaatgggcctcaaaagttttgcattgaaaaagttggcaaagacacttggttaccaagaagccatacatgttttaatcgcttggatctaccaccatataagagttatgaacaactaaaggaaaaacttctttttgcaatagaagagacagagggatttggacaagaatgaatgtggcttcttattttggaggagctcttgcatttaaataccccagccaagaaaaattgcacagatagtgtatataagctgttcattctgtacagtgaattttccgaacctctcaaagtatgttttccgttcttccacagaaatatgcaaaacagttcatccttttctactttatttattgttcccttgaaatgactgaccaggaaaaagatcatccttaaattttgaagcaagtgagagactttattaaaaatacatatatatctatataaacatatatgatagtggctctagttttatagagctccaagtgtattaaacatgacagccattcattcataaagatctggatttgctttaccttgttaatattatctaggggaaaaagtgcaaattgctccatgttcttctctcccttatgtaacatctcctgagggtgtttagttgcatggctgttcagaaaggtattaagggcttaggccaaatcttactttgagtatgttaaaaaaaaaaaaatgctgctggcttttctgaagacaggtgcttgaacttgtcagtttgttttaaataaatacaatagttg

SEQ ID NO: 270584 - DNA, 2708 bp, Artificial Sequence
  derived and/or modified sequence
attttgggacatggccactgcttcaccaaggtctgatactagtaataaccacagtggaaggttgcagttacaggtaactgttaatggagaatcatcctcatttgcaccaactgataatgcgtctgtcacgggtactccagtagtgtctgaagaaaatgccttgtctccaaattgcactagtactactgttgaagatcctccagttcaagaaatactgacttcctcagaaaacaatgaatgtattccttctaccagtgcagaattggaatctgaagctagaagtatattagagcctgacacctctaattctagaagtagttctgcttttgaagcagccaaatcaagacagccagatgggtgtatggatcctgtacggcagcagtctgggaatgccaacacagaaaccttgccatcagggtgggaacaaagaaaagatcctcatggtagaacctattatgtggatcataatactcgaactaccacatgggagagaccacaacctttacctccaggttgggaaagaagagttgatgatcgtagaagagtttattatgtggatcataacaccagaacaacaacgtggcagcggcctaccatggaatctgtccgaaattttgaacagtggcaatctcagcggaaccaattgcagggagctatgcaacagtttaaccaacgatacctctattcggcttcaatgttagctgcagaaaatgacccttatggacctttgccaccaggctgggaaaaaagagtggattcaacagacagggtttactttgtgaatcataacacaaaaacaacccagtgggaagatccaagaactcaaggcttacagaatgaagaacccctgccagaaggctgggaaattagatatactcgtgaaggtgtaaggtactttgttgatcataacacaagaacaacaacattcaaagatcctcgcaatgggaagtcatctgtaactaaaggtggtccacaaattgcttatgaacgcggctttaggtggaagcttgctcacttccgttatttgtgccagtctaatgcactacctagtcatgtaaagatcaatgtgtcccggcagacattgtttgaagattccttccaacagattatggcattaaaaccctatgacttgaggaggcgcttatatgtaatatttagaggagaagaaggacttgattatggtggcctagcgagagaatggtttttcttgctttcacatgaagttttgaacccaatgtattgcttatttgagtatgcgggcaagaacaactattgtctgcagataaatccagcatcaaccattaatccagaccatctttcatacttctgtttcattggtcgttttattgccatggcactatttcatggaaagtttatcgatactggtttctctttaccattctacaagcgtatgttaagtaaaaaacttactattaaggatttggaatctattgatactgaattttataactcccttatctggataagagataacaacattgaagaatgtggcttagaaatgtacttttctgttgacatggagattttgggaaaagttacttcacatgacctgaagttgggaggttccaatattctggtgactgaggagaacaaagatgaatatattggtttaatgacagaatggcgtttttctcgaggagtacaagaacagaccaaagctttccttgatggttttaatgaagttgttcctcttcagtggctacagtacttcgatgaaaaagaattagaggttatgttgtgtggcatgcaggaggttgacttggcagattggcagagaaatactgtttatcgacattatacaagaaacagcaagcaaatcatttggttttggcagtttgtgaaagagacagacaatgaagtaagaatgcgactattgcagttcgtcactggaacctgccgtttacctctaggaggatttgctgagctcatgggaagtaatgggcctcaaaagttttgcattgaaaaagttggcaaagacacttggttaccaagaagccatacatgttttaatcgcttggatctaccaccatataagagttatgaacaactaaaggaaaaacttctttttgcaatagaagagacagagggatttggacaagaatgaatgtggcttcttattttggaggagctcttgcatttaaataccccagccaagaaaaattgcacagatagtgtatataagctgttcattctgtacagtgaattttccgaacctctcaaagtatgttttccgttcttccacagaaatatgcaaaacagttcatccttttctactttatttattgttcccttgaaatgactgaccaggaaaaagatcatccttaaattttgaagcaagtgagagactttattaaaaatacatatatatctatataaacatatatgatagtggctctagttttatagagctccaagtgtattaaacatgacagccattcattcataaagatctggatttgctttaccttgttaatattatctaggggaaaaagtgcaaattgctccatgttcttctctcccttatgtaacatctcctgagggtgtttagttgcatggctgttcagaaaggtattaagggcttaggccaaatcttactttgagtatgttaaaaaaaaaaaaatgctgctggcttttctgaagacaggtgcttgaacttgtcagtttgttttaaataaatacaatagttg

SEQ ID NO: 270585 - DNA, 2163 bp, Artificial Sequence
  derived and/or modified sequence
atggccactgcttcaccaaggtctgatactagtaataaccacagtggaaggttgcagttacaggtaactgtttctagtgccaaacttaaaagaaaaaagaactggttcggaacagcaatatatacagaagtagttgtagatggagaaattacgaaaacagcaaaatccagtagttcttctaatccaaaatgggatgaacagctaactgtaaatgttacgccacagactacattggaatttcaagtttggagccatcgcactttaaaagcagatgctttattaggaaaagcaacgatagatttgaaacaagctctgttgatacacaatagaaaattggaaagagtgaaagaacaattaaaactttccttggaaaacaagaatggcatagcacaaactggtgaattgacagttgtgcttgatggattggtgattgagcaagaaaatataacaaactgcagctcatctccaaccatagaaatacaggaaaatggtgatgccttacatgaaaatggagagccttcagcaaggacaactgccagttaatggagaatcatcctcatttgcaccaactgataatgcgtctgtcacgggtactccagtagtgtctgaagaaaatgccttgtctccaaattgcactagtactactgttgaagatcctccagttcaagaaatactgacttcctcagaaaacaatgaatgtattccttctaccagtgcagaattggaatctgaagctagaagtatattagagcctgacacctctaattctagaagtagttctgcttttgaagcagccaaatcaagacagccagatgggtgtatggatcctgtacggcagcagtctgggaatgccaacacagaaaccttgccatcagggtgggaacaaagaaaagatcctcatggtagaacctattatgtggatcataatactcgaactaccacatgggagagaccacaacctttacctccaggttgggaaagaagagttgatgatcgtagaagagtttattatgtggatcataacaccagaacaacaacgtggcagcggcctaccatggaatctgtccgaaattttgaacagtggcaatctcagcggaaccaattgcagggagctatgcaacagtttaaccaacgatacctctattcggcttcaatgttagctgcagaaaatgacccttatggacctttgccaccaggctgggaaaaaagagtggattcaacagacagggtttactttgtgaatcataacacaaaaacaacccagtgggaagatccaagaactcaaggcttacagaatgaagaacccctgccagaaggctgggaaattagatatactcgtgaaggtgtaaggtactttgttgatcataacacaagaacaacaacattcaaagatcctcgcaatgggaagtcatctgtaactaaaggtggtccacaaattgcttatgaacgcggctttaggtggaagcttgctcacttccgttatttgtgccagtctaatgcactacctagtcatgtaaagatcaatgtgtcccggcagacattgtttgaagattccttccaacagattatggcattaaaaccctatgacttgaggaggcgcttatatgtaatatttagaggagaagaaggacttgattatggtggcctagcgagagaatggtttttcttgctttcacatgaagttttgaacccaatgtattgcttatttgagtatgcgggcaagaacaactattgtctgcagataaatccagcatcaaccattaatccagaccatctttcatacttctgtttcattggtcgttttattgccatggcactatttcatggaaagtttatcgatactggtttctctttaccattctacaagcgtatgttaagtaaaaaacttactattaaggatttggaatctattgatactgaattttataactcccttatctggataaggtttgaagattttgttttgcaataagtcatttttttgaaacccattttgtttcattttgttaattagtgtatatatatttatttcacccagagataacaacattgaagaatgtggcttagaaatgtacttttctgttgacatggagattttgggaaaagttacttcacatgacctgaagttgggaggttccaatattctggtgactgaggagaaca

SEQ ID NO: 270586 - protein, 148 aa, Artificial Sequence
  derived and/or modified sequence
MARMNRPAPVEVSYKHMRFLITHNPTNATLSTFIEDLKKYGATTVVRVCEVTYDKTPLEKDGITVVDWPFDDGAPPPGKVVEDWLSLVKAKFCEAPGSCVAVHCVAGLGRKRRGAINSKQLTYLEKYRPKQRLRFKDPHTHKTRCCVM

SEQ ID NO: 270587 - DNA, 447 bp, Artificial Sequence
  derived and/or modified sequence
atggcaaggatgaacaggcctgctcccgtggaggtgtcctataagcacatgcgcttcctgattacacacaatcctaccaacgcgactctgtcaactttcatcgaggacctgaagaaatacggcgccaccaccgttgtacgagtatgtgaggttacctacgacaagacgcctctcgagaaggacggtataaccgtggtggactggccgtttgacgatggcgcacccccccctggtaaagtggtggaggactggcttagcctggttaaagccaaattctgcgaggctcccgggtcctgcgttgccgttcattgtgttgctggcttgggacggaagcggcgtggcgcaatcaactcaaaacagttgacatatttagaaaagtatcgccctaaacagcggctgcggttcaaggatcctcacacccacaaaactcggtgttgcgtgatgtag

SEQ ID NO: 270588 - DNA, 447 bp, Artificial Sequence
  derived and/or modified sequence
atggcccgcatgaaccgtccagctcctgtggaggtctcctacaagcacatgaggtttctgattactcacaatcccacaaatgccaccctcagcacctttatcgaggatcttaagaaatatggggcaaccaccgttgtccgggtctgcgaagtgacctacgataaaaccccccttgagaaagacggcatcaccgttgtggactggcccttcgacgacggggccccgccacccgggaaagtagtggaggattggctgagtctggtaaaggcaaaattctgtgaggcaccgggctcctgcgtggcagttcactgcgttgcggggcttggacggaagcgtcggggggccatcaatagcaagcagttgacttacttagaaaagtaccgacctaagcagcgcctccggtttaaggatccgcatacccacaagacccgctgctgtgtgatgtag

SEQ ID NO: 270589 - DNA, 213 bp, Artificial Sequence
  derived and/or modified sequence
atggcccgcatgaatcgacctgctccagtcgaggtgtcttataagcacatgaggtttttgatcactcataatccaactaacgccactttgtccaccttcatcgaggacctgaagaaatatggtgccaccactgtcgtgagagtgtgcgaggtcacatacgacaaaactcctcttgagaaggatgggataactgtagtggactggcccttctag

SEQ ID NO: 270590 - DNA, 447 bp, Artificial Sequence
  derived and/or modified sequence
atggccaggatgaacagacctgcccctgtggaggtgtcctacaagcacatgaggttcctgatcacccacaaccccaccaatgccaccctgagcaccttcatcgaggacctgaagaagtacggggccaccaccgtggtgcgggtgtgtgaggtgacctatgacaagacccccctggagaaggatggcatcaccgtggtggactggccctttgatgatggagcccctcctcctgggaaggtggtggaggactggctgagcctggtgaaggccaagttctgtgaggcccctggcagctgtgtggccgtgcactgtgtggccggcctgggcaggaagagaagaggagccatcaacagcaagcagctgacctacctggagaagtaccggcccaagcagaggctgcgcttcaaggacccccacacccacaagacccgctgctgcgtgatgtag

SEQ ID NO: 270591 - DNA, 213 bp, Artificial Sequence
  derived and/or modified sequence
atggccaggatgaacagacctgcccctgtggaggtgtcctacaagcacatgaggttcctgatcacccacaaccccaccaatgccaccctgagcaccttcatcgaggacctgaagaagtacggggccaccaccgtggtgcgggtgtgtgaggtgacctatgacaagacccccctggagaaggatggcatcaccgtggtggactggcccttctag

SEQ ID NO: 270592 - DNA, 447 bp, Artificial Sequence
  derived and/or modified sequence
atggcccggatgaaccggcccgcccccgtggaggtgagctacaagcacatgaggttcctgattacccataaccctacgaatgcaactctctccacatttattgaggatctgaagaaatacggtgccacaacagtggtgcgcgtatgtgaagttacttacgacaaaacacccctggagaaagacggaattacggtagtggactggccattcgatgatggcgcgcccccgccgggcaaagtcgtcgaagattggctgtcacttgtgaaggctaagttttgtgaggcacccggctcatgtgtggcagttcactgtgtcgcagggcttggccgaaagcggagaggcgcaatcaattccaaacagttgacatatctcgagaaataccgccctaaacagagactgcgcttcaaagacccccatacccacaagactagatgttgcgtaatgtag

SEQ ID NO: 270593 - DNA, 447 bp, Artificial Sequence
  derived and/or modified sequence
atggcccggatgaaccggcccgcccccgtggaggtgagctacaagcacatgcgtttcctgatcacccataacccgacgaacgcaaccttaagcacctttatcgaagacctcaaaaaatacggagctacaactgtggtgcgcgtgtgtgaagttacttatgataagaccccacttgaaaaagacggcatcactgtggtggattggcccttcgatgatggggcgccccctccaggcaaggtggttgaagactggctgtccctggtgaaagcgaagttttgcgaggcccccggaagttgtgttgccgttcattgcgtggccggtttgggccgcaaaagaaggggcgctattaactccaaacagcttacatatttagaaaagtatagacccaagcagcgtctcagattcaaggaccctcatacacataagactcggtgttgtgtcatgtag

SEQ ID NO: 270594 - DNA, 213 bp, Artificial Sequence
  derived and/or modified sequence
atggcccggatgaaccggcccgcccccgtggaggtgagctacaagcacatgagattcctgatcacacacaaccccaccaatgccacgctgtccaccttcatcgaagatctgaagaaatatggagctacaaccgtggtgcgtgtgtgtgaagtaacctacgataagacaccgctcgaaaaggacggtattacagtggtggactggccgttctag

SEQ ID NO: 270595 - DNA, 447 bp, Artificial Sequence
  derived and/or modified sequence
atggccaggatgaataggcccgctcctgtggaagtgagctataagcatatgaggttcctgatcactcacaaccccaccaacgcaactctgagcacctttatagaggaccttaaaaaatatggagccactactgtggtgagagtctgcgaagtaacctacgataagaccccattggagaaggatggcatcaccgtcgtggactggcccttcgacgatggcgctccgccacctgggaaggtcgtcgaggactggctgagccttgttaaggccaaattttgtgaggcaccaggttcatgtgttgccgtgcattgtgttgccggtctcggaaggaagaggcgcggtgccattaactccaaacaactaacctacctcgagaagtaccgtcctaagcagaggttgcggttcaaggacccccacacccacaaaacccgctgctgtgtcatgtag

SEQ ID NO: 270596 - DNA, 447 bp, Artificial Sequence
  derived and/or modified sequence
atggcacgcatgaataggcccgctccagtggaagttagctacaagcacatgcgctttctcataacacataaccccacaaacgctaccctgagtacttttatagaagacctgaagaaatatggagctactacggtggttcgcgtctgtgaagttacgtatgataaaacccctctggagaaagacggcattactgtggtcgactggcctttcgacgatggcgcacctcccccagggaaagtggtcgaggactggctctcgttagtgaaggctaaattctgtgaagcccctggatcttgcgtagccgtccattgcgtggccggtcttgggagaaagcgccgtggagctataaactcaaagcaattaacctatctggaaaagtacagaccaaagcagcgcctgcgtttcaaggatccccatactcataagacacggtgttgcgtcatgtag

SEQ ID NO: 270597 - DNA, 213 bp, Artificial Sequence
  derived and/or modified sequence
atggccagaatgaacagacctgcacccgtggaggtgagctacaaacacatgcgctttcttattacccacaacccaaccaacgctaccttgtctacctttatcgaggacctgaagaaatatggggcaaccaccgtcgtccgcgtgtgcgaggtgacatatgacaaaacgccattggaaaaggacggcataaccgtggtagattggcccttttag

SEQ ID NO: 270598 - DNA, 1257 bp, Artificial Sequence
  derived and/or modified sequence
tgactatccagctctgagagacgggagtttggagttgcccgctttactttggttgggttggggggggcggcgggctgttttgttccttttcttttttaagagttgggttttcttttttaattatccaaacagtgggcagcttcctcccccacacccaagtatttgcacaatatttgtgcggggtatgggggtgggtttttaaatctcgtttctcttggacaagcacagggatctcgttctcctcattttttgggggtgtgtggggacttctcaggtcgtgtccccagccttctctgcagtcccttctgccctgccgggcccgtcgggaggcgccatggctcggatgaaccgcccggccccggtggaggtgagctacaaacacatgcgcttcctcatcacccacaaccccaccaacgccacgctcagcaccttcattgaggacctgaagaagtacggggctaccactgtggtgcgtgtgtgtgaagtgacctatgacaaaacgccgctggagaaggatggcatcaccgttgtggactggccgtttgacgatggggcgcccccgcccggcaaggtagtggaagactggctgagcctggtgaaggccaagttctgtgaggcccccggcagctgcgtggctgtgcactgcgtggcgggcctgggccggaagcgccgcggagccatcaacagcaagcagctcacctacctggagaaataccggcccaaacagaggctgcggttcaaagacccacacacgcacaagacccggtgctgcgttatgtagctcaggaccttggctgggcctggtcgtcatgtaggtcaggaccttggctggacctggaggccctgcccagccctgctctgcccagcccagcaggggctccaggccttggctggccccacatcgccttttcctccccgacacctccgtgcacttgtgtccgaggagcgaggagcccctcgggccctgggtggcctctgggccctttctcctgtctccgccactccctctggcggcgctggccgtggctctgtctctctgaggtgggtcgggcgccctctgcccgccccctcccacaccagccaggctggtctcctctagcctgtttgttgtggggtgggggtatattttgtaaccactgggcccccagcccctcttttgcgaccccttgtcctgacctgttctcggcaccttaaattattagaccccggggcagtcaggtgctccggacacccgaaggcaataaaacaggagccgtg

SEQ ID NO: 270599 - DNA, 1866 bp, Artificial Sequence
  derived and/or modified sequence
aagccggtggagccgcggccgcgcctgtgcgcgagggcgcgcgcgtcccgagccctccacccgtcgtgccggcgccgcccggaccgccagatgctgtgtgctgtggacccacctggggttcatggagtgggccacggggcccagccctaagcactgctgcgcccagggtcgccgcgcctcctgctgaggggtccccgtgccactggctctcaccattgccctcgcctgccgatggcctctgctgcccagcctggggccagctctaccgcctgagccccctgccccactccaggactcaccgtaccccgatggggtaacgtgacacaggccccacacgtcagaggccgctgtccccacggccactgcccgtgacccctggcccaaggcagctggagttggttcagttcaagttcattcttcctctggcccttgggggcttggggcccacctctgagtgaagggggctgtctgcccatccaccaatgtggagagggcgcccccggtgtggggtccagctctggacactgcttggcggccgggttcactttgagtttttaagttttctttgctgagcttttttggttgttctttttattttttgcctctttatgactatccagctctgagagacgggagtttggagttgcccgctttactttggttgggttggggggggcggcgggctgttttgttccttttcttttttaagagttgggttttcttttttaattatccaaacagtgggcagcttcctcccccacacccaagtatttgcacaatatttgtgcggggtatgggggtgggtttttaaatctcgtttctcttggacaagcacagggatctcgttctcctcattttttgggggtgtgtggggacttctcaggtcgtgtccccagccttctctgcagtcccttctgccctgccgggcccgtcgggaggcgccatggctcggatgaaccgcccggccccggtggaggtgagctacaaacacatgcgcttcctcatcacccacaaccccaccaacgccacgctcagcaccttcattgaggacctgaagaagtacggggctaccactgtggtgcgtgtgtgtgaagtgacctatgacaaaacgccgctggagaaggatggcatcaccgttgtggactggccgtttgacgatggggcgcccccgcccggcaaggtagtggaagactggctgagcctggtgaaggccaagttctgtgaggcccccggcagctgcgtggctgtgcactgcgtggcgggcctgggccggaagcgccgcggagccatcaacagcaagcagctcacctacctggagaaataccggcccaaacagaggctgcggttcaaagacccacacacgcacaagacccggtgctgcgttatgtagctcaggaccttggctgggcctggtcgtcatgtaggtcaggaccttggctggacctggaggccctgcccagccctgctctgcccagcccagcaggggctccaggccttggctggccccacatcgccttttcctccccgacacctccgtgcacttgtgtccgaggagcgaggagcccctcgggccctgggtggcctctgggccctttctcctgtctccgccactccctctggcggcgctggccgtggctctgtctctctgaggtgggtcgggcgccctctgcccgccccctcccacaccagccaggctggtctcctctagcctgtttgttgtggggtgggggtatattttgtaaccactgggcccccagcccctcttttgcgaccccttgtcctgacctgttctcggcaccttaaattattagaccccggggcagtcaggtgctccggacacccgaaggcaataaaacaggagccgtg

SEQ ID NO: 270600 - DNA, 558 bp, Artificial Sequence
  derived and/or modified sequence
gtgcgcgagggcgcgcgcgtcccgagccctccacccgtcgtgccggcgccgcccggaccgccagatgctgtgtgctgtggacccacctggggttcatggagtgggccacggggcccagccctaagcactgctgcgcccagggtcgccgcgcctcctgctgaggggtccccgtgccactggctctcaccattgccctcgcctgccgatggcctctgctgcccagcctggggccagctctaccgcctgagccccctgccccactccaggactcaccgtaccccgatggggtcgtgtccccagccttctctgcagtcccttctgccctgccgggcccgtcgggaggcgccatggctcggatgaaccgcccggccccggtggaggtgagctacaaacacatgcgcttcctcatcacccacaaccccaccaacgccacgctcagcaccttcattgaggacctgaagaagtacggggctaccactgtggtgcgtgtgtgtgaagtgacctatgacaaaacgccgctggagaaggatggcatcaccgttgtggactggccgtttg

SEQ ID NO: 270601 - DNA, 447 bp, Artificial Sequence
  derived and/or modified sequence
atggccagaatgaacagacccgcccccgtggaggtgagctacaagcacatgagattcctgatcacccacaaccccaccaacgccaccctgagcaccttcatcgaggacctgaagaagtacggcgccaccaccgtggtgagagtgtgcgaggtgacctacgacaagacccccctggagaaggacggcatcaccgtggtggactggcccttcgacgacggcgcccccccccccggcaaggtggtggaggactggctgagcctggtgaaggccaagttctgcgaggcccccggcagctgcgtggccgtgcactgcgtggccggcctgggcagaaagagaagaggcgccatcaacagcaagcagctgacctacctggagaagtacagacccaagcagagactgagattcaaggacccccacacccacaagaccagatgctgcgtgatgtag

SEQ ID NO: 270602 - DNA, 213 bp, Artificial Sequence
  derived and/or modified sequence
atggccagaatgaacagacccgcccccgtggaggtgagctacaagcacatgagattcctgatcacccacaaccccaccaacgccaccctgagcaccttcatcgaggacctgaagaagtacggcgccaccaccgtggtgagagtgtgcgaggtgacctacgacaagacccccctggagaaggacggcatcaccgtggtggactggcccttctag

SEQ ID NO: 270603 - protein, 276 aa, Artificial Sequence
  derived and/or modified sequence
MGSKALPAPIPLHPSLQLTNYSFLQAVNTFPATVDHLQGLYGLSAVQTMHMNHWTLGYPNVHEITRSTITEMAAAQGLVDARFPFPALPFTTHLFHPKQGAIAHVLPALHKDRPRFDFANLAVAATQEDPPKMGDLSKLSPGLGSPISGLSKLTPDRKPSRGRLPSKTKKEFICKFCGRHFTKSYNLLIHERTHTDERPYTCDICHKAFRRQDHLRDHRYIHSKEKPFKCQECGKGFCQSRTLAVHKTLHMQTSSPTAASSAAKCSGETVICGGTA

SEQ ID NO: 270604 - DNA, 1825 bp, Artificial Sequence
  derived and/or modified sequence
cggggccgctactaaagcccaagactcccggcctggggcagcctggggagggacgcgggcggggacggagctcggcgtgcttgctgctggagggtgatggccctgcaaggctgtgggctccgacctcaccgggagtcgacagcgagaggttcgccgaagagcgaggttctgggcgagcgctgaacgccggccccaagcaccccgggtctttacacagtccgcgtccacagactctgacgaagacgtggatctgctctcgctttagctgctcgcggtcctccagatcatgtccgcgactcctgcgactccgcgcggaaaaaaaagtttgccaggcgtggactcaatgacctttccaagctgtgcgcctcgctgcctggaccgggtctgagcgcggctgcccaggttgacctttctgcgggagggctttctctacgtgctgttgtctcactgggtttttgtcggagccccacgccctccggcctctgattcctggaagaaagggttggtcccctcagcacccccagcatcccggaaaatggggagcaaggctctgccagcgcccatcccgctccacccgtcgctgcagctcaccaattactccttcctgcaggccgtgaacaccttcccggccacggtggaccacctgcagggcctgtacggtctcagcgcggtacagaccatgcacatgaaccactggacgctggggtatcccaatgtgcacgagatcacccgctccaccatcacggagatggcggcggcgcagggcctcgtggacgcgcgcttccccttcccggccctgccttttaccacccacctattccaccccaagcagggggccattgcccacgtcctcccagccctgcacaaggaccggccccgttttgactttgccaatttggcggtggctgccacgcaagaggatccgcctaagatgggagacctgagcaagctgagcccaggactgggtagccccatctcgggcctcagtaaattgactccggacagaaagccctctcgaggaaggttgccctccaaaacgaaaaaagagtttatctgcaagttttgcggcagacactttaccaaatcctacaatttgctcatccatgagaggacccacacggacgagaggccgtacacgtgtgacatctgccacaaggccttccggaggcaagatcacctgcgggatcacagatacatccattccaaagaaaaacccttcaaatgtcaggagtgtgggaaaggattttgtcagtctagaactctagcagttcacaaaactttacacatgcagacatcaagccctacagctgcgagcagtgcggcaaagtgttcaggcgaaactgtgatctgcggcggcacagcctgactcacaccccgcggcaggacttctagagaagcccaggatctgtcccgtgccgccgctgctcccctccccagacacctctccacgtctcctacccagggggtcgcatccctagcccttcactgaccccagctcttcccttgctgcagccgcacctgcagctccagggagttaactcttcttctgggggactgagaactgtagaaagccacacactactacatcccttcacaaagagtatatgctagtttcttgtagatattcacagctcattttagagctctgtacataatgttgtgggtctttgttttgttgttttgtttgctttgggatcttgttggatgcacttagatatggaaaatggaagccaaattttatctttaaagactgtattttcaaaataaaactttttcttgtttgtttcaaaaaaaaaaaaaaaaaaaaaaaaaaaaaaaaaaaaaa

SEQ ID NO: 270605 - DNA, 1736 bp, Artificial Sequence
  derived and/or modified sequence
cgggcggggacggagctcggcgtgcttgctgctggagggtgatggccctgcaaggctgtgggctccgacctcaccgggagtcgacagcgagaggttcgccgaagagcgaggttctgggcgagcgctgaacgccggccccaagcaccccgggtctttacacagtccgcgtccacagactctgacgaagacgtggatctgctctcgctttagctgctcgcggtcctccagatcatgtccgcgactcctgcgactccgcgcggaaaaaaaagtttgccaggcgtggactcaatgacctttccaagctgtgcgcctcgctgcctggaccgggtctgagcgcggctgcccaggttgacctttctgcgggagggctttctctacgtgctgttgtctcactgggtttttgtcggagccccacgccctccggcctctgattcctggaagaaagggttggtcccctcagcacccccagcatcccggaaaatggggagcaaggctctgccagcgcccatcccgctccacccgtcgctgcagctcaccaattactccttcctgcaggccgtgaacaccttcccggccacggtggaccacctgcagggcctgtacggtctcagcgcggtacagaccatgcacatgaaccactggacgctggggtatcccaatgtgcacgagatcacccgctccaccatcacggagatggcggcggcgcagggcctcgtggacgcgcgcttccccttcccggccctgccttttaccacccacctattccaccccaagcagggggccattgcccacgtcctcccagccctgcacaaggaccggccccgttttgactttgccaatttggcggtggctgccacgcaagaggatccgcctaagatgggagacctgagcaagctgagcccaggactgggtagccccatctcgggcctcagtaaattgactccggacagaaagccctctcgaggaaggttgccctccaaaacgaaaaaagagtttatctgcaagttttgcggcagacactttaccaaatcctacaatttgctcatccatgagaggacccacacggacgagaggccgtacacgtgtgacatctgccacaaggccttccggaggcaagatcacctgcgggatcacagatacatccattccaaagaaaaacccttcaaatgtcaggagtgtgggaaaggattttgtcagtctagaactctagcagttcacaaaactttacacatgcagacatcaagccctacagctgcgagcagtgcggcaaagtgttcaggcgaaactgtgatctgcggcggcacagcctgactcacaccccgcggcaggacttctagagaagcccaggatctgtcccgtgccgccgctgctcccctccccagacacctctccacgtctcctacccagggggtcgcatccctagcccttcactgaccccagctcttcccttgctgcagccgcacctgcagctccagggagttaactcttcttctgggggactgagaactgtagaaagccacacactactacatcccttcacaaagagtatatgctagtttcttgtagatattcacagctcattttagagctctgtacataatgttgtgggtctttgttttgttgttttgtttgctttgggatcttgttggatgcacttagatatggaaaatggaagccaaattttatctttaaagactgtattttcaaaataaaactttttcttgtttgtttcaaaa

SEQ ID NO: 270606 - DNA, 480 bp, Artificial Sequence
  derived and/or modified sequence
atgaaaatcgtggacgagagggagaaaaacctggacgacaaggcctaccggaatattaaagagctcgaaaactatgcggaaaacactcagtcttcactgctgtatctgaccctggagatcttgggtatcaaggatttgcacgcagaccacgcggcatcccatatcggcaaagctcagggaatcgttacatgcctgagagcaacaccttaccacggaagccggaggaaggttttcctgcctatggatatctgtatgttgcatggtgtgagtcaggaggacttcctgaggagaaatcaggacaaaaacgtccgggatgtgatctacgacattgcctcccaggcccatctgcacctgaaacacgcccggtccttccacaagacagtgcctgttaaggcctttcccgccttcctccaaactgagattaaggacgccgatactcagggggtatgtctcgcccagcccgcaagtttgggcaaatag

SEQ ID NO: 270607 - DNA, 480 bp, Artificial Sequence
  derived and/or modified sequence
atgaagatcgtggatgagcgggagaagaacctggatgacaaggcctacagaaacatcaaggagctggagaactatgcagagaacacccagagcagcctgctgtacctgaccctggagatcctgggcatcaaggacctgcacgccgaccatgctgccagccacatcggcaaggcccagggcatcgtgacctgcctgcgggccaccccctaccacggcagcaggaggaaggtgttcctgcccatggacatctgcatgctgcatggagtgtcccaggaggacttcctgcggaggaaccaggacaagaatgtgagagatgtgatctatgacatcgccagccaggcccacctgcacctgaagcacgcccgctccttccacaagacagtgcctgtgaaggccttccctgccttcctgcagacagagatcaaggatgctgacacccagggcgtgtgcctggcccagcctgccagcctgggcaagtag

SEQ ID NO: 270608 - DNA, 480 bp, Artificial Sequence
  derived and/or modified sequence
atgaagatcgtggacgagcgggagaagaacctggacgacaaggcctaccgaaacatcaaggagctggagaattacgccgaaaatactcagtcctcactgctgtatttgacgctggagattcttgggatcaaggacttacacgccgaccacgcagcttcccatatcgggaaggctcagggtatcgtcacctgtctcagggccactccataccacggctcaaggcgcaaagtctttcttcccatggatatttgtatgttacacggcgtctctcaggaagatttcctgcggcgcaatcaggacaagaatgtgagggatgtgatctatgatatagccagccaggcacaccttcatttgaagcatgctcggtcatttcataagacggtaccagtgaaagcgttcccagccttcctccagactgagataaaagatgccgacacccagggggtgtgcctggctcaacccgcatccctcgggaagtag

SEQ ID NO: 270609 - DNA, 480 bp, Artificial Sequence
  derived and/or modified sequence
atgaaaatagtcgacgagagagaaaaaaatttagacgataaagcataccggaacatcaaggaacttgaaaactacgcagaaaatacacaatccagtcttttgtatttaaccttagagattctcgggatcaaggatctgcatgctgatcacgccgctagtcatattggcaaagcccaggggattgtgacatgtttacgagccacgccctaccacggttcccgcagaaaggtttttctgcctatggacatttgcatgctgcacggtgtaagccaggaggattttcttagaaggaatcaggacaaaaatgtaagagatgtgatctacgatattgcctcacaggcccatctgcacctcaagcatgcacgctccttccacaagaccgtgccagtcaaagctttccccgctttcctgcagacagagatcaaggatgccgatacccagggcgtctgtttagcacagcccgcatctctggggaaatag

SEQ ID NO: 270610 - DNA, 480 bp, Artificial Sequence
  derived and/or modified sequence
atgaagatcgtggacgagagagagaagaacctggacgacaaggcctacagaaacatcaaggagctggagaactacgccgagaacacccagagcagcctgctgtacctgaccctggagatcctgggcatcaaggacctgcacgccgaccacgccgccagccacatcggcaaggcccagggcatcgtgacctgcctgagagccaccccctaccacggcagcagaagaaaggtgttcctgcccatggacatctgcatgctgcacggcgtgagccaggaggacttcctgagaagaaaccaggacaagaacgtgagagacgtgatctacgacatcgccagccaggcccacctgcacctgaagcacgccagaagcttccacaagaccgtgcccgtgaaggccttccccgccttcctgcagaccgagatcaaggacgccgacacccagggcgtgtgcctggcccagcccgccagcctgggcaagtag

SEQ ID NO: 270611 - protein, 4022 aa, Artificial Sequence
  derived and/or modified sequence
MLESYVTPILMSYVNRYIKNLKPSDLQLSLWGGDVVLSKLELKLDVLEQELKLPFTFLSGHIHELRIHVPWTKLGSEPVVITINTMECILKLKDGIQDDHESCGSNSTNRSTAESTKSSIKPRRMQQAAPTDPDLPPGYVQSLIRRVVNNVNIVINNLILKYVEDDIVLSVNITSAECYTVGELWDRAFMDISATDLVLRKVINFSDCTVCLDKRNASGKIEFYQDPLLYKCSFRTRLHFTYENLNSKMPSVIKIHTLVESLKLSITDQQLPMFIRIMQLGIALYYGEIGNFKEGEIEDLTCHNKDMLGNITGSEDETRIDMQYPAQHKGQELYSQQDEEQPQGWVSWAWSFVPAIVSYDDGEEDFVGNDPASTMHQQKAQTLKDPIVSIGFYCTKATVTFKLTEMQVESSYYSPQKVKSKEVLCWEQEGTTVEALMMGEPFFDCQIGFVGCRAMCLKGIMGVKDFEENMNRSETEACFFICGDNLSTKGFTYLTNSLFDYRSPENNGTRAEFILDSTHHKETYTEIAGMQRFGAFYMDYLYTMENTSGKGSTNQQDFSSGKSEDLGTVQEKSTKSLVIGPLDFRLDSSAVHRILKMIVCALEHEYEPYSRLKSDIKDENETILNPEEVALLEEYIPTRHTSVTLLKCTCTISMAEFNLLDHLLPVIMGEKNSSNFMNTTNFQSLRPLPSIRILVDKINLEHSVPMYAEQLVHVVSSLTQPSDNLLHYCYVHCYLKIFGFQAGLTSLDCSGSYCLPVPVIPSFSTALYGKLLKLPTCWTKRSQIAITEGIFELPNLTIQATRAQTLLLQAIYQSWSHLGNVSSSAVIEALINEIFLSIGVKSKNPLPTLEGSIQNVELKYCSTSLVKCASGTMGSIKICAKAPVDSGKEKLIPLLQGPSDTKDLHSTKWLNESRKPESLLAPDLMAFTIQVPQYIDYCHNSGAVLLCSIQGLAVNIDPILYTWLIYQPQKRTSRHMQQQPVVAVPLVMPVCRRKEDEVSIGSAPLAKQQSYQASEYASSPVKTKTVTESRPLSVPVKAMLNISESCRSPEERMKEFIGIVWNAVKHLTLQLEVQSCCVFIPNDSLPSPSTIVSGDIPGTVRSWYHGQTSMPGTLVLCLPQIKIISAGHKYMEPLQEIPFVIPRPILEEGDAFPWTISLHNFSIYTLLGKQVTLCLVEPMGCTSTLAVTSQKLLATGPDTRHSFVVCLHVDLESLEIKCSNPQVQLFYELTDIMNKVWNKIQKRGNLNLSPTSPETMAGPVPTSPVRSSIGTAPPDTSTCSPSADIGTTTEGDSIQAGEESPFSDSVTLEQTTSNIGGTSGRVSLWMQWVLPKITIKLFAPDPENKGTEVCMVSELEDLSASIDVQDVYTKVKCKIESFNIDHYRSSLGEECWSLGQCGGVFLSCTDKLNRRTLLVRPISKQDPFSNCSGFFPSTTTKLLDGTHQQHGFLSLTYTKAVTKNVRHKLTSRNERRSFHKLSEGLMDGSPHFLHEILLSAQAFDIVLYFPLLNAIASIFQAKLPKTQKEKRKSPGQPMRTHTLTSRNLPLIYVNTSVIRIFIPKTEEMQPTVEANQAAKEDTVVLKIGSVAMAPQADNPLGRSVLRKDIYQRALNLGILRDPGSEIEDRQYQIDLQSINIGTAQWHQLKPEKESVSGGVVTETERNSQNPALEWNMASSIRRHQERRAILTPVLTDFSVRITGAPAVIFTKVVSPENLHTEEILVCGHSLEVNITTNLDFFLSVAQVQLLHQLIVANMTGLEPSNKAAEISKQEQKKVDIFDGGMAETSSRYSGAQDSGIGSDSVKIRIVQIEQHSGASQHRIARPSRQSSIVKNLNFIPFDIFITASRISLMTYSCMALSKSKSQEQKNNEKTDKSSLNLPEVDSDVAKPNQACISTVTAEDLLRSSISFPSGKKIGVLSLESLHASTRSSARQALGITIVRQPGRRGTGDLQLEPFLYFIVSQPSLLLSCHHRKQRVEVSIFDAVLKGVASDYKCIDPGKTLPEALDYCTVWLQTVPGEIDSKSGIPPSFITLQIKDFLNGPADVNLDISKPLKANLSFTKLDQINLFLKKIKNAHSLAHSEETSAMSNTMVNKDDLPVSKYYRGKLSKPKIHGDGVQKISAQENMWRAVSCFQKISVQTTQIVISMETVPHTSKPCLLASLSNLNGSLSVKATQKVPGIILGSSFLLSINDFLLKTSLKERSRILIGPCCATANLEAKWCKHSGNPGPEQSIPKISIDLRGGLLQVFWGQEHLNCLVLLHELLNGYLNEEGNFEVQVSEPVPQMSSPVEKNQTFKSEQSSDDLRTGLFQYVQDAESLKLPGVYEVLFYNETEDCPGMMLWRYPEPRVLTLVRITPVPFNTTEDPDISTADLGDVLQVPCSLEYWDELQKVFVAFREFNLSESKVCELQLPDINLVNDQKKLVSSDLWRIVLNSSQNGADDQSSASESGSQSTCDPLVTPTALAACTRVDSCFTPWFVPSLCVSFQFAHLEFHLCHHLDQLGTAAPQYLQPFVSDRNMPSELEYMIVSFREPHMYLRQWNNGSVCQEIQFLAQADCKLLECRNVTMQSVVKPFSIFGQMAVSSDVVEKLLDCTVIVDSVFVNLGQHVVHSLNTAIQAWQQNKCPEVEELVFSHFVICNDTQETLRFGQVDTDENILLASLHSHQYSWRSHKSPQLLHICIEGWGNWRWSEPFSVDHAGTFIRTIQYRGRTASLIIKVQQLNGVQKQIIICGRQIICSYLSQSIELKVVQHYIGQDGQAVVREHFDCLTAKQKLPSYILENNELTELCVKAKGDEDWSRDVCLESKAPEYSIVIQVPSSNSSIIYVWCTVLTLEPNSQVQQRMIVFSPLFIMRSHLPDPIIIHLEKRSLGLSETQIIPGKGQEKPLQNIEPDLVHHLTFQAREEYDPSDCAVPISTSLIKQIATKVHPGGTVNQILDEFYGPEKSLQPIWPYNKKDSDRNEQLSQWDSPMRVKLSIWKPYVRTLLIELLPWALLINESKWDLWLFEGEKIVLQVPAGKIIIPPNFQEAFQIGIYWANTNTVHKSVAIKLVHNLTSPKWKDGGNGEVVTLDEEAFVDTEIRLGAFPGHQKLCQFCISSMVQQGIQIIQIEDKTTIINNTPYQIFYKPQLSVCNPHSGKEYFRVPDSATFSICPGGEQPAMKSSSLPCWDLMPDISQSVLDASLLQKQIMLGFSPAPGADSSQCWSLPAIVRPEFPRQSVAVPLGNFRENGFCTRAIVLTYQEHLGVTYLTLSEDPSPRVIIHNRCPVKMLIKENIKDIPKFEVYCKKIPSECSIHHELYHQISSYPDCKTKDLLPSLLLRVEPLDEVTTEWSDAIDINSQGTQVVFLTGFGYVYVDVVHQCGTVFITVAPEGKAGPILTNTNRAPEKIVTFKMFITQLSLAVFDDLTHHKASAELLRLTLDNIFLCVAPGAGPLPGEEPVAALFELYCVEICCGDLQLDNQLYNKSNFHFAVLVCQGEKAEPIQCSKMQSLLISNKELEEYKEKCFIKLCITLNEGKSILCDINEFSFELKPARLYVEDTFVYYIKTLFDTYLPNSRLAGHSTHLSGGKQVLPMQVTQHARALVNPVKLRKLVIQPVNLLVSIHASLKLYIASDHTPLSFSVFERGPIFTTARQLVHALAMHYAAGALFRAGWVVGSLDILGSPASLVRSIGNGVADFFRLPYEGLTRGPGAFVSGVSRGTTSFVKHISKGTLTSITNLATSLARNMDRLSLDEEHYNRQEEWRRQLPESLGEGLRQGLSRLGISLLGAIAGIVDQPMQNFQKTSEAQASAGHKAKGVISGVGKGIMGVFTKPIGGAAELVSQTGYGILHGAGLSQLPKQRHQPSDLHADQAPNSHVKYVWKMLQSLGRPEVHMALDVVLVRGSGQEHEGCLLLTSEVLFVVSVSEDTQQQAFPVTEIDCAQDSKQNNLLTVQLKQPRVACDVEVDGVRERLSEQQYNRLVDYITKTSCHLAPSCSSMQIPCPVVAAEPPPSTVKTYHYLVDPHFAQVFLSKFTMVKNKALRKGFP

SEQ ID NO: 270612 - DNA, 12069 bp, Artificial Sequence
  derived and/or modified sequence
atgctggagagctacgtgacccccatcctgatgagctacgtgaacagatacatcaagaacctgaagcccagcgacctgcagctgagcctgtggggcggcgacgtggtgctgagcaagctggagctgaagctggacgtgctggagcaggagctgaagctgcccttcaccttcctgagcggccacatccacgagctgagaatccacgtgccctggaccaagctgggcagcgagcccgtggtgatcaccatcaacaccatggagtgcatcctgaagctgaaggacggcatccaggacgaccacgagagctgcggcagcaacagcaccaacagaagcaccgccgagagcaccaagagcagcatcaagcccagaagaatgcagcaggccgcccccaccgaccccgacctgccccccggctacgtgcagagcctgatcagaagagtggtgaacaacgtgaacatcgtgatcaacaacctgatcctgaagtacgtggaggacgacatcgtgctgagcgtgaacatcaccagcgccgagtgctacaccgtgggcgagctgtgggacagagccttcatggacatcagcgccaccgacctggtgctgagaaaggtgatcaacttcagcgactgcaccgtgtgcctggacaagagaaacgccagcggcaagatcgagttctaccaggaccccctgctgtacaagtgcagcttcagaaccagactgcacttcacctacgagaacctgaacagcaagatgcccagcgtgatcaagatccacaccctggtggagagcctgaagctgagcatcaccgaccagcagctgcccatgttcatcagaatcatgcagctgggcatcgccctgtactacggcgagatcggcaacttcaaggagggcgagatcgaggacctgacctgccacaacaaggacatgctgggcaacatcaccggcagcgaggacgagaccagaatcgacatgcagtaccccgcccagcacaagggccaggagctgtacagccagcaggacgaggagcagccccagggctgggtgagctgggcctggagcttcgtgcccgccatcgtgagctacgacgacggcgaggaggacttcgtgggcaacgaccccgccagcaccatgcaccagcagaaggcccagaccctgaaggaccccatcgtgagcatcggcttctactgcaccaaggccaccgtgaccttcaagctgaccgagatgcaggtggagagcagctactacagcccccagaaggtgaagagcaaggaggtgctgtgctgggagcaggagggcaccaccgtggaggccctgatgatgggcgagcccttcttcgactgccagatcggcttcgtgggctgcagagccatgtgcctgaagggcatcatgggcgtgaaggacttcgaggagaacatgaacagaagcgagaccgaggcctgcttcttcatctgcggcgacaacctgagcaccaagggcttcacctacctgaccaacagcctgttcgactacagaagccccgagaacaacggcaccagagccgagttcatcctggacagcacccaccacaaggagacctacaccgagatcgccggcatgcagagattcggcgccttctacatggactacctgtacaccatggagaacaccagcggcaagggcagcaccaaccagcaggacttcagcagcggcaagagcgaggacctgggcaccgtgcaggagaagagcaccaagagcctggtgatcggccccctggacttcagactggacagcagcgccgtgcacagaatcctgaagatgatcgtgtgcgccctggagcacgagtacgagccctacagcagactgaagagcgacatcaaggacgagaacgagaccatcctgaaccccgaggaggtggccctgctggaggagtacatccccaccagacacaccagcgtgaccctgctgaagtgcacctgcaccatcagcatggccgagttcaacctgctggaccacctgctgcccgtgatcatgggcgagaagaacagcagcaacttcatgaacaccaccaacttccagagcctgagacccctgcccagcatcagaatcctggtggacaagatcaacctggagcacagcgtgcccatgtacgccgagcagctggtgcacgtggtgagcagcctgacccagcccagcgacaacctgctgcactactgctacgtgcactgctacctgaagatcttcggcttccaggccggcctgaccagcctggactgcagcggcagctactgcctgcccgtgcccgtgatccccagcttcagcaccgccctgtacggcaagctgctgaagctgcccacctgctggaccaagagaagccagatcgccatcaccgagggcatcttcgagctgcccaacctgaccatccaggccaccagagcccagaccctgctgctgcaggccatctaccagagctggagccacctgggcaacgtgagcagcagcgccgtgatcgaggccctgatcaacgagatcttcctgagcatcggcgtgaagagcaagaaccccctgcccaccctggagggcagcatccagaacgtggagctgaagtactgcagcaccagcctggtgaagtgcgccagcggcaccatgggcagcatcaagatctgcgccaaggcccccgtggacagcggcaaggagaagctgatccccctgctgcagggccccagcgacaccaaggacctgcacagcaccaagtggctgaacgagagcagaaagcccgagagcctgctggcccccgacctgatggccttcaccatccaggtgccccagtacatcgactactgccacaacagcggcgccgtgctgctgtgcagcatccagggcctggccgtgaacatcgaccccatcctgtacacctggctgatctaccagccccagaagagaaccagcagacacatgcagcagcagcccgtggtggccgtgcccctggtgatgcccgtgtgcagaagaaaggaggacgaggtgagcatcggcagcgcccccctggccaagcagcagagctaccaggccagcgagtacgccagcagccccgtgaagaccaagaccgtgaccgagagcagacccctgagcgtgcccgtgaaggccatgctgaacatcagcgagagctgcagaagccccgaggagagaatgaaggagttcatcggcatcgtgtggaacgccgtgaagcacctgaccctgcagctggaggtgcagagctgctgcgtgttcatccccaacgacagcctgcccagccccagcaccatcgtgagcggcgacatccccggcaccgtgagaagctggtaccacggccagaccagcatgcccggcaccctggtgctgtgcctgccccagatcaagatcatcagcgccggccacaagtacatggagcccctgcaggagatccccttcgtgatccccagacccatcctggaggagggcgacgccttcccctggaccatcagcctgcacaacttcagcatctacaccctgctgggcaagcaggtgaccctgtgcctggtggagcccatgggctgcaccagcaccctggccgtgaccagccagaagctgctggccaccggccccgacaccagacacagcttcgtggtgtgcctgcacgtggacctggagagcctggagatcaagtgcagcaacccccaggtgcagctgttctacgagctgaccgacatcatgaacaaggtgtggaacaagatccagaagagaggcaacctgaacctgagccccaccagccccgagaccatggccggccccgtgcccaccagccccgtgagaagcagcatcggcaccgccccccccgacaccagcacctgcagccccagcgccgacatcggcaccaccaccgagggcgacagcatccaggccggcgaggagagccccttcagcgacagcgtgaccctggagcagaccaccagcaacatcggcggcaccagcggcagagtgagcctgtggatgcagtgggtgctgcccaagatcaccatcaagctgttcgcccccgaccccgagaacaagggcaccgaggtgtgcatggtgagcgagctggaggacctgagcgccagcatcgacgtgcaggacgtgtacaccaaggtgaagtgcaagatcgagagcttcaacatcgaccactacagaagcagcctgggcgaggagtgctggagcctgggccagtgcggcggcgtgttcctgagctgcaccgacaagctgaacagaagaaccctgctggtgagacccatcagcaagcaggaccccttcagcaactgcagcggcttcttccccagcaccaccaccaagctgctggacggcacccaccagcagcacggcttcctgagcctgacctacaccaaggccgtgaccaagaacgtgagacacaagctgaccagcagaaacgagagaagaagcttccacaagctgagcgagggcctgatggacggcagcccccacttcctgcacgagatcctgctgagcgcccaggccttcgacatcgtgctgtacttccccctgctgaacgccatcgccagcatcttccaggccaagctgcccaagacccagaaggagaagagaaagagccccggccagcccatgagaacccacaccctgaccagcagaaacctgcccctgatctacgtgaacaccagcgtgatcagaatcttcatccccaagaccgaggagatgcagcccaccgtggaggccaaccaggccgccaaggaggacaccgtggtgctgaagatcggcagcgtggccatggccccccaggccgacaaccccctgggcagaagcgtgctgagaaaggacatctaccagagagccctgaacctgggcatcctgagagaccccggcagcgagatcgaggacagacagtaccagatcgacctgcagagcatcaacatcggcaccgcccagtggcaccagctgaagcccgagaaggagagcgtgagcggcggcgtggtgaccgagaccgagagaaacagccagaaccccgccctggagtggaacatggccagcagcatcagaagacaccaggagagaagagccatcctgacccccgtgctgaccgacttcagcgtgagaatcaccggcgcccccgccgtgatcttcaccaaggtggtgagccccgagaacctgcacaccgaggagatcctggtgtgcggccacagcctggaggtgaacatcaccaccaacctggacttcttcctgagcgtggcccaggtgcagctgctgcaccagctgatcgtggccaacatgaccggcctggagcccagcaacaaggccgccgagatcagcaagcaggagcagaagaaggtggacatcttcgacggcggcatggccgagaccagcagcagatacagcggcgcccaggacagcggcatcggcagcgacagcgtgaagatcagaatcgtgcagatcgagcagcacagcggcgccagccagcacagaatcgccagacccagcagacagagcagcatcgtgaagaacctgaacttcatccccttcgacatcttcatcaccgccagcagaatcagcctgatgacctacagctgcatggccctgagcaagagcaagagccaggagcagaagaacaacgagaagaccgacaagagcagcctgaacctgcccgaggtggacagcgacgtggccaagcccaaccaggcctgcatcagcaccgtgaccgccgaggacctgctgagaagcagcatcagcttccccagcggcaagaagatcggcgtgctgagcctggagagcctgcacgccagcaccagaagcagcgccagacaggccctgggcatcaccatcgtgagacagcccggcagaagaggcaccggcgacctgcagctggagcccttcctgtacttcatcgtgagccagcccagcctgctgctgagctgccaccacagaaagcagagagtggaggtgagcatcttcgacgccgtgctgaagggcgtggccagcgactacaagtgcatcgaccccggcaagaccctgcccgaggccctggactactgcaccgtgtggctgcagaccgtgcccggcgagatcgacagcaagagcggcatcccccccagcttcatcaccctgcagatcaaggacttcctgaacggccccgccgacgtgaacctggacatcagcaagcccctgaaggccaacctgagcttcaccaagctggaccagatcaacctgttcctgaagaagatcaagaacgcccacagcctggcccacagcgaggagaccagcgccatgagcaacaccatggtgaacaaggacgacctgcccgtgagcaagtactacagaggcaagctgagcaagcccaagatccacggcgacggcgtgcagaagatcagcgcccaggagaacatgtggagagccgtgagctgcttccagaagatcagcgtgcagaccacccagatcgtgatcagcatggagaccgtgccccacaccagcaagccctgcctgctggccagcctgagcaacctgaacggcagcctgagcgtgaaggccacccagaaggtgcccggcatcatcctgggcagcagcttcctgctgagcatcaacgacttcctgctgaagaccagcctgaaggagagaagcagaatcctgatcggcccctgctgcgccaccgccaacctggaggccaagtggtgcaagcacagcggcaaccccggccccgagcagagcatccccaagatcagcatcgacctgagaggcggcctgctgcaggtgttctggggccaggagcacctgaactgcctggtgctgctgcacgagctgctgaacggctacctgaacgaggagggcaacttcgaggtgcaggtgagcgagcccgtgccccagatgagcagccccgtggagaagaaccagaccttcaagagcgagcagagcagcgacgacctgagaaccggcctgttccagtacgtgcaggacgccgagagcctgaagctgcccggcgtgtacgaggtgctgttctacaacgagaccgaggactgccccggcatgatgctgtggagataccccgagcccagagtgctgaccctggtgagaatcacccccgtgcccttcaacaccaccgaggaccccgacatcagcaccgccgacctgggcgacgtgctgcaggtgccctgcagcctggagtactgggacgagctgcagaaggtgttcgtggccttcagagagttcaacctgagcgagagcaaggtgtgcgagctgcagctgcccgacatcaacctggtgaacgaccagaagaagctggtgagcagcgacctgtggagaatcgtgctgaacagcagccagaacggcgccgacgaccagagcagcgccagcgagagcggcagccagagcacctgcgaccccctggtgacccccaccgccctggccgcctgcaccagagtggacagctgcttcaccccctggttcgtgcccagcctgtgcgtgagcttccagttcgcccacctggagttccacctgtgccaccacctggaccagctgggcaccgccgccccccagtacctgcagcccttcgtgagcgacagaaacatgcccagcgagctggagtacatgatcgtgagcttcagagagccccacatgtacctgagacagtggaacaacggcagcgtgtgccaggagatccagttcctggcccaggccgactgcaagctgctggagtgcagaaacgtgaccatgcagagcgtggtgaagcccttcagcatcttcggccagatggccgtgagcagcgacgtggtggagaagctgctggactgcaccgtgatcgtggacagcgtgttcgtgaacctgggccagcacgtggtgcacagcctgaacaccgccatccaggcctggcagcagaacaagtgccccgaggtggaggagctggtgttcagccacttcgtgatctgcaacgacacccaggagaccctgagattcggccaggtggacaccgacgagaacatcctgctggccagcctgcacagccaccagtacagctggagaagccacaagagcccccagctgctgcacatctgcatcgagggctggggcaactggagatggagcgagcccttcagcgtggaccacgccggcaccttcatcagaaccatccagtacagaggcagaaccgccagcctgatcatcaaggtgcagcagctgaacggcgtgcagaagcagatcatcatctgcggcagacagatcatctgcagctacctgagccagagcatcgagctgaaggtggtgcagcactacatcggccaggacggccaggccgtggtgagagagcacttcgactgcctgaccgccaagcagaagctgcccagctacatcctggagaacaacgagctgaccgagctgtgcgtgaaggccaagggcgacgaggactggagcagagacgtgtgcctggagagcaaggcccccgagtacagcatcgtgatccaggtgcccagcagcaacagcagcatcatctacgtgtggtgcaccgtgctgaccctggagcccaacagccaggtgcagcagagaatgatcgtgttcagccccctgttcatcatgagaagccacctgcccgaccccatcatcatccacctggagaagagaagcctgggcctgagcgagacccagatcatccccggcaagggccaggagaagcccctgcagaacatcgagcccgacctggtgcaccacctgaccttccaggccagagaggagtacgaccccagcgactgcgccgtgcccatcagcaccagcctgatcaagcagatcgccaccaaggtgcaccccggcggcaccgtgaaccagatcctggacgagttctacggccccgagaagagcctgcagcccatctggccctacaacaagaaggacagcgacagaaacgagcagctgagccagtgggacagccccatgagagtgaagctgagcatctggaagccctacgtgagaaccctgctgatcgagctgctgccctgggccctgctgatcaacgagagcaagtgggacctgtggctgttcgagggcgagaagatcgtgctgcaggtgcccgccggcaagatcatcatcccccccaacttccaggaggccttccagatcggcatctactgggccaacaccaacaccgtgcacaagagcgtggccatcaagctggtgcacaacctgaccagccccaagtggaaggacggcggcaacggcgaggtggtgaccctggacgaggaggccttcgtggacaccgagatcagactgggcgccttccccggccaccagaagctgtgccagttctgcatcagcagcatggtgcagcagggcatccagatcatccagatcgaggacaagaccaccatcatcaacaacaccccctaccagatcttctacaagccccagctgagcgtgtgcaacccccacagcggcaaggagtacttcagagtgcccgacagcgccaccttcagcatctgccccggcggcgagcagcccgccatgaagagcagcagcctgccctgctgggacctgatgcccgacatcagccagagcgtgctggacgccagcctgctgcagaagcagatcatgctgggcttcagccccgcccccggcgccgacagcagccagtgctggagcctgcccgccatcgtgagacccgagttccccagacagagcgtggccgtgcccctgggcaacttcagagagaacggcttctgcaccagagccatcgtgctgacctaccaggagcacctgggcgtgacctacctgaccctgagcgaggaccccagccccagagtgatcatccacaacagatgccccgtgaagatgctgatcaaggagaacatcaaggacatccccaagttcgaggtgtactgcaagaagatccccagcgagtgcagcatccaccacgagctgtaccaccagatcagcagctaccccgactgcaagaccaaggacctgctgcccagcctgctgctgagagtggagcccctggacgaggtgaccaccgagtggagcgacgccatcgacatcaacagccagggcacccaggtggtgttcctgaccggcttcggctacgtgtacgtggacgtggtgcaccagtgcggcaccgtgttcatcaccgtggcccccgagggcaaggccggccccatcctgaccaacaccaacagagcccccgagaagatcgtgaccttcaagatgttcatcacccagctgagcctggccgtgttcgacgacctgacccaccacaaggccagcgccgagctgctgagactgaccctggacaacatcttcctgtgcgtggcccccggcgccggccccctgcccggcgaggagcccgtggccgccctgttcgagctgtactgcgtggagatctgctgcggcgacctgcagctggacaaccagctgtacaacaagagcaacttccacttcgccgtgctggtgtgccagggcgagaaggccgagcccatccagtgcagcaagatgcagagcctgctgatcagcaacaaggagctggaggagtacaaggagaagtgcttcatcaagctgtgcatcaccctgaacgagggcaagagcatcctgtgcgacatcaacgagttcagcttcgagctgaagcccgccagactgtacgtggaggacaccttcgtgtactacatcaagaccctgttcgacacctacctgcccaacagcagactggccggccacagcacccacctgagcggcggcaagcaggtgctgcccatgcaggtgacccagcacgccagagccctggtgaaccccgtgaagctgagaaagctggtgatccagcccgtgaacctgctggtgagcatccacgccagcctgaagctgtacatcgccagcgaccacacccccctgagcttcagcgtgttcgagagaggccccatcttcaccaccgccagacagctggtgcacgccctggccatgcactacgccgccggcgccctgttcagagccggctgggtggtgggcagcctggacatcctgggcagccccgccagcctggtgagaagcatcggcaacggcgtggccgacttcttcagactgccctacgagggcctgaccagaggccccggcgccttcgtgagcggcgtgagcagaggcaccaccagcttcgtgaagcacatcagcaagggcaccctgaccagcatcaccaacctggccaccagcctggccagaaacatggacagactgagcctggacgaggagcactacaacagacaggaggagtggagaagacagctgcccgagagcctgggcgagggcctgagacagggcctgagcagactgggcatcagcctgctgggcgccatcgccggcatcgtggaccagcccatgcagaacttccagaagaccagcgaggcccaggccagcgccggccacaaggccaagggcgtgatcagcggcgtgggcaagggcatcatgggcgtgttcaccaagcccatcggcggcgccgccgagctggtgagccagaccggctacggcatcctgcacggcgccggcctgagccagctgcccaagcagagacaccagcccagcgacctgcacgccgaccaggcccccaacagccacgtgaagtacgtgtggaagatgctgcagagcctgggcagacccgaggtgcacatggccctggacgtggtgctggtgagaggcagcggccaggagcacgagggctgcctgctgctgaccagcgaggtgctgttcgtggtgagcgtgagcgaggacacccagcagcaggccttccccgtgaccgagatcgactgcgcccaggacagcaagcagaacaacctgctgaccgtgcagctgaagcagcccagagtggcctgcgacgtggaggtggacggcgtgagagagagactgagcgagcagcagtacaacagactggtggactacatcaccaagaccagctgccacctggcccccagctgcagcagcatgcagatcccctgccccgtggtggccgccgagcccccccccagcaccgtgaagacctaccactacctggtggacccccacttcgcccaggtgttcctgagcaagttcaccatggtgaagaacaaggccctgagaaagggcttcccctag

SEQ ID NO: 270613 - DNA, 12069 bp, Artificial Sequence
  derived and/or modified sequence
atgttggagagctacgttacaccaattttgatgagctacgtgaaccgttacatcaaaaatctcaagccctcagatctgcaactgagtctatggggaggcgatgtggtccttagtaaactcgagctgaagctggatgttctggagcaggagctcaagctgcctttcacatttctgagtggccatatccacgaactgaggatccacgtgccttggactaaattaggttctgagcccgtagtgataacaatcaatactatggagtgcattctgaagcttaaagatggcatccaggacgaccacgagagctgcggtagcaattccactaataggtctactgccgagtcaacaaaatctagtattaaacctcgtagaatgcagcaggccgcgcctaccgatccagatctgccacctggatatgtgcaatctctcattcggagagttgtaaacaacgtcaatattgttattaacaacctaattctgaagtacgttgaggatgatattgtgctgtctgtcaacatcaccagcgcagagtgttacaccgtgggcgagctctgggatagagcattcatggacatctctgctactgatctggttctcaggaaggtgatcaacttcagcgattgtactgtgtgtctagataaaagaaacgcatccgggaagattgagttttatcaggatccacttctctataagtgtagctttcgcaccaggctgcactttacctatgagaacctgaacagcaagatgcctagcgttatcaagattcataccctggtggaaagtttgaaactttcaattacagaccaacagctccctatgttcattcgtataatgcagctgggcatcgcgctgtattacggcgagatcggcaatttcaaggagggcgaaatcgaggatcttacctgtcataacaaagatatgcttggaaacataacaggatccgaagatgagaccagaattgatatgcagtatcccgcccagcacaaaggacaagagctgtattcacagcaggatgaagagcagcctcaaggctgggtaagctgggcttggtcttttgttccagctattgtgtcttatgacgacggcgaggaagactttgtgggaaacgacccagccagcaccatgcatcagcagaaagctcaaaccctgaaagatcccattgttagtatcggtttttattgcaccaaggctacagtcacctttaagctgacggagatgcaagtcgagtcgagttattatagcccgcagaaagtgaaatctaaagaggtgttgtgctgggagcaggaaggtacaacggtggaggccctgatgatgggtgagcccttcttcgactgccagattggtttcgtgggatgtagagcaatgtgcctgaaggggatcatgggcgtgaaagacttcgaagagaacatgaaccgatctgaaactgaggcatgcttcttcatctgcggggacaacctctcgactaagggttttacatacttgactaattccctgtttgactatagaagccccgagaataacggaacccgggcagagttcatcctggattcaactcaccacaaggagacatacacagagatagccggtatgcagcgatttggagctttctatatggattacctctacacaatggagaatacatcagggaaggggtctaccaaccaacaggatttttccagtggcaagagtgaagacctgggaacagtgcaggaaaagtccacaaagtctctggtcattggtccactggatttcaggctggactcaagtgcagtgcatcgcattctgaaaatgatcgtatgtgccctcgaacacgaatatgagccttatagccgacttaagtctgatattaaggacgaaaacgagaccatcctgaaccctgaggaagtagctctgttggaggagtatatccccacacgacacacaagcgtaacactcctcaagtgtacctgtacaatcagcatggccgagttcaaccttctggatcatctgcttccagtgatcatgggtgaaaagaactcttccaactttatgaacacaacaaactttcaatcccttcgaccgcttcccagcattcgtatactcgtggataaaataaatctggaacattccgtgcccatgtacgcggagcagttggtccacgtcgtgtcttctttgacgcagccttccgataatctccttcactattgctacgtgcactgttaccttaagatcttcggatttcaggccggtttgaccagcttggactgttccgggtcatattgcttgccagtacccgtgatcccatcctttagtacggctctgtatggaaaattactgaagctcccaacttgctggacaaagagatctcagatcgccattaccgaggggattttcgagctcccaaaccttacaatacaggcgacacgagcgcagactctgcttctgcaggccatctatcagtcttggtcgcatcttgggaatgtctcctcctccgctgttattgaagctctcattaatgagatatttctaagcattggcgtcaaatctaaaaatcctctccctaccctggagggcagcatacagaacgtagagcttaaatattgtagcacgagtctggttaagtgtgcctccggcacaatgggtagtatcaaaatttgtgccaaagcccctgtcgatagcgggaaggagaagctcattccgctactgcaagggcctagtgacactaaagatctgcacagcactaagtggttgaatgaaagtcgtaagccagagagccttctcgcccctgacctaatggcattcactattcaagtgcctcagtacatagattactgtcacaactccggagcggtgctgctctgctcaattcaaggcctggccgtcaacattgaccctattttatatacctggctgatatatcagcctcagaagcgcacatcccgccatatgcaacagcagccagtcgtggcagtgccactggtcatgcctgtctgtcggcggaaagaggacgaggtctccattggaagtgcaccccttgccaagcagcagtcctatcaagcctccgaatacgcaagctcacccgtcaagactaagacagttactgagtctagacctttaagtgtgccagttaaagccatgctgaatatctctgaatcttgcagaagccccgaagagagaatgaaggagttcatcggtattgtctggaacgccgtgaagcacttgaccctccagctggaggtccagtcatgttgcgtgtttatccctaacgactctctgccttccccttccacgattgtgtccggggatatcccggggaccgttcgttcctggtatcacggccagacttcaatgcctgggaccctggtgctgtgcctgccccaaatcaagataatatccgccggacataaatacatggaacctctacaggaaatcccattcgtcatacctcgccccatccttgaagagggggatgcctttccttggacgatctctctgcacaatttctccatttacacgctattgggaaaacaggtaaccctgtgtctggtggaacccatggggtgcacctccaccttagcagtgacgtcgcaaaagctgctggctacggggccagatactcggcattctttcgtggtatgcctccatgtggatcttgagtccctggagatcaagtgctcaaatcctcaggtacagctgttttatgagctgaccgacatcatgaacaaagtctggaacaagattcagaagaggggtaatttaaacctgagccccaccagtcccgaaactatggcaggccccgttcctactagccctgtgaggagcagtattggaacagccccaccagacaccagtacttgctcgccttctgctgacatcggcacaaccactgagggagactccattcaggccggcgaggaatccccgttttctgattctgtgaccttggagcagacaacctcaaacatcggtggaacgtcaggccgtgtcagtttatggatgcagtgggtcctgccaaaaattactattaagctgttcgcacccgatccagagaacaaaggtaccgaggtctgcatggtttcagaattagaggatttaagcgcgtcaattgacgttcaagatgtgtacactaaggtgaaatgcaaaattgaaagtttcaatatagaccactaccgatcaagtttgggcgaggaatgttggagtttaggccagtgtggcggtgtttttctcagctgtactgacaaacttaaccggcggacactgcttgtgaggcccatttccaagcaggaccccttcagcaactgcagcggcttcttcccaagtacaaccacgaagctcctagacggtacgcaccagcagcacggattcctcagcctgacctatacgaaagccgttaccaagaatgtccgccacaaactgacgagccgaaacgagcggcgtagttttcataagctcagcgagggactgatggacggcagcccccactttcttcacgagattttgctttccgcccaggcctttgatatcgtcctgtacttccctctgcttaacgctatagctagcatttttcaggcaaagctgcccaagactcagaaagaaaagcggaaatcgcctggacagccaatgaggacacatacgcttacttcccgcaaccttccgctgatatacgtgaacaccagcgttattcgtatttttatacccaagactgaggagatgcagcctaccgttgaggcaaaccaggccgcaaaggaagatacagtggtactgaagatcggaagcgtcgcaatggcacctcaggctgacaatcccttaggacggtcggtgctgcggaaagatatatatcagcgagctctgaacctcggcattctccgagaccctgggtcagaaattgaggacaggcaataccagatcgatttgcagagtataaacatcggtaccgcccagtggcaccagctaaagccagagaaagaatcagtctctggaggggtagtgacagaaaccgaacgtaatagtcagaatccagccttggagtggaacatggctagctccatcaggaggcaccaggagagaagggccattctcacgcctgtgctgacagatttcagcgttcgcatcacaggcgctccagctgtgatttttactaaggttgtctctccagaaaacttgcacacagaggagatcctcgtctgcgggcactccctggaggtaaatatcacaactaatcttgattttttccttagtgtcgcacaggttcagctgctgcaccaactcatcgttgctaatatgactggcctggagccttccaataaggcagctgaaatttccaagcaggaacagaaaaaagtggacatcttcgatggcggcatggctgagacctcttctaggtactccggggctcaggatagcggcatcggctcggacagcgtcaagataaggattgtgcagattgagcaacatagcggcgcatctcagcatagaattgcacgcccctcaaggcagtccagtattgttaaaaaccttaactttattccttttgatatttttatcaccgcgtctcgaatctctcttatgacctacagctgtatggccctgtctaaaagtaagagccaggaacagaaaaacaacgaaaaaaccgacaagtcgtccctaaacctgcccgaggtggactccgacgtagccaaacccaatcaagcctgtatctctactgtcaccgccgaggacctcttgcgttcatctattagcttccccagcggcaaaaaaattggtgttttgtctctcgagagcctacacgcatccacccggtcgtctgcccggcaggccctgggaataacaatcgtgcggcagcccggtaggaggggaacaggtgacttacaattggagcccttcctctatttcatagtgtcgcaacccagcctgctgctttcttgccaccaccgaaagcagcgggttgaggtgtctatctttgatgcggtcctgaagggagtggcctctgactacaaatgcatcgaccccggaaaaacgctaccagaggccctggactactgcacagtttggttacagactgtcccgggcgagattgacagcaagagcggcattccgccatcatttattaccctacagataaaagacttcctgaacggccctgcagacgtgaatctcgacatcagtaaacccctgaaagcaaatctgtcattcacgaaattagatcagattaacctgttcctgaaaaagattaagaatgcgcactctctagctcactctgaggagacctctgccatgtcgaataccatggtgaacaaggatgacctgcctgtttctaagtactaccgtggcaaactgtcaaagccgaagatccatggcgatggggtgcagaagatcagcgcccaagaaaatatgtggagggcagtgtcatgttttcagaagatatccgtgcaaacaacacagattgtgatctccatggaaaccgtcccgcacaccagtaagccttgcctgctcgcaagcctgagcaatttaaatggcagtctgtctgttaaagccacccaaaaggtacctggaatcattctggggagcagctttctgctgagtatcaacgattttctgctgaagaccagtctgaaagagaggtcaaggatcctgatcgggccatgctgcgccactgccaacctggaagcgaaatggtgcaaacatagtggcaaccctgggccagagcagtctatccccaaaatcagtattgacctacgtggaggactcctccaggtgttctggggtcaggagcatctaaattgtcttgtactgctgcacgagctcttgaatggctatctcaatgaagagggtaatttcgaggtccaggtttctgaaccagtgcctcagatgtcctcaccggtggagaagaaccagacctttaagtcagaacaatccagtgatgacctccgtaccggcctgtttcaatatgttcaggatgctgagagtctcaaactgcctggcgtctatgaggtattattctataatgaaacagaggactgccccggaatgatgttgtggagatacccagagccacgcgttctcacgctggtacgaatcactccagtgccatttaataccactgaggaccctgacataagtacagcggatctgggggacgttctgcaggttccgtgtagtctagagtactgggacgagctccagaaggtcttcgtggcgttcagggagttcaatcttagtgagtcaaaagtctgtgagctacagctgccagacatcaacctggtcaatgatcaaaaaaaactagtgagctccgacctgtggcggatcgtcttgaacagcagccagaacggcgctgatgatcagtcgtcagccagcgaaagcggatcacaatctacatgcgaccctctagtgacgccaactgccctggctgcatgtacacgagtcgactcttgtttcacgccttggtttgttccatccctgtgcgttagctttcaattcgcacacctagagttccatctatgtcatcacctagatcaacttggcacagccgctcctcagtatctgcagccgtttgtgtcagacagaaacatgccatcagagctggagtacatgatagtctcttttcgtgagccgcacatgtatctgaggcagtggaacaatggaagcgtctgtcaggaaatccagtttcttgcacaggcggactgtaagttactcgagtgcaggaatgtgacaatgcagagtgtggttaaaccctttagcattttcggccagatggcggtctcttccgacgtggtggaaaaactattggattgcaccgtgatcgttgacagcgtgttcgtgaatctggggcagcatgtggtccacagcttgaatacggccattcaggcatggcagcagaataagtgtcctgaagtggaagagctcgttttttcccatttcgtgatttgcaacgatacacaggagacgttgcggttcggacaggtcgacaccgatgaaaatatcctgctcgcctccctacattcacaccagtactcttggcgatcacataaaagcccacaattgctccatatttgtattgaggggtgggggaactggaggtggtctgaacctttctctgttgaccacgccggaacatttattagaactattcaataccggggccgaactgctagccttataatcaaagtgcaacagctaaacggcgtgcagaagcagatcattatttgcgggagacagatcatttgctcctacctctctcagagtatcgaacttaaggttgtgcagcattatatcgggcaggatggccaggcagtcgttcgggaacattttgattgtctgaccgcaaaacagaagttgccaagttacatcctggagaataatgagctcacagagctgtgcgttaaggccaagggtgacgaggattggtccagggatgtgtgcctcgagagtaaggcccccgagtattctatagtcatacaggttccctcctctaactcgtcaatcatttacgtgtggtgtaccgtgctgacactagagcctaatagccaggtgcagcaaaggatgatcgtctttagcccactgtttattatgcgttcccacctgcctgacccaataatcatccatcttgaaaaacgatctctgggcctgagcgagacacagataattccagggaaagggcaagagaagcctctccaaaatatcgagcccgatctcgtgcatcaccttactttccaagcaagagaagagtatgacccatcagactgcgctgtccctatttcgacgtctctaatcaaacagattgcaactaaggttcatcccggaggtaccgtaaatcagatcctcgatgagttttacggtcccgagaagagcctccagcccatctggccatataataaaaaggattctgaccgtaacgagcagctgagccagtgggactctcccatgcgggtgaaattgtcaatttggaagccgtatgtacgcacccttttgatcgaattactcccctgggctctgttaatcaatgaatcaaaatgggatttgtggttatttgaaggggaaaaaatcgtgctgcaagttccggccggcaaaattatcatcccacctaactttcaggaggccttccagattggtatttattgggctaacacaaataccgtacacaaatcggtggcaataaagctcgtccacaatttgacatctcctaaatggaaagatggcgggaatggagaggtggtgacgctggacgaagaagcgttcgtagacaccgaaattcgcctgggggccttccccgggcaccaaaagttatgccagttttgtatcagcagcatggtccagcagggtatccagattatacagattgaagataaaaccacgataatcaataacacaccttaccagattttttataagccgcagttgtctgtttgcaacccgcactcaggtaaggagtacttcagggtaccagatagtgctaccttctctatttgtccagggggggaacagccagcaatgaaaagttcgagcttgccttgctgggacctgatgccagatatctctcagtccgtgctggatgccagcctgctccaaaagcagataatgctagggttcagtcctgctcccggagccgactcttcccagtgttggtccctgccagcaatagttagacctgaatttcccagacagtcagtggcagtgccgctgggtaacttccgggagaatggattctgcactcgtgccatcgtgctcacctatcaggaacatctgggtgtgacttatttgacactgagcgaggaccctagcccccgggtcattatccataacaggtgcccagtgaagatgctgattaaagagaacatcaaggatatccccaagttcgaggtgtactgcaaaaagattcctagcgagtgttctatacatcacgagttataccaccagatatcttcttatccggactgtaagaccaaggatctcctcccgtcactgctgttgcgtgtggagcctttagacgaggtcactactgagtggagcgatgcaatcgacatcaactcccagggcacgcaagtggtattcttaactggattcggatatgtgtatgttgacgttgtccaccagtgcgggaccgtgttcatcacggtggcgcctgaaggaaaggctgggccaatcctgaccaatactaaccgcgcccccgagaagatagtgacctttaaaatgttcatcacacagctgagcttggccgtttttgacgacctaacgcatcacaaagccagtgccgaattgcttagattaactcttgacaacatctttttgtgcgtggcccctggcgcaggccccttgccgggcgaagaaccagtggcagcgttattcgagctgtactgtgttgagatctgctgtggcgatttgcaactggacaatcaactctacaataagtcaaatttccactttgcggtgctggtctgtcagggggaaaaggccgaacccatacagtgctcaaagatgcagagcctcctcataagcaataaagagctggaggaatacaaggaaaaatgctttattaagttgtgtatcactctgaatgagggaaaatcaatactttgtgatataaatgagtttagtttcgagctgaagcccgcaagactctacgtagaggacacttttgtttattatatcaagacactattcgacacttatctgcccaatagcagactggcgggacatagtactcacttatcaggcgggaagcaggtgttgccgatgcaggtgacgcaacatgctcgagctctcgtgaacccagtaaaactgcgaaagttggtgattcagcctgtcaaccttctggtgtctatccacgcctcactgaagttatacattgccagcgaccatacccctctgagcttttccgtgttcgaacgtggtccaatcttcacaaccgctcggcagctggtccatgctctggcaatgcattacgcagctggagccttattcagagctggctgggttgtggggagtctggacattctgggctctccagcttcactcgtaaggagtattgggaatggcgttgccgacttttttcggttaccgtacgaaggcttaactcggggccctggagctttcgtcagtggcgtgagtcggggcaccacttcttttgttaagcacataagcaaagggacactcacatccattaccaatttggctacttcactggcccgtaacatggatcgactgtcactcgacgaggagcactataaccgacaggaggaatggagacggcaattgcccgaatcactcggagagggccttaggcaggggttgagccggcttggaatcagtctcctgggcgctattgccgggatcgtagatcagcctatgcagaattttcagaagacgagcgaagctcaagcatcagccggccataaggccaagggcgtgatttccggagtaggaaagggaatcatgggagtatttaccaagcctatcgggggcgctgctgagctggtatcacaaaccggctacggcatcctgcatggcgcaggtttgtcgcagctgcccaagcaacggcatcagccatctgatctccatgcagatcaggccccaaacagtcacgtcaagtatgtctggaagatgctccagtcactcggtcgcccagaagtgcatatggcactggacgtagtcttagtccgcggtagcggacaagagcacgagggttgcttactgctcacatcggaggtattgttcgtagtcagcgtcagcgaggacacacagcagcaggctttccccgtgaccgagatcgactgtgcccaggactctaagcagaacaacctgctgactgtacaactgaagcagcctagagtagcgtgcgacgttgaggtggacggcgtccgcgagcgactctccgaacagcagtataaccgtttagtcgactatataacaaagacatcttgtcatctggctcccagctgttcatccatgcaaatcccatgccccgtggtcgccgccgagcccccccctagcactgtcaaaacttatcattacctggttgacccacactttgcacaggtctttctcagtaagttcactatggttaagaacaaggcactgaggaaggggtttccctag

SEQ ID NO: 270614 - DNA, 12069 bp, Artificial Sequence
  derived and/or modified sequence
atgctggagagctatgtgacccccatcctgatgtcctatgtgaaccgctacatcaagaacctgaagcccagcgacctgcagctgagcctgtggggcggagatgtggtgctgagcaagctggagctgaagctggatgtgctggagcaggagctgaagctgcccttcaccttcctgagcggccacatccacgagctgcgcatccacgtgccctggaccaagctgggcagcgagcctgtggtgatcaccatcaacaccatggagtgcatcctgaagctgaaggatggcatccaggatgaccacgagagctgtggcagcaacagcaccaacagaagcacagctgagagcaccaagagcagcatcaagcccaggaggatgcagcaggccgcccccacagatcctgacctgcccccaggctacgtgcagagcctcatcagaagagtggtgaacaacgtgaacatcgtcatcaacaacctgatcctgaagtatgtggaggatgacatcgtgctgtctgtgaacatcaccagcgctgagtgctacacagtgggggagctgtgggaccgggccttcatggacatcagcgccacagacctggtgctgaggaaggtgatcaacttcagtgactgcaccgtgtgcctggacaagagaaatgccagcggcaagattgagttctaccaggaccccctgctgtacaagtgcagcttccgcacccggctgcacttcacctatgagaacctgaacagcaagatgcccagcgtcatcaagatccacaccctggtggagagcctgaagctgagcatcacagaccagcagctgcccatgttcatccgcatcatgcagctgggcatcgccctgtactacggggagatcggcaacttcaaggagggggagattgaggacctgacctgccacaacaaggacatgctgggcaacatcaccggctctgaagatgagaccagaattgacatgcagtacccagcccagcacaagggccaggagctgtacagccagcaggatgaggagcagccccagggctgggtgtcctgggcctggagctttgtgcctgccatcgtgtcctatgatgatggagaggaggactttgtgggcaatgaccctgccagcaccatgcaccagcagaaggcccagaccctgaaggaccccatcgtgtccatcggcttctactgcaccaaggccaccgtgaccttcaagctgacagagatgcaggtggagagcagctactacagcccccagaaggtgaagagcaaggaggtgctgtgctgggagcaggagggcaccaccgtggaggccctgatgatgggagagcccttctttgactgccagattggatttgtgggctgccgggccatgtgcctgaagggcatcatgggcgtgaaggactttgaggagaacatgaacagaagtgaaacagaggcctgcttcttcatctgtggggacaacctgagcaccaagggcttcacctacctgaccaacagcctgtttgactaccgcagcccagaaaataatggcaccagggctgagttcatcctggacagcacccaccacaaggagacctacacagaaattgctggcatgcagagatttggagccttctacatggactacctgtacaccatggagaacaccagcggcaagggcagcaccaaccagcaggacttcagcagcggcaagtctgaggacctgggcaccgtgcaggagaagagcaccaagagcctggtgattggccccctggacttccggctggacagcagcgctgtgcaccgcatcctgaagatgattgtgtgtgccctggagcacgagtatgagccctacagccggctgaagagtgacatcaaggatgaaaatgagaccatcctgaaccctgaggaggtggccctgctggaggagtacatccccaccaggcacacctctgtgaccctgctgaagtgcacctgcaccatctccatggccgagttcaacctgctggaccacctgctgcctgtgatcatgggagagaagaacagcagcaacttcatgaacaccaccaacttccagagcctgcggcccctgcccagcatccgcatcctggtggacaagatcaacctggagcacagcgtgcccatgtatgcagagcagctggtgcacgtggtgagcagcctgacccagcccagcgacaacctgctgcactactgctacgtgcactgctacctgaagatcttcggcttccaggccggcctgaccagcctggactgcagcggcagctactgcctgcctgtgcctgtgatccccagcttcagcacagccctgtatggcaagctgctgaagctgcccacctgctggaccaagaggagccagatcgccatcacagagggcatctttgagctgcccaacctgaccatccaggccacccgggcccagaccctgctgctgcaggccatctaccagagctggagccacctgggcaatgtgagcagcagcgctgtgattgaggccctgatcaatgagatcttcctgagcattggagtgaagagcaagaaccccctgcccaccctggagggcagcatccagaatgtggagctgaagtactgcagcaccagcctggtgaagtgtgccagcggcaccatgggcagcatcaagatctgtgccaaggcccctgtggacagcggcaaggagaagctgatccccctgctgcagggccccagcgacaccaaggacctgcacagcaccaagtggctgaatgaaagcaggaagccagagagcctgctggccccagacctgatggccttcaccatccaggtgccccagtacatcgactactgccacaacagcggggctgtgctgctgtgcagcatccagggcctggccgtgaacatcgaccccatcctgtacacctggctgatctaccagccccagaagaggaccagccgccacatgcagcagcagcctgtggtggccgtgcccctggtgatgcctgtgtgcaggaggaaagaagatgaggtgtccatcggcagcgcccccctggccaagcagcagagctaccaggcctctgaatatgccagcagccctgtgaagaccaagacagtgacagagagccggcccctgtctgtgcctgtgaaggccatgctgaacatcagcgagagctgccgcagccctgaggagaggatgaaggagttcatcggcatcgtgtggaatgctgtgaagcacctgaccctgcagctggaggtgcagagctgctgcgtgttcatccccaatgacagcctgcccagccccagcaccatcgtgtctggggacatccctggcaccgtgcgctcctggtaccacggccagacctccatgcctggcaccctggtgctgtgcctgccccagatcaagatcatctctgctggccacaagtacatggagcccctgcaggagatcccctttgtgatcccccggcccatcctggaggagggagatgccttcccctggaccatcagcctgcacaacttcagcatctacaccctgctgggcaagcaggtgaccctgtgcctggtggagcccatgggctgcaccagcaccctggccgtgaccagccagaagctgctggccactggaccagacaccaggcacagctttgtggtgtgcctgcacgtggacctggagagcctggagatcaagtgcagcaacccccaggtgcagctgttctatgagctgacagacatcatgaacaaggtgtggaacaagatccagaagaggggcaacctgaacctgagccccaccagccctgagaccatggccggccctgtgcccaccagccctgtgcgcagcagcattggaacagcccccccagacaccagcacctgcagccccagcgctgacatcggcaccaccacagaaggagacagcatccaggccggggaggagagccccttcagtgacagcgtgaccctggagcagaccaccagcaacattggaggcaccagcggccgggtgtccctgtggatgcagtgggtgctgcccaagatcaccatcaagctgtttgccccagaccctgaaaataaaggaacagaggtgtgcatggtgtctgagctggaggacctgagcgccagcattgatgtgcaggatgtgtacaccaaggtgaagtgcaagattgagagcttcaacatcgaccactaccgcagcagcctgggggaggagtgctggagcctgggccagtgtggcggcgtcttcctgagctgcacagacaagctgaacagaaggaccctgctggtgcggcccatcagcaagcaggaccccttcagcaactgcagcggcttcttccccagcaccaccaccaagctgctggatggcacccaccagcagcacggcttcctgagcctgacctacaccaaggctgtgaccaagaatgtgcgccacaagctgaccagcagaaatgaaagaagaagcttccacaagctgtctgagggcctgatggatggcagcccccacttcctgcacgagatcctgctgagcgcccaggcctttgatattgtgctgtacttccccctgctgaatgccatcgccagcatcttccaggccaagctgcccaagacccagaaggagaagaggaagagccctggccagcccatgaggacccacaccctgaccagcaggaacctgcccctcatctacgtgaacaccagcgtcatccgcatcttcatccccaagacagaggagatgcagcccaccgtggaggccaaccaggccgccaaggaggacacagtggtgctgaagattggctctgtggccatggccccccaggccgacaaccccctgggccgctctgtgctgaggaaggacatctaccagagggccctgaacctgggcatcctgcgggaccccggcagcgagattgaagatcggcagtaccagattgacctgcagagcatcaacatcggcacagcccagtggcaccagctgaagccagagaaggagagcgtgtctgggggcgtggtgacagaaacagaaagaaacagccagaacccagccctggagtggaacatggccagcagcatcagaagacaccaggagcggcgggccatcctgacccctgtgctgacagacttctctgtgcgcatcaccggggccccagctgtgatcttcaccaaggtggtgtccccagagaacctgcacacagaggagatcctggtgtgtggccacagcctggaggtgaacatcaccaccaacctggacttcttcctgtctgtggcccaggtgcagctgctgcaccagctgattgtggccaacatgacaggcctggagcccagcaacaaggctgctgagatcagcaagcaggagcagaagaaggtggacatctttgatggcggcatggccgagaccagcagccgctacagcggggcccaggacagcggcatcggcagtgacagcgtgaagatcagaattgtgcagatcgagcagcacagcggggccagccagcacagaattgcccggcccagccggcagagcagcatcgtgaagaacctgaacttcatcccctttgacatcttcatcacagccagccgcatcagcctgatgacctacagctgcatggccctgagcaagagcaagagccaggagcagaagaacaatgagaagacagacaagagcagcctgaacctgcctgaggtggacagtgatgtggccaagcccaaccaggcctgcatcagcacagtgacagctgaggacctgctgcggagcagcatctccttccccagcggcaagaagattggagtgctgagcctggagagcctgcacgccagcaccaggagcagcgcccggcaggccctgggcatcaccatcgtgcggcagcctggaagaagaggcaccggggacctgcagctggagcccttcctgtacttcatcgtgtcccagcccagcctgctgctgagctgccaccacaggaagcagagggtggaggtgtccatctttgatgctgtgctgaagggcgtggccagtgactacaagtgcatcgaccccgggaagaccctgcctgaggccctggactactgcaccgtgtggctgcagacagtgcctggagaaattgacagcaagagcggcatccccccatccttcatcaccctgcagatcaaggacttcctgaatggaccagcagatgtgaacctggacatcagcaagcccctgaaggccaacctgtccttcaccaagctggaccagatcaacctcttcctgaagaagatcaagaatgcccacagcctggcccacagcgaggagaccagcgccatgagcaacaccatggtgaacaaggatgacctgcctgtgtccaagtactaccggggcaagctgagcaagcccaagatccatggagatggagtgcagaagatcagcgcccaggagaacatgtggagggctgtgtcctgcttccagaagatctctgtgcagaccacccagatcgtcatctccatggagaccgtgccccacaccagcaagccctgcctgctggccagcctgagcaacctgaatggcagcctgtctgtgaaggccacccagaaggtgcccggcatcatcctgggcagcagcttcctgctgagcatcaatgacttcctgctgaagaccagcctgaaggagaggagccgcatcctgattggcccctgctgtgccacagccaacctggaggccaagtggtgcaagcacagcggcaaccctggccctgagcagagcatccccaagatcagcattgacctgcggggcggcctgctgcaggtgttctggggccaggagcacctgaactgcctggtgctgctgcacgagctgctgaatggctacctgaatgaggagggcaactttgaggtgcaggtgtctgagcctgtgccccagatgagcagccctgtggagaagaaccagaccttcaagtctgagcagagcagtgatgacctgaggacaggcctcttccagtatgtgcaggatgctgagagcctgaagctgcccggggtgtatgaggtgctcttctacaatgaaacagaggactgccccggcatgatgctgtggagatacccagagccccgggtgctgaccctggtgcgcatcacccctgtgcccttcaacaccacagaagatcctgacatcagcacagctgacctgggagatgtgctgcaggtgccctgcagcctggagtactgggatgagctgcagaaggtgtttgtggccttccgggagttcaacctgtctgagagcaaggtgtgtgagctgcagctgcctgacatcaacctggtgaatgaccagaagaagctggtgtccagtgacctgtggagaattgtgctgaacagcagccagaatggagcagatgaccagagcagcgccagcgagagcggcagccagagcacctgtgaccccctggtgacccccacagccctggccgcctgcaccagggtggacagctgcttcaccccctggtttgtgcccagcctgtgtgtgtccttccagtttgcccacctggagttccacctgtgccaccacctggaccagctgggcacagctgccccccagtacctgcagccctttgtgtctgacaggaacatgcccagcgagctggagtacatgattgtgtccttccgggagccccacatgtacctgcggcagtggaacaatggatctgtgtgccaggagatccagttcctggcccaggccgactgcaagctgctggagtgcagaaatgtgaccatgcagagcgtggtgaagcccttcagcatcttcggccagatggctgtgtccagtgatgtggtggagaagctgctggactgcaccgtgattgtggacagcgtgtttgtgaacctgggccagcacgtggtgcacagcctgaacacagccatccaggcctggcagcagaacaagtgcccagaggtggaggagctggtgttcagccacttcgtcatctgcaatgacacccaggagaccctgcgcttcggccaggtggacacagatgagaacatcctgctggccagcctgcacagccaccagtacagctggaggagccacaagagcccccagctgctgcacatctgcatcgagggctggggcaactggcgctggagcgagcccttctctgtggaccatgctggcaccttcatccgcaccatccagtaccggggccgcacagccagcctcatcatcaaggtgcagcagctgaatggagtgcagaagcagatcatcatctgtggccggcagatcatctgcagctacctgagccagagcattgagctgaaggtggtgcagcactacatcggccaggacggccaggccgtggtgcgggagcactttgactgcctgacagccaagcagaagctgcccagctacatcctggagaacaatgagctgacagagctgtgtgtgaaggccaagggagatgaggactggagcagagatgtgtgcctggagagcaaggcccctgagtacagcatcgtcatccaggtgcccagcagcaacagcagcatcatctacgtgtggtgcaccgtgctgaccctggagcccaacagccaggtgcagcagaggatgattgtgttcagccccctcttcatcatgaggagccacctgcctgaccccatcatcatccacctggagaagaggagcctgggcctgtctgagacccagatcatccctgggaagggccaggagaagcccctgcagaacatcgagccagacctggtgcaccacctgaccttccaggcccgggaggagtatgaccccagcgactgtgctgtgcccatcagcaccagcctcatcaagcagatcgccaccaaggtgcaccctgggggcaccgtgaaccagatcctggatgagttctacggccctgagaagagcctgcagcccatctggccctacaacaagaaggacagcgacagaaatgagcagctgagccagtgggacagccccatgagggtgaagctgagcatctggaagccctacgtgaggaccctgctgattgagctgctgccctgggccctgctgatcaatgaaagcaagtgggacctgtggctgtttgaaggagagaagatcgtgctgcaggtgcctgctgggaagatcatcatcccccccaacttccaggaggccttccagatcggcatctactgggccaacaccaacacagtgcacaagtctgtggccatcaagctggtgcacaacctgaccagccccaagtggaaggatggcggcaatggagaggtggtgaccctggatgaggaggcctttgtggacacagagatccggctgggcgccttccctggccaccagaagctgtgccagttctgcatcagctccatggtgcagcagggcatccagatcatccagatcgaggacaagaccaccatcatcaacaacaccccctaccagatcttctacaagccccagctgtctgtgtgcaacccccacagcggcaaggagtacttccgggtgcctgacagcgccaccttcagcatctgccctggaggagagcagcctgccatgaagagcagcagcctgccctgctgggacctgatgccagacatcagccagagcgtgctggatgccagcctgctgcagaagcagatcatgctgggcttcagccctgcccctggagctgacagcagccagtgctggagcctgcctgccatcgtgcggcctgagttcccccggcagagcgtggccgtgcccctgggcaacttccgggagaatggcttctgcacccgggccatcgtgctgacctaccaggagcacctgggcgtgacctacctgaccctgtctgaggaccccagccccagggtcatcatccacaaccgctgccctgtgaagatgctgatcaaggagaacatcaaggacatccccaagtttgaggtgtactgcaagaagatccccagtgaatgttccatccaccacgagctgtaccaccagatcagcagctacccagactgcaagaccaaggacctgctgcccagcctgctgctgcgggtggagcccctggatgaggtgaccacagagtggagcgatgccatcgacatcaacagccagggcacccaggtggtgttcctgaccggcttcggctacgtgtatgtggatgtggtgcaccagtgtggcaccgtcttcatcaccgtggcccctgagggcaaggccggccccatcctgaccaacaccaacagagcccctgagaagatcgtgaccttcaagatgttcatcacccagctgagcctggccgtgtttgatgacctgacccaccacaaggccagcgctgagctgctgcggctgaccctggacaacatcttcctgtgtgtggcccctggagctggccccctgcctggagaggagcctgtggccgccctgtttgagctgtactgtgtggagatctgctgcggggacctgcagctggacaaccagctgtacaacaagagcaacttccactttgctgtgctggtgtgccagggcgagaaggccgagcccatccagtgcagcaagatgcagagcctgctgatcagcaacaaggagctggaggagtacaaggagaagtgcttcatcaagctgtgcatcaccctgaatgaaggcaagagcatcctgtgtgacatcaatgagttctcctttgagctgaagccagcccggctgtatgtggaggacacctttgtgtactacatcaagaccctgtttgacacctacctgcccaacagccggctggccggccacagcacccacctgagcggcggcaagcaggtgctgcccatgcaggtgacccagcacgcccgggccctggtgaaccctgtgaagctgaggaagctggtgatccagcctgtgaacctgctggtgtccatccacgccagcctgaagctgtacatcgccagtgaccacacccccctgtccttctctgtgtttgagcggggccccatcttcaccacagcccggcagctggtgcacgccctggccatgcactacgccgccggggccctcttccgggccggctgggtggtgggcagcctggacatcctgggcagccctgccagcctggtgcgcagcattggaaatggagtggccgacttcttccggctgccctatgagggcctgacccggggccctggggcctttgtgtctggagtgtcccggggcaccaccagctttgtgaagcacatcagcaagggcaccctgaccagcatcaccaacctggccaccagcctggccaggaacatggaccggctgagcctggatgaggagcactacaaccggcaggaggagtggaggcggcagctgcctgagagcctgggggagggcctgcggcagggcctgagccggctgggcatcagcctgctgggcgccatcgccggcatcgtggaccagcccatgcagaacttccagaagaccagcgaggcccaggccagcgctggccacaaggccaagggcgtcatcagcggcgtgggcaagggcatcatgggcgtcttcaccaagcccatcggcggcgctgctgagctggtgtcccagacaggctacggcatcctgcacggggccggcctgagccagctgcccaagcagaggcaccagcccagcgacctgcatgctgaccaggcccccaacagccacgtgaagtatgtgtggaagatgctgcagagcctgggccggcctgaggtgcacatggccctggatgtggtgctggtgcggggcagcggccaggagcacgagggctgcctgctgctgaccagcgaggtgctgtttgtggtgtctgtgtctgaggacacccagcagcaggccttccctgtgacagaaattgactgtgcccaggacagcaagcagaacaacctgctgactgtgcagctgaagcagccccgggtggcctgtgatgtggaggtggatggagtgcgggagcggctgtctgagcagcagtacaaccggctggtggactacatcaccaagaccagctgccacctggcccccagctgcagctccatgcagatcccctgccctgtggtggccgctgagcccccacccagcacagtgaagacctaccactacctggtggacccccactttgcccaggtgttcctgagcaagttcaccatggtgaagaacaaggccctgaggaagggcttcccctag

SEQ ID NO: 270615 - DNA, 12069 bp, Artificial Sequence
  derived and/or modified sequence
atgctggagagctacgtgacccccatcctgatgagctacgtgaacaggtatattaagaatttaaaaccaagcgacctccagctgagtctgtgggggggtgacgtggtgctgtccaagctcgaattaaagctggacgttctagagcaggagctgaagcttccctttaccttcctgagtgggcatatacatgagctgagaatccacgtaccctggacaaagcttggtagcgagccagttgtgatcacgataaacacgatggagtgcattctaaaactgaaggatgggatacaggacgatcatgagagttgcgggtccaactccacgaacagaagcactgcagagtctacaaagagtagcatcaaacctcggcgcatgcagcaggcggctccaaccgatccagacctgccccccggctacgtgcaatctttgataaggcgggttgttaataacgtgaatatagtgataaacaatctaatcctaaaatatgtggaggacgatattgtcctatccgtaaacattacatccgctgagtgctacaccgttggggaactctgggacagggcgttcatggacattagtgccactgacttggtgctgagaaaagtgattaattttagcgactgtaccgtttgcctcgacaagaggaacgcatccggaaaaatcgagttttatcaggatcctctcctatacaaatgcagcttcaggactagactgcatttcacatacgagaacttaaattcaaaaatgccttcggttatcaaaatccataccctggtggagtccctgaaactttctattactgatcagcaactgcccatgttcattcgcatcatgcaactgggcatcgcactctactacggggaaatcggaaattttaaggagggtgagatcgaagacttaacttgccacaataaagatatgctaggcaatatcaccgggagtgaagatgagacaagaatcgatatgcaatatcccgcccagcacaaaggacaggagctgtactcacagcaagatgaagaacaaccccagggatgggtctcatgggcctggtcttttgtgccagcaatcgtgtcgtatgacgatggcgaggaggatttcgtgggtaatgacccagcctcaaccatgcaccagcagaaggctcaaacactgaaagacccaatagtcagcatcggattttactgtaccaaggctacagtgacattcaaacttacagagatgcaagtggagtcctcatactactccccacagaaggtaaagtctaaggaggtcctatgttgggagcaagaaggaaccactgtagaggccctgatgatgggcgagccattcttcgattgtcaaatcgggtttgtggggtgcagggcaatgtgtctgaaaggtataatgggggtcaaagactttgaggagaatatgaatcggagcgagaccgaagcctgttttttcatctgcggggacaatctgtccactaaaggcttcacctatctaaccaattctctgttcgactaccgctcccctgagaacaacggaactagagcggagttcattttagacagcactcaccataaagagacctatactgaaattgcgggcatgcagaggttcggggccttttacatggactacctgtacactatggaaaacacaagcgggaaaggttcgacgaatcagcaagacttcagctctgggaagagcgaggatctcggcactgtccaggagaaatctaccaagtcgcttgtgattggaccactagactttagactggattcttctgcagtacacaggatcctaaaaatgattgtgtgcgcgctggagcacgaatacgaaccatattctaggttaaagagtgatatcaaagacgagaacgaaaccatcctgaatcccgaggaagtagccctgttagaagagtatattcctacccgtcacacatctgtgacccttctgaaatgtacatgtactatatccatggcggagttcaatcttctcgaccacctactgcctgtcataatgggcgaaaagaacagcagcaactttatgaataccactaatttccagtcccttaggcccctcccgtccatcagaattttggtcgacaagatcaaccttgaacactccgtgcccatgtatgcagaacagctggtgcacgtggtgtcaagtcttacgcagccatcggacaatctactccattactgttatgttcattgctatctgaagatattcggattccaagcaggactgaccagcctggactgctctgggtcatattgcctgccagtaccagtgataccaagtttctccaccgccctgtatggaaagctgctcaaactgcctacgtgttggacgaaaaggtcacagatagccataacagaggggatttttgagctgccaaatcttacgattcaggccaccagggcccagacgcttctcctgcaggcaatttaccagtcgtggtctcacctgggcaacgtgtccagctcagccgttatcgaagccctgatcaatgagatttttctgtccattggtgtgaagagcaaaaatcccctccccaccctggaaggctccattcagaatgtagagctgaaatattgcagcacgtccctggtgaaatgcgctagtggaacaatgggatcaatcaaaatctgtgcaaaggccccagtcgactcaggaaaggagaaactcattccactgctgcaaggccccagtgacaccaaagaccttcattccaccaaatggttgaacgagtctaggaagccagaaagcctgctggcccccgacctgatggctttcaccatccaagtgcctcaatatattgattactgtcataactcgggtgcagtccttctctgttcaatacaaggacttgctgttaatattgatcccattttatatacctggttgatctaccaaccccagaaacgcacctcgcgacacatgcagcagcagccagttgttgctgtgcccctggttatgccagtctgtagaagaaaagaagatgaggtgagcattgggtccgcacccctcgccaaacaacagtcctaccaggccagcgagtacgcctcatctccggtcaagacgaagacagttaccgagtcacggcccctatcagtccctgtcaaggctatgttgaacatctctgagtcatgcagatctcccgaagagcgaatgaaggaatttattggcattgtctggaatgccgtgaagcaccttactctgcagctggaagtgcagtcttgctgtgtgttcattcccaatgactcacttccgtcccctagcactatcgtgtccggtgacattcctggcacagtcaggagctggtatcacggccagacatctatgcccggcactctcgtactgtgcctccctcagatcaaaatcatcagtgctgggcataagtacatggaacctcttcaagagatcccatttgtcatacctcggcccatactagaggaaggcgacgcttttccgtggacaatctccctgcacaacttcagtatttacactttgcttggtaaacaggttacactttgcctggtcgagcctatgggctgcactagcactttagccgttacctcccagaaactgttagcgaccggtcccgacacacgtcatagttttgtcgtgtgcttgcatgttgaccttgagtcactggagatcaagtgctcgaatcctcaggtacaactgttctacgaactgacagacatcatgaataaagtatggaataaaatccaaaagcggggcaatctgaacttatcccctacaagccctgagacgatggccggaccagtaccgacgagtccagtaagatcttcaattggaactgcccctccagatacttccacttgttcaccaagcgccgacatcgggactacaacggagggggacagcattcaggccggcgaggaatcaccattttctgattccgttacactggaacagactacctcaaatattgggggaacctctgggcgggtcagcctctggatgcagtgggtcttgcctaagatcacaataaagctgtttgcccccgatcccgaaaacaaaggcactgaggtgtgcatggtctccgagcttgaagacttgagtgcttctattgacgttcaagacgtctacacaaaagttaagtgtaagattgaatcatttaacattgatcactataggtcctccctcggggaggaatgttggagcctgggccagtgtggtggagtatttctttcttgtacggacaaactgaatcgtcgaaccctgcttgtgcggcccattagcaagcaggatccattcagcaattgctccggctttttcccttccacaacaacaaagttgctcgatggcactcatcagcagcatgggtttttatccctgacctacaccaaagccgtcactaagaacgtcaggcacaagctgactagtaggaacgagcgacgaagcttccataagctgtcggaaggacttatggacggttctcctcatttcctgcatgagattcttctatccgcgcaagcgtttgacattgttctatacttccctctgctaaacgctattgcatccattttccaggctaaactgcctaagacacaaaaagaaaaaaggaaatctcccggccaacccatgcgtactcacactttgacatctcgcaatctgcccctgatttatgttaacacaagcgttatcagaattttcattcccaaaacggaggaaatgcaacccaccgtcgaggccaaccaagctgccaaggaagacactgttgtgctgaagattggcagtgtggctatggctccccaagcggataatcccctgggtaggtctgtgttgcggaaggacatttatcagagagccctcaatctaggtatccttcgggaccccgggtcagaaatcgaggatagacagtaccagatcgatttacagagtattaatattgggactgcacagtggcatcagttgaaaccggagaaagaatccgtatccggcggggtggtgacagagacagaacgtaactctcagaatcccgccctggagtggaatatggcctccagcatccggaggcaccaggaacgccgtgccattttgacgcctgtgctgacagatttctctgtccggatcacaggagcgccagcagttattttcacgaaagtcgtctccccagaaaatttacacaccgaagagatcctggtgtgtggtcattcattagaggtgaacattacaactaatctggatttctttctgtcagtcgcccaagtccagctactgcaccaactcattgttgcaaacatgactgggttggaaccaagtaataaggcagcagagatctccaagcaggagcagaagaaggtcgatatttttgacggaggtatggccgaaacgagctccagatattccggcgcacaagatagtggcatcggcagcgattctgtgaaaatccgtattgttcaaattgagcaacattcaggggccagccagcatcgcatagcacgaccgtccaggcagtcaagcatcgtaaagaacctgaattttatcccttttgatatctttataacggcttcacggatctcattaatgacttacagctgcatggccttatccaagagcaagtcccaggaacagaagaacaacgaaaaaacagacaagagctccctgaacctgccggaggtggatagtgacgttgcgaaacccaaccaggcctgcatttcaaccgtcaccgctgaagatctgctacgctcttccatctccttccccagtggcaaaaaaataggcgtcctttctcttgaatcattacacgctagtactcgatctagtgctcgccaggccctgggcatcacaatcgtgcgccagccgggacggagaggcacaggtgaccttcagctcgagccattcctttattttattgtgtctcagccttcactcttactgagctgccaccaccgaaaacagcgagtggaagtgagtatcttcgatgctgtcctgaaaggagtcgcctcggattataaatgtatagacccaggtaagacgcttccggaggcgcttgattattgcacagtctggctacagaccgtgccaggcgaaattgactcaaaatcagggattccgcctagcttcattaccctgcagattaaagatttcctgaatggccctgcagatgtaaacttggatatctccaaacctctcaaggccaacctttcctttacgaagttagaccagatcaatttgtttctgaagaaaataaagaatgcccacagccttgcccattctgaggaaacgtctgccatgtcaaataccatggtcaataaggacgatttgccggtgtccaagtactacagggggaagctgagtaaacccaaaatccacggtgacggtgtgcagaaaataagtgcccaagaaaatatgtggcgcgcagtgagctgcttccagaaaatcagtgtgcagactacgcaaatcgttattagtatggagactgttccacacacatcaaagccatgccttctggccagtctcagtaacttaaatggcagcttgagtgtcaaggcaacacaaaaggtgccagggatcatcctgggttcatcattcctgctcagcattaacgatttccttttgaaaacatctttaaaggagcgctcacggatcctgatcggaccttgttgtgccactgccaacctggaagcaaagtggtgcaaacacagtggcaaccctggccccgagcaatctatcccaaagatttcgatagatctacgcggcggacttctccaagttttttggggacaagaacacctcaattgtctcgttctgcttcacgagcttttgaatggttacctaaacgaggaaggaaatttcgaagtgcaggtttcagagcccgtccctcagatgtccagccctgtggaaaaaaatcaaacgtttaaatccgagcagtcatccgatgaccttcggaccggactgtttcagtacgtgcaggatgcagagtccctgaagctgccaggcgtgtatgaggtgctgttctataatgagactgaggactgcccgggcatgatgctctggaggtaccccgagcctagagttcttacgctagttcgcattacccctgttccttttaatactacagaggacccagacatttctacagccgaccttggcgacgtattgcaggttccttgcagtctggaatactgggacgagctacagaaggtctttgtagcttttcgagagttcaacctgtccgagtctaaagtttgcgaactgcagttgcccgacataaatttggtgaatgatcagaaaaaactggtctcctctgacctctggaggatcgtgctcaattcttcacagaacggtgctgatgaccagtcatctgcatccgaatctggctcccagtcaacttgcgaccctttggttacaccgacggcactggcggcctgtacaagagtagatagctgttttaccccctggtttgtacccagcttatgcgtgagtttccaatttgcccatttggagttccacctctgccaccacctggaccagctgggcacggcagcgccccaataccttcagccattcgtgtccgatcgcaatatgccatctgaattggagtatatgatcgtcagctttagggaacctcatatgtacctgagacagtggaataatggttcagtgtgccaggagattcagttcctcgctcaggctgattgtaaattactggagtgcagaaacgtcactatgcagtccgtggttaaacctttctcaatattcggccaaatggcagtgtcttccgatgtagtggaaaaactcttggattgcacagttatcgtagactctgtgttcgtcaatttgggccagcacgtggtacatagccttaataccgccattcaggcctggcaacagaacaagtgccccgaggttgaggagctcgttttttcccactttgtcatctgcaacgatacgcaagagacattaagatttggccaggtggacaccgatgagaacattctgctggcctctttgcacagccatcagtactcctggagaagtcacaagtcgccacagttacttcatatttgcatcgaggggtggggaaattggcgttggagtgaacccttttccgtggaccacgcgggcacattcatcagaacaatccagtatagaggtaggacggccagccttataattaaggtgcaacaactcaatggagttcagaagcaaatcatcatctgtggaaggcagattatctgtagttatctttctcagagcattgagctcaaagttgtccagcattatataggccaggacggccaagccgtggtccgcgagcacttcgactgccttacagccaagcagaagctgcctagctacattttggagaataacgagctcactgagctgtgcgtgaaagctaagggagacgaagattggtcccgagatgtctgccttgagagtaaagcacccgaatactcgatcgtgatccaggtgccatcctctaatagttccatcatctacgtgtggtgtacagtcctaacactagaacccaacagtcaggtgcagcagcgcatgattgtattctctcctctgttcataatgcggtcgcacctaccggatccaatcataatccacctggagaagcgaagtctgggcctgtccgagacccaaatcatccccggcaaagggcaggaaaaacctcttcaaaacattgaaccagacttggttcaccacttgacgtttcaggctagggaggaatatgatcccagcgactgtgccgtcccaatctcaacttccctcattaaacaaatagcaaccaaagttcaccccgggggcactgtcaaccagatcctcgacgaattttacggtccggagaagagcctgcagcctatctggccctacaacaagaaggattctgatagaaatgagcagttgagccagtgggattccccaatgcgggtcaagctgagcatctggaaaccttacgtacgcacgcttctgatcgaactgcttccatgggctttactcatcaatgagagtaaatgggatctgtggctctttgagggcgaaaaaattgtactgcaagtgccagctggaaagatcataatcccccccaacttccaggaagcctttcagatcggtatttattgggctaacacgaatactgtgcacaaatccgttgccatcaagctagttcataacctcacctctcccaagtggaaggacggtggaaacggcgaagtggtcacactggatgaggaggcatttgtcgataccgagattagactgggagcctttccaggccatcagaagctgtgtcaattttgcatcagctcgatggtccaacagggtatccagatcatccagatcgaggataagacaaccattatcaacaatacgccttaccagatcttctacaagcctcagctgtcagtgtgtaacccacattccggaaaagagtatttccgcgtgcctgattccgctacgttttccatttgtccaggcggggagcaaccagccatgaagagttcgagcctcccttgttgggacctgatgcccgatatctctcagtccgtactcgacgcatctctcctgcagaagcagattatgcttggcttctctcctgccccgggcgccgattctagtcagtgctggagcctgcccgctatagtacgccccgagtttcctagacagtctgtggcggtacccctgggtaattttagggagaatggtttttgcactagagccattgtactcacttaccaggaacacttaggcgttacctacctgaccttgtcggaggacccttctccaagagttattattcacaatagatgccctgtcaaaatgttgattaaagaaaacataaaggacatacctaaatttgaggtttattgcaaaaagataccaagcgagtgcagcatccaccatgaactgtatcatcagatatcatcttacccagattgtaagacaaaagatctcctcccctctctattgctgcgggtagagcctctggacgaggtcacaaccgagtggagtgacgccatcgatatcaatagccagggcacccaggtggtctttctgactggatttggatacgtctatgttgacgtcgtgcaccagtgtggtactgtattcatcacggtggctcctgagggtaaagcgggcccgatactgacgaacaccaaccgagcccctgagaaaattgtgacctttaaaatgttcataactcagctatctctggccgtgtttgacgacctgacgcatcacaaggcaagcgcggaactgcttcggctgaccctcgacaatattttcctctgcgtggcccccggggcaggccccctgcccggggaagaacctgttgctgcactttttgagctatactgtgttgagatctgctgtggagatctgcagttggacaatcaactgtataataagagcaattttcattttgccgtgctggtgtgccagggcgaaaaggccgaacctattcagtgttctaagatgcagtccttgctgatttctaataaagaactggaagaatacaaagagaagtgtttcattaagctgtgcatcaccttaaatgaggggaaaagcattctctgtgacatcaatgaattcagttttgaactgaagcctgctaggctttacgtggaagacactttcgtctattacatcaagaccctgtttgacacttaccttccaaacagtaggttggccgggcattccacacatctttcaggaggaaaacaggtgctgccaatgcaggtgacccagcacgccagagcgctggtgaaccctgtgaaactacgaaagctcgtgatccagcctgtaaatttactcgtctctattcatgcttcacttaaactgtacatagccagtgaccatactccactttccttcagtgtttttgaaagagggcctatttttactactgcccgccagctggtgcacgctctggccatgcactacgcagccggagctttattcagagccggatgggtcgtcggcagcctcgacatactgggatcccccgctagtctagtacgatccattggaaacggagtggctgatttttttaggctcccttatgagggtttgacccgtggaccaggcgccttcgttagcggggtttctcggggcaccacgagctttgtaaaacacatttctaaaggcacgctgacttctatcacaaacctggcgacctcgcttgccagaaacatggatcggttatctttagacgaagagcattacaaccgccaggaggagtggaggaggcagctccctgagtccctgggagaagggctacgtcaggggctgagccggttgggaatatctctgctaggcgccatagcaggaatcgtggatcagcccatgcagaattttcagaagacctcggaggctcaggcttctgcgggacacaaagcgaaaggtgtcatctctggggtgggcaaggggattatgggggtgttcaccaagcccatcggcggggctgccgagcttgtgtcacaaaccggctacgggatcctccacggagcaggcctttcacagcttcctaagcagcggcatcaacctagcgacttacacgccgatcaggcccccaatagccatgtgaaatacgtctggaagatgctacaaagcttgggccgccccgaggtccatatggctctcgacgtggtgttggtgcggggaagcggacaggagcacgagggttgccttctccttacgagcgaggtgctgtttgtagtgtctgtgagcgaggatacccaacagcaggccttccccgttactgaaatagattgtgcccaagatagcaagcagaacaacctgctgactgttcagctcaagcagccacgagtagcttgcgacgtggaggtggacggagtgcgcgaacgtctgtcagaacaacagtacaacagactcgtcgactatataaccaagacatcttgccacctggctcccagttgtagtagtatgcagatcccctgtccggtggtggcagcagagccacctccaagtactgtcaaaacataccactacctcgttgatccacattttgcacaggtgttcctgtctaaatttaccatggtcaagaacaaggccctccgcaaagggttcccttag

SEQ ID NO: 270616 - DNA, 12069 bp, Artificial Sequence
  derived and/or modified sequence
atgttggaaagttatgtgacaccaatccttatgtcttatgtcaacagatatattaaaaaccttaaaccgagtgatttgcagctcagcctttggggcggtgatgtggtgctgtcaaagctggaactgaaattagatgtgcttgaacaggagcttaaactaccgttcaccttcctttcaggtcacatccacgaattgaggatacacgtgccctggactaagctgggctctgaaccagtagtcatcacaattaacacaatggaatgtatactgaaactaaaggacggcatacaggatgatcacgaaagctgcggatccaactccacaaaccgcagcacagctgagtcaactaaatccagcattaaaccacgcagaatgcaacaggctgcaccgacagacccagatctgccacccggttatgtacagtcgctgattcggagggtagtcaacaacgtgaatatcgtgatcaacaatttgatcctcaagtacgtggaggacgatatagttttgtctgtgaatatcacttcagccgaatgctatacggtcggcgaactttgggatagggcatttatggacatcagtgcgacggacctagtactaagaaaagtaattaatttttcagactgcactgtgtgcctggacaagcgcaatgccagtggtaaaatagagttttaccaggacccactgctctacaaatgctcattccggaccaggttgcactttacctatgaaaatctcaattctaagatgccgagtgtcattaagatccacacgctcgtggaaagtttaaaactgtccatcacagaccagcaactgcctatgtttatcaggatcatgcaactggggattgccctttattacggggaaatagggaatttcaaagaaggtgagattgaggaccttacctgccacaacaaagacatgctcggtaacattacagggagcgaggacgaaacccggattgacatgcagtaccccgctcagcacaaaggtcaggagctgtatagccagcaggacgaagaacagccccaaggctgggtgtcctgggcctggagtttcgtgcccgcaatagtgtcttatgacgacggcgaggaggattttgttgggaacgaccctgcctctactatgcatcaacagaaagcccagacattgaaggaccctatcgtaagtattggcttctattgtaccaaggctactgtgaccttcaaactgaccgaaatgcaggttgagtccagctactattcaccgcagaaggtcaagagcaaagaagtgttgtgctgggagcaggagggcaccactgttgaggctctgatgatgggcgagccattcttcgactgtcaaattggatttgttggatgtcgggcaatgtgtctcaaaggcatcatgggtgtaaaggatttcgaggagaatatgaatagaagtgaaactgaggcctgtttcttcatatgcggcgataacttaagtactaaggggtttacctatctgacgaatagcctgtttgattatcgtagccccgagaataacgggactcgggcagaatttatcctagactctacacaccataaagaaacttatacagaaatagccggaatgcagcggttcggtgccttctatatggactatctttataccatggagaatacttctgggaagggctctacaaatcagcaggactttagcagcgggaaaagtgaagacttaggaactgtgcaagaaaagtcaactaaaagcttggtgatcggaccattagatttccgcctggactccagcgccgtgcatcggatactgaagatgatagtatgcgctttagaacatgagtacgagccttatagcaggctgaaatccgacataaaggacgagaatgagaccattctgaaccctgaagaggtcgctctgctggaggagtatataccgacgcgccacaccagcgttactttgctcaaatgtacgtgtaccatatcgatggcagaattcaatctgctggatcatcttctccctgtaatcatgggagagaagaacagtagcaattttatgaatacaacaaactttcaatcactcagaccacttccaagcatccgcatcctcgtggacaagatcaacctcgaacatagtgtccccatgtacgctgaacagctagtgcacgtagtgagtagcctaacacagccatctgacaacctgctgcactactgctacgtccactgttacctgaagattttcggcttccaagccggtcttacctccttggactgtagcggttcatactgcttgccggttcctgtgattcctagtttctcaactgcactgtatgggaaattactgaaactgcctacatgttggactaagcggagccagattgcaatcactgaaggcatctttgagctccctaacttaacaattcaggcaactagagcccagacactgctgttgcaggcgatctaccagagctggtcgcaccttggtaatgtctcatcctcagctgtgatagaggcactcattaatgagattttcctaagcattggcgttaaatctaaaaatcctctccctactttagaagggagcattcaaaacgtggagctcaaatactgttctacaagcctcgtgaaatgtgctagtggaaccatgggatccatcaaaatctgtgcaaaggcacctgtggattctggaaaagaaaagctgattcctctactgcaagggccttcggacactaaggatctgcattctaccaagtggttgaatgagtcaagaaagcccgaaagtctcctggcccctgatttaatggcatttaccatccaggtgccccagtacattgattattgtcacaattcaggcgctgtcctcctgtgttccattcaaggcctcgcagtaaatatagatccaatcctttacacttggctgatttaccagccccagaaaaggacttcacggcacatgcaacaacagcccgtggtggccgtcccgctggtgatgcctgtctgtcggaggaaagaggatgaagtctcaattgggtccgcaccactggccaaacagcaatcctaccaggcttccgagtacgcttcaagccctgtaaagaccaaaacagttacagaatctcggcctctctccgttccagtgaaagcaatgctgaatatctccgaatcctgcaggtccccggaagagagaatgaaagaattcattgggattgtgtggaacgccgtcaagcatttgaccttgcagctggaagtgcagagttgttgtgtgttcatcccaaatgatagcctgccttccccctccactattgtgagcggggatattccgggaacagtacgttcctggtaccatggacaaacttccatgccaggaactttggtgctctgcctcccacagatcaagatcatttccgccggtcacaaatacatggagccgctacaggaaatccctttcgtgattcccagacccattcttgaggaaggtgacgccttcccatggactataagtctgcacaacttttccatctacaccctgctcggcaagcaagtaaccttgtgccttgttgagcccatgggatgtaccagcactctagcggtcacttcgcaaaaattactggctaccggaccagacaccagacacagttttgtcgtgtgcttgcacgtggacctggaaagccttgagattaagtgctcgaatcctcaggtccagctgttttatgaactgacagatatcatgaacaaggtgtggaacaagatccagaagcgcggtaatcttaacctgtcgcctacttctcccgaaaccatggcgggtcccgtgcctacgagtcccgtgcggtcttctatcggcacagccccacccgatacgagcacctgttctcctagcgccgatatcggtactactaccgagggggatagcatacaggctggggaagagtcacctttcagcgatagcgtaaccttggaacagactacatctaatatcggcggaacatcaggacgtgtgagcctgtggatgcagtgggttcttcccaaaattacaatcaagctgttcgcacccgatcccgaaaacaagggaactgaagtgtgcatggtctccgaacttgaagacctttccgcaagcattgacgtgcaggacgtgtacacaaaagtgaaatgtaagatcgaaagctttaatattgaccactataggtcatctctcggggaggagtgttggagcctgggccagtgcggcggagtgttcctgtcatgtaccgataaattgaacagacgaactttactcgtacgaccgattagtaagcaggaccccttctcaaactgctctggcttcttcccgtcaaccaccacaaaactgctggatggaacacaccagcagcacggattcttgtcacttacatacacaaaggccgtcacaaagaatgtccggcataagttgacaagccgaaacgagcgacggtcattccacaagctgtcagaaggtttgatggacggatccccccattttctacacgagatcctcttgtcggcccaggcgtttgacatcgtactttatttccctctgttgaacgccattgcttccatctttcaggccaagttgcctaagactcaaaaagagaaacgcaaatctccaggccagccaatgaggactcataccttgacctcgagaaatctaccccttatatacgtaaatactagcgtcattcgcatttttataccgaagactgaagaaatgcaaccaactgttgaggcaaaccaggccgctaaggaagatacggtggtgctgaagatcgggtctgttgctatggcaccccaggctgacaaccccttgggtagatccgtccttagaaaggacatataccagcgcgcattgaatctcgggattcttcgtgacccaggatcagaaattgaagacagacagtatcagattgatctgcagagcattaatatcgggaccgcccaatggcaccaattgaaacccgagaaggagtcggtgagcggtggagtggttacagaaactgaacgtaactcccagaatccggcactcgaatggaacatggcgtccagcatcagacggcaccaagaaagaagggctatccttactccagtccttacagatttcagcgtgcggattacaggcgcacccgcagtgatcttcacaaaggttgtatcaccagagaacctgcacactgaggaaattctggtgtgcggccacagtctggaagtgaatattactacgaacctggatttttttttatccgttgctcaggttcagctgcttcaccagctgatcgtagccaacatgaccggactggaacctagcaataaggcggcagaaatttccaagcaggagcagaagaaagttgacattttcgatggcggaatggctgagacaagtagccgatacagtggcgctcaggatagtgggatcggctcagactctgtgaagataaggatagtgcagatcgagcagcatagtggcgcttcgcaacataggatagctagacctagtcggcagtctagtatcgtaaaaaacctcaacttcatcccttttgacatcttcatcacagcctcccgtattagcctgatgacctacagttgcatggccctgagcaagagtaagtcacaagaacagaagaataacgagaagaccgataaatctagcctcaacctgcctgaagtggactccgatgtcgccaagcccaaccaggcgtgcattagcactgttaccgctgaggatctgctgagatctagtatctctttccccagtggaaaaaaaataggagttctcagtctggaatccctgcacgcatccacccgaagctctgcccgtcaggccttggggattaccatcgttcgacaacctggccgtcgtgggacaggtgacctgcagctggaaccatttctgtattttattgtgtcacagcccagtctactactgtcctgccaccataggaagcagagggtggaagtgtctatctttgatgctgtgcttaaaggcgtggcatccgattacaaatgcatcgacccaggcaaaaccctgccggaggcactggattactgtaccgtgtggcttcagaccgtccccggtgagattgactccaagtctggaatccctccgagcttcatcaccttacaaatcaaagactttctgaatggaccagccgatgtaaacttggacatatctaagccccttaaggccaacctgagcttcacaaaactggaccaaatcaatctttttttaaagaaaatcaaaaacgctcacagcctcgcccatagcgaagaaacctctgccatgagcaacaccatggtgaacaaggatgatctgcctgtcagcaagtactataggggaaagctgtcaaaacccaaaatccatggagatggagttcaaaaaatttctgcgcaggagaatatgtggagggctgtgtcctgttttcagaaaatcagcgttcagactactcagattgtcattagcatggagacagtacctcacacctcaaaaccttgcctgcttgctagcctctctaacctaaatggcagtctcagcgtgaaagcgacccagaaggtgcctggaatcatcctgggtagctctttcctcttgagtattaatgattttctgctcaagacaagcctaaaggaaagaagtcgcatactcatcggtccttgttgcgcaaccgcgaacctcgaggccaagtggtgtaagcattctggaaatcctggcccagagcagagcatccccaagatttcaatcgatctgagaggagggctgttgcaagtcttctggggccaggagcacctcaattgtttggtcctcttgcacgaactcctcaatggctatttgaatgaggaggggaacttcgaggtccaggtgtccgagcctgttccccagatgtccagccccgtagagaagaaccagacttttaagtccgagcagtcctcagacgacctgaggaccggcctgttccagtatgtccaggacgcagagagcttaaaactgccaggtgtgtacgaggttctgttctacaacgagaccgaggactgccccggaatgatgctgtggaggtaccccgaacccagagtgctgactctggtcagaatcaccccagtgccattcaacaccacagaggatcccgacatatccacagccgatctgggggacgtgttgcaggtgccttgcagcctggagtattgggacgagctgcagaaggtctttgtcgcattccgggaatttaacctatccgagtccaaggtgtgtgaacttcaactccccgacatcaacctggttaacgaccagaaaaaattagtgagcagcgatctttggcgcattgtgctgaactcaagccagaatggcgctgatgaccagtctagcgctagcgaatctggctctcagtctacctgcgacccccttgtgacccctaccgcgctggcggcatgtacacgggtggactcctgcttcacaccatggtttgtccccagcctatgcgtgtcttttcagttcgcccacctggaatttcatctatgccatcacctcgatcaactcggcaccgccgcacctcaatacttacagcccttcgtatccgaccgcaacatgccttccgaattggaatacatgatcgtgtcctttagggagccgcacatgtacctcaggcaatggaacaatggttccgtgtgtcaggaaatccagttcctggctcaagccgattgcaagctgctcgagtgcaggaacgtcacaatgcaatcagtcgtgaaacccttcagtatcttcgggcagatggccgtgagcagtgatgtggtcgagaagctgctggattgtaccgtgatcgttgatagcgtgtttgtgaacctgggccagcacgtggttcacagccttaacaccgcaatacaggcctggcagcaaaataagtgtcccgaggtcgaggagcttgtcttcagccacttcgttatttgcaacgatacccaggaaaccttaagattcggccaggtggacacagacgagaatatcctcctggcttctctccacagccaccagtacagctggaggtcacataagtcaccgcaacttctgcacatttgcattgaggggtggggcaattggcggtggagcgaaccattctcagtggaccacgccggaacctttatccgtactatccaatacaggggaagaaccgctagtctcatcattaaggtgcagcaactcaatggcgtccagaaacagattatcatctgcgggagacagataatttgttcctacctgagtcagtccatcgaactgaaagtggtgcagcactatatcggacaggacggccaggccgtcgtgcgggaacattttgattgtctgaccgccaagcagaaactgccttcgtacattcttgaaaacaacgagctgacagagctctgcgtgaaagcgaagggagacgaagactggtcgagagacgtatgcctggagtctaaggcaccagaatatagcattgtcattcaagttccctcctcaaactcctccataatttacgtgtggtgcaccgttttgacactcgagcccaacagtcaggtgcaacagcgaatgatcgtgttttcaccgctgttcattatgcgaagtcacctccctgacccaataatcatccacctggaaaaaaggagcctgggtctatcagaaactcaaatcatccccggaaagggccaggagaaacctctacagaatatagagcccgaccttgtgcaccatctgaccttccaggctcgggaggaatacgacccatccgattgcgccgtaccaattagcacttctctgatcaaacagatcgcaaccaaggtgcaccccggtggcaccgtgaaccaaattctggacgagttctacggaccggagaaaagtctacagcccatctggccttataataagaaggactccgacaggaatgagcagctttcccagtgggactcacctatgcgtgttaaactctctatctggaagccctatgtacgcacactgctgatcgagttgcttccttgggcgctgctgatcaacgagtccaaatgggatctgtggctgttcgagggcgagaaaattgtcttgcaggtgcctgctggtaagattattatcccccctaattttcaggaggcctttcagataggcatatattgggctaatactaacaccgtccacaagtccgtggcaattaaattggtacataacttgaccagtcccaaatggaaggatggcggtaacggagaagtggtgaccctcgatgaggaagctttcgtagataccgagattcgcctaggggctttccctgggcaccaaaagttgtgccaattctgtatctcatccatggtccagcagggcattcagatcattcagatcgaagataagacgacaattattaacaatacgccgtaccagatcttttacaagccgcaactgtctgtgtgtaacccccattccggaaaagaatatttccgggtgcctgattccgctacatttagcatctgtccgggaggcgaacagccagcgatgaagtcaagttctttgccgtgttgggaccttatgccagatataagtcaaagcgtactcgacgctagtttgctgcagaaacagatcatgctgggcttttcaccggcaccaggggcagactcatcacaatgttggagtctgccagctattgttcggccagagtttccaaggcagtcggtagccgtgcctctcggtaactttcgcgagaatggattttgcacaagggcaatcgtgttaacataccaggaacacctcggcgtgacgtatttaacgctttctgaggacccctctcccagagtgatcatccacaacagatgtccggtgaaaatgctaattaaggagaacatcaaggatatcccgaagttcgaggtgtattgcaagaaaattccctccgagtgttcaatccaccacgagctataccatcagatatcttcttacccagattgcaaaacgaaagacctgctgccctccttgctgctgcgagtggaaccgttggatgaagtgaccactgagtggtcagacgccatcgatatcaactcgcagggcacccaagttgtgttcctgactggtttcgggtacgtgtacgtggacgtcgttcaccagtgcgggactgtgttcatcaccgtggcccctgaggggaaggcaggacccattctgaccaataccaacagggctccggagaagatcgtaaccttcaagatgtttatcactcagcttagtcttgccgtgtttgatgacttgacacaccataaggcctctgccgaactgttaagattaacactggataatattttcctgtgtgtcgcgcctggagcgggaccactgccaggggaagagccagtagccgctctgttcgagctatattgtgtggagatctgctgcggcgatctgcagctcgataaccagctatacaacaagtcaaattttcactttgccgttcttgtgtgccaaggagagaaagccgaacctatccaatgctcaaagatgcaatcactgctgatctctaataaagagctggaggagtacaaagagaagtgcttcattaaactgtgcattacacttaacgagggaaaaagcattctgtgcgacattaatgagttttcatttgagttaaaaccagcccgtctttacgtggaagacacattcgtgtactatatcaagacccttttcgacacctacttgcctaactcaagacttgctggccattccacgcacctgtctgggggtaaacaggtgctccctatgcaggttacccaacacgccagagctttagtaaatcccgtaaaactacgtaaattggtaatccagcccgtgaacctcttggtcagtatacacgcttcattgaagctttacattgcctcagaccacactcctctttccttttcagtgttcgagaggggcccaatcttcacaaccgccaggcagctagtacacgcactcgcgatgcattatgccgctggagcactgtttcgtgctggttgggtggttggtagcctggacattctgggcagcccggcaagccttgttcgcagtattgggaatggtgtagccgacttttttagacttccctacgagggtcttactaggggtccaggggcatttgtgtcaggcgtctctcgtggcacaacttccttcgtgaaacacatatctaaaggtacactgactagtatcactaacctggccacaagcctcgcacgcaatatggaccgactatctctggacgaagagcactataataggcaagaagaatggcggaggcagctcccagaaagtctgggcgagggattgaggcagggtctatccagactcgggatttccctgctgggcgctatcgcgggaatagttgatcagcctatgcaaaattttcagaaaacctctgaggcacaggcttcagcaggccataaggcgaaaggcgtgatatctggggtcgggaaaggcattatgggagtctttacaaaacccatcgggggagctgctgagctcgtatctcaaactggatacggaatccttcatggcgcagggctttctcaattacctaagcagaggcaccagcccagcgacttgcatgcagaccaggctcctaattctcacgttaagtacgtttggaaaatgcttcagagcttgggaagacccgaggtccatatggctctggatgtggtgctcgttagaggtagcggtcaggaacatgaggggtgtctgctacttaccagtgaggttttgtttgtagtcagtgtcagcgaagatacacagcaacaggcattccctgttaccgaaattgattgcgcccaggacagtaaacaaaacaaccttctgaccgtccagctgaagcagcccagagtcgcctgcgacgtggaggtagacggggtgagagagcggctctcagaacagcagtacaatcgtctggtggactatatcaccaagaccagctgccatctggccccttcatgcagctctatgcagatcccttgtcccgtggtggctgcggaaccacccccatctacggtcaagacgtaccattatcttgtcgacccgcactttgcccaggtgtttctcagtaagttcaccatggtgaaaaataaagcactgcgaaaggggttcccttag

SEQ ID NO: 270617 - DNA, 14094 bp, Artificial Sequence
  derived and/or modified sequence
ggcgcggtacaggagcagcactgccggcgggggcgggtgccagggacttggaggtggaggggacgcggcggtactctggcgtcttccgacttcgactccttaccttaaaagatgctggagtcatatgtaactccaattttaatgagctatgtgaatcgctacatcaagaacttaaagccgtcggatctacagctttcactatggggtggagacgtggtactcagcaagctcgagttaaagttggatgtgctggaacaggaactgaaattaccattcacttttttaagtggacatattcatgaattgaggattcatgtaccatggacaaaactgggttcagaaccagtggtaattaccatcaatactatggaatgcattttgaaacttaaggatgggatacaggatgaccatgaaagctgtggttctaattctaccaaccgtagtactgctgagagcacaaaatcatcaatcaaaccgcggagaatgcagcaggctgctcctacagatcctgacttaccaccaggttatgtgcagagtctgattagacgagttgtaaataatgtaaacattgtgataaataatctcatactaaaatatgttgaagatgatatcgtcctttccgtcaatatcacttctgcagaatgttatacagtaggtgaattatgggatcgtgcattcatggatatttctgcaactgatttggtgctgagaaaggttatcaatttttctgactgtacagtttgtcttgataaacggaatgccagtggtaaaatagaattttaccaggatcctttattatacaaatgttccttcagaactcgtcttcattttacatatgaaaacctaaattccaagatgccatctgttattaaaattcatactttagtggaaagtttgaaactttctatcacagatcaacaactgcctatgtttattcgtataatgcaacttggaattgctctttactatggagaaataggcaattttaaagaaggcgaaatagaggaccttacttgtcataataaagatatgctaggaaacattacaggttctgaagatgaaacaagaatagatatgcaatatcctgctcagcataaaggtcaagagttatattcacagcaagatgaggagcagccacagggatgggtgtcatgggcctggtcctttgtgcctgcaattgtgagttatgacgatggcgaggaagactttgttgggaacgatcctgcatcaaccatgcatcaacaaaaagcacagactttgaaggatcctattgtttctataggattttattgcacaaaggcaacggtgactttcaaactcacagaaatgcaagttgagagtagttattacagtccacagaaagtaaaatctaaagaagtattgtgttgggaacaagaaggaactacagttgaggcccttatgatgggagaacctttctttgattgccagattgggtttgttggttgcagagccatgtgccttaaaggaattatgggtgttaaagattttgaagagaatatgaatagaagtgaaactgaagcctgtttcttcatttgtggtgacaatttgagtacgaaaggtttcacataccttacaaattcattgtttgattaccgaagcccagaaaataatggtactcgcgcagaatttatcttggattcaactcatcataaggagacatacactgagatagctggaatgcaacggtttggggctttttatatggattacctgtatacaatggagaacactagtggcaaaggttccacaaatcaacaagacttttcttcagggaaaagtgaagatttgggaacagttcaggagaagtccaccaaaagccttgttataggtcctcttgattttcgtttggatagcagtgcggtgcataggattttgaaaatgattgtgtgtgccttggaacatgaatatgaaccatatagcaggctaaaatcagatattaaggatgaaaatgaaacaatactgaatcctgaagaggtggctcttctggaggaatatattcctactcgacatacaagtgttactctcctcaaatgtacctgcacaatttccatggctgaattcaacttgctggaccatttactacctgtcattatgggagaaaagaactcaagtaacttcatgaatactacaaacttccagtctcttcggcctttgccatccattcgaatattggtggataaaattaatctggaacattcagtgccaatgtatgctgaacagttggtgcatgtggtcagcagccttactcaaccttctgataacctgcttcattattgttatgtacactgctatcttaagatatttggtttccaggcaggactgacgtctttggattgcagtggatcttactgcttacctgtaccagttattccctctttcagcactgctctttatgggaaacttctgaaactccccacatgctggaccaaaagatctcagattgctataactgaaggtatatttgaacttccaaatctcacaattcaagctacaagagcacagacacttctcttgcaagcaatatatcaaagttggtctcatcttggaaatgtcagctcttccgcagtgattgaagctttgataaatgaaatcttcctaagtataggtgtgaaatctaagaatcccctgccaactcttgagggctcaatccagaatgttgaattgaagtactgcagcacatcattggtcaaatgtgcctctgggaccatgggatcaataaaaatttgtgccaaagccccagttgatagtggaaaagagaagttgattcccttgcttcagggtccttctgacactaaagaccttcatagcaccaagtggctcaatgagagtagaaagccagagtctctcttagctccagatttgatggccttcacaatccaagttccacaatatattgactactgccacaattccggtgctgtacttctttgcagtatacaaggactagcagttaatattgacccaatcttatatacgtggctcatctatcagcctcagaaacgaacaagtagacatatgcaacagcagcctgtggtagctgttcctcttgttatgccagtttgtagaaggaaagaggatgaggtgtctattggaagtgcccccttggcaaagcagcaatcatatcaggcctctgaatatgccagcagccctgtaaaaacaaaaacggtaacagaatcccgcccattgtcagttcctgttaaagccatgttgaatatatctgaaagctgtagaagtcctgaagaaagaatgaaggaatttattggaattgtttggaatgcagtgaagcatctcacactacagcttgaagtacaatcttgttgtgtgtttattccaaatgatagcctgccttccccaagtacaattgtatctggtgacattcctggaacagtaagaagttggtaccatggacaaaccagcatgccgggaacacttgtcctctgtttgcctcaaataaagattattagtgctgggcacaagtatatggaacctctgcaggagattccatttgttatcccacgacccatccttgaagaaggtgatgcttttccttggacgatcagcttgcataatttcagcatatatacccttcttggaaaacaagtgacactttgcctagtggaacctatgggttgcacctccactctagctgtcacgtctcaaaaactgcttgctacgggacctgatacacgacattcatttgttgtctgtctccatgttgacctagagtcactagagataaaatgctctaatccccaggtccagctcttctatgaactaactgatatcatgaataaggtctggaacaagattcagaagagaggcaatctcaacctatctccaacctctccagagaccatggcagggcctgttcctacttctccagttagaagcagtataggcacagctcctccagataccagcacatgcagcccatctgctgacattgggactactactgagggagattctatacaagcaggtgaggaatcaccattctcagattctgtgaccttggaacaaactacaagtaatattggaggaaccagtggacgtgttagtttatggatgcagtgggtgcttcccaaaattactataaagctctttgctccagatcctgaaaataaaggcacagaggtttgtatggtcagtgaactagaagatctcagtgcttccatagatgtccaggatgtatataccaaagtgaaatgtaaaatagagagtttcaatattgatcactatagaagcagccttggggaagagtgttggtctttggggcaatgtggaggtgtcttcctttcctgtactgacaagctgaacagacgcaccttgttggttcgacccatcagcaagcaggaccctttcagtaattgctctggcttctttccttctacaactacaaaacttctagatggcactcatcagcagcatggattcctctctctgacatacacaaaagctgtaacaaaaaatgtccgccacaagttaacatcaagaaatgagcgaagaagttttcataagttatctgaaggcctaatggatggttctcctcattttcttcatgaaattcttctttcagcacaagcttttgatattgttctttattttcctttacttaatgccattgcaagtatatttcaagcaaaactaccaaagacccaaaaagagaaaagaaaatctcctggtcagcccatgaggacccatacactgacatcccgcaatttacctttgatttatgtcaacacaagtgtaatcagaatttttattccaaaaacagaagaaatgcagccaactgttgaagctaatcaggcagcaaaagaagacactgtggttttgaagattggctctgttgccatggctccccaggctgacaatccccttggcagatctgtccttaggaaagatatttaccagagagccttgaacttaggaattcttcgagatcctggatcagaaatcgaagacagacaataccaaatagatctgcagtccatcaatattggtactgcacagtggcatcaactaaaaccagagaaggaaagtgtctcaggaggggtggtaacagagactgaaaggaattctcaaaatccagcccttgagtggaatatggccagcagcatacggcggcatcaagaaaggagagcaattttgacccccgttttgacagatttttctgtccgaataactggagcacctgctgtcattttcaccaaagtagtttctccagaaaatttgcatactgaggagattttagtgtgtggccattccttagaagtgaatataaccacaaacctggacttcttcctaagtgtggctcaagttcaactcttacatcagttaatagtagcaaatatgactggactggaaccatcaaacaaggctgcagagatctctaaacaagaacagaaaaaagtggatatatttgatggaggcatggctgaaacctcatctcgctacagtggtgctcaggatagtggaattggcagtgacagtgttaaaatcagaatagtgcaaatagagcagcacagtggtgccagtcagcatcgcattgcccgtccctcacgccagtcatcaattgtaaaaaatctaaattttattccctttgacatatttattactgcaagtagaatctcactaatgacctattcctgtatggccttatccaaatcgaaatcacaagaacagaagaataatgaaaaaacagacaagagttcattaaatctcccagaagttgattcagatgttgctaagcccaaccaggcatgtatttccacggtgacagcagaagatctcttaaggagcagcatttcttttccttcagggaaaaaaataggggtcctctctcttgaaagtcttcatgcatccacaaggtcatctgctagacaagcacttggtataactattgttcggcagcctggtcgaagaggaactggtgacttacagctagagccttttctgtactttattgtgtcccagccttccttgcttctgagttgtcaccacagaaagcagcgagtggaagtatccatttttgatgctgtgcttaaaggggtggcctctgattacaaatgtatagatcctgggaagactctgcctgaagcccttgattattgcactgtttggctacagacagtgcctggagaaatagacagcaaaagtggtattccaccttcctttataacactacagattaaagactttctgaatggaccagcggatgtcaatttggatatatcaaagcctttgaaagcaaacctgagtttcaccaaactggatcagataaacctttttttaaagaagataaaaaatgcacacagtttggcacatagtgaagagacttcagccatgtccaacaccatggtgaataaggatgatcttccagtctccaaatattaccgtggaaagttgtctaaacccaaaattcatggtgatggagtgcaaaagatttcagctcaagaaaacatgtggagagctgtttcctgctttcaaaaaatttctgttcaaactactcagattgtgatctccatggaaactgtaccccataccagcaaaccatgcctgttagcatctctctcaaacctcaatggaagccttagtgtcaaggcaacacaaaaagtacctggcataattcttgggtcatcatttctactcagtataaacgattttctccttaaaacaagtctcaaagaaagaagccgcattctgataggaccatgttgtgctactgccaatctggaagctaagtggtgtaaacacagcgggaatccaggcccagaacaatccataccaaaaatatccattgacttaagaggaggtctactacaggtcttctggggtcaagaacatttgaattgtttagttcttctacatgaattactcaatggataccttaatgaggagggaaattttgaagtacaagtttctgaaccagtgcctcaaatgtcatctcctgtggaaaagaatcagacatttaaaagtgaacaaagttcagatgacctacggacaggtctatttcagtatgtacaggatgctgaatctttgaaattgcctggggtctatgaagtcttattttataatgaaactgaagattgcccagggatgatgttatggagatatccagaacctagagtactcacccttgtacgaataactcctgtaccttttaacaccacagaggatccagatattagcacagcagaccttggtgatgtgctacaggttccttgtagcttggaatactgggatgaactccagaaggtttttgttgcatttagagaatttaatctgtctgaaagcaaagtttgtgaactgcagttgccggatatcaatctcgtgaatgaccagaagaaattagtatcttcagatctttggagaattgtcttgaacagcagtcaaaatggagctgatgaccaaagctctgcaagtgagtctggttctcaaagcacttgtgatccacttgtgactccaacagccctggctgcctgtaccagagttgactcctgctttaccccatggtttgtcccatccctttgcgtttctttccagtttgctcacctggaattccatctttgtcatcaccttgaccaactaggcacagctgcaccacagtacctacagccatttgtttccgacagaaatatgccatctgaactagaatacatgattgtttccttcagagaaccacacatgtatcttcgacagtggaataatggttctgtctgtcaggagatccagttcttagctcaagcagactgtaaacttctagagtgcagaaatgtcactatgcaaagtgtggtgaaacccttcagcatcttcgggcagatggcagtttccagcgatgtagtggaaaagctgcttgactgcaccgtgatagttgattctgtatttgtaaaccttggacagcatgtagtccattcactaaacactgcaatacaagcttggcaacagaacaaatgccctgaggtagaggagttggtcttcagccattttgtgatctgtaatgacacacaggagacactgcggtttggccaggtggatactgatgaaaatattctgctggcgagtctccacagtcaccagtacagctggcgctctcacaaatccccacagctgttacacatctgtattgaaggttggggcaactggcgttggtcagagcctttcagtgtggaccatgccgggacttttattagaacaattcagtacaggggtcgaactgcttctctcatcatcaaggttcagcaactcaatggagtacaaaaacagattatcatctgtggaagacagatcatctgtagttacttgtctcaaagcatagaactaaaagtcgttcagcattacattggtcaagatggacaagctgtagttcgggaacattttgactgcctcacagccaaacagaaattgccttcgtacatactagaaaacaatgaactgacggagctgtgtgtgaaggccaaaggagatgaagactggtcaagagatgtgtgcctggaatccaaagcccctgagtacagcattgtcattcaggtgccatcttcaaacagttccattatttatgtctggtgcacagttttgactttagaacccaactctcaagtgcaacaacgaatgattgtgttcagccctctttttatcatgaggagtcatcttccagaccccattatcatacatttggagaaaaggagtctgggattgagtgaaacacaaattattccaggaaaagggcaggaaaaaccactgcaaaacatagaacctgaccttgtacatcacctgacattccaagcaagagaagaatatgatccttcagattgtgcagttcccatctcaacatccctcattaagcaaatagccactaaggtacaccctggaggcacagttaatcagatccttgacgaattctatgggccagaaaagtcgcttcaacccatatggccctataataagaaggattctgacaggaatgaacagctaagtcagtgggatagcccaatgcgagtgaagctgtcaatctggaagccatatgttagaactttgttgatagaacttctgccctgggccctgcttatcaatgaatccaaatgggacctctggctatttgaaggagagaaaattgttctacaggttcctgctggcaaaattattattcctcctaattttcaggaagcttttcaaattggaatatactgggcaaatacaaacactgtgcacaagtcagtagcaattaaactggtccataacctgacatctccaaagtggaaagatggaggtaatggtgaagttgtgacactggatgaagaagcgtttgttgatactgaaataagacttggtgcttttccaggacatcagaagttatgtcagttctgcatttcctccatggtacagcaaggtatacaaattattcagattgaagacaagactacaataatcaataatacaccatatcaaatattttataaaccacagctatctgtctgcaatccccattctggaaaggagtattttcgtgttccagacagtgctacttttagcatttgcccaggtggagagcagcctgctatgaaatccagctcccttccttgctgggacttgatgcctgacatcagtcagtcagtactggatgcatccctgcttcagaaacagatcatgctgggcttttctcctgccccaggtgctgacagctcacagtgctggagcctgccagctatagttagaccagagtttcccagacagagtgtggcagtacccctcgggaatttccgggaaaatggattctgtaccagggctatagtgctgacatatcaagaacacctcggagtgacttatttaaccctctcagaagaccctagtcctcgagtaattatccacaatagatgtccagtaaaaatgcttataaaggaaaacattaaagatattccaaagtttgaggtttattgcaaaaaaattccctccgagtgctcaattcatcatgagctgtatcatcagatttccagttatccggactgcaagaccaaagacttacttccaagcctacttttgagagttgaacctctagatgaagtaacaactgagtggagtgatgccattgacatcaacagtcagggaacacaggttgtgttcctgactggctttggctatgtgtatgtggatgttgtacatcagtgtggcacagtcttcatcactgtggccccagaaggaaaagcaggacctattttaaccaataccaacagagcgccagagaagattgttacatttaaaatgttcatcactcagttaagcctggcagtgtttgatgacctcacccaccacaaagcatcagctgagcttctgagactcacactggacaacatttttctctgtgtggccccgggagctggtcccctccctggggaagagcctgtggctgcgttgtttgaactttactgtgtggagatctgctgtggggacctgcagctagacaaccagctttataacaagtccaatttccactttgctgtcttagtctgccagggagaaaaagcagaacccattcagtgttccaaaatgcagagtctcctcatatccaacaaagagttggaagaatacaaggaaaaatgttttatcaaactttgcatcaccttaaatgaaggcaagagcatcctctgtgatattaatgagttcagctttgaattaaaacctgctcggttatacgtggaagacacatttgtatactacatcaagactttgtttgacacctaccttcctaacagcaggttggctggtcactccacacacctctccgggggtaaacaggtgttgcccatgcaggtcacacagcacgccagggccttggtgaatcctgtgaagttacggaaactggtgatccagccagtaaatttgctcgtcagcatccacgcttccctcaagctgtacatagcctcagaccacactcctctctccttctcggtgtttgaaagaggacccatcttcaccactgcgaggcagcttgtgcacgccctggcaatgcactatgccgctggggccctttttagagcaggctgggtagttgggtctctggatattcttggcagccctgcaagcctggtgagaagcatcgggaacggggtcgccgacttcttcaggcttccgtatgaggggctgacccggggccctggagccttcgtgagtggcgtctccagagggaccacatcgtttgtaaagcacatctccaaaggtaccctcacatccatcaccaacctcgccacaagcctggcccggaacatggaccggctctcactggatgaggagcactacaaccggcaggaggagtggcggcggcagctccccgagagcctgggcgaggggcttcgacagggcctgtcccggctgggcatcagcctgcttggtgcaattgctggtatagttgatcagccgatgcagaacttccagaaaacatctgaggcacaggcttcagcaggacacaaggccaagggtgtcatctcgggtgtggggaaaggaatcatgggggtgttcacaaagcccatcggaggagctgctgagctggtgtcacagactggctatggtattttacatggagctggactttctcagcttcccaaacagcgccatcagccaagtgatctacatgctgaccaggctccaaacagccatgtcaaatatgtctggaaaatgcttcagtctctgggcagaccagaagtccacatggccctggacgtggttctggtgaggggctcaggccaggagcatgaagggtgcttgctgctgacatcagaagtgctcttcgtggtgagtgtcagtgaggacacacagcagcaggccttccccgtcacagaaatcgactgtgcacaggacagcaagcagaacaacttactcacagtgcagctcaagcagccaagagtggcctgtgatgtggaggtagatggagtccgagagagactgtcagagcaacagtacaacagactggtggactacatcacaaagacatcttgtcacctggcccccagctgttcttccatgcaaataccatgccctgtggtggctgcagaacctcccccctccactgttaaaacataccattacctggttgatccacattttgctcaggtcttccttagtaaatttaccatggtgaaaaataaagccctgaggaaagggtttccttgagtcccctctgaggtgtttattcctgcttgtgtgatttagtttttgggtttctttgagacagggtctcactgcattgcccttgctgacctcaaattctggggttcaagcaatcctcccacctcaacccacaagtagctacgactgcaagcacctgccaccataaagggctgcattttgccaccataaagggctgcatttttttaaaaagcctaggcagctctaacatcatctgatatggacacaaggccaacagtttccttatttacatccttacctctaaaagatacttcaaagtgacaaaaacgtgttccttccccacttagagacaatgattaacagggccctatatgttcttaccacatacagaggatgcatttatttttgctctatgacacttgcaaaaatctctactgtaattaatttgggtctattattaactctctgttccatcatagaatgtggccaggccttacaatggagagccagagttaaaacttcaagttgcatctgtttttgggctgagtcaccacctttgcctcatgctcctttgtctgcaaaggcctaggattctttctttaaatgaaatgcttaggactttgtggcttgttacatttgtcatttaactgcagtgctattctttgaaagctgctatgtgtattttctctgaagtctgcattttactaaaatttacaacagtctgatgattgattgattactgtccaggtacattttagaaaaagtgttcttcttccagtttgttttactaagcaaactttgagtaaatcctttgtcctatattgaatccagtcccaaagtgttcaggtgagtttctctagttccataaacaaaacatacatagtgggaactccctggtatgccatagagcacacaagaaccccaatattaatgctaacaattataccagtccattttgtttattctgtggaattgacttgacaaagcatgaagatattcccagtgtctgtctgataatattttgcatctaagaatgggtttgactcaagatcttgggttaccaagatgtcttaaatgttcagtaaatatctttcttacagtccagtagcttagagcatgtttgctgattgatattacatttaaacttggggctacagcttgttacctagaattttgagatactaagagaatgcaattttaaatgcccactggttttatttgttttggagagagggtctcattctgtcacccaggctagagtacagtgggaacagtcatggctcactgcagcttaagctcactgcctgggctcaagtgatcttactccagcctcccaagcagctgggactacaccaccacaggtatgcaccaccatacctggctgatttttaaaattttttctagagatgaggtctcactatgttgcccagctggtctcatactcctcagttcacgcattcctcccacctccacctcccaaactgctgggattacaggtgtgagccaccatgcccaacacccactgatctttaactctcacatgttgggcataagaagtcactatataattgttactggaaagcaagacttaacgaacaattctgactatgaaaaatgtctctttcagtttgttctgtaaatatttagaaaagtgacagctgtcaacctcagagtaactatttctaaaaatgtaaatatgtattaatccttgtatcttttatggtaattttgcatattgatatgaattatataaaattgtttaaaataaaaggtgtccttgaattactgaccacccatagatgtctactgttaccaggttttacaatgcaaattttcactaatacctgggtttaatacagctcacatcactgaatgttacacatgagtttaaatgggtaatatacaggttttgttataataaagttactgattaaatta

SEQ ID NO: 270618 - protein, 200 aa, Artificial Sequence
  derived and/or modified sequence
MLARLLKFEEAPYFLPEHIFRDKCMLPKSLEKHEKDLYFLTNKIAESLGGSGYSVERLSVPYVPQVTDEDRLSRRKSIVDTVSIQVDILSNNVPSDDVVSNTEEITFEALKKAIDTSGMEEQEKEKRRLVIEKFQKAPFEEIAAQCESKANLLHDRLAQILELTIRPPPSPSGTLTITSGHAQYQSVPVYEMKFPDLCVY

SEQ ID NO: 270619 - protein, 785 aa, Artificial Sequence
  derived and/or modified sequence
MEKLTFYAVSAPEKLDRIGSYLAERLSRDVVRHRSGYVLIAMEALDQLLMACHSQSIKPFVESFLHMVAKLLESGEPKLQVLGTNSFVKFANIEEDTPSYHRRYDFFVSRFSAMCHSCHSDPEIRTEIRIAGIRGIQGVVRKTVNDELRATIWEPQHMDKIVPSLLFNMQKIEEVDSRIGPPSSPSATDKEENPAVLAENCFRELLGRATFGNMNNAVRPVFAHLDHHKLWDPNEFAVHCFKIIMYSIQAQYSHHVIQEILGHLDARKKDAPRVRAGIIQVLLEAVAIAAKGSIGPTVLEVFNTLLKHLRLSVEFEANDLQGGSVGSVNLNTSSKDNDEKIVQNAIIQTIGFFGSNLPDYQRSEIMMFIMGKVPVFGTSTHTLDISQLGDLGTRRIQIMLLRSLLMVTSGYKAKTIVTALPGSFLDPLLSPSLMEDYELRQLVLEVMHNLMDRHDNRAKLRGIRIIPDVADLKIKREKICRQDTSFMKKNGQQLYRHIYLGCKEEDNVQKNYELLYTSLALITIELANEEVVIDLIRLAIALQDSAIINEDNLPMFHRCGIMALVAAYLNFVSQMIAVPAFCQHVSKVIEIRTMEAPYFLPEHIFRDKCMLPKSLEKHEKDLYFLTNKIAESLGGSGYSVERLSVPYVPQVTDEDRLSRRKSIVDTVSIQVDILSNNVPSDDVVSNTEEITFEALKKAIDTSGMEEQEKEKRRLVIEKFQKAPFEEIAAQCESKANLLHDRLAQILELTIRPPPSPSGTLTITSGHAQYQSVPVYEMKFPDLCVY

SEQ ID NO: 270620 - DNA, 603 bp, Artificial Sequence
  derived and/or modified sequence
atgctggctcgcctgctgaagttcgaagaggcaccctactttctgcctgaacatatctttcgagataagtgcatgttgcccaagagccttgagaagcacgaaaaagatctgtacttcctcaccaacaagattgccgagtcgttggggggttcggggtacagcgttgagcgactgtcagtcccctatgtgcctcaggtgactgacgaagaccggctaagtcggaggaagtctatagtcgacactgttagcattcaggtggatattctgtcaaacaacgtgcctagtgatgatgtggtctctaatactgaggagatcacgtttgaggcactcaagaaagccattgatacctctggtatggaggagcaggaaaaagagaaaaggaggctggtgatcgaaaagtttcagaaagctcctttcgaggaaattgccgcacaatgtgaatcaaaagccaatctactgcacgacaggcttgctcaaatactggaattgacaatccgccctccgccctctccatccggaaccctgactatcacctccggacatgcacagtaccagagcgtccccgtttatgagatgaagtttccagacctatgcgtatattag

SEQ ID NO: 270621 - DNA, 603 bp, Artificial Sequence
  derived and/or modified sequence
atgctggcccggctgctgaagtttgaggaggccccctacttcctgcctgagcacatcttccgggacaagtgcatgctgcccaagagcctggagaagcatgagaaggacctgtacttcctgaccaacaagattgctgagagcctgggcggcagcggctacagcgtggagcggctgtctgtgccctacgtgccccaggtgacagatgaagatcggctgagcaggaggaagagcatcgtggacacagtgtccatccaggtggacatcctgagcaacaacgtgcccagtgatgatgtggtgagcaacacagaggagatcacctttgaggccctgaagaaggccatcgacaccagcggcatggaggagcaggagaaggagaagaggcggctggtgattgagaagttccagaaggccccctttgaggagattgctgcccagtgtgagagcaaggccaacctgctgcatgaccggctggcccagatcctggagctgaccatccggcccccacccagccccagcggcaccctgaccatcaccagcggccacgcccagtaccagagcgtgcctgtgtatgagatgaagttcccagacctgtgtgtgtactag

SEQ ID NO: 270622 - DNA, 603 bp, Artificial Sequence
  derived and/or modified sequence
atgctggcccggctgctgaagttcgaggaggccccctacttcctgccagaacacattttcagagacaagtgtatgctgccaaagtccctggagaagcatgaaaaagatctgtactttttaacaaacaagatcgcagagtctttgggagggtccggatactcagtggaacgtttgagtgtgccctacgttccacaggtgacagatgaggacaggctcagccgccggaaatctattgtggacaccgtcagcatccaggtggacatactctctaacaatgtgccgtccgatgacgtggtgtctaacacagaggagattacattcgaagccctgaagaaggcaattgacacaagcggcatggaagaacaggagaaggagaagaggcgcctagtaatagagaagtttcaaaaggcccctttcgaggagattgccgcccaatgcgagtccaaggccaacctcctccacgaccgccttgctcagatcttggagctcaccatcaggcctcccccatcacccagtggcacgctgactatcacttccggccacgcacaatatcagagcgttcccgtgtatgagatgaagttccccgatctctgtgtgtattag

SEQ ID NO: 270623 - DNA, 603 bp, Artificial Sequence
  derived and/or modified sequence
atgctcgcccgactgctgaaatttgaagaggctccatactttctgccggaacatatttttcgcgacaaatgtatgctgcctaagtccctcgagaagcacgaaaaggatctctacttcttgaccaataagatcgccgaaagccttggcggttcgggttacagtgtggagcgcctgagtgttccctatgtgcctcaagtgacagatgaggacagactgtccagacgcaagtctatcgtggatactgtctcaatccaggtagacatattgtcgaacaacgtgccttctgatgacgtcgtgtctaacacggaggagattaccttcgaagcacttaaaaaagctatcgacactagtggtatggaagaacaggaaaaggaaaagcgacggcttgtcatcgagaagttccagaaagccccatttgaagagattgcagcccagtgtgaaagtaaagccaacctgctccatgaccgcctcgctcaaattctcgagctcacaatccgccctccaccctccccgagcggaaccttgactatcacctccggacacgctcagtaccagtcagttcccgtgtacgaaatgaagttcccggacctgtgcgtatactag

SEQ ID NO: 270624 - DNA, 603 bp, Artificial Sequence
  derived and/or modified sequence
atgctggccagactgctgaagttcgaggaggccccctacttcctgcccgagcacatcttcagagacaagtgcatgctgcccaagagcctggagaagcacgagaaggacctgtacttcctgaccaacaagatcgccgagagcctgggcggcagcggctacagcgtggagagactgagcgtgccctacgtgccccaggtgaccgacgaggacagactgagcagaagaaagagcatcgtggacaccgtgagcatccaggtggacatcctgagcaacaacgtgcccagcgacgacgtggtgagcaacaccgaggagatcaccttcgaggccctgaagaaggccatcgacaccagcggcatggaggagcaggagaaggagaagagaagactggtgatcgagaagttccagaaggcccccttcgaggagatcgccgcccagtgcgagagcaaggccaacctgctgcacgacagactggcccagatcctggagctgaccatcagacccccccccagccccagcggcaccctgaccatcaccagcggccacgcccagtaccagagcgtgcccgtgtacgagatgaagttccccgacctgtgcgtgtactag

SEQ ID NO: 270625 - protein, 838 aa, Artificial Sequence
  derived and/or modified sequence
MQEQEIGFISKYNEGLCVNTDPVSILTSILDMSLHRQMGSDRDLQSSASSVSLPSVKKAPKKRRISIGSLFRRKKDNKRKSRELNGGVDGIASIESIHSEMCTDKNSIFSTNTSSDNGLTSISKQIGDFIECPLCLLRHSKDRFPDIMTCHHRSCVDCLRQYLRIEISESRVNISCPECTERFNPHDIRLILSDDVLMEKYEEFMLRRWLVADPDCRWCPAPDCGYAVIAFGCASCPKLTCGREGCGTEFCYHCKQIWHPNQTCDAARQERAQSLRLRTIRSSSISYSQESGAAADDIKPCPRCAAYIIKMNDGSCNHMTCAVCGCEFCWLCMKEISDLHYLSPSGCTFWGKKPWSRKKKILWQLGTLVGAPVGIALIAGIAIPAMIIGIPVYVGRKIHNRYEGKDVSKHKRNLAIAGGVTLSVIVSPVVAAVTVGIGVPIMLAYVYGVVPISLCRSGGCGVSAGNGKGVRIEFDDENDINVGGTNTAVDTTSVAEARHNPSIGEGSVGGLTGSLSASGSHMDRIGAIRDNLSETASTMALAGASITGSLSGSAMVNCFNRLEVQADVQKERYSLSGESGTVSLGTVSDNASTKAMAGSILNSYIPLDKEGNSMEVQVDIESKPSKFRHNSGSSSVDDGSATRSHAGGSSSGLPEGKSSATKWSKEATAGKKSKSGKLRKKGNMKINETREDMDAQLLEQQSTNSSEFEAPSLSDSMPSVADSHSSHFSEFSCSDLESMKTSCSHGSSDYHTRFATVNILPEVENDRLENSPHQCSISVVTQTASCSEVSQLNHIAEEHGNNGIKPNVDLYFGDALKETNNNHSHQTMELKVAIQTEI

SEQ ID NO: 270626 - protein, 165 aa, Artificial Sequence
  derived and/or modified sequence
MQEQEIGFISKYNEGLCVNTDPVSILTSILDMSLHRQMGSDRDLQSSASSVSLPSVKKAPKKRRISIGSLFRRKKDNKRKSRELNGGVDGIASIESIHSEMCTDKNSIFSTNTSSDNGLTSISKQIGDFIECPLCLLRHSKDRFPDIMTCHHRSCVDCLRQYLRI

SEQ ID NO: 270627 - DNA, 2517 bp, Artificial Sequence
  derived and/or modified sequence
atgcaggagcaggagatcggcttcatcagcaagtacaacgagggcctgtgcgtgaacaccgaccccgtgagcatcctgaccagcatcctggacatgagcctgcacagacagatgggcagcgacagagacctgcagagcagcgccagcagcgtgagcctgcccagcgtgaagaaggcccccaagaagagaagaatcagcatcggcagcctgttcagaagaaagaaggacaacaagagaaagagcagagagctgaacggcggcgtggacggcatcgccagcatcgagagcatccacagcgagatgtgcaccgacaagaacagcatcttcagcaccaacaccagcagcgacaacggcctgaccagcatcagcaagcagatcggcgacttcatcgagtgccccctgtgcctgctgagacacagcaaggacagattccccgacatcatgacctgccaccacagaagctgcgtggactgcctgagacagtacctgagaatcgagatcagcgagagcagagtgaacatcagctgccccgagtgcaccgagagattcaacccccacgacatcagactgatcctgagcgacgacgtgctgatggagaagtacgaggagttcatgctgagaagatggctggtggccgaccccgactgcagatggtgccccgcccccgactgcggctacgccgtgatcgccttcggctgcgccagctgccccaagctgacctgcggcagagagggctgcggcaccgagttctgctaccactgcaagcagatctggcaccccaaccagacctgcgacgccgccagacaggagagagcccagagcctgagactgagaaccatcagaagcagcagcatcagctacagccaggagagcggcgccgccgccgacgacatcaagccctgccccagatgcgccgcctacatcatcaagatgaacgacggcagctgcaaccacatgacctgcgccgtgtgcggctgcgagttctgctggctgtgcatgaaggagatcagcgacctgcactacctgagccccagcggctgcaccttctggggcaagaagccctggagcagaaagaagaagatcctgtggcagctgggcaccctggtgggcgcccccgtgggcatcgccctgatcgccggcatcgccatccccgccatgatcatcggcatccccgtgtacgtgggcagaaagatccacaacagatacgagggcaaggacgtgagcaagcacaagagaaacctggccatcgccggcggcgtgaccctgagcgtgatcgtgagccccgtggtggccgccgtgaccgtgggcatcggcgtgcccatcatgctggcctacgtgtacggcgtggtgcccatcagcctgtgcagaagcggcggctgcggcgtgagcgccggcaacggcaagggcgtgagaatcgagttcgacgacgagaacgacatcaacgtgggcggcaccaacaccgccgtggacaccaccagcgtggccgaggccagacacaaccccagcatcggcgagggcagcgtgggcggcctgaccggcagcctgagcgccagcggcagccacatggacagaatcggcgccatcagagacaacctgagcgagaccgccagcaccatggccctggccggcgccagcatcaccggcagcctgagcggcagcgccatggtgaactgcttcaacagactggaggtgcaggccgacgtgcagaaggagagatacagcctgagcggcgagagcggcaccgtgagcctgggcaccgtgagcgacaacgccagcaccaaggccatggccggcagcatcctgaacagctacatccccctggacaaggagggcaacagcatggaggtgcaggtggacatcgagagcaagcccagcaagttcagacacaacagcggcagcagcagcgtggacgacggcagcgccaccagaagccacgccggcggcagcagcagcggcctgcccgagggcaagagcagcgccaccaagtggagcaaggaggccaccgccggcaagaagagcaagagcggcaagctgagaaagaagggcaacatgaagatcaacgagaccagagaggacatggacgcccagctgctggagcagcagagcaccaacagcagcgagttcgaggcccccagcctgagcgacagcatgcccagcgtggccgacagccacagcagccacttcagcgagttcagctgcagcgacctggagagcatgaagaccagctgcagccacggcagcagcgactaccacaccagattcgccaccgtgaacatcctgcccgaggtggagaacgacagactggagaacagcccccaccagtgcagcatcagcgtggtgacccagaccgccagctgcagcgaggtgagccagctgaaccacatcgccgaggagcacggcaacaacggcatcaagcccaacgtggacctgtacttcggcgacgccctgaaggagaccaacaacaaccacagccaccagaccatggagctgaaggtggccatccagaccgagatctag

SEQ ID NO: 270628 - DNA, 48 bp, Artificial Sequence
  derived and/or modified sequence
atgcaggagcaggagatcggcttcatcagcaagtacaacgagggctag

SEQ ID NO: 270629 - DNA, 2517 bp, Artificial Sequence
  derived and/or modified sequence
atgcaagagcaggagataggcttcattagcaagtacaacgagggcctatgcgtaaacacagatccagtcagcattctcactagtattctggatatgagccttcatcgacagatgggctctgatcgcgatttacagtcctccgccagttcagtgtccctaccttctgtcaagaaggccccaaagaaaagacgtattagcattggcagcctttttcggagaaagaaagataacaagcgaaaatcccgcgaattaaacggaggggttgatggaatcgcttccattgagagcattcattccgaaatgtgtacggacaagaatagcatcttttcaactaatacgtcttctgacaatgggctaacatcaatttccaagcagattggtgactttatagaatgtcccttgtgtttactacgccactcgaaagatagattcccagacataatgacatgccaccatcggagttgtgtggactgcctgcggcagtacctcagaatagaaatatcagaaagtagagtcaatatctcttgtcccgaatgtaccgaaaggttcaacccgcatgacatcagactgattttgtctgacgacgtacttatggagaaatacgaagaattcatgctgcgccgatggctcgtggctgatccagattgccgctggtgtccagcccccgactgtggctacgctgtgatcgcttttggctgcgcctcatgtcccaagcttacttgcggtcgggagggttgtgggacggaattctgctaccattgtaagcagatctggcatcctaatcagacttgcgacgccgcccggcaggagagagcccagagcctccgtttgcggaccatcaggagctcttctatctcctattcccaagaatctggtgccgctgctgatgacattaagccctgccccagatgtgcagcttatatcatcaagatgaacgatggttcgtgtaatcatatgacttgtgctgtctgcggatgcgaattttgctggctttgcatgaaggaaattagtgacctgcactatctctccccgtctggttgcaccttttggggcaagaaaccttggtcccgcaagaaaaaaattctgtggcagctcggcacgcttgttggtgcccccgtgggaatcgccctgatagcaggaatagcgatacctgcaatgattattgggatcccggtctacgtgggcaggaagatccataatcgctatgagggaaaagacgtgtcaaagcataaacggaacctagccatcgccggaggagttaccctcagcgtgattgtcagcccggttgtggctgccgtcaccgtcggaataggagtgcccattatgttggcttacgtctacggagtggtgccgatctctctttgtagaagtgggggatgcggcgtgtcggctggtaatgggaagggtgttcgaatcgaattcgatgacgaaaacgatattaacgttggagggacgaacactgctgttgataccacatctgtggcagaggctaggcataacccttccattggggaaggcagcgtgggcggcctaactggctccctttctgctagcggcagccatatggataggatcggcgccatccgtgataatctgagcgaaacagctagcaccatggctctagctggggccagtatcactgggagcttaagtgggagcgcaatggtgaactgtttcaacagactggaagtccaggccgacgtacagaaagagaggtatagcctgagtggtgagagcggtaccgtgagccttggcacagtcagcgacaatgcgagtacgaaggccatggccgggtctatcctgaactcttatataccccttgataaagaaggtaattctatggaagtgcaagtggacattgagtcgaagccgagcaagtttagacataactcaggttcatcctccgtcgacgatggcagcgcaacccgaagccacgccggcggctcgagctcaggactgcccgagggaaagtcctctgccaccaaatggagcaaagaagctactgcggggaaaaagagtaagagcgggaaactcagaaagaagggcaatatgaaaattaacgagactagggaggatatggacgcccagcttttggaacaacaatcaacaaatagctccgagtttgaggctccttctctgtccgactctatgccttctgtcgccgattcccacagttctcattttagcgaattttcctgtagcgatttggaaagcatgaagacaagctgtagccatggcagcagtgactaccacacccggttcgctaccgttaacatactgccagaggtagaaaatgatcggctagagaattcaccccaccagtgcagcatcagcgtggttacgcagacagcatcatgttcagaagtctctcagttgaaccatatcgctgaagaacacggcaacaacggaatcaagccaaacgtcgacctctattttggagacgcgcttaaagaaaccaataataaccatagccatcagaccatggagttaaaagtggcaattcaaaccgaaatttag

SEQ ID NO: 270630 - DNA, 2517 bp, Artificial Sequence
  derived and/or modified sequence
atgcaggaacaggaaatcggcttcatcagtaagtacaacgaggggctgtgtgtgaataccgaccctgttagtattctgaccagtattctcgacatgtctcttcatagacagatgggctcggatagagatttgcaaagctccgccagcagcgtgagcctgcccagtgtgaagaaagcccctaaaaaacggcgaatctcaatagggagtttattccggcgcaaaaaagacaacaaacggaagtctcgtgagctgaacggtggtgtcgatggcattgcctctattgagagcatacactctgaaatgtgcactgacaaaaattctattttttcaaccaacacatcttccgacaacggtctgaccagcatttccaagcagatcggggacttcatcgaatgtccactgtgcctgctccgacactctaaagaccggttcccggacattatgacgtgtcatcataggtcctgtgtcgactgtcttaggcagtatctgcgaattgagatttctgagagccgggtcaatattagctgtccggagtgtaccgagagattcaacccccatgatatcagattgatcctgtccgacgatgtactgatggagaagtatgaagagttcatgctacgccgttggttggtggccgatcccgattgtcgatggtgtcctgctcccgactgcggctatgccgtcattgctttcggatgcgcctcctgccccaaactcacatgtggcagggaaggctgtgggaccgaattctgctaccactgtaagcaaatctggcatcccaaccagacatgtgatgcagcccgacaggagagagcccagagccttaggctccggactattcgctccagcagtatcagttacagccaggagtcaggagccgccgctgatgacattaagccctgtccccggtgtgctgcctatatcataaaaatgaatgacggctcatgcaatcatatgacctgtgccgtttgcggatgcgagttttgctggttgtgtatgaaggagatttccgacttgcattacctcagtcccagcggttgtactttctggggaaagaagccttggagccgcaagaagaagatactatggcagcttgggactcttgtaggggcccccgtgggaattgcactgatagcaggaattgcaattcccgccatgatcattgggattcccgtttatgtcggccggaagattcacaatcgatacgaggggaaggacgtttccaagcacaagaggaacctggccatcgcaggcggcgttactctgtcagtcattgtgagccctgtggtcgccgctgtgaccgtgggaattggcgtgcctatcatgctagcctatgtgtacggcgtcgtgcctatttccctgtgtcggtcgggtgggtgtggtgtttcagccggcaatgggaagggagtccggatcgagtttgatgacgagaatgacatcaatgtggggggaactaacacagccgtggacacgacaagcgtagccgaagcccggcataacccgtccatcggagagggctctgtaggcggccttaccggcagcctgagcgcatcgggctctcatatggataggattggggctatccgagacaacttaagcgagaccgcaagcaccatggccctggccggcgcttcgattacgggctctcttagtggaagcgccatggtgaattgcttcaatcggctagaagtccaggccgacgtacagaaggaaaggtactctctaagcggcgaaagtggcaccgtgtctctcggcactgtgtcagacaatgcctcaacaaaggcgatggccgggagcatccttaattcatacattcccctcgacaaagaggggaattcaatggaagtgcaggttgatattgagtccaaaccaagcaagttcagacacaactctggctcatccagtgtggacgacgggtcagctaccagaagtcacgctggcggcagctcatccggactgcctgaaggcaaaagctctgctaccaagtggtctaaagaggctacagccggaaaaaaaagcaagtcagggaaactgcgcaaaaagggaaatatgaagattaatgaaacacgtgaggatatggacgcacaactgctcgagcagcaaagcaccaattccagcgaatttgaggccccctcactgtctgactcaatgccctctgtggccgactctcacagcagccacttcagcgaattttcctgctctgacctggagtccatgaagacatcttgtagccacggatcaagtgattaccatactcggttcgcgaccgtcaacattcttcccgaggtggagaatgatagacttgagaatagcccgcaccaatgttccatctccgtggtgacgcagaccgcttcatgctccgaggtgagccagttgaatcacattgccgaagagcacggaaataatgggataaagcccaacgtagacctttatttcggagacgctcttaaggaaactaataacaaccattctcaccagaccatggaactgaaagtggcgatacagacggaaatttag

SEQ ID NO: 270631 - DNA, 48 bp, Artificial Sequence
  derived and/or modified sequence
atgcaggaacaggaaatcggattcatctctaagtacaatgagggctag

SEQ ID NO: 270632 - DNA, 2517 bp, Artificial Sequence
  derived and/or modified sequence
atgcaggagcaggagatcggcttcatcagcaagtacaatgaaggcctgtgtgtgaacacagatcctgtgtccatcctgaccagcatcctggacatgagcctgcaccggcagatgggcagtgaccgggacctgcagagcagcgccagctctgtgtccctgcccagcgtgaagaaggcccccaagaagaggcgcatcagcatcggcagcctcttccggaggaagaaggacaacaagaggaagagccgggagctgaatggaggagtggatggcatcgccagcattgagagcatccacagcgagatgtgcacagacaagaacagcatcttcagcaccaacaccagcagtgacaatggcctgaccagcatcagcaagcagatcggggacttcattgaatgtcccctgtgcctgctgcggcacagcaaggaccgcttcccagacatcatgacctgccaccacaggagctgtgtggactgcctgcggcagtacctgagaattgagatcagcgagagccgggtgaacatcagctgcccagagtgcacagagcgcttcaacccccatgacatccgcctcatcctgagtgatgatgtgctgatggagaagtatgaggagttcatgctgcggcgctggctggtggccgaccctgactgccgctggtgcccagccccagactgtggctatgctgtgattgccttcggctgtgccagctgccccaagctgacctgtggccgggagggctgcggcacagagttctgctaccactgcaagcagatctggcaccccaaccagacctgtgatgctgcccggcaggagcgggcccagagcctgcggctgcggaccatccgcagcagcagcatctcctacagccaggagagcggggctgctgctgatgacatcaagccctgcccccgctgtgccgcctacatcatcaagatgaatgatggcagctgcaaccacatgacctgtgctgtgtgtggctgtgagttctgctggctgtgcatgaaggagatcagtgacctgcactacctgagccccagcggctgcaccttctggggcaagaagccctggagcaggaagaagaagatcctgtggcagctgggcaccctggtgggcgcccctgtgggcatcgccctgattgctggcatcgccatcccagccatgatcatcggcatccctgtgtatgtgggcaggaagatccacaacagatatgagggcaaggatgtgtccaagcacaagaggaacctggccatcgccggcggcgtgaccctgtctgtgattgtgtcccctgtggtggccgctgtgacagtgggcattggagtgcccatcatgctggcctacgtgtatggagtggtgcccatcagcctgtgccgcagcggcggctgcggcgtgtctgctggaaatggcaagggcgtgcgcatcgagtttgatgatgaaaatgacatcaacgtgggcggcaccaacacagctgtggacaccacctctgtggccgaggcccggcacaaccccagcattggagagggctctgtgggcggcctgaccggcagcctgagcgccagcggcagccacatggacagaattggagccatccgggacaacctgtctgaaacagccagcaccatggccctggccggggccagcatcaccggcagcctgagcggcagcgccatggtgaactgcttcaaccggctggaggtgcaggctgatgtgcagaaggagcgctacagcctgagcggggagagcggcaccgtgtccctgggcaccgtgtctgacaatgccagcaccaaggccatggccggcagcatcctgaacagctacatccccctggacaaggagggcaacagcatggaggtgcaggtggacatcgagagcaagcccagcaagttccgccacaacagcggcagcagctctgtggatgatggcagcgccaccaggagccacgccggcggcagcagcagcggcctgcctgagggcaagagcagcgccaccaagtggagcaaggaggccacagctgggaagaagagcaagagcggcaagctgaggaagaagggcaacatgaagatcaatgagacccgggaggacatggatgcccagctgctggagcagcagagcaccaacagcagcgagtttgaggcccccagcctgagtgacagcatgcccagcgtggccgacagccacagcagccacttcagcgagttcagctgcagcgacctggagagcatgaagaccagctgcagccacggcagcagtgactaccacaccaggtttgccaccgtgaacatcctgcctgaggtggagaatgaccggctggagaacagcccccaccagtgcagcatctctgtggtgacccagacagccagctgcagcgaggtgtcccagctgaaccacatcgccgaggagcacggcaacaacggcatcaagcccaacgtggacctgtactttggagatgccctgaaggagaccaacaacaaccacagccaccagaccatggagctgaaggtggccatccagacagagatctag

SEQ ID NO: 270633 - DNA, 48 bp, Artificial Sequence
  derived and/or modified sequence
atgcaggagcaggagatcggcttcatcagcaagtacaatgaaggatag

SEQ ID NO: 270634 - DNA, 2517 bp, Artificial Sequence
  derived and/or modified sequence
atgcaggagcaggagatcggcttcatcagcaagtacaacgagggcctctgcgtgaacactgaccctgtgtccattctgacatctatcctggatatgtcactccatcggcagatggggtcagaccgcgatctacagagcagtgcttcctctgtgtctctcccttcagtcaagaaagcccctaaaaagcggcgaatcagtattggttcactgtttagaagaaagaaggacaataaacgaaagagcagagagctcaatggcggtgtcgatgggattgcaagcattgagagtatccattccgagatgtgtactgataaaaatagcattttctcaacaaacacctcgtcagataatggcctgacctctatttcaaaacagattggcgattttatagagtgccccctctgccttctaaggcacagcaaggataggttcccagacataatgacgtgccaccatcgctcttgcgttgattgtctgaggcagtatcttcggatagaaatcagcgaatctagggtgaatatctcatgcccagagtgcaccgaacggttcaacccccatgatatcagacttattttgtcagacgatgtattgatggaaaagtatgaagaatttatgctgcgcaggtggttagtcgccgaccccgactgcaggtggtgccctgccccggactgtggatatgccgttatcgctttcggctgcgcaagctgccccaagctgacgtgcggacgagagggatgcggaactgaattctgttaccactgcaagcaaatatggcatccaaatcagacctgcgacgccgccagacaggaacgtgcccagtcattgcgactgaggactatccgctcatccagtatctcatattctcaagaatcaggggcagcagcagatgatattaagccatgtccacgctgtgcagcctacattatcaagatgaatgacgggtcctgtaatcatatgacttgtgcagtgtgcggctgcgaattctgttggctgtgcatgaaggaaattagcgacctccactatctgagcccttctggatgcaccttctggggcaaaaaaccctggagccgcaagaaaaagattctgtggcagcttggtactctggtcggcgcgccagtgggcattgcgctgattgcgggaatagctattccggcaatgattataggcatccctgtctatgtcggccggaagatacataaccgctacgaaggaaaggatgtctccaagcacaaacgcaacctagcgatcgcaggtggagtgaccctgagcgtgatcgtatcacctgtggtcgctgccgtgaccgtgggcatcggagtgccaattatgctggcctacgtctacggtgtagtcccgatcagtctttgccgcagcggcggctgtggcgtttctgctggcaacggcaaaggcgtgcggatcgagtttgacgatgaaaacgacataaacgtagggggcactaatactgctgtcgatactacaagcgtagccgaggcaagacacaacccatccatcggcgagggctcagtcggtggactcaccggctctctgtcagcatccggctcacatatggaccgcatcggcgcaattagagacaacctgtctgagacggcctccactatggccctggcaggagcatctatcactggatctttaagcgggtcagcaatggttaattgtttcaatcgcttggaggtccaggctgacgtccaaaaagaaagatactcactctctggtgaatcagggactgtttctctgggtaccgtttccgacaatgcttccacgaaagccatggcggggtcaatcctgaactcctacattcccctcgacaaagaaggcaattccatggaggttcaggttgacatcgaatccaagccctctaagttcagacataattccggaagttctagtgttgatgatggaagcgccacacgctcccacgcgggcgggtcatcatcaggtcttccagagggtaaatcaagcgctaccaaatggtcaaaggaggccactgccggcaaaaaatcaaagtccggaaaacttagaaagaaggggaatatgaagatcaacgaaaccagggaggacatggacgcccagttactggagcaacagtctaccaactcttcggagttcgaagccccctccctgagcgattcaatgccctccgtcgcggacagccactcttcccacttcagtgagtttagctgctctgatttagaatctatgaaaactagctgtagtcacggatcctcagactatcacactaggttcgctaccgtgaatatattaccagaggttgagaacgacagactcgaaaactcccctcatcagtgctctatttccgttgtgacgcaaaccgccagttgctccgaagtgtcccagttgaaccatattgctgaggagcatggcaacaatgggattaaacccaatgtagacctttactttggcgatgccttaaaagagacaaacaacaatcacagccaccagaccatggagttaaaagtcgccattcagacagaaatctag

SEQ ID NO: 270635 - DNA, 2517 bp, Artificial Sequence
  derived and/or modified sequence
atgcaggagcaggagatcggcttcatcagcaagtacaacgagggcctgtgtgttaacaccgatccagtctcaattttgacatccattcttgatatgtccctgcatcggcagatgggatctgaccgggatcttcaatcatcagcctcttcagtttccctgcctagcgtgaagaaagctcccaaaaaaaggcgcatttctattggtagcttgtttaggcgcaaaaaggataacaaacggaaatctcgagagttgaatggtggggttgatgggatcgctagcatcgagagcattcatagcgaaatgtgtactgataaaaatagtatcttttcgactaatacgtcaagcgataacggcttaacaagcatttcaaaacagattggcgatttcattgagtgtcctctctgtttactaaggcactctaaggatagattccccgatatcatgacatgtcaccacagaagctgtgtggattgcctacggcagtatttgcgtatcgagataagcgaaagtcgggtcaacatcagctgtccggaatgcaccgagcgatttaatcctcacgacataagactgatcttgtctgatgacgttctgatggagaagtatgaggaatttatgctgcggcgctggctcgtcgcagaccctgactgccgctggtgccctgcaccagattgtgggtacgcagtcattgcgttcggctgcgctagctgtcctaagctaacctgtggcagggaggggtgtggcaccgagttctgctatcactgtaaacaaatttggcatccaaatcaaacctgtgatgctgcccgtcaggaacgcgcccagagccttaggttaagaacaatacggagctccagcatcagctacagccaggagtccggagctgcagccgacgatattaagccatgccctcgctgcgcagcatacataataaagatgaatgacggatcatgcaaccatatgacttgtgccgtatgtggctgcgagttttgttggctctgtatgaaggagattagcgacctacattacctttcacccagtggttgcactttctggggaaaaaagccttggagcagaaagaagaagattctctggcagctcggaactctggttggcgctccagtggggatcgcattaattgccgggattgctatccctgccatgattatcggcatacccgtgtacgtcggccgcaagatacacaaccggtacgagggcaaggatgtgagcaaacacaagagaaatctggctatcgccggcggggttactctgagtgtgattgtgagccccgtagtcgcagcggtcacagtcgggattggcgtgcccataatgcttgcatacgtgtacggagtggtgcctatatcactttgtagaagtggaggctgtggcgtatccgctggaaacggaaaaggggttcggatcgagttcgacgatgagaatgacatcaacgtcggaggcacaaatacagctgtcgacactacatctgtggcggaggcacggcacaacccgtctatcggggagggctccgtgggaggcttgaccggatcactcagcgcgtctggaagccatatggatcgtattggcgccattcgggataatttaagtgagactgccagcaccatggcccttgccggggcatctatcacaggcagtctgagcgggtctgccatggtaaattgcttcaatcgcctggaagtgcaagctgatgttcagaaagagcgctatagtttgagcggcgagtccggcaccgtgtctttgggcactgtctcggacaatgccagtaccaaagctatggccggctctatcctgaatagctatattccactggacaaggaaggcaattcgatggaggtgcaggttgatatcgagtccaaaccgagtaaattcaggcacaatagcgggtctagttccgtggacgacggttcggcgacaaggtctcatgccggcggctcttcttctgggttacccgagggaaagagttccgcaaccaaatggtccaaggaggccactgccggcaaaaagtctaagagcgggaagctgcggaaaaaaggtaatatgaaaattaatgaaacacgggaagatatggacgcccagcttctggagcagcagagcactaattcttctgagttcgaggcccccagtctgtctgattcaatgccatcggttgcggatagccatagtagccacttcagcgaattttcctgtagtgacctggaatccatgaaaaccagttgttctcatgggagttccgattaccacacacgattcgcaaccgtgaatatcctccccgaagtagagaacgatcgtttggaaaatagtccccaccagtgcagtatcagtgtagtgactcagacagcctcctgctctgaggtctctcaattgaaccatattgcagaagagcatggcaataatggcatcaagccgaatgtggacttgtattttggcgatgccctaaaggagaccaacaataatcattctcatcagaccatggagctaaaagtggctatccagaccgagatttag

SEQ ID NO: 270636 - DNA, 2517 bp, Artificial Sequence
  derived and/or modified sequence
atgcaggaacaagagatcggattcatctcaaaatataatgagggactctgtgtaaatacagaccccgtgagtatccttaccagcatattagacatgtctttacacaggcaaatgggttcagatcgagacctccagagtagtgcttcctccgtgtctttgccaagtgtgaagaaggctcctaagaagagacgcatttccattggcagtctgttccgtagaaagaaagataataaaagaaaatccagggagcttaacgggggagtggacggcatcgcatccatcgaatccatccactctgaaatgtgtactgataagaactcaatttttagtaccaacacctcatcagataatgggttaaccagcataagcaagcagatcggagattttatagagtgcccgctctgccttctgcggcatagtaaggaccggtttcctgacatcatgacatgtcaccaccggtcatgtgtagattgcctgagacagtaccttcggatcgagattagtgaaagcagggtaaacatctcgtgtccagaatgcacggagagattcaaccctcacgacattaggctgatccttagcgacgacgtcttgatggaaaaatacgaagagttcatgctcagacgctggctggtggccgaccccgactgccgatggtgtcctgcgccagattgcggatatgcagtgattgcattcgggtgcgcctcctgccccaaactgacttgcggacgggagggatgcggcacggagttttgctaccactgtaaacagatttggcaccctaaccagacatgtgacgccgctcgacaagagcgggcacagtctcttcggctacggaccatcagaagcagtagcatcagctattcccaggagtctggtgccgctgcggatgacattaagccatgtccccgatgcgcagcctacatcatcaaaatgaacgatgggtcttgtaatcacatgacctgcgcagtgtgtggatgtgagttttgctggttgtgtatgaaggagattagcgaccttcattatctgtccccaagtggttgcaccttctggggcaagaagccctggagcagaaagaaaaaaatactgtggcagctgggcactctggttggtgcccctgtgggaatagccctgatcgctggcatagccattccagctatgattattgggatcccggtgtatgtcggcaggaagatccacaatagatatgaaggcaaggatgtctctaagcacaagaggaaccttgcaattgccggaggcgtaacgttgtctgtgattgtgtcccccgtggtcgcagctgttactgtagggataggggtgcccatcatgctggcttatgtgtatggagtggtccctatatccctgtgcaggtcaggcggttgcggggtcagtgccggtaacgggaaaggcgtgcgaatcgaattcgacgatgaaaatgacattaacgtcggaggcacaaacaccgccgtcgataccacctctgtggccgaggcccgtcacaatcccagcatcggcgaggggagcgtcggcggattgacaggctccctcagtgcttcgggcagccacatggaccgcattggagctatccgtgataacttgtccgagaccgcctcgacaatggctctggctggagcttctatcaccgggagtctctctggctccgcaatggtaaattgcttcaacaggctcgaggtacaggctgatgtacagaaggagcgttacagcctgtctggtgagagtggaacagtgtccctcggaaccgtgagcgataacgcgtccactaaggccatggccggtagcatcttgaacagctacatcccactcgacaaagagggcaactccatggaggttcaggtggacatcgagtcaaagccctctaagttccggcacaactccggctccagttcggtagatgacggcagtgctacacgctcacacgccggtggctccagttcaggactccccgaaggcaaaagtagcgctactaagtggtctaaggaggctactgccggaaagaagtccaaaagtggaaaactgagaaagaagggtaacatgaaaatcaacgagacaagagaggacatggacgcgcagttgctcgagcagcagagtactaacagttccgagttcgaagcgccatcactgagcgatagcatgcccagtgtggctgactcccattctagccacttctccgagtttagttgctctgacttagaatctatgaagacctcctgttcacatggctcttctgactatcatacacgctttgctacagtaaatatactccccgaggttgagaacgacagactggagaactcaccacaccagtgcagtattagcgtcgtgactcaaaccgccagctgctccgaggtctctcagctcaatcacatcgctgaggagcatgggaacaatggaataaaacctaacgtcgacctctacttcggggatgccctgaaagaaacaaacaacaaccattcccaccagacaatggaactcaaagtggccatccagaccgagatatag

SEQ ID NO: 270637 - DNA, 2517 bp, Artificial Sequence
  derived and/or modified sequence
atgcaggaacaagaaataggattcatctctaaatataacgagggcctgtgcgtgaatacagaccccgtcagtatacttacatctatactagacatgtctctgcatcggcagatgggcagcgatagagatctccagtcttcggcgagcagcgtgagcctgccttccgtgaaaaaagctcctaaaaaacgccgtatcagcattggcagcctgtttagaagaaaaaaggataacaagcgtaaaagtagagaattgaatggaggcgtcgacggtatcgccagcattgaatctatccactctgagatgtgcacagataagaatagtatttttagtacgaatacctctagcgacaatggcctgaccagcataagtaagcagatcggggattttatcgaatgtccgctgtgtctattaagacattctaaggatcgatttccagatattatgacctgccaccacagatcttgcgtggactgtctgagacagtacctgaggattgagatttctgagtcccgcgttaacatttcctgtcccgaatgcaccgaaaggtttaatcctcacgatatcagactgattttatccgacgatgtgctgatggagaaatacgaggagttcatgctcaggaggtggctggttgccgatccagactgccgctggtgtccagccccagactgtggctacgcagtcatcgcgtttgggtgtgcctcttgccctaaattgacctgcggacgagaaggctgtggcaccgaattctgctaccactgtaaacagatttggcatccgaaccagacctgcgacgccgcacgccaggagagggcccagtctcttcggctccgtactattcgaagcagcagcattagctattcacaggaaagtggggcagcagcagatgatataaagccgtgtcctaggtgtgccgcatacataattaagatgaacgacggttcttgtaatcacatgacatgcgcagtctgcggttgcgaattctgctggctgtgtatgaaggagatttctgatctgcactacctgtccccttctggctgtacgttttggggcaagaagccctggtcccgcaaaaaaaagatcttgtggcagctgggcacactggtgggagccccagttggaatcgcactgattgcaggaatcgcaatccccgctatgatcattggcatccctgtgtatgtgggccgtaaaatccacaataggtacgagggtaaagacgtgagcaaacataaaagaaatctggccatcgccggaggcgtcaccctgtccgtcattgtgtcccctgtggtcgcggcagtgacagtcggaattggagtgccgatcatgctggcatatgtctacggagtggtccccatatccctctgcaggtccgggggttgtggggtaagcgctggtaacggaaaaggggtgcggattgaatttgacgatgaaaatgacatcaacgtggggggaactaacacagcagtcgataccacgtctgtggcagaagcgagacacaatccaagtattggggagggttcagtgggcggtctcaccggaagtctaagcgcttctggctctcacatggacaggataggcgcaattagggataacttgagtgagaccgcttccactatggcccttgcaggagcgtcaataacggggagtctaagcgggagtgctatggttaattgctttaataggcttgaagtgcaggccgatgttcagaaagaaaggtactccctctccggagaatctggcactgtgtcactaggaacagtttctgataatgcctccactaaggctatggctggttcaatactcaactcttatattccgctggacaaagaaggaaatagcatggaagtccaggtcgacattgaatctaagccctcgaaattcagacacaacagcggctcatccagtgtagatgatggcagtgcgactagatcacacgctggcggatcttcctctgggctcccggaaggcaaaagctccgcaaccaaatggagcaaagaagcaacagcaggaaaaaagagcaagagtgggaaactcagaaagaagggcaacatgaagatcaacgagacccgcgaagatatggatgcccagctcctggagcagcagagtacgaactcgtcagaatttgaagcaccatccctttccgacagcatgccaagtgtggctgatagtcacagctctcacttttctgagttctcatgctccgatctagaatctatgaaaacaagctgttcacacgggagtagcgattatcataccagatttgcaaccgtgaatatcctgcccgaggtcgaaaacgaccgacttgagaactcaccacaccagtgctctatatcagtggtcacacagaccgcaagttgcagcgaggtgtctcagttgaatcacatcgcagaagagcatgggaacaacggtatcaaacccaacgtggatctgtactttggggacgccttaaaggaaactaacaacaaccactctcaccaaactatggaactgaaagtggcgattcaaaccgagatctag

SEQ ID NO: 270638 - DNA, 48 bp, Artificial Sequence
  derived and/or modified sequence
atgcaggagcaagaaattggcttcataagcaaatacaacgaagggtag

SEQ ID NO: 270639 - DNA, 4285 bp, Artificial Sequence
  derived and/or modified sequence
gggggccgcagtcggggccacccgggtgcagcggggcggctcctgcgcgggcgcggaacgaacgtgcgcaagggaacagccgcgtccagagccgcccgcagcgggcccggtgggcgtgacgccatgacgcacagcacgcgggcggcgcgctggggcggggcggccgggggcgggaggaagaagtgggaggaggaggaggggaaagcgggggctgcgggagggggaggtggtagttgcggcgctggttcccgggagcagccgtcgagccacaactgcggaggaggagttcgggaaagcggccgtcgggactcctcccctccgtcgtctccgccccggttgagaggcgcctcggcgcatcggagggaccctcccccgcgcttcctcaggctgctgtcgccgctgctgggagatgggcctactcgcccgccaccctgcgctgccgccgctctgaggagttaaagaacatccatgatagcagtcttctgtaaatcgaacttttcaagaattctctgaaggaaccaagtaggatattcttacatcatgacttaatgtgaatgcaagaacaagaaataggttttatctctaaatataatgaagggctgtgtgtaaacactgaccctgtctcaattctaacaagcattttagacatgagtttacatcggcaaatgggttcagatcgagatcttcagtcctctgcttcatctgtgagcttgccttcagtcaaaaaggcacccaaaaaaagaagaatttcaataggctccctgtttcggaggaaaaaagataacaaacgtaaatcaagggagctaaatggcggggtggatggaattgcaagtattgaaagtatacattctgaaatgtgtactgataagaactccattttctctacaaatacctcttctgacaatggattaacttccatcagcaaacaaattggagacttcatagagtgccctttgtgccttttgcggcattctaaagacagatttcctgatataatgacttgtcatcacagatcttgtgtggattgcttacgacaatatttaaggatagaaatctctgaaagcagagttaatattagttgcccagaatgtactgaacggtttaatccccatgatattcgcttgatattaagtgatgatgtcttgatggaaaaatacgaagaatttatgcttagacggtggcttgttgcagatcctgattgtaggtggtgtccagctccagactgtggatatgctgtgatagcatttggatgtgccagctgtccaaaattaacttgtgggcgagagggctgtggaacagagttttgctaccactgtaaacagatttggcaccccaaccagacctgtgatgctgctcgacaagagagagcccagagcttacgtttgagaactatacgttcttcatccattagttatagtcaagagtctggagcagcagctgatgatataaagccatgtccacgatgtgctgcttatataataaagatgaatgatgggagctgcaatcacatgacatgtgctgtttgtggttgtgagttttgttggttgtgtatgaaagaaatctcagatttgcattatctaagtccatcaggatgtactttttgggggaagaaaccctggagccgaaagaagaaaatattgtggcaactgggaacactggttggtgctcctgtcggaatcgctttaatagctggcattgctattcctgcaatgattattggcattcctgtgtatgtgggccgcaagattcacaatcgctatgaaggcaaggatgtttcaaagcacaaacggaatttggccatagcaggtggtgtaacgttgtctgtaatcgtgtctccagtagtagctgcagtgactgtaggtatcggtgttcctattatgttagcttatgtctatggcgtagttccaatttctctttgtcgaagcggaggttgtggagtctcagcaggcaatggaaaaggagttaggattgaatttgatgatgaaaatgatataaatgttggtggaactaacacagctgtagacacaacatcagtagcagaagcaagacacaacccaagcataggggagggaagtgttggtgggctgactggcagtttgagtgcaagtggaagccacatggatcgaataggagccatccgagacaacctgagtgaaacggccagcaccatggcactagctggagccagtataacggggagtctgtcaggaagtgccatggtaaactgttttaacaggttggaagtacaagcagatgtacagaaagaacggtacagtctaagtggagaatctggcacagtcagcttgggaacagttagtgataatgccagcaccaaagcaatggcaggatccattctgaattcctacatcccattggacaaagaaggcaacagtatggaggtgcaagtagatattgagtcaaagccatccaaattcaggcacaacagtggaagcagtagtgtggatgatggcagtgccacccgaagtcatgctggcggttcatccagtggcttgcctgaaggtaaatctagtgccaccaagtggtccaaagaagcaacagcagggaaaaaatcaaaaagtggtaaactgaggaaaaagggtaacatgaagataaatgagacgagagaggacatggatgcacagttgttagaacaacaaagcacgaactcaagtgaatttgaggctccatccctcagtgacagtatgccttctgtagcagattctcactctagtcatttttctgaatttagttgttctgacctagaaagcatgaaaacttcttgtagtcatggttccagtgattatcacacccgctttgctactgttaacattcttcctgaggtagaaaatgaccgtctggaaaattccccacatcagtgtagcatttctgtggttacccaaactgcttcctgttcagaagtttcacagttgaatcatattgctgaagaacatggtaacaatggaataaaacctaatgttgatttatattttggcgatgcactaaaagaaacaaataacaaccactcacatcagacaatggaattaaaagttgcaattcagactgaaatttaggcccataaatgctgcagaataattaccactgtacaaccgtgtttggagctggttgaactacatgtgactacttaagtttcaggttaccagcaaaagccgggtttcattatcataatgcagatacattttctgtgttcagcaaggcattgtgtgtcatgtggatcttagttaccaaactatgaagtgaaggctttaaaagtgcattattttaaggataataaatttgaagagcaaagcatgttttgtgtgtttgccacaaaacattgcttgaagcacatacttagatagaaattggtcttaatttatataatcaatataaaatactaatgcaattctacagcattcaaatgaagaaaacttgaggctttagggataagtggttagtgatattttattgaaaccactaaagagataagtttaaaagaactgcataggttactctcagtatatgatactctgtaacatttctatttatatcggcataaatttcattttttttcttcatatgcaatgtggttatataaagcttaatgcagctcatttgctaccatttggatacttagacactttgagcaagattgtggcagtttttgcacaactttgaaatagaaatacctggtactctatcttgtttattgttgatgccatcttagaggaaaaaatgtaaaggtaagtaattaagcatatgacagcaacaaataagatacataaaactacaaaataaagtcccattaggttataagtattacaaaaaatccacctttctctaaggggaagtttgtaccccattgattcttggtgcctttgggatcgactgggttttaatggcctagttatttgaggattttgctgtgttgttttccatgtcttctctggtcaccttggattatatataaaaatacaggaaatagataaacatgaatgtgattaataatgctgaaaaagtattagcctaccaaagacacactcaggctttagtgaataactttacataacctcagtttttaacacatgcatatcttctccaaccatgaaatcaaagcacggtgcagaacttgtaccaagtacaaaaggtccatgtatgattagcattattttcttttgcttttgtttatggacaatgttcagctgacataagcagaagttggccaaaatactgcctgtactgttaatttcctgtataattcacttaaataaaagcaggttaacctcaa

SEQ ID NO: 270640 - DNA, 4330 bp, Artificial Sequence
  derived and/or modified sequence
atagtcaccagaagctggaagagtcaaaggacacattctcccctcaagccccagtgggagcacggcccagctggattttggacttctggcctccagaactagacagggcctcactgtgtcacccagggtggaatacagtggtgtgatcatagctcactgcagcctggaattcctgggctcaagcaaccctgccacctcagccttccaagtagctaggactacagaacatccatgatagcagtcttctgtaaatcgaacttttcaagaattctctgaaggaaccaagtaggatattcttacatcatgacttaatgtgaatgcaagaacaagaaataggttttatctctaaatataatgaagggctgtgtgtaaacactgaccctgtctcaattctaacaagcattttagacatgagtttacatcggcaaatgggttcagatcgagatcttcagtcctctgcttcatctgtgagcttgccttcagtcaaaaaggcacccaaaaaaagaagaatttcaataggctccctgtttcggaggaaaaaagataacaaacgtaaatcaagggagctaaatggcggggtggatggaattgcaagtattgaaagtatacattctgaaatgtgtactgataagaactccattttctctacaaatacctcttctgacaatggattaacttccatcagcaaacaaattggagacttcatagagtgccctttgtgccttttgcggcattctaaagacagatttcctgatataatgacttgtcatcacagatcttgtgtggattgcttacgacaatatttaaggatagaaatctctgaaagcagagttaatattagttgcccagaatgtactgaacggtttaatccccatgatattcgcttgatattaagtgatgatgtcttgatggaaaaatacgaagaatttatgcttagacggtggcttgttgcagatcctgattgtaggtggtgtccagctccagactgtggatatgctgtgatagcatttggatgtgccagctgtccaaaattaacttgtgggcgagagggctgtggaacagagttttgctaccactgtaaacagatttggcaccccaaccagacctgtgatgctgctcgacaagagagagcccagagcttacgtttgagaactatacgttcttcatccattagttatagtcaagagtctggagcagcagctgatgatataaagccatgtccacgatgtgctgcttatataataaagatgaatgatgggagctgcaatcacatgacatgtgctgtttgtggttgtgagttttgttggttgtgtatgaaagaaatctcagatttgcattatctaagtccatcaggatgtactttttgggggaagaaaccctggagccgaaagaagaaaatattgtggcaactgggaacactggttggtgctcctgtcggaatcgctttaatagctggcattgctattcctgcaatgattattggcattcctgtgtatgtgggccgcaagattcacaatcgctatgaaggcaaggatgtttcaaagcacaaacggaatttggccatagcaggtggtgtaacgttgtctgtaatcgtgtctccagtagtagctgcagtgactgtaggtatcggtgttcctattatgttagcttatgtctatggcgtagttccaatttctctttgtcgaagcggaggttgtggagtctcagcaggcaatggaaaaggagttaggattgaatttgatgatgaaaatgatataaatgttggtggaactaacacagctgtagacacaacatcagtagcagaagcaagacacaacccaagcataggggagggaagtgttggtgggctgactggcagtttgagtgcaagtggaagccacatggatcgaataggagccatccgagacaacctgagtgaaacggccagcaccatggcactagctggagccagtataacggggagtctgtcaggaagtgccatggtaaactgttttaacaggttggaagtacaagcagatgtacagaaagaacggtacagtctaagtggagaatctggcacagtcagcttgggaacagttagtgataatgccagcaccaaagcaatggcaggatccattctgaattcctacatcccattggacaaagaaggcaacagtatggaggtgcaagtagatattgagtcaaagccatccaaattcaggcacaacagtggaagcagtagtgtggatgatggcagtgccacccgaagtcatgctggcggttcatccagtggcttgcctgaaggtaaatctagtgccaccaagtggtccaaagaagcaacagcagggaaaaaatcaaaaagtggtaaactgaggaaaaagggtaacatgaagataaatgagacgagagaggacatggatgcacagttgttagaacaacaaagcacgaactcaagtgaatttgaggctccatccctcagtgacagtatgccttctgtagcagattctcactctagtcatttttctgaatttagttgttctgacctagaaagcatgaaaacttcttgtagtcatggttccagtgattatcacacccgctttgctactgttaacattcttcctgaggtagaaaatgaccgtctggaaaattccccacatcagtgtagcatttctgtggttacccaaactgcttcctgttcagaagtttcacagttgaatcatattgctgaagaacatggtaacaatggaataaaacctaatgttgatttatattttggcgatgcactaaaagaaacaaataacaaccactcacatcagacaatggaattaaaagttgcaattcagactgaaatttaggcccataaatgctgcagaataattaccactgtacaaccgtgtttggagctggttgaactacatgtgactacttaagtttcaggttaccagcaaaagccgggtttcattatcataatgcagatacattttctgtgttcagcaaggcattgtgtgtcatgtggatcttagttaccaaactatgaagtgaaggctttaaaagtgcattattttaaggataataaatttgaagagcaaagcatgttttgtgtgtttgccacaaaacattgcttgaagcacatacttagatagaaattggtcttaatttatataatcaatataaaatactaatgcaattctacagcattcaaatgaagaaaacttgaggctttagggataagtggttagtgatattttattgaaaccactaaagagataagtttaaaagaactgcataggttactctcagtatatgatactctgtaacatttctatttatatcggcataaatttcattttttttcttcatatgcaatgtggttatataaagcttaatgcagctcatttgctaccatttggatacttagacactttgagcaagattgtggcagtttttgcacaactttgaaatagaaatacctggtactctatcttgtttattgttgatgccatcttagaggaaaaaatgtaaaggtaagtaattaagcatatgacagcaacaaataagatacataaaactacaaaataaagtcccattaggttataagtattacaaaaaatccacctttctctaaggggaagtttgtaccccattgattcttggtgcctttgggatcgactgggttttaatggcctagttatttgaggattttgctgtgttgttttccatgtcttctctggtcaccttggattatatataaaaatacaggaaatagataaacatgaatgtgattaataatgctgaaaaagtattagcctaccaaagacacactcaggctttagtgaataactttacataacctcagtttttaacacatgcatatcttctccaaccatgaaatcaaagcacggtgcagaacttgtaccaagtacaaaaggtccatgtatgattagcattattttcttttgcttttgtttatggacaatgttcagctgacataagcagaagttggccaaaatactgcctgtactgttaatttcctgtataattcacttaaataaaagcaggttaacctcaatgatagcagttaaaatgttctatcttatgtatttcttttaagtattaccattatggtgctactgagcgttttcttttggtaaaaagaaaaatgccatgggctgcagtcttcttccatcacttttccctaccaggtccattaatatgcttataacactagtgccagttattttatttgataatgcttatggtatttgtatatttgtttgcattccaattttgtttaataatgagtgtgtaaactgcatacgttaaataaatgtaaatactaatgtactgctgc

SEQ ID NO: 270641 - protein, 636 aa, Artificial Sequence
  derived and/or modified sequence
MNPSAPSYPMASLYVGDLHPDVTEAMLYEKFSPAGPILSIRVCRDMITRRSLGYAYVNFQQPADAERALDTMNFDVIKGKPVRIMWSQRDPSLRKSGVGNIFIKNLDKSIDNKALYDTFSAFGNILSCKVVCDENGSKGYGFVHFETQEAAERAIEKMNGMLLNDRKVFVGRFKSRKEREAELGARAKEFTNVYIKNFGEDMDDERLKDLFGKFGPALSVKVMTDESGKSKGFGFVSFERHEDAQKAVDEMNGKELNGKQIYVGRAQKKVERQTELKRKFEQMKQDRITRYQGVNLYVKNLDDGIDDERLRKEFSPFGTITSAKVMMEGGRSKGFGFVCFSSPEEATKAVTEMNGRIVATKPLYVALAQRKEERQAHLTNQYMQRMASVRAVPNPVINPYQPAPPSGYFMAAIPQTQNRAAYYPPSQIAQLRPSPRWTAQGARPHPFQNMPGAIRPAAPRPPFSTMRPASSQVPRVMSTQRVANTSTQTMGPRPAAAAAAATPAVRTVPQYKYAAGVRNPQQHLNAQPQVTMQQPAVHVQGQEPLTASMLASAPPQEQKQMLGERLFPLIQAMHPTLAGKITGMLLEIDNSELLHMLESPESLRSKVDEAVAVLQAHQAKEAAQKAVNSATGVPTV

SEQ ID NO: 270642 - protein, 547 aa, Artificial Sequence
  derived and/or modified sequence
MNPSAPSYPMASLYVGDLHPDVTEAMLYEKFSPAGPILSIRVCRDMITRRSLGYAYVNFQQPADAERALDTMNFDVIKGKPVRIMWSQRDPSLRKSGVGNIFIKNLDKSIDNKALYDTFSAFGNILSCKVVCDENGSKGYGFVHFETQEAAERAIEKMNGMLLNDRKVFVGRFKSRKEREAELGARAKEFTNVYIKNFGEDMDDERLKDLFGKFGPALSVKVMTDESGKSKGFGFVSFERHEDAQKAVDEMNGKELNGKQIYVGRAQKKVERQTELKRKFEQMKQDRITRYQGVNLYVKNLDDGIDDERLRKEFSPFGTITSAKVMMEGGRSKGFGFVCFSSPEEATKAVTEMNGRIVATKPLYVALAQRKEERQAHLTNQYMQRMASVRAVPNPVINPYQPAPPSGYFMAAIPQTQNRAAYYPPSQIAQLRPSPRWTAQGARPHPAVHVQGQEPLTASMLASAPPQEQKQMLGERLFPLIQAMHPTLAGKITGMLLEIDNSELLHMLESPESLRSKVDEAVAVLQAHQAKEAAQKAVNSATGVPTV

SEQ ID NO: 270643 - protein, 42 aa, Artificial Sequence
  derived and/or modified sequence
  misc_feature (1)..(1): Xaa can be any naturally occurring amino acid
XMLESPESLRSKVDEAVAVLQAHQAKEAAQKAVNSATGVPTV

SEQ ID NO: 270644 - protein, 38 aa, Artificial Sequence
  derived and/or modified sequence
MNPSAPSYPMASLYVGDLHPDVTEAMLYEKFSPAGPIL

SEQ ID NO: 270645 - protein, 118 aa, Artificial Sequence
  derived and/or modified sequence
MNPSAPSYPMASLYVGDLHPDVTEAMLYEKFSPAGPILSIRVCRDMITRRSLGYAYVNFQQPADAERALDTMNFDVIKGKPVRIMWSQRDPSLRKSGVGNIFIKNLDKSIDNKALYDT

SEQ ID NO: 270646 - protein, 43 aa, Artificial Sequence
  derived and/or modified sequence
MNPSAPSYPMASLYVGDLHPDVTEAMLYEKFSPAGPILSIRVC

SEQ ID NO: 270647 - protein, 169 aa, Artificial Sequence
  derived and/or modified sequence
  misc_feature (1)..(1): Xaa can be any naturally occurring amino acid
XASSQVPRVMSTQRVANTSTQTMGPRPAAAAAAATPAVRTVPQYKYAAGVRNPQQHLNAQPQVTMQQPAVHVQGQEPLTASMLASAPPQEQKQMLGERLFPLIQAMHPTLAGKITGMLLEIDNSELLHMLESPESLRSKVDEAVAVLQAHQAKEAAQKAVNSATGVPTV

SEQ ID NO: 270648 - protein, 61 aa, Artificial Sequence
  derived and/or modified sequence
MNPSAPSYPMASLYVGDLHPDVTEAMLYEKFSPAGPILSIRVCRDMITRRSLGYAYVNFQQ

SEQ ID NO: 270649 - protein, 129 aa, Artificial Sequence
  derived and/or modified sequence
MNPSAPSYPMASLYVGDLHPDVTEAMLYEKFSPAGPILSIRVCRDMITRRSLGYAYVNFQQPADAERALDTMNFDVIKGKPVRIMWSQRDPSLRKSGVGNIFIKNLDKSIDNKALYDTFSAFGNILSCK

SEQ ID NO: 270650 - protein, 183 aa, Artificial Sequence
  derived and/or modified sequence
IRPAAPRPPFSTMRPASSQVPRVMSTQRVANTSTQTMGPRPAAAAAAATPAVRTVPQYKYAAGVRNPQQHLNAQPQVTMQQPAVHVQGQEPLTASMLASAPPQEQKQMLGERLFPLIQAMHPTLAGKITGMLLEIDNSELLHMLESPESLRSKVDEAVAVLQAHQAKEAAQKAVNSATGVPTV

SEQ ID NO: 270651 - protein, 75 aa, Artificial Sequence
  derived and/or modified sequence
MNPSAPSYPMASLYVGDLHPDVTEAMLYEKFSPAGPILSIRVCRDMITRRSLGYAYVNFQQPADAERALDTMNFD

SEQ ID NO: 270652 - DNA, 1911 bp, Artificial Sequence
  derived and/or modified sequence
atgaaccccagcgcccccagctaccccatggccagcctgtacgtgggcgacctgcaccccgacgtgaccgaggccatgctgtacgagaagttcagccccgccggccccatcctgagcatcagagtgtgcagagacatgatcaccagaagaagcctgggctacgcctacgtgaacttccagcagcccgccgacgccgagagagccctggacaccatgaacttcgacgtgatcaagggcaagcccgtgagaatcatgtggagccagagagaccccagcctgagaaagagcggcgtgggcaacatcttcatcaagaacctggacaagagcatcgacaacaaggccctgtacgacaccttcagcgccttcggcaacatcctgagctgcaaggtggtgtgcgacgagaacggcagcaagggctacggcttcgtgcacttcgagacccaggaggccgccgagagagccatcgagaagatgaacggcatgctgctgaacgacagaaaggtgttcgtgggcagattcaagagcagaaaggagagagaggccgagctgggcgccagagccaaggagttcaccaacgtgtacatcaagaacttcggcgaggacatggacgacgagagactgaaggacctgttcggcaagttcggccccgccctgagcgtgaaggtgatgaccgacgagagcggcaagagcaagggcttcggcttcgtgagcttcgagagacacgaggacgcccagaaggccgtggacgagatgaacggcaaggagctgaacggcaagcagatctacgtgggcagagcccagaagaaggtggagagacagaccgagctgaagagaaagttcgagcagatgaagcaggacagaatcaccagataccagggcgtgaacctgtacgtgaagaacctggacgacggcatcgacgacgagagactgagaaaggagttcagccccttcggcaccatcaccagcgccaaggtgatgatggagggcggcagaagcaagggcttcggcttcgtgtgcttcagcagccccgaggaggccaccaaggccgtgaccgagatgaacggcagaatcgtggccaccaagcccctgtacgtggccctggcccagagaaaggaggagagacaggcccacctgaccaaccagtacatgcagagaatggccagcgtgagagccgtgcccaaccccgtgatcaacccctaccagcccgccccccccagcggctacttcatggccgccatcccccagacccagaacagagccgcctactacccccccagccagatcgcccagctgagacccagccccagatggaccgcccagggcgccagaccccaccccttccagaacatgcccggcgccatcagacccgccgcccccagaccccccttcagcaccatgagacccgccagcagccaggtgcccagagtgatgagcacccagagagtggccaacaccagcacccagaccatgggccccagacccgccgccgccgccgccgccgccacccccgccgtgagaaccgtgccccagtacaagtacgccgccggcgtgagaaacccccagcagcacctgaacgcccagccccaggtgaccatgcagcagcccgccgtgcacgtgcagggccaggagcccctgaccgccagcatgctggccagcgcccccccccaggagcagaagcagatgctgggcgagagactgttccccctgatccaggccatgcaccccaccctggccggcaagatcaccggcatgctgctggagatcgacaacagcgagctgctgcacatgctggagagccccgagagcctgagaagcaaggtggacgaggccgtggccgtgctgcaggcccaccaggccaaggaggccgcccagaaggccgtgaacagcgccaccggcgtgcccaccgtgtag

SEQ ID NO: 270653 - DNA, 1644 bp, Artificial Sequence
  derived and/or modified sequence
atgaaccccagcgcccccagctaccccatggccagcctgtacgtgggcgacctgcaccccgacgtgaccgaggccatgctgtacgagaagttcagccccgccggccccatcctgagcatcagagtgtgcagagacatgatcaccagaagaagcctgggctacgcctacgtgaacttccagcagcccgccgacgccgagagagccctggacaccatgaacttcgacgtgatcaagggcaagcccgtgagaatcatgtggagccagagagaccccagcctgagaaagagcggcgtgggcaacatcttcatcaagaacctggacaagagcatcgacaacaaggccctgtacgacaccttcagcgccttcggcaacatcctgagctgcaaggtggtgtgcgacgagaacggcagcaagggctacggcttcgtgcacttcgagacccaggaggccgccgagagagccatcgagaagatgaacggcatgctgctgaacgacagaaaggtgttcgtgggcagattcaagagcagaaaggagagagaggccgagctgggcgccagagccaaggagttcaccaacgtgtacatcaagaacttcggcgaggacatggacgacgagagactgaaggacctgttcggcaagttcggccccgccctgagcgtgaaggtgatgaccgacgagagcggcaagagcaagggcttcggcttcgtgagcttcgagagacacgaggacgcccagaaggccgtggacgagatgaacggcaaggagctgaacggcaagcagatctacgtgggcagagcccagaagaaggtggagagacagaccgagctgaagagaaagttcgagcagatgaagcaggacagaatcaccagataccagggcgtgaacctgtacgtgaagaacctggacgacggcatcgacgacgagagactgagaaaggagttcagccccttcggcaccatcaccagcgccaaggtgatgatggagggcggcagaagcaagggcttcggcttcgtgtgcttcagcagccccgaggaggccaccaaggccgtgaccgagatgaacggcagaatcgtggccaccaagcccctgtacgtggccctggcccagagaaaggaggagagacaggcccacctgaccaaccagtacatgcagagaatggccagcgtgagagccgtgcccaaccccgtgatcaacccctaccagcccgccccccccagcggctacttcatggccgccatcccccagacccagaacagagccgcctactacccccccagccagatcgcccagctgagacccagccccagatggaccgcccagggcgccagaccccaccccgccgtgcacgtgcagggccaggagcccctgaccgccagcatgctggccagcgcccccccccaggagcagaagcagatgctgggcgagagactgttccccctgatccaggccatgcaccccaccctggccggcaagatcaccggcatgctgctggagatcgacaacagcgagctgctgcacatgctggagagccccgagagcctgagaagcaaggtggacgaggccgtggccgtgctgcaggcccaccaggccaaggaggccgcccagaaggccgtgaacagcgccaccggcgtgcccaccgtgtag

SEQ ID NO: 270654 - DNA, 129 bp, Artificial Sequence
  derived and/or modified sequence
tgaatgctggagagccccgagagcctgagaagcaaggtggacgaggccgtggccgtgctgcaggcccaccaggccaaggaggccgcccagaaggccgtgaacagcgccaccggcgtgcccaccgtgtag

SEQ ID NO: 270655 - DNA, 117 bp, Artificial Sequence
  derived and/or modified sequence
atgaaccccagcgcccccagctaccccatggccagcctgtacgtgggcgacctgcaccccgacgtgaccgaggccatgctgtacgagaagttcagccccgccggccccatcctgtag

SEQ ID NO: 270656 - DNA, 357 bp, Artificial Sequence
  derived and/or modified sequence
atgaaccccagcgcccccagctaccccatggccagcctgtacgtgggcgacctgcaccccgacgtgaccgaggccatgctgtacgagaagttcagccccgccggccccatcctgagcatcagagtgtgcagagacatgatcaccagaagaagcctgggctacgcctacgtgaacttccagcagcccgccgacgccgagagagccctggacaccatgaacttcgacgtgatcaagggcaagcccgtgagaatcatgtggagccagagagaccccagcctgagaaagagcggcgtgggcaacatcttcatcaagaacctggacaagagcatcgacaacaaggccctgtacgacacctag

SEQ ID NO: 270657 - DNA, 132 bp, Artificial Sequence
  derived and/or modified sequence
atgaaccccagcgcccccagctaccccatggccagcctgtacgtgggcgacctgcaccccgacgtgaccgaggccatgctgtacgagaagttcagccccgccggccccatcctgagcatcagagtgtgctag

SEQ ID NO: 270658 - DNA, 510 bp, Artificial Sequence
  derived and/or modified sequence
tgagccagcagccaggtgcccagagtgatgagcacccagagagtggccaacaccagcacccagaccatgggccccagacccgccgccgccgccgccgccgccacccccgccgtgagaaccgtgccccagtacaagtacgccgccggcgtgagaaacccccagcagcacctgaacgcccagccccaggtgaccatgcagcagcccgccgtgcacgtgcagggccaggagcccctgaccgccagcatgctggccagcgcccccccccaggagcagaagcagatgctgggcgagagactgttccccctgatccaggccatgcaccccaccctggccggcaagatcaccggcatgctgctggagatcgacaacagcgagctgctgcacatgctggagagccccgagagcctgagaagcaaggtggacgaggccgtggccgtgctgcaggcccaccaggccaaggaggccgcccagaaggccgtgaacagcgccaccggcgtgcccaccgtgtag

SEQ ID NO: 270659 - DNA, 186 bp, Artificial Sequence
  derived and/or modified sequence
atgaaccccagcgcccccagctaccccatggccagcctgtacgtgggcgacctgcaccccgacgtgaccgaggccatgctgtacgagaagttcagccccgccggccccatcctgagcatcagagtgtgcagagacatgatcaccagaagaagcctgggctacgcctacgtgaacttccagcagtag

SEQ ID NO: 270660 - DNA, 390 bp, Artificial Sequence
  derived and/or modified sequence
atgaaccccagcgcccccagctaccccatggccagcctgtacgtgggcgacctgcaccccgacgtgaccgaggccatgctgtacgagaagttcagccccgccggccccatcctgagcatcagagtgtgcagagacatgatcaccagaagaagcctgggctacgcctacgtgaacttccagcagcccgccgacgccgagagagccctggacaccatgaacttcgacgtgatcaagggcaagcccgtgagaatcatgtggagccagagagaccccagcctgagaaagagcggcgtgggcaacatcttcatcaagaacctggacaagagcatcgacaacaaggccctgtacgacaccttcagcgccttcggcaacatcctgagctgcaagtag

SEQ ID NO: 270661 - DNA, 552 bp, Artificial Sequence
  derived and/or modified sequence
atcagacccgccgcccccagaccccccttcagcaccatgagacccgccagcagccaggtgcccagagtgatgagcacccagagagtggccaacaccagcacccagaccatgggccccagacccgccgccgccgccgccgccgccacccccgccgtgagaaccgtgccccagtacaagtacgccgccggcgtgagaaacccccagcagcacctgaacgcccagccccaggtgaccatgcagcagcccgccgtgcacgtgcagggccaggagcccctgaccgccagcatgctggccagcgcccccccccaggagcagaagcagatgctgggcgagagactgttccccctgatccaggccatgcaccccaccctggccggcaagatcaccggcatgctgctggagatcgacaacagcgagctgctgcacatgctggagagccccgagagcctgagaagcaaggtggacgaggccgtggccgtgctgcaggcccaccaggccaaggaggccgcccagaaggccgtgaacagcgccaccggcgtgcccaccgtgtag

SEQ ID NO: 270662 - DNA, 228 bp, Artificial Sequence
  derived and/or modified sequence
atgaaccccagcgcccccagctaccccatggccagcctgtacgtgggcgacctgcaccccgacgtgaccgaggccatgctgtacgagaagttcagccccgccggccccatcctgagcatcagagtgtgcagagacatgatcaccagaagaagcctgggctacgcctacgtgaacttccagcagcccgccgacgccgagagagccctggacaccatgaacttcgactag

SEQ ID NO: 270663 - DNA, 1911 bp, Artificial Sequence
  derived and/or modified sequence
atgaaccctagtgctccgtcctatccgatggctagtctgtacgttggggacctccaccctgacgtgacagaggccatgctctacgaaaaattttctcccgctggccctatcttgagtattcgagtctgtagggacatgataacccgccggagcctaggatacgcttatgtgaattttcagcaacccgcagatgcggaaagggctctggatactatgaactttgacgtgatcaaggggaaacccgtcagaatcatgtggagtcagcgtgatccgagcctgcgtaagagtggggtcggcaatatcttcattaagaacttggataagagcattgacaacaaggccctgtacgacacattttcagcgtttggtaacattttgtcttgcaaagtcgtgtgcgacgaaaatgggtcgaaggggtacggatttgtgcatttcgagacccaagaggcagctgagagggcaatcgagaagatgaacggcatgcttcttaacgaccggaaagtattcgtgggacgattcaagtcccgcaaagagagggaggccgaactgggcgctagggccaaagagtttacgaatgtgtatattaagaatttcggcgaagatatggatgatgagaggttgaaagacttatttggtaagtttggccccgccctgtctgtgaaggtaatgactgacgaatccggcaaatccaaaggttttggatttgtgagcttcgagcggcatgaggacgctcaaaaagctgtggatgagatgaatgggaaagagctcaatggaaagcagatctacgtggggcgggcccagaagaaagtcgagcggcaaacggagctaaaaaggaagtttgagcagatgaagcaagataggattaccaggtaccagggtgtcaacctgtatgtgaaaaacctggacgatggcatcgacgacgaaagactccggaaagaattcagcccattcgggactataacttccgcaaaggtgatgatggaaggtggccggtccaaaggcttcggattcgtgtgtttctcttcgcctgaagaagccaccaaggcagttaccgagatgaacggtcgtatcgtcgctacaaaacccttgtacgtcgcactcgcccagaggaaggaggagaggcaggcacacctcacaaatcagtatatgcagagaatggctagtgtgagggccgttccaaacccagtgatcaacccttatcagccagcccccccgtccgggtacttcatggcggccatcccccagacccaaaaccgtgccgcctactaccccccgtctcagatcgcacaactgcggccttcaccacggtggaccgcacaaggtgcacgcccacacccatttcagaacatgcccggtgccattagaccagcagcccctcgcccacctttctccaccatgagaccagcgagctctcaggtgcccagagtcatgtccactcagagagtggcgaacacctccacacaaaccatggggccacgtcccgctgcggcggctgccgcagcgacccctgcagtcagaaccgttcctcagtacaagtacgccgccggtgttcggaaccctcagcagcatctgaacgcacagcctcaggtgactatgcagcagccagccgtgcacgttcagggacaggaacccctcacggcttccatgctggctagcgctccacctcaggagcagaaacaaatgctgggggagcgtctattccctctgattcaggctatgcatcccactcttgccggtaagataacgggtatgctcctggaaatagataattcagagcttttgcacatgcttgagagtcctgagtctctgcgttccaaagtagatgaagccgtggcagtgctacaggcgcatcaggcaaaggaagcagcacagaaagctgtgaatagcgctactggggtccctacagtatag

SEQ ID NO: 270664 - DNA, 1644 bp, Artificial Sequence
  derived and/or modified sequence
atgaatccaagcgctcctagttatccaatggcctcattatatgtgggcgacctccaccccgatgtgacggaggcgatgctctatgagaagtttagtccggcaggccctatcttatccatccgagtatgcagggacatgatcaccagaagatcactgggctacgcctacgtaaatttccagcaacccgctgacgcagagagggctttggatacgatgaacttcgacgtgattaaggggaagcccgttagaatcatgtggagccaacgtgatccatcactgagaaaatcaggggtgggcaatattttcattaagaacctggacaagagtatcgacaataaagctttgtatgacaccttctccgctttcgggaacatccttagttgtaaggtagtttgtgacgagaatgggtcaaaaggctacggctttgtccacttcgagacccaggaagctgccgagagggccatagaaaaaatgaatgggatgctgctgaacgataggaaggtttttgttggaagattcaagtctcgcaaagaacgtgaagctgaactcggcgccagggcaaaggaattcaccaacgtttatatcaaaaacttcggcgaagacatggatgacgagagactcaaagacctatttggaaaatttgggcccgcactttctgtgaaggtcatgacggacgaatccggtaaatcaaaaggattcggctttgtgagcttcgaacgacatgaagacgcccagaaggctgtagatgagatgaacggaaaggagctcaatggcaaacagatttatgtgggcagggcccagaagaaggtcgaacgacagactgaattgaagcgtaagttcgaacagatgaaacaggataggatcacacggtaccagggagttaacctgtatgtgaagaatctcgatgatggaatagacgatgagaggctgcgcaaggagttctcaccattcggaacaatcacctcagccaaggtgatgatggaaggcgggcggtcgaaaggttttgggtttgtgtgcttcagcagtccagaggaggcaactaaggccgtaactgagatgaatggcaggattgtggcaacaaaaccattgtacgttgcactggcgcagcgtaaagaggaaagacaagcccatctgacaaaccaatacatgcagcgcatggcttccgtgagggctgttcccaacccagtcattaatccctatcagcctgccccaccaagcggctactttatggccgccattccgcaaactcaaaatagagcagcctattatcccccctcacaaatcgctcagctgcgcccatcgccaagatggactgcccagggggctagaccccaccctgcagtacacgtccagggccaggaaccactgacggcaagcatgctggcgtcagctcctcctcaggagcaaaaacagatgttgggtgaacgcctcttccctctgatccaggccatgcacccgacactcgctggcaagatcacgggaatgcttttagagattgacaacagcgaattattgcacatgcttgagagccccgagagcctcagatcaaaagtggatgaagcagtcgccgttctacaagcacaccaggctaaagaggctgcccagaaagcagtgaacagcgccaccggcgtgcccacggtctag

SEQ ID NO: 270665 - DNA, 129 bp, Artificial Sequence
  derived and/or modified sequence
tagatgttagagtccccagagagcttgagatccaaggtagacgaagctgttgctgttctgcaggcccaccaagccaaggaagcagcacagaaagctgtcaatagcgcaaccggtgtgcctacagtgtag

SEQ ID NO: 270666 - DNA, 117 bp, Artificial Sequence
  derived and/or modified sequence
atgaatccttccgccccatcttaccccatggccagcctctatgtcggcgatctgcatcctgatgtgacagaggctatgctgtacgaaaaattctcccccgctggcccgatcttatag

SEQ ID NO: 270667 - DNA, 357 bp, Artificial Sequence
  derived and/or modified sequence
atgaatccatctgcaccatcgtatcccatggcaagcctctatgtgggcgacctgcacccagacgtcactgaagccatgctttatgagaagttctcaccggctggccctattctttccattcgcgtgtgtagggatatgattacaaggcggagcttggggtatgcatatgtgaactttcaacaacccgcagacgcagagcgggccctggacactatgaactttgacgtcatcaagggcaaaccggtccgcataatgtggagccagagagaccctagtctccgcaaatctggggtcggtaatatatttatcaaaaatctcgacaagtcgatagataacaaagcactttatgatacatag

SEQ ID NO: 270668 - DNA, 132 bp, Artificial Sequence
  derived and/or modified sequence
atgaatccgtccgctccatcgtatcccatggcctccctgtacgtgggggatctgcacccggacgttaccgaagccatgttgtatgagaagttttcgccagctggcccgatattatctattcgtgtctgctag

SEQ ID NO: 270669 - DNA, 510 bp, Artificial Sequence
  derived and/or modified sequence
taggcgtcctctcaggtgccccgggtgatgtccactcagcgtgtagccaacacatctacacagacaatggggcctagacccgctgctgctgccgccgccgccactcccgcagtcaggactgtgccacagtacaaatacgccgcaggcgtacgcaacccgcagcagcatttgaacgcacaaccgcaggtgaccatgcagcagccggctgtgcacgtgcagggccaggaaccactgaccgccagcatgttagcatccgcccctccacaggagcaaaaacagatgctcggtgaacgcctcttcccgctcatccaggcgatgcatccaacactggccggaaaaatcactggaatgctcctggagatagataattcggagctgctgcatatgctggagtccccggaaagcctgagaagcaaggtagatgaagcagtcgctgtattacaagcacatcaggcaaaagaagccgcccagaaagcagtcaatagcgcaactggggttccgactgtctag

SEQ ID NO: 270670 - DNA, 186 bp, Artificial Sequence
  derived and/or modified sequence
atgaacccgtccgcaccaagttaccccatggcttccctgtatgtaggcgatctgcatcccgatgtgaccgaggccatgctgtatgagaagttttccccagcgggacccatcctctctatcagggtgtgtcgagacatgatcacccgcaggagtctaggttacgcatacgtcaattttcaacagtag

SEQ ID NO: 270671 - DNA, 390 bp, Artificial Sequence
  derived and/or modified sequence
atgaacccaagcgcaccttcatatcctatggcttctctgtacgtgggtgaccttcacccagacgtgaccgaggccatgttgtacgagaaatttagtccggcgggtcccatcttgagtatacgtgtgtgccgcgatatgattacacgcagaagcctgggctatgcatacgtaaattttcagcaaccagcagacgccgagcgcgctctggacacaatgaacttcgatgtgattaaaggaaagccggttagaattatgtggtcccagcgggaccctagcttacgcaagtccggagtgggcaatatatttatcaaaaatctggataagtctattgacaataaagctctctacgatacgttttccgcattcggaaatattctcagctgtaaatag

SEQ ID NO: 270672 - DNA, 552 bp, Artificial Sequence
  derived and/or modified sequence
atcagacccgctgcacctcgcccacccttctctaccatgagaccagcatccagccaggtgccccgagtaatgagcacacaaagagttgcgaatactagcactcaaaccatgggacctaggcccgcggctgctgctgccgctgccacaccggccgttcggaccgttccacaatacaaatacgctgccggagttagaaacccccagcagcatctgaatgcgcaacctcaggtgaccatgcaacaacctgcagttcacgtccagggccaagaaccattgaccgcatctatgcttgccagcgctccaccacaggaacaaaagcagatgttgggcgagaggctgttccccctgattcaggctatgcaccccactctggcaggcaagataacaggaatgctgctcgagatcgacaactcagagcttctccatatgttagaaagccccgaatctcttcggagcaaagtcgacgaagcggtcgccgtgcttcaggcccaccaggccaaagaggccgctcagaaagccgtcaacagcgcaactggcgtgcctaccgtgtag

SEQ ID NO: 270673 - DNA, 228 bp, Artificial Sequence
  derived and/or modified sequence
atgaacccctctgcacctagttatcccatggcttccctgtatgtgggcgacctgcacccagatgtgacagaggctatgctatacgagaagtttagcccggccggcccaatcctgtcaatcagagtatgcagggacatgatcactaggcgtagcctcggatacgcttacgtaaatttccaacagcccgccgatgctgagagggccctcgataccatgaactttgattag

SEQ ID NO: 270674 - DNA, 1911 bp, Artificial Sequence
  derived and/or modified sequence
atgaaccccagcgcccccagctaccccatggccagcctgtatgtgggggacctgcacccagatgtgacagaggccatgctgtatgagaagttctccccagctggccccatcctgagcatccgggtgtgccgggacatgatcaccaggaggagcctgggctacgcctacgtgaacttccagcagcctgcagatgctgagcgggccctggacaccatgaactttgatgtgatcaagggcaagcctgtgcgcatcatgtggagccagagggaccccagcctgaggaagagcggcgtgggcaacatcttcatcaagaacctggacaagagcattgacaacaaggccctgtatgacaccttcagcgccttcggcaacatcctgagctgcaaggtggtgtgtgatgaaaatggcagcaagggctacggctttgtgcactttgagacccaggaggccgctgagcgggccatcgagaagatgaatggcatgctgctgaatgacaggaaggtgtttgtgggccgcttcaagagcaggaaggagcgggaggccgagctgggcgcccgggccaaggagttcaccaacgtgtacatcaagaactttggagaggacatggatgatgagcggctgaaggacctgtttgggaagtttggacctgccctgtctgtgaaggtgatgacagatgaaagtggcaagagcaaaggatttggatttgtgtcctttgaaagacatgaagatgcccagaaggctgtggatgagatgaatggcaaggagctgaatggcaagcagatctacgtgggccgggcccagaagaaggtggagcggcagacagagctgaagaggaagtttgagcagatgaagcaggaccgcatcacccgctaccagggcgtgaacctgtatgtgaagaacctggatgatggcattgatgatgagcggctgaggaaggagttcagccccttcggcaccatcaccagcgccaaggtgatgatggagggcggccgcagcaaaggatttggatttgtgtgcttcagcagccctgaggaggccaccaaggctgtgacagagatgaatggaagaattgtggccaccaagcccctgtatgtggccctggcccagaggaaggaggagcggcaggcccacctgaccaaccagtacatgcagaggatggcctctgtgcgggctgtgcccaaccctgtgatcaacccctaccagcctgccccacccagcggctacttcatggccgccatcccccagacccagaacagagctgcctactacccacccagccagatcgcccagctgcggcccagcccccgctggacagcccagggcgcccggccccaccccttccagaacatgcctggggccatccggcctgctgcccccaggcctcccttcagcaccatgaggcctgccagcagccaggtgccccgggtgatgagcacccagagggtggccaacaccagcacccagaccatgggccccaggcctgctgctgctgctgctgctgccaccccagctgtgaggacagtgccccagtacaagtatgctgctggggtgaggaacccccagcagcacctgaatgcccagccccaggtgaccatgcagcagcctgctgtgcacgtgcagggccaggagcccctgacagcctccatgctggccagcgccccaccccaggagcagaagcagatgctgggggagcggctcttccccctcatccaggccatgcaccccaccctggccggcaagatcaccggcatgctgctggagattgacaacagcgagctgctgcacatgctggagagccctgagagcctgcggagcaaggtggatgaggccgtggccgtgctgcaggcccaccaggccaaggaggccgcccagaaggctgtgaacagcgccactggagtgcccaccgtgtag

SEQ ID NO: 270675 - DNA, 1644 bp, Artificial Sequence
  derived and/or modified sequence
atgaaccccagcgcccccagctaccccatggccagcctgtatgtgggggacctgcacccagatgtgacagaggccatgctgtatgagaagttctccccagctggccccatcctgagcatccgggtgtgccgggacatgatcaccaggaggagcctgggctacgcctacgtgaacttccagcagcctgcagatgctgagcgggccctggacaccatgaactttgatgtgatcaagggcaagcctgtgcgcatcatgtggagccagagggaccccagcctgaggaagagcggcgtgggcaacatcttcatcaagaacctggacaagagcattgacaacaaggccctgtatgacaccttcagcgccttcggcaacatcctgagctgcaaggtggtgtgtgatgaaaatggcagcaagggctacggctttgtgcactttgagacccaggaggccgctgagcgggccatcgagaagatgaatggcatgctgctgaatgacaggaaggtgtttgtgggccgcttcaagagcaggaaggagcgggaggccgagctgggcgcccgggccaaggagttcaccaacgtgtacatcaagaactttggagaggacatggatgatgagcggctgaaggacctgtttgggaagtttggacctgccctgtctgtgaaggtgatgacagatgaaagtggcaagagcaaaggatttggatttgtgtcctttgaaagacatgaagatgcccagaaggctgtggatgagatgaatggcaaggagctgaatggcaagcagatctacgtgggccgggcccagaagaaggtggagcggcagacagagctgaagaggaagtttgagcagatgaagcaggaccgcatcacccgctaccagggcgtgaacctgtatgtgaagaacctggatgatggcattgatgatgagcggctgaggaaggagttcagccccttcggcaccatcaccagcgccaaggtgatgatggagggcggccgcagcaaaggatttggatttgtgtgcttcagcagccctgaggaggccaccaaggctgtgacagagatgaatggaagaattgtggccaccaagcccctgtatgtggccctggcccagaggaaggaggagcggcaggcccacctgaccaaccagtacatgcagaggatggcctctgtgcgggctgtgcccaaccctgtgatcaacccctaccagcctgccccacccagcggctacttcatggccgccatcccccagacccagaacagagctgcctactacccacccagccagatcgcccagctgcggcccagcccccgctggacagcccagggcgcccggccccaccctgctgtgcacgtgcagggccaggagcccctgacagcctccatgctggccagcgccccaccccaggagcagaagcagatgctgggggagcggctcttccccctcatccaggccatgcaccccaccctggccggcaagatcaccggcatgctgctggagattgacaacagcgagctgctgcacatgctggagagccctgagagcctgcggagcaaggtggatgaagctgtggccgtgctgcaggcccaccaggccaaggaggccgcccagaaggctgtgaacagcgccaccggggtgcccaccgtgtag

SEQ ID NO: 270676 - DNA, 129 bp, Artificial Sequence
  derived and/or modified sequence
tgaatgctggagagccctgagagcctgcggagcaaggtggatgaggccgtggccgtgctgcaggcccaccaggccaaggaggccgcccagaaggctgtgaacagcgccactggagtgcccaccgtgtag

SEQ ID NO: 270677 - DNA, 117 bp, Artificial Sequence
  derived and/or modified sequence
atgaaccccagcgcccccagctaccccatggccagcctgtatgtgggggacctgcacccagatgtgacagaggccatgctgtatgagaagttctccccagctggccccatcctgtag

SEQ ID NO: 270678 - DNA, 357 bp, Artificial Sequence
  derived and/or modified sequence
atgaaccccagcgcccccagctaccccatggccagcctgtatgtgggggacctgcacccagatgtgacagaggccatgctgtatgagaagttctccccagctggccccatcctgagcatccgggtgtgccgggacatgatcaccaggaggagcctgggctacgcctacgtgaacttccagcagcctgcagatgctgagcgggccctggacaccatgaactttgatgtgatcaagggcaagcctgtgcgcatcatgtggagccagagggaccccagcctgaggaagagcggcgtgggcaacatcttcatcaagaacctggacaagagcattgacaacaaggccctgtatgacacctag

SEQ ID NO: 270679 - DNA, 132 bp, Artificial Sequence
  derived and/or modified sequence
atgaaccccagcgcccccagctaccccatggccagcctgtatgtgggggacctgcacccagatgtgacagaggccatgctgtatgagaagttctccccagctggccccatcctgagcatccgggtgtgctag

SEQ ID NO: 270680 - DNA, 510 bp, Artificial Sequence
  derived and/or modified sequence
tgagccagcagccaggtgccccgggtgatgagcacccagagggtggccaacaccagcacccagaccatgggccccaggcctgctgctgctgctgctgctgccaccccagctgtgaggacagtgccccagtacaagtatgctgctggggtgaggaacccccagcagcacctgaatgcccagccccaggtgaccatgcagcagcctgctgtgcacgtgcagggccaggagcccctgacagcctccatgctggccagcgccccaccccaggagcagaagcagatgctgggggagcggctcttccccctcatccaggccatgcaccccaccctggccggcaagatcaccggcatgctgctggagattgacaacagcgagctgctgcacatgctggagagccctgagagcctgcggagcaaggtggatgaagctgtggccgtgctgcaggcccaccaggccaaggaggccgcccagaaggctgtgaacagcgccaccggggtgcccaccgtgtag

SEQ ID NO: 270681 - DNA, 186 bp, Artificial Sequence
  derived and/or modified sequence
atgaaccccagcgcccccagctaccccatggccagcctgtatgtgggggacctgcacccagatgtgacagaggccatgctgtatgagaagttctccccagctggccccatcctgagcatccgggtgtgccgggacatgatcaccaggaggagcctgggctacgcctacgtgaacttccagcagtag

SEQ ID NO: 270682 - DNA, 390 bp, Artificial Sequence
  derived and/or modified sequence
atgaaccccagcgcccccagctaccccatggccagcctgtatgtgggggacctgcacccagatgtgacagaggccatgctgtatgagaagttctccccagctggccccatcctgagcatccgggtgtgccgggacatgatcaccaggaggagcctgggctacgcctacgtgaacttccagcagcctgcagatgctgagcgggccctggacaccatgaactttgatgtgatcaagggcaagcctgtgcgcatcatgtggagccagagggaccccagcctgaggaagagcggcgtgggcaacatcttcatcaagaacctggacaagagcattgacaacaaggccctgtatgacaccttcagcgccttcggcaacatcctgagctgcaagtag

SEQ ID NO: 270683 - DNA, 552 bp, Artificial Sequence
  derived and/or modified sequence
atccggcctgctgccccccggccccccttcagcaccatgaggcctgccagcagccaggtgccccgggtgatgagcacccagagggtggccaacaccagcacccagaccatgggccccaggcctgctgctgctgctgctgctgccaccccagctgtgaggacagtgccccagtacaagtatgctgctggggtgaggaacccccagcagcacctgaatgcccagccccaggtgaccatgcagcagcctgctgtgcacgtgcagggccaggagcccctgacagcctccatgctggccagcgccccaccccaggagcagaagcagatgctgggggagcggctcttccccctcatccaggccatgcaccccaccctggccggcaagatcaccggcatgctgctggagattgacaacagcgagctgctgcacatgctggagagccctgagagcctgcggagcaaggtggatgaagctgtggccgtgctgcaggcccaccaggccaaggaggccgcccagaaggctgtgaacagcgccaccggggtgcccaccgtgtag

SEQ ID NO: 270684 - DNA, 228 bp, Artificial Sequence
  derived and/or modified sequence
atgaaccccagcgcccccagctaccccatggccagcctgtatgtgggggacctgcacccagatgtgacagaggccatgctgtatgagaagttctccccagctggccccatcctgagcatccgggtgtgccgggacatgatcaccaggaggagcctgggctacgcctacgtgaacttccagcagcctgcagatgctgagcgggccctggacaccatgaactttgattag

SEQ ID NO: 270685 - DNA, 1911 bp, Artificial Sequence
  derived and/or modified sequence
atgaaccccagcgcccccagctaccccatggccagcctgtacgtgggcgacttacaccctgacgtgaccgaggccatgctctatgaaaaatttagtccagcaggtcccatccttagcataagagtgtgtcgtgacatgatcacaagacgctccctgggttatgcgtacgtaaactttcaacaacctgccgatgcagaaagagcactcgatacaatgaactttgacgttatcaagggcaaaccagtgcgaataatgtggtctcaacgcgatccttccttgcggaagtccggagtaggcaatatttttatcaaaaatttagacaagagtatcgacaataaagcactgtacgatacattctcggcctttgggaacatattaagctgcaaagttgtgtgcgacgaaaatgggtctaaaggctacggctttgtgcattttgaaacccaagaagctgccgagcgagccatcgagaaaatgaacggcatgctgctcaatgacagaaaggtcttcgtcggccgattcaagtcgcggaaggagcgagaagctgagttgggcgcccgcgcaaaagagttcaccaatgtctacatcaagaatttcggcgaggatatggatgatgagcgtctaaaagatctgtttgggaaattcggccccgctcttagtgttaaagtgatgactgatgaatccgggaagagtaaggggttcgggtttgtctcatttgaaaggcacgaggatgcccaaaaagccgtcgacgagatgaacggcaaagaactcaacggcaaacaaatctacgtcggcagggctcagaagaaggtcgagcgccaaacagaactgaaaaggaaatttgagcagatgaagcaggatagaataacaaggtaccagggagttaacttatatgtcaagaatttagatgatgggatagatgatgaacgcctgcgtaaagagtttagcccgtttggtacaattaccagcgcaaaggtcatgatggagggcggccgcagcaaaggtttcggtttcgtgtgtttcagcagtcctgaagaagccacaaaggccgtgaccgaaatgaacggacgcattgtggcaactaagcctctgtatgtggcactcgctcagcgcaaagaagagcggcaagcccacctcacgaatcagtacatgcaacgtatggcttcagtccgcgctgttcccaaccccgtcatcaacccctaccagcctgcgcccccctcggggtacttcatggccgctattcctcagactcaaaaccgagcagcatactatcctccatcacagattgctcagctgaggcctagcccccggtggactgcccagggggcgcggccacatccatttcagaacatgcccggggcaatccgacctgccgctcctcggccccctttctccaccatgagacctgcctcatcccaggtgccgagagttatgtcaacccagcgagttgctaacacatcgactcaaactatgggtcctcgacccgccgcagccgccgctgccgcgacccctgccgtgcgcaccgtaccccagtataagtacgccgctggggtccggaacccccagcagcacttgaacgctcagccacaggtaacgatgcaacaaccggcagtccatgtccaggggcaggaaccactgaccgctagtatgctcgccagcgcgcctcctcaggagcagaagcagatgctcggtgaacgtctgttcccccttatccaggcaatgcaccctacactggctggcaagatcaccggcatgctgctcgagatcgataactctgagctgctccatatgctggagtcccctgaatcattgagatctaaagtggatgaggccgtggcagtcctgcaggcccaccaggctaaggaggctgcacagaaggccgtgaatagcgctacaggggttccaacagtatag

SEQ ID NO: 270686 - DNA, 1644 bp, Artificial Sequence
  derived and/or modified sequence
atgaaccccagcgcccccagctaccccatggccagcctgtacgtgggggatctgcatcccgatgtgactgaggcaatgctctatgaaaagttcagtcccgctggccccatactgtctattcgcgtctgcagagatatgattacacgaaggtcactgggatacgcatacgtgaactttcagcagccggccgacgcggagagggccctggacaccatgaatttcgatgtcatcaagggcaaacctgtcagaattatgtggtcacaacgggacccgagcctgaggaaaagtggggtggggaacatttttataaaaaatctagacaaaagcattgacaataaggcactctatgacaccttctcggctttcgggaatatcctgtcctgtaaggtagtatgcgatgagaatggttctaaaggatatggatttgtgcatttcgagacccaggaggctgccgagcgggcgattgaaaaaatgaatggtatgcttctcaacgatcgtaaagtgtttgtgggtagattcaagagcagaaaggagagagaagcagagctcggagctagggccaaggagtttacgaatgtctatatcaagaactttggagaagatatggacgacgaaaggctgaaagacctcttcggcaagttcgggcccgccctatccgtgaaggtgatgacagacgaatccggcaagtccaagggctttggatttgtaagctttgagcgacatgaggacgctcaaaaggccgtcgatgaaatgaatggaaaggaactcaacgggaagcagatctacgtagggagagcccagaagaaagtcgagcgacagactgagctcaagcgtaagtttgaacaaatgaagcaggatcgtatcacacggtaccagggggtcaacctgtatgtgaagaatctcgacgacgggattgatgacgagagattgcgcaaggagttttcccccttcggcaccataacaagcgccaaggtgatgatggagggaggaaggtccaaagggtttggatttgtctgcttttcaagcccagaggaggcaactaaggccgtcacagagatgaatggcaggattgtggcaaccaagccactgtacgtggcactggcccagcgcaaggaagaacgacaagcacaccttactaaccaatacatgcaacgcatggcttcagtgcgagcggttccaaatccagtaataaacccctaccaaccagctcccccctccggatactttatggccgccataccacagacccagaatagggcagcttattatccacctagccagatagctcagctgcgcccatcacctcgttggacagcacagggggcgcgaccccaccccgccgtgcatgtgcagggacaagagccccttacagcctctatgctcgcctcagccccacctcaggaacagaagcagatgttaggcgagcgcctgttccccttgattcaggctatgcacccaacactggctgggaagattacaggtatgctgcttgagatcgacaacagcgagctcctccacatgctggaatcaccagagagcctgcgaagtaaggtggacgaggccgtagcagttttgcaggcccatcaggccaaggaggctgcacagaaggccgtcaacagcgccaccggcgtacctactgtgtag

SEQ ID NO: 270687 - DNA, 129 bp, Artificial Sequence
  derived and/or modified sequence
tgaatgctggagagccccgagagcctgcggagcaaggtggacgaggccgtggccgtgctccaagcccaccaggccaaggaagcagcccagaaggctgtaaactccgctacaggggtgccaactgtgtag

SEQ ID NO: 270688 - DNA, 117 bp, Artificial Sequence
  derived and/or modified sequence
atgaaccccagcgcccccagctaccccatggccagcctgtacgtgggggacctgcacccagatgtcacagaggccatgttgtatgagaagttctcccctgccggtcctattctgtag

SEQ ID NO: 270689 - DNA, 357 bp, Artificial Sequence
  derived and/or modified sequence
atgaaccccagcgcccccagctaccccatggccagcctgtacgtgggtgacttacacccagacgtgaccgaagctatgctctacgagaagttttcccctgccggccccatcctgagcattcgggtgtgccgggacatgatcacacggcggtctttaggatacgcttacgtcaacttccagcagcccgcagacgccgagcgtgcccttgatactatgaacttcgatgtgattaaagggaaacccgtgagaattatgtggagtcagagggacccaagcctccgaaagagtggggtcggtaatattttcattaagaatctggataagtctatcgacaacaaagcactgtatgatacgtag

SEQ ID NO: 270690 - DNA, 132 bp, Artificial Sequence
  derived and/or modified sequence
atgaaccccagcgcccccagctaccccatggccagcctgtacgtgggtgacttgcaccctgatgtaaccgaggcgatgctgtacgaaaagttcagtccagccggtccaatcctgagcatccgagtttgttag

SEQ ID NO: 270691 - DNA, 510 bp, Artificial Sequence
  derived and/or modified sequence
tgagccagcagccaggtgccccgggtgatgagcacccagcgggtggctaacacttctacccaaacgatggggccacgccctgctgcagctgctgcagccgccactcctgccgtcagaaccgtgccacagtataagtatgcagcgggagtgcgaaaccctcagcagcatttgaatgcacagcctcaagtaactatgcagcagccagcagtgcatgtgcagggccaggagccacttaccgccagcatgctcgcttcagcgccgccccaggagcagaagcagatgctcggtgaaaggctgtttcctttaatccaggctatgcatcctacccttgctggcaagattacaggcatgctccttgagattgacaactcggagttgctgcacatgcttgagtccccagagtccctcaggtctaaagtggacgaagcagtggcggtgttacaggcgcaccaggcaaaagaagcggctcagaaggccgtgaactccgccactggagtgccaaccgtatag

SEQ ID NO: 270692 - DNA, 186 bp, Artificial Sequence
  derived and/or modified sequence
atgaaccccagcgcccccagctaccccatggccagcctgtacgtgggtgatttgcacccggacgtgaccgaagccatgctgtacgaaaagttcagccctgctgggccaattctctcaatcagagtgtgtagagatatgataactcgccgctctctgggctacgcttatgttaactttcagcagtag

SEQ ID NO: 270693 - DNA, 390 bp, Artificial Sequence
  derived and/or modified sequence
atgaaccccagcgcccccagctaccccatggccagcctgtacgtgggtgatctgcacccagatgtcacggaagctatgctctatgaaaaattctctcctgccggccccatcctcagcatccgcgtgtgcagggatatgatcacacgaagaagtctgggctatgcatatgtgaattttcagcaacctgcggacgcggagcgggctctggatactatgaatttcgacgtgattaaaggcaaacccgtgcgtatcatgtggtcccagcgagacccctccctgaggaagtccggcgtgggcaacattttcatcaagaatctggacaagtcaatcgataacaaggctctatacgatacattctctgccttcggtaacattctctcctgcaaatag

SEQ ID NO: 270694 - DNA, 552 bp, Artificial Sequence
  derived and/or modified sequence
atccggcccgccgccccccggccccccttcagcaccatgcggcccgcgtcttctcaggtccctcgtgtgatgtccacacaacgtgtggcaaatacttccacccagacaatgggaccacggcccgcagcagccgcagccgcggcaacccctgcagtcagaaccgtcccacagtataaatatgctgccggggtcagaaacccccagcagcatctgaacgcccaaccacaggtgacaatgcagcagccggccgtgcacgttcagggccaagagccacttaccgccagcatgctagctagtgcaccccctcaggaacaaaagcagatgctcggcgagcgactattccctctgatccaggccatgcatcccacactggctggcaagatcacaggcatgctgttagaaatcgacaactcagagctccttcatatgctcgagtcccctgagtccctcaggtccaaagtagatgaggctgtagctgttctgcaggcccaccaggccaaagaggctgctcagaaagccgtgaactctgctactggagtgccaaccgtgtag

SEQ ID NO: 270695 - DNA, 228 bp, Artificial Sequence
  derived and/or modified sequence
atgaaccccagcgcccccagctaccccatggccagcctgtacgtgggggacttacatcctgacgtgacagaggccatgctgtacgagaagttttcccccgccgggccgattctatccatccgcgtttgcagagacatgatcacccggagatctctgggctatgcatatgtaaatttccagcagcccgctgacgctgagagggccttggacactatgaacttcgactag

SEQ ID NO: 270696 - DNA, 1911 bp, Artificial Sequence
  derived and/or modified sequence
atgaatccttcagctcctagctaccctatggcgtcactgtatgtgggcgatctgcatcccgatgtgaccgaagccatgctttacgagaagttctccccagcaggaccaatattgtctattcgtgtttgtcgcgacatgatcactagaaggagcctcggatacgcatacgtgaacttccaacagccggctgacgctgagcgtgccctagacacaatgaacttcgacgtgattaaaggtaagccagtgaggattatgtggtcacagcgggatccgtctcttaggaaatccggagtgggaaacatctttattaagaaccttgataaatctattgataacaaagcactgtacgatacattctccgcatttggaaatatcctttcttgtaaggtagtgtgcgacgagaatgggtccaaaggttatggctttgttcatttcgagacgcaggaggctgcagagcgcgctatcgagaaaatgaatggtatgctcctgaacgatcgcaaggtctttgtaggtagattcaaaagccgcaaagaacgcgaagcagagctcggggctcgtgccaaagagtttacgaatgtgtacatcaagaactttggagaggatatggatgacgagagattaaaagatctgttcgggaagtttgggcctgccctgagcgtgaaggtgatgactgacgagagcggaaagtccaaaggtttcgggttcgtctcatttgagaggcatgaagatgcccagaaagccgtggacgagatgaatggcaaggagctgaatggcaaacagatctacgtgggtagggcacaaaaaaaagtggaaaggcagacagaactgaagaggaagtttgagcagatgaagcaggacagaattacccggtaccaaggtgtcaacctgtatgtcaagaacttagacgacggcatcgacgacgagcgactgcgcaaagaattcagccctttcggtaccattacctctgcaaaagttatgatggagggtgggaggtctaaaggatttggttttgtgtgcttctcttcccccgaagaggccaccaaggccgtaacggaaatgaacggcagaatcgtggcaacaaagcccttgtacgtcgctctcgctcaacggaaggaggagcggcaggcccatctgacaaaccagtacatgcagcgcatggcgagcgtgcgcgcagtcccaaatcccgtgatcaacccatatcagcctgctccaccgtccgggtactttatggctgccataccccagacacagaacagagcagcttattatccgccatctcagatcgcccagcttagaccctctcctcgatggaccgcacagggcgcaaggcctcacccgttccagaatatgccgggagcaattaggcctgcagccccacgtcctccgttctcaacaatgcgcccagcttcctcccaggtgcctcgtgtaatgtctacccagcgcgtggctaatacatccactcagaccatgggcccaaggcctgcagcagcagcagctgcggctactcccgctgtacggaccgtgccacagtataaatacgccgctggagtgaggaatccacaacagcatctgaatgcacagccccaggttacaatgcagcaacctgcagtgcacgtgcaaggccaagaacctctgaccgcctcaatgcttgctagtgcccctccccaggagcagaagcaaatgttgggagagaggttgtttcccctgatccaggctatgcatccaacgctcgccggaaagatcactgggatgctgttggagatagacaattctgaactcttacatatgctcgagtccccggaatccctccgctccaaggtggacgaggcagtggccgttcttcaggcacatcaggccaaggaagcagcccagaaagctgttaattccgcaaccggtgttcctacagtttag

SEQ ID NO: 270697 - DNA, 1644 bp, Artificial Sequence
  derived and/or modified sequence
atgaatcccagcgccccaagttacccgatggcaagcctttatgttggagatctgcatcctgacgtgaccgaggcaatgctgtacgaaaagtttagtccagccggaccaatcctgtccatcagagtctgtcgcgacatgattacccggaggtccctggggtatgcttacgtcaacttccaacaaccggcagatgccgagagagctctagacaccatgaactttgacgtcatcaagggcaaacccgtgaggataatgtggtctcagagggacccgtcgttgcgtaaatccggcgtcgggaatattttcatcaagaacctggacaagtctatcgataataaggccctgtacgacacattttcagcctttggcaacatcctgtcatgtaaggtcgtctgtgatgagaatggctctaaaggttacggttttgtccatttcgaaacacaggaagccgcagaaagagctattgagaaaatgaacggaatgcttctgaatgatcgcaaagtctttgttggacgctttaagagtaggaaggagagagaagccgagctgggggctagggccaaagagttcactaatgtctacatcaaaaactttggagaggacatggacgatgagcggctgaaagacctgttcggaaagttcggccctgccctatcagtcaaagtcatgacggacgagtcaggcaagagtaaagggtttggctttgtctcatttgagcgccacgaagatgctcagaaagcagtggatgagatgaatgggaaggaactgaacgggaaacaaatttatgttggacgcgcacagaagaaagttgagcggcagactgaactgaagagaaagtttgagcagatgaaacaggaccgcattactagataccaaggggtcaatctgtacgtcaaaaatctggatgatgggatcgacgacgagcggctccgcaaggaattttcccccttcggaacgattaccagcgccaaggtcatgatggagggaggacgcagcaaaggcttcgggttcgtgtgcttttcgtcccccgaagaggccactaaggcagttacggagatgaatggaaggatagtggccaccaagccactttacgtggcactggcccagaggaaggaagaaagacaggcacatctgaccaatcagtacatgcagcgaatggccagcgtcagggccgtgcccaacccagtcataaatccctatcagccagcccctccatctggttacttcatggcagccatcccacagacacaaaatagggcagcatattaccccccttctcaaatcgcacaactgcggccttccccaagatggaccgcccagggagcaaggcctcaccctgccgttcacgtccagggacaagaacccctgactgcttctatgttggcgtcagcccctcctcaggagcagaaacagatgctgggcgaacgccttttccccttgatccaggcgatgcacccgaccttggccggaaaaatcaccggaatgcttctggagatcgacaattccgagcttctgcacatgctcgaatcacccgaaagccttcgatccaaagtggatgaggcggtcgcagtgttacaagcccaccaagctaaggaagcagcccagaaggccgtgaatagcgcaacaggggtcccgacagtgtag

SEQ ID NO: 270698 - DNA, 129 bp, Artificial Sequence
  derived and/or modified sequence
tgaatgctggagtcccctgagagtctgcgctccaaagtcgacgaggccgtcgccgtacttcaagcccaccaggctaaggaggcagcccagaaagcagtgaactcagctactggtgtgccaaccgtgtag

SEQ ID NO: 270699 - DNA, 117 bp, Artificial Sequence
  derived and/or modified sequence
atgaacccgtccgcaccgagctaccctatggcctctctgtacgtcggtgaccttcaccctgacgtgactgaagctatgctctacgagaagttctcacccgcaggccctatcctgtag

SEQ ID NO: 270700 - DNA, 357 bp, Artificial Sequence
  derived and/or modified sequence
atgaatcctagcgctccaagctacccgatggcttccctttatgtgggagacctccaccctgatgtaaccgaggcaatgctgtatgagaagttctcacccgctggccctattctcagtatccgtgtttgtcgggacatgattacccgacgttccctgggatacgcctacgtcaattttcagcagcccgcagatgctgaacgggctctggataccatgaatttcgatgtgattaagggtaaacccgtgaggatcatgtggtctcagcgggacccaagcctgagaaaatcgggtgtgggcaacatcttcattaagaatttggacaagagcatagataataaagccctgtacgatacttag

SEQ ID NO: 270701 - DNA, 132 bp, Artificial Sequence
  derived and/or modified sequence
atgaatccctccgcaccctcataccccatggccagcctgtatgtgggcgacctccaccctgacgtgacagaagccatgctatacgagaagttctccccagctggaccgatcttaagcatcagggtgtgttag

SEQ ID NO: 270702 - DNA, 510 bp, Artificial Sequence
  derived and/or modified sequence
taggcatccagccaagtgcccagagtgatgtcaacccagcgtgtagcaaataccagcacgcagaccatgggccctaggccagctgcagctgcagccgctgctacccccgctgtgcgcaccgttccacagtataagtacgcagccggagtgcggaatcctcaacagcacctgaacgcacagccacaggtgacaatgcagcagcccgcagtgcatgtccaggggcaggagcccctgacggcttctatgcttgctagcgccccacctcaagaacaaaaacagatgctgggggaaagactgtttcctctgattcaggccatgcaccctacactggctggcaagattactggtatgctgttagagattgacaactcagagttgttacacatgttagagagtccggaaagccttaggtccaaggttgatgaggcggtagcagtgctgcaggcacaccaagccaaagaagctgcacagaaagccgtgaacagtgctaccggggtgcccactgtgtag

SEQ ID NO: 270703 - DNA, 186 bp, Artificial Sequence
  derived and/or modified sequence
atgaacccctctgcacctagctaccccatggcctccctctacgtaggggaccttcacccagatgtgacagaagccatgttgtacgaaaaatttagtcccgctggaccaattctcagcattagggtatgtagggacatgatcacaaggcgttccctggggtatgcatatgtgaattttcaacaatag

SEQ ID NO: 270704 - DNA, 390 bp, Artificial Sequence
  derived and/or modified sequence
atgaatccttcggctccctcttatccaatggcctcactctatgttggtgacctgcatcccgacgtcactgaggccatgctgtatgagaagttttcccctgccggacccatcttgtccatccgcgtttgccgtgatatgataacacgaaggagcctgggttacgcctacgtgaatttccagcagccagcagatgccgagcgagctctggacaccatgaattttgatgtgataaagggtaaacccgtgaggattatgtggagccagcgcgaccctagcctcaggaagagcggagtggggaacatcttcataaagaacctcgacaagtcaatcgataataaagcgttgtacgatacgttcagtgcctttggtaatattctgtcctgcaaatag

SEQ ID NO: 270705 - DNA, 552 bp, Artificial Sequence
  derived and/or modified sequence
atcagacccgctgccccacgtccacctttcagtacaatgcgaccggcttcgtctcaggtgcccagggttatgagtactcagcgtgtcgcgaatacaagcactcagactatgggcccacgccctgcagccgctgctgctgccgcaactcctgctgtgcgcaccgtccctcaatacaagtatgcagcaggagtgcgcaacccccagcagcacctgaatgcccagccccaggtgacaatgcaacagccagctgtgcatgttcaggggcaggagccactgacggctagtatgctcgcatctgcacccccacaagaacagaaacaaatgctgggagagcggctgttcccactgatccaggctatgcaccccacgttagcagggaaaatcactggaatgctactggagatcgacaactctgaactactccacatgctggagtctcctgagtctctgagaagcaaagtggacgaggcggtggctgtcttgcaagcccatcaagcgaaggaggctgctcagaaagctgttaacagcgccaccggagtgcctacagtttag

SEQ ID NO: 270706 - DNA, 228 bp, Artificial Sequence
  derived and/or modified sequence
atgaatcctagcgccccttcctaccctatggccagcctctatgtgggagacttgcaccccgacgtcaccgaggccatgctttacgaaaaattcagtcctgcaggacctatcttgagcatccgggtttgccgggacatgatcacgagacgaagccttggttatgcctacgtgaacttccagcagccagctgacgcagaacgggcactggatacaatgaatttcgactag

SEQ ID NO: 270707 - DNA, 3485 bp, Artificial Sequence
  derived and/or modified sequence
cgtagtgcggtccgggtaggagagagcagggggccacgctggctccatctacgcacgtttcggaaaccgggcccggaggggaccacgcccgctcacccgtgcccggcgtcccccggagctggggctagaggagccgggccggccgcagcgggaagaggccacaggcggccgcgcacgtggggggtggttagcgcggaggaacccggaagccctttgcaccgcccaccgccgcggtgacgggttaacgctcctcctggtggaggcaggggcgggcggggcggaaggcggggacgcctcagccaacacccccgaggaccgcccgcgagccgtcctccccacccccacggacgcgacgcagcgcgggctccgcttccccggccgcggcgcctgcgcaaaagccccgccccttcgcccgagccccacccccacaccgcagcctccaccgccgccacctctcccttcctctctgctctttcctcctgttttctcttccctcctccccctggcctccgcgtctcctcctactccggcgctgacgctcgcgtaggggccctggcgtcagacgcgcgggggcggggcgagtgcggcgcggggtataagtagagggtgcaggaggcggtgcttccccttctccccggcggttagtgctgagagtgcggagtgtgtgctccgggctcggaacacacatttattattaaaaaatccaaaaaaaatctaaaaaaatcttttaaaaaaccccaaaaaaatttacaaaaaatccgcgtctcccccgccggagacttttattttttttcttcctcttttataaaataacccggtgaagcagccgagaccgacccgcccgcccgcggccccgcagcagctccaagaaggaaccaagagaccgaggccttcccgctgcccggacccgacaccgccaccctcgctccccgccggcagccggcagccagcggcagtggatcgaccccgttctgcggccgttgagtagttttcaattccggttgatttttgtccctctgcgcttgctccccgctcccctccccccggctccggcccccagccccggcactcgctctcctcctctcacggaaaggtcgcggcctgtggccctgcgggcagccgtgccgagatgaaccccagtgcccccagctaccccatggcctcgctctacgtgggggacctccaccccgacgtgaccgaggcgatgctctacgagaagttcagcccggccgggcccatcctctccatccgggtctgcagggacatgatcacccgccgctccttgggctacgcgtatgtgaacttccagcagccggcggacgcggagcgtgctttggacaccatgaattttgatgttataaagggcaagccagtacgcatcatgtggtctcagcgtgatccatcacttcgcaaaagtggagtaggcaacatattcattaaaaatctggacaaatccattgataataaagcactgtatgatacattttctgcttttggtaacatcctttcatgtaaggtggtttgtgatgaaaatggttccaagggctatggatttgtacactttgagacgcaggaagcagctgaaagagctattgaaaaaatgaatggaatgctcctaaatgatcgcaaagtatttgttggacgatttaagtctcgtaaagaacgagaagctgaacttggagctagggcaaaagaattcaccaatgtttacatcaagaattttggagaagacatggatgatgagcgccttaaggatctctttggcaagtttgggcctgccttaagtgtgaaagtaatgactgatgaaagtggaaaatccaaaggatttggatttgtaagctttgaaaggcatgaagatgcacagaaagctgtggatgagatgaacggaaaggagctcaatggaaaacaaatttatgttggtcgagctcagaaaaaggtggaacggcagacggaacttaagcgcaaatttgaacagatgaaacaagataggatcaccagataccagggtgttaatctttatgtgaaaaatcttgatgatggtattgatgatgaacgtctccggaaagagttttctccatttggtacaatcactagtgcaaaggttatgatggagggtggtcgcagcaaagggtttggttttgtatgtttctcctccccagaagaagccactaaagcagttacagaaatgaacggtagaattgtggccacaaagccattgtatgtagctttagctcagcgcaaagaagagcgccaggctcacctcactaaccagtatatgcagagaatggcaagtgtacgagctgttcccaaccctgtaatcaacccctaccagccagcacctccttcaggttacttcatggcagctatcccacagactcagaaccgtgctgcatactatcctcctagccaaattgctcaactaagaccaagtcctcgctggactgctcagggtgccagacctcatccattccaaaatatgcccggtgctatccgcccagctgctcctagaccaccatttagtactatgagaccagcttcttcacaggttccacgagtcatgtcaacacagcgtgttgctaacacatcaacacagacaatgggtccacgtcctgcagctgcagccgctgcagctactcctgctgtccgcaccgttccacagtataaatatgctgcaggagttcgcaatcctcagcaacatcttaatgcacagccacaagttacaatgcaacagcctgctgttcatgtacaaggtcaggaacctttgactgcttccatgttggcatctgcccctcctcaagagcaaaagcaaatgttgggtgaacggctgtttcctcttattcaagccatgcaccctactcttgctggtaaaatcactggcatgttgttggagattgataattcagaacttcttcatatgctcgagtctccagagtcactccgttctaaggttgatgaagctgtagctgtactacaagcccaccaagctaaagaggctgcccagaaagcagttaacagtgccaccggtgttccaactgtttaaaattgatcagggaccatgaaaagaaacttgtgcttcaccgaagaaaaatatctaaacatcgaaaaacttaaatattatggaaaaaaaacattgcaaaatataaaataaataaaaaaaggaaaggaaactttgaaccttatgtaccgagcaaatgccaggtctagcaaacataatgctagtcctagattacttattgatttaaaaacaaaaaaacacaaaaaaatagtaaaatataaaaacaaattaatgttttatagaccctgggaaaaagaattttcagcaaagtacaaaaatttaaagcattcctttctttaattttgtaattctttactgtggaatagctcagaatgtcagttctgttttaagtaacagaattgataactgagcaaggaaacgtaatttggattataaaattcttgctttaataaaaattccttaaacagtg

SEQ ID NO: 270708 - DNA, 2593 bp, Artificial Sequence
  derived and/or modified sequence
cccttctccccggcggttagtgctgagagtgcggagtgtgtgctccgggctcggaacacacatttattattaaaaaatccaaaaaaaatctaaaaaaatcttttaaaaaaccccaaaaaaatttacaaaaaatccgcgtctcccccgccggagacttttattttttttcttcctcttttataaaataacccggtgaagcagccgagaccgacccgcccgcccgcggccccgcagcagctccaagaaggaaccaagagaccgaggccttcccgctgcccggacccgacaccgccaccctcgctccccgccggcagccggcagccagcggcagtggatcgaccccgttctgcggccgttgagtagttttcaattccggttgatttttgtccctctgcgcttgctccccgctcccctccccccggctccggcccccagccccggcactcgctctcctcctctcacggaaaggtcgcggcctgtggccctgcgggcagccgtgccgagatgaaccccagtgcccccagctaccccatggcctcgctctacgtgggggacctccaccccgacgtgaccgaggcgatgctctacgagaagttcagcccggccgggcccatcctctccatccgggtctgcagggacatgatcacccgccgctccttgggctacgcgtatgtgaacttccagcagccggcggacgcggagcgtgctttggacaccatgaattttgatgttataaagggcaagccagtacgcatcatgtggtctcagcgtgatccatcacttcgcaaaagtggagtaggcaacatattcattaaaaatctggacaaatccattgataataaagcactgtatgatacattttctgcttttggtaacatcctttcatgtaaggtggtttgtgatgaaaatggttccaagggctatggatttgtacactttgagacgcaggaagcagctgaaagagctattgaaaaaatgaatggaatgctcctaaatgatcgcaaagtatttgttggacgatttaagtctcgtaaagaacgagaagctgaacttggagctagggcaaaagaattcaccaatgtttacatcaagaattttggagaagacatggatgatgagcgccttaaggatctctttggcaagtttgggcctgccttaagtgtgaaagtaatgactgatgaaagtggaaaatccaaaggatttggatttgtaagctttgaaaggcatgaagatgcacagaaagctgtggatgagatgaacggaaaggagctcaatggaaaacaaatttatgttggtcgagctcagaaaaaggtggaacggcagacggaacttaagcgcaaatttgaacagatgaaacaagataggatcaccagataccagggtgttaatctttatgtgaaaaatcttgatgatggtattgatgatgaacgtctccggaaagagttttctccatttggtacaatcactagtgcaaaggttatgatggagggtggtcgcagcaaagggtttggttttgtatgtttctcctccccagaagaagccactaaagcagttacagaaatgaacggtagaattgtggccacaaagccattgtatgtagctttagctcagcgcaaagaagagcgccaggctcacctcactaaccagtatatgcagagaatggcaagtgtacgagctgttcccaaccctgtaatcaacccctaccagccagcacctccttcaggttacttcatggcagctatcccacagactcagaaccgtgctgcatactatcctcctagccaaattgctcaactaagaccaagtcctcgctggactgctcagggtgccagacctcatcctgctgttcatgtacaaggtcaggaacctttgactgcttccatgttggcatctgcccctcctcaagagcaaaagcaaatgttgggtgaacggctgtttcctcttattcaagccatgcaccctactcttgctggtaaaatcactggcatgttgttggagattgataattcagaacttcttcatatgctcgagtctccagagtcactccgttctaaggttgatgaagctgtagctgtactacaagcccaccaagctaaagaggctgcccagaaagcagttaacagtgccaccggtgttccaactgtttaaaattgatcagggaccatgaaaagaaacttgtgcttcaccgaagaaaaatatctaaacatcgaaaaacttaaatattatggaaaaaaaacattgcaaaatataaaataaataaaaaaaggaaaggaaactttgaaccttatgtaccgagcaaatgccaggtctagcaaacataatgctagtcctagattacttattgatttaaaaacaaaaaaacacaaaaaaatagtaaaatataaaaacaaattaatgttttatagaccctgggaaaaagaattttcagcaaagtacaaaaatttaaagcattcctttctttaattttgtaattctttactgtggaatagctcagaatgtcagttctgttttaagtaacagaattgataactgagcaaggaaacgtaatttggattataaaattcttgctttaataaaaattccttaaacagtg

SEQ ID NO: 270709 - DNA, 453 bp, Artificial Sequence
  derived and/or modified sequence
cccttctccccggcggttagtgctgagagtgcggaccgagaccgacccgcccgcccgcggccccgcagcagctccaagaaggaaccaagagaccgaggccttcccgctgcccggacccgacaccgccaccctcgctccccgccggcagccggcagccagcggcagtggatcgaccccgttctgcggccgttgagtagttttcaattccggttgatttttgtccctctgcgcttgctccccgctcccctccccccggctccggcccccagccccggcactcgctctcctcctctcacggaaaggtcgcggcctgtggccctgcgggcagccgtgccgagatgaaccccagtgcccccagctaccccatggcctcgctctacgtgggggacctccaccccgacgtgaccgaggcgatgctctacgagaagttcagcccggccgggcccatcctct

SEQ ID NO: 270710 - DNA, 754 bp, Artificial Sequence
  derived and/or modified sequence
gcttccccttctccccggcggttagtgctgagagtgcggagtgtgtgctccgggctcggaacacacatttattattaaaaaatccaaaaaaaatctaaaaaaatcttttaaaaaaccccaaaaaaatttacaaaaaatccgcgtctcccccgccggagacttttattttttttcttcctcttttataaaataacccggtgaagcagccgagaccgacccgcccgcccgcggccccgcagcagctccaagaaggaaccaagagaccgaggccttcccgctgcccggacccgacaccgccaccctcgctccccgccggcagccggcagccagcggcagtggatcgaccccgttctgcggccgttgagtcgcggcctgtggccctgcgggcagccgtgccgagatgaaccccagtgcccccagctaccccatggcctcgctctacgtgggggacctccaccccgacgtgaccgaggcgatgctctacgagaagttcagcccggccgggcccatcctctccatccgggtctgcagggacatgatcacccgccgctccttgggctacgcgtatgtgaacttccagcagccggcggacgcggagcgtgctttggacaccatgaattttgatgttataaagggcaagccagtacgcatcatgtggtctcagcgtgatccatcacttcgcaaaagtggagtaggcaacatattcattaaaaatctggacaaatccattgataataaagcactgtatgataca

SEQ ID NO: 270711 - DNA, 493 bp, Artificial Sequence
  derived and/or modified sequence
ttctgcggccgacgcgcgtggcggcggtgccggctgggactcgtagtgcggtccggcagccgagaccgacccgcccgcccgcggccccgcagcagctccaagaaggaaccaagagaccgaggccttcccgctgcccggacccgacaccgccaccctcgctccccgccggcagccggcagccagcggcagtggatcgaccccgttctgcggccgttgagtagttttcaattccggttgatttttgtccctctgcgcttgctccccgctcccctccccccggctccggcccccagccccggcactcgctctcctcctctcacggaaaggtcgcggcctgtggccctgcgggcagccgtgccgagatgaaccccagtgcccccagctaccccatggcctcgctctacgtgggggacctccaccccgacgtgaccgaggcgatgctctacgagaagttcagcccggccgggcccatcctctccatccgggtctgcag

SEQ ID NO: 270712 - DNA, 971 bp, Artificial Sequence
  derived and/or modified sequence
cagcttcttcacaggttccacgagtcatgtcaacacagcgtgttgctaacacatcaacacagacaatgggtccacgtcctgcagctgcagccgctgcagctactcctgctgtccgcaccgttccacagtataaatatgctgcaggagttcgcaatcctcagcaacatcttaatgcacagccacaagttacaatgcaacagcctgctgttcatgtacaaggtcaggaacctttgactgcttccatgttggcatctgcccctcctcaagagcaaaagcaaatgttgggtgaacggctgtttcctcttattcaagccatgcaccctactcttgctggtaaaatcactggcatgttgttggagattgataattcagaacttcttcatatgctcgagtctccagagtcactccgttctaaggttgatgaagctgtagctgtactacaagcccaccaagctaaagaggctgcccagaaagcagttaacagtgccaccggtgttccaactgtttaaagtgagcttttccctctgattgatcagggaccatgaaaagaaacttgtgcttcaccgaagaaaaatatctaaacatcgaaaaacttaaatattatggaaaaaaaacattgcaaaatataaaataaataaaaaaaggaaaggaaactttgaaccttatgtaccgagcaaatgccaggtctagcaaacataatgctagtcctagattacttattgatttaaaaacaaaaaaacacaaaaaaatagtaaaatataaaaacaaattaatgttttatagaccctgggaaaaagaattttcagcaaagtacaaaaatttaaagcattcctttctttaattttgtaattctttactgtggaatagctcagaatgtcagttctgttttaagtaacagaattgataactgagcaaggaaacgtaatttggattataaaattcttgctttaataaaaattccttaaacagtg

SEQ ID NO: 270713 - DNA, 492 bp, Artificial Sequence
  derived and/or modified sequence
gttggtgtcagcgagcgccgcggccgttggggactccagctcccagcaggcaccgcttctgcggccgacgcgcgtggcggcggtgccggctgggactcgtagtgcggtccggcagccgagaccgacccgcccgcccgcggccccgcagcagctccaagaaggaaccaagagaccgaggccttcccgctgcccggacccgacaccgccaccctcgctccccgccggcagccggcagccagcggcagtggatcgaccccgttctgcggccgttgagtcgcggcctgtggccctgcgggcagccgtgccgagatgaaccccagtgcccccagctaccccatggcctcgctctacgtgggggacctccaccccgacgtgaccgaggcgatgctctacgagaagttcagcccggccgggcccatcctctccatccgggtctgcagggacatgatcacccgccgctccttgggctacgcgtatgtgaacttccagcag

SEQ ID NO: 270714 - DNA, 628 bp, Artificial Sequence
  derived and/or modified sequence
gcggccgacgcgcgtggcggcggtgccggctgggactcgtagtgcggtccggccgagaccgacccgcccgcccgcggccccgcagcagctccaagaaggaaccaagagaccgaggccttcccgctgcccggacccgacaccgccaccctcgctccccgccggcagccggcagccagcggcagtggatcgaccccgttctgcggccgtcgcggcctgtggccctgcgggcagccgtgccgagatgaaccccagtgcccccagctaccccatggcctcgctctacgtgggggacctccaccccgacgtgaccgaggcgatgctctacgagaagttcagcccggccgggcccatcctctccatccgggtctgcagggacatgatcacccgccgctccttgggctacgcgtatgtgaacttccagcagccggcggacgcggagcgtgctttggacaccatgaattttgatgttataaagggcaagccagtacgcatcatgtggtctcagcgtgatccatcacttcgcaaaagtggagtaggcaacatattcattaaaaatctggacaaatccattgataataaagcactgtatgatacattttctgcttttggtaacatcctttcatgtaag

SEQ ID NO: 270715 - DNA, 736 bp, Artificial Sequence
  derived and/or modified sequence
atccgcccagctgctcctagaccaccatttagtactatgagaccagcttcttcacaggttccacgagtcatgtcaacacagcgtgttgctaacacatcaacacagacaatgggtccacgtcctgcagctgcagccgctgcagctactcctgctgtccgcaccgttccacagtataaatatgctgcaggagttcgcaatcctcagcaacatcttaatgcacagccacaagttacaatgcaacagcctgctgttcatgtacaaggtcaggaacctttgactgcttccatgttggcatctgcccctcctcaagagcaaaagcaaatgttgggtgaacggctgtttcctcttattcaagccatgcaccctactcttgctggtaaaatcactggcatgttgttggagattgataattcagaacttcttcatatgctcgagtctccagagtcactccgttctaaggttgatgaagctgtagctgtactacaagcccaccaagctaaagaggctgcccagaaagcagttaacagtgccaccggtgttccaactgtttaaagtgagcttttccctctggtttgttgttttaagcttgttttcttcatcttttataaagtttgttgagcatattttgaaatgtacatagcaaaagatcattttacagttcatttaaatgtattgctaatttttcaaggaaaagtggaactaactatagaggaattaaaggaattttacccgttaa

SEQ ID NO: 270716 - DNA, 593 bp, Artificial Sequence
  derived and/or modified sequence
aggcaccgcttctgcggccgacgcgcgtggcggcggtgccggctgggactcgtagtgcggtccggccgagaccgacccgcccgcccgcggccccgcagcagctccaagaaggaaccaagagaccgaggccttcccgctgcccggacccgacaccgccaccctcgctccccgccggcagccggcagccagcggcagtggatcgaccccgttctgcggccgttgagtagttttcaattccggttgatttttgtccctctgcgcttgctccccgctcccctccccccggctccggcccccagccccggcactcgctctcctcctctcacggaaaggtcgcggcctgtggccctgcgggcagccgtgccgagatgaaccccagtgcccccagctaccccatggcctcgctctacgtgggggacctccaccccgacgtgaccgaggcgatgctctacgagaagttcagcccggccgggcccatcctctccatccgggtctgcagggacatgatcacccgccgctccttgggctacgcgtatgtgaacttccagcagccggcggacgcggagcgtgctttggacaccatgaattttgat

SEQ ID NO: 270717 - DNA, 348 bp, Artificial Sequence
  derived and/or modified sequence
atggaagaccacaactgcgagcaattgtgcgtgaatgtgcccggctcttttgtgtgtcagtgttatagtggttacgccctcgccgaggacggcaaacgatgtgttgcagtagattactgcgcaagcgagaatcacggttgcgaacacgagtgtgtcaacgcagacggctcatatctctgccaatgtcacgaggggtttgctctgaatcccgataaaaaaacgtgtacgaagatcgattattgcgcaagcagcaaccacggctgtcagcacgagtgcgtaaatacagatgacagctacagttgccactgcctgaagggatttaccctcaatcctgacaagaaaacctag

SEQ ID NO: 270718 - DNA, 348 bp, Artificial Sequence
  derived and/or modified sequence
atggaggaccacaactgtgagcagctgtgtgtgaatgtgcccggcagctttgtgtgccagtgctacagcggctacgccctggctgaagatggcaagagatgtgtggccgtggactactgtgcctctgaaaatcatggctgtgaacatgaatgtgtgaatgctgatggcagctacctgtgccagtgccacgagggctttgccctgaacccagacaagaagacctgcaccaagattgactactgtgccagcagcaaccacggctgccagcatgaatgtgtgaacacagatgacagctacagctgccactgcctgaagggcttcaccctgaacccagacaagaagacctag

SEQ ID NO: 270719 - DNA, 600 bp, Artificial Sequence
  derived and/or modified sequence
aggtgatggctggtgggttcagagtaattaagactgatggataactgcagagaggaaatctagttttcagggcaaacagatgcgtccaagagagagcccacacacgtggttggatgcagctggagatggagaattccagttcaaggaaaaggcctgggcagtatgtgtttggtggtggtcgttgaccctgaaaatagatggaatcttggagggagaaagcgagtgtggaaagtgaagtccaggatctgtgtgccatggaggaccacaactgtgagcagctctgtgtgaatgtgccgggctccttcgtctgccagtgctacagtggctacgccctggctgaggatgggaagaggtgtgtggctgtggactactgtgcctcagaaaaccacggatgtgaacatgagtgtgtaaatgctgatggctcctacctttgccagtgccatgaaggatttgctcttaacccagataaaaaaacgtgcacaaagatagactactgtgcctcatctaatcacggatgtcagcacgagtgtgttaacacagatgattcctattcctgccactgcctgaaaggctttaccctgaatccagataagaaaacct

SEQ ID NO: 270720 - DNA, 348 bp, Artificial Sequence
  derived and/or modified sequence
atggaggaccacaactgcgagcagctgtgcgtgaacgtgcccggcagcttcgtgtgtcagtgctatagcggctacgcactggctgaggatgggaagaggtgcgttgctgtggactattgcgcaagtgagaatcacggctgtgaacacgaatgtgttaatgcggacggctcctacctgtgtcaatgccatgagggattcgccttgaatcctgataagaagacatgtacgaagatagattactgcgcaagtagcaaccacggctgtcagcatgagtgcgtcaatactgatgacagctactcatgccattgccttaaggggtttacgttgaaccctgataagaaaacttag

SEQ ID NO: 270721 - DNA, 348 bp, Artificial Sequence
  derived and/or modified sequence
atggaggatcacaattgtgagcagctttgcgttaacgtcccaggatcattcgtatgccagtgctattctggctatgccctggcggaagatggaaaaaggtgcgtggcagtggattattgcgcctcagaaaaccacggatgcgaacacgagtgtgtgaatgctgacgggagctacctgtgtcagtgtcatgagggatttgctctgaacccagataagaaaacctgtaccaagattgattactgcgcaagctccaatcacggatgtcaacatgagtgtgtcaataccgacgattcatattcgtgccactgcctcaagggcttcactctgaacccagacaagaagacatag

SEQ ID NO: 270722 - DNA, 348 bp, Artificial Sequence
  derived and/or modified sequence
atggaggaccacaactgcgagcagctgtgcgtgaacgtgcccggcagcttcgtgtgccagtgctacagcggctacgccctggccgaggacggcaagagatgcgtggccgtggactactgcgccagcgagaaccacggctgcgagcacgagtgcgtgaacgccgacggcagctacctgtgccagtgccacgagggcttcgccctgaaccccgacaagaagacctgcaccaagatcgactactgcgccagcagcaaccacggctgccagcacgagtgcgtgaacaccgacgacagctacagctgccactgcctgaagggcttcaccctgaaccccgacaagaagacctag

SEQ ID NO: 270723 - DNA, 1584 bp, Artificial Sequence
  derived and/or modified sequence
atggccgtacaccgcgtcaaggtgacattcaaagacgagcccggagagggttctggcgtcgcaagatcgttttatactgcaatagcccaggcctttctgtccaatgaaaagctgcccaacctcgaatgcattcagaacgccaataaaggcactcacacatctctgatgcagcggttacggaaccgcggcgaacgcgaccgggaacgcgagcgtgagagggagatgcgccggagctccggcctgcgggccggaagccgccgcgacagagaccgggattttcgccgccagctctccatagacactagaccctttagaccagcctccgaaggaaaccccagcgatgaccccgaacctctgcccgctcaccggcaagccctgggcgaacgcttgtatcccagagttcaggctatgcagcctgcattcgccagcaaaatcacaggaatgttgctcgaactgtctcccgcgcaacttttgctgctcctcgcctctgaggatagccttcgggcccgtgtcgatgaagctatggagcttatcatcgcacatggccgagagaacggcgctgactccattttggacttagggcttgtagattcttccgaaaaggtccaagagaatcggaagcgccatggttctagcaggtcagttgttgacatggacctggacgacaccgacgacggcgatgacaacgccccactgttctaccagccgggaaaacgcggattctacacccccaggcccggaaaaaatactgaggcccgcttaaattgtttcagaaatatcggacggatcctcggcttgtgtttgctgcaaaacgaattgtgcccgattaccttgaataggcacgtgatcaaagttctcttaggacggaaagttaactggcacgatttcgctttcttcgacccagttatgtatgagagcctgcggcagctcatcctagcctcacagtcctctgatgctgacgccgtgttctcagctatggacctggcgttcgccatcgatctatgtaaggaagagggcggggggcaggtggaactcatacccaacggcgtgaacattccggtgacacctcagaacgtttatgaatacgtgagaaaatatgctgagcataggatgctggtcgtggccgaacagccgctccatgccatgcggaagggcctcctggatgtgctgcccaagaacagcctggaggatctgaccgcagaggacttccgactgctggtcaacggttgtggtgaggttaacgtgcaaatgctgattagctttacaagctttaacgatgagtcaggggagaacgcagagaagctgctccagttcaagagatggttctggtcaatcgtcgagaagatgtccatgaccgaacgccaagacctggtttacttttggactagttctccctccttgcccgcctcagaagagggttttcagcctatgccatctatcacaatccggcctcctgacgatcagcacctccccacggcaaatacatgtatctcccggctatatgtgcctctttactcatccaaacagatcttgaagcagaagttgttgctcgccataaagacaaaaaacttcgggtttgtatag

SEQ ID NO: 270724 - DNA, 1584 bp, Artificial Sequence
  derived and/or modified sequence
atggctgtgcaccgggtgaaggtgaccttcaaggatgagcccggggagggcagcggcgtggcccgctccttctacacagccatcgcccaggccttcctgagcaatgagaagctgcccaacctggagtgcatccagaatgccaacaagggcacccacaccagcctgatgcagaggctgaggaacagaggagagcgggaccgggagcgggagcgggagcgggagatgaggaggagcagcggcctgcgggccggcagccggcgggaccgggaccgggacttccggcggcagctgagcattgacacccggcccttccggcctgccagcgagggcaaccccagtgatgatcctgagcccctgcctgcccaccggcaggccctgggggagcggctgtacccccgggtgcaggccatgcagcctgcctttgccagcaagatcaccggcatgctgctggagctgagccctgcccagctgctgctgctgctggccagcgaggacagcctgcgggcccgggtggatgaggccatggagctgatcatcgcccacggccgggagaatggagctgacagcatcctggacctgggcctggtggacagcagcgagaaggtgcaggagaacaggaagagacatggcagcagccgctctgtggtggacatggacctggatgacacagatgatggagatgacaatgcccccctcttctaccagcccgggaagaggggcttctacacccccaggcctgggaagaacacagaggcccggctgaactgcttcaggaacatcggccgcatcctgggcctgtgcctgctgcagaatgagctgtgccccatcaccctgaacagacatgtgatcaaggtgctgctgggcaggaaggtgaactggcatgactttgccttctttgatcctgtgatgtatgagagcctgcggcagctgatcctggccagccagagcagtgatgctgatgctgtgttcagcgccatggacctggcctttgccatcgacctgtgcaaggaggagggcggcggccaggtggagctgatccccaacggggtgaacatccctgtgaccccccagaatgtgtatgaatatgtgaggaaatatgcagagcacaggatgctggtggtggccgagcagcccctgcacgccatgaggaagggcctgctggatgtgctgcccaagaacagcctggaggacctgacagctgaggacttccggctgctggtgaatggctgtggggaggtgaatgtgcagatgctgatctccttcaccagcttcaatgatgagagcggggagaatgctgagaagctgctgcagttcaagcgctggttctggagcatcgtggagaagatgtccatgacagagcggcaggacctggtgtacttctggaccagcagccccagcctgcctgccagcgaggagggcttccagcccatgcccagcatcaccatccggcccccagatgaccagcacctgcccacagccaacacctgcatcagccggctgtatgtgcccctgtacagcagcaagcagatcctgaagcagaagctgctgctggccatcaagaccaagaactttggatttgtgtag

SEQ ID NO: 270725 - DNA, 1584 bp, Artificial Sequence
  derived and/or modified sequence
atggccgtgcaccgggtgaaggtgaccttcaaggacgagcccggcgagggaagcggcgtggctcgcagcttctacacagcgatagcacaggcatttctcagcaatgaaaagctccccaatctagaatgcatccagaacgccaacaagggaactcatacgagtttgatgcagcgactgaggaacagaggcgagcgggatagggagagggaacgcgagcgggaaatgcgacgcagcagcggactccgcgcaggcagccgccgagacagggacagggatttcagaaggcaacttagcatcgacaccaggcccttcaggcccgcttcggaaggtaatcctagtgatgatccagagcctttgcccgcccatcgccaggccctaggggagagactttatccaagagtgcaggctatgcagccagcttttgcgtcaaagatcacggggatgcttctggaactcagtccagcccagcttctgttgcttctggcctccgaggatagcctacgggcaagagtggatgaggccatggagctgatcatcgcccatggaagagagaacggagccgattctattctggacctggggctggtggactcatccgaaaaggtgcaggagaatcgcaaacgtcacggctcatcccggtccgttgtggacatggacctggacgacaccgacgacggagatgataacgccccacttttctaccagcctgggaagcgagggttctacactcctcgacctggcaaaaacactgaggcccgactgaactgcttccgcaatatcggaagaatcctaggcctctgtctccttcagaatgaattatgcccgattaccttgaaccgacatgtcatcaaagtgctgctggggaggaaggtcaactggcacgattttgccttcttcgaccccgtgatgtacgaatctttgaggcaattgatcctagcttctcagagtagcgacgctgatgccgttttctctgccatggacctcgcattcgccatagacctgtgtaaagaagaagggggcgggcaggttgagttgattcctaacggggtgaacatccctgtcacacctcagaatgtttacgagtacgtccggaagtacgccgagcacaggatgctggtggttgctgaacagccattacacgccatgaggaaaggccttctcgatgttctgcccaagaattcactggaggacctaaccgctgaggactttcgcctgcttgtcaatggctgcggcgaggttaatgtgcagatgctgatatcattcacctcatttaatgacgagtctggagagaacgcggagaagttactccagtttaaacgttggttctggagcatagtggagaaaatgtcaatgacagagaggcaggatctggtctatttttggacctcttcccccagcttgcctgcgagcgaagagggcttccaacctatgcctagtatcactatccgcccacccgatgatcagcacctgcctaccgcaaacacatgtatctcgagactctatgtccccttgtactcctcaaagcagatattgaagcaaaaactcctgttggccataaagaccaaaaacttcggcttcgtgtag

SEQ ID NO: 270726 - DNA, 1584 bp, Artificial Sequence
  derived and/or modified sequence
atggcagtacacagagtgaaagtgactttcaaagatgagcccggagagggatccggggtggccagatccttttacacagccatcgcgcaggcattcttatctaacgagaaactgccaaatctcgagtgtattcaaaatgcgaacaagggaacccacacttccctcatgcagaggctaagaaatcgcggagaacgggatagagaacgagagcgggaaagggagatgcggagaagcagcggactccgcgcaggatctagaagggatagggatagagatttcagacgacagctgagcatcgacacaaggcccttcagaccagcgagcgagggaaacccatcagatgaccccgagccactgcctgcccacagacaagcattgggagagcggctctaccccagggtgcaggccatgcagcctgcgttcgcttccaagataaccgggatgctcctcgaactgagtcccgcacagttgctcctgctgctagcatccgaagatagcctgcgcgcacgagtagacgaggccatggagttgattatcgctcacggaagagagaacggggctgatagtatcctcgatttgggccttgtagactcttccgagaaagtccaggaaaaccgcaaaaggcacggcagttcccgctccgttgttgacatggatctggacgacacagatgatggggatgacaatgcccctcttttttaccagcccggtaaaagagggttttacacaccccgacccggtaagaacacggaagcaagattgaattgcttccgaaacatcggcaggatccttggcctctgcttgctgcagaatgagctgtgccccataacattgaacaggcacgtcataaaggttctcctgggacggaaggtgaactggcacgattttgcgttttttgaccccgttatgtacgaaagcctgaggcagctgattttggctagtcagtcgagcgacgctgacgccgtgtttagcgcaatggatttggcttttgcaattgatctgtgtaaagaggagggcggtggccaggtcgaacttattcccaatggtgtgaacatccctgtgaccccccagaatgtgtatgagtacgtgcgaaaatacgctgaacacagaatgttggtggtggccgaacagccactccatgctatgcgaaaaggtctcttggacgtgctgccaaaaaactccctggaagacctgaccgccgaagattttcgcctcctggtgaacgggtgcggggaagtgaacgtgcagatgttgatcagcttcacaagtttcaacgacgaatccggcgagaatgcggagaagctcctgcaatttaaaagatggttctggtccatagtggagaagatgagcatgacagagcgccaagatttggtgtacttttggacaagcagcccctcactccccgctagcgaggaaggcttccagcccatgccatctattaccatcaggccccctgatgatcagcacttgcctaccgcaaacacgtgcattagcagactctacgtgcctctgtattcatccaaacaaattctcaaacagaaacttctcttggccatcaaaacgaaaaacttcggtttcgtctag

SEQ ID NO: 270727 - DNA, 1931 bp, Artificial Sequence
  derived and/or modified sequence
tttgtaatggataagcttctgagaactccaattactttgttgttttttaaactctcaaggaaaggctaaaactagattttcagattgtacatagaaaaattcaagctactttccaacattgaatttactactttttgacttcttgatgtgttttaataggttgatcgggatcgagatcttctcattcagcagactatgaggcagcttaacaatcactttggtcgaagatgtgctactacaccaatggctgtacacagagtaaaagtcacatttaaggatgagccaggagagggcagtggtgtagcacgaagtttttatacagccattgcacaagcatttttatcaaatgaaaaattgccaaatctagagtgtatccaaaatgccaacaaaggcacccacacaagtttaatgcagagattaaggaaccgaggagagagagaccgggaaagggagagagaaagggaaatgaggaggagtagtggtttgcgagcaggttctcggagggaccgggatagagactttagaagacagctttccatcgacactaggccctttagaccagcctctgaagggaatcctagcgatgatcctgagcctttgccagcacatcggcaggcacttggagagaggctttatcctcgtgtacaagcaatgcaaccagcatttgcaagtaaaatcactggcatgttgttggaattatccccagctcagctgcttctccttctagcaagtgaggattctctgagagcaagagtggatgaggccatggaactcattattgcacatggacgggaaaatggagctgatagtatcctggatcttggattagtagactcctcagaaaaggtacaggaaaaccgaaagcgccatggctctagtcgaagtgtagtagatatggatttagatgatacagatgatggtgatgacaatgcccctttgttttaccaacctgggaaaagaggattttatactccaaggcctggcaagaacacagaagcaaggttgaattgtttcagaaacattggcaggattcttggactatgtctgttacagaatgaactatgtcctatcacattgaatagacatgtaattaaagtattgcttggtagaaaagtcaattggcatgattttgctttttttgatcctgtaatgtatgagagtttgcggcaactaatcctcgcgtctcagagttcagatgctgatgctgttttctcagcaatggatttggcatttgcaattgacctgtgtaaagaagaaggtggaggacaggttgaactcattcctaatggtgtaaatataccagtcactccacagaatgtatatgagtatgtgcggaaatacgcagaacacagaatgttggtagttgcagaacagcccttacatgcaatgaggaaaggtctactagatgtgcttccaaaaaattcattagaagatttaacggcagaagattttaggcttttggtaaatggctgcggtgaagtcaatgtgcaaatgctgatcagttttacctctttcaatgatgaatcaggagaaaatgctgagaagcttctgcagttcaagcgttggttctggtcaatagtagagaagatgagcatgacagaacgacaagatcttgtttacttttggacatcaagcccatcactgccagccagtgaagaaggattccagcctatgccctcaatcacaataagaccaccagatgaccaacatcttcctactgcaaatacttgcatttctcgactttacgtcccactctattcctctaaacagattctcaaacagaaattgttactcgccattaagaccaagaattttggttttgtgtagagtataaaaagtgtgtattgctgtgtaatattactagcaaattttgtagatttttttccatttgtctataaaagtttatggaagttaatgctgtcatacccccc

SEQ ID NO: 270728 - DNA, 1584 bp, Artificial Sequence
  derived and/or modified sequence
atggccgtgcacagagtgaaggtgaccttcaaggacgagcccggcgagggcagcggcgtggccagaagcttctacaccgccatcgcccaggccttcctgagcaacgagaagctgcccaacctggagtgcatccagaacgccaacaagggcacccacaccagcctgatgcagagactgagaaacagaggcgagagagacagagagagagagagagagagagagatgagaagaagcagcggcctgagagccggcagcagaagagacagagacagagacttcagaagacagctgagcatcgacaccagacccttcagacccgccagcgagggcaaccccagcgacgaccccgagcccctgcccgcccacagacaggccctgggcgagagactgtaccccagagtgcaggccatgcagcccgccttcgccagcaagatcaccggcatgctgctggagctgagccccgcccagctgctgctgctgctggccagcgaggacagcctgagagccagagtggacgaggccatggagctgatcatcgcccacggcagagagaacggcgccgacagcatcctggacctgggcctggtggacagcagcgagaaggtgcaggagaacagaaagagacacggcagcagcagaagcgtggtggacatggacctggacgacaccgacgacggcgacgacaacgcccccctgttctaccagcccggcaagagaggcttctacacccccagacccggcaagaacaccgaggccagactgaactgcttcagaaacatcggcagaatcctgggcctgtgcctgctgcagaacgagctgtgccccatcaccctgaacagacacgtgatcaaggtgctgctgggcagaaaggtgaactggcacgacttcgccttcttcgaccccgtgatgtacgagagcctgagacagctgatcctggccagccagagcagcgacgccgacgccgtgttcagcgccatggacctggccttcgccatcgacctgtgcaaggaggagggcggcggccaggtggagctgatccccaacggcgtgaacatccccgtgaccccccagaacgtgtacgagtacgtgagaaagtacgccgagcacagaatgctggtggtggccgagcagcccctgcacgccatgagaaagggcctgctggacgtgctgcccaagaacagcctggaggacctgaccgccgaggacttcagactgctggtgaacggctgcggcgaggtgaacgtgcagatgctgatcagcttcaccagcttcaacgacgagagcggcgagaacgccgagaagctgctgcagttcaagagatggttctggagcatcgtggagaagatgagcatgaccgagagacaggacctggtgtacttctggaccagcagccccagcctgcccgccagcgaggagggcttccagcccatgcccagcatcaccatcagaccccccgacgaccagcacctgcccaccgccaacacctgcatcagcagactgtacgtgcccctgtacagcagcaagcagatcctgaagcagaagctgctgctggccatcaagaccaagaacttcggcttcgtgtag

SEQ ID NO: 270729 - DNA, 45 bp, Artificial Sequence
  derived and/or modified sequence
atggctctggtacttggcagtctgttgttgttgggtctgtgctag

SEQ ID NO: 270730 - protein, 503 aa, Artificial Sequence
  derived and/or modified sequence
MFCQRKDTGQKKTLDKKDGRRMSFQKPKGTIEYTVESRDSLNSIALKFDTTPNELVQLNKLFSRAVVTGQVLYVPDPEYVSSVESSPSLSPVSPLSPTSSEAEFDKTTNPDVHPTEATPSSTFTGIRPARVVSSTSEEEEAFTEKFLKINCKYITSGKGTVSGVLLVTPNNIMFDPHKNDPLVQENGCEEYGIMCPMEEVMSAAMYKEILDSKIKESLPIDIDQLSGRDFCHSKKMTGSNTEEIDSRIRDAGNDSASTAPRSTEESLSEDVFTESELSPIREELVSSDELRQDKSSGASSESVQTVNQAEVESLTVKSESTGTPGHLRSDTEHSTNEVGTLCHKTDLNNLEMAIKEDQIADNFQGISGPKEDSTSIKGNSDQDSFLHENSLHQEESQKENMPCGETAEFKQKQSVNKGKQGKEQNQDSQTEAEELRKLWKTHTMQQTKQQRENIQQVSQKEAKHKITSADGHIESKCYRVNEVSSSNCMVSPSFLTDSKAAVP

SEQ ID NO: 270731 - DNA, 1512 bp, Artificial Sequence
  derived and/or modified sequence
atgttttgccaaagaaaggacactgggcaaaaaaaaacattggacaagaaggacggccgcaggatgagttttcagaagcctaaggggaccatcgagtacaccgtcgagtctagagactcgcttaactccattgctctgaagtttgataccacaccaaatgagctggtgcagctgaataagttattttcccgggccgttgtcactggccaagtcctgtatgtgcccgatcccgagtatgtgtcatccgtcgagtcttctccgagcctgtcgcctgtcagccctctgagtcccaccagcagcgaggccgaatttgataagactactaacccagatgtgcatcctaccgaagcaactccctccagcacattcacaggcattagacccgccagagtggtctcgagtaccagcgaggaggaagaagccttcacggaaaagttccttaagatcaattgcaagtatataacatcgggaaagggcactgtcagcggtgtcctgttggttaccccaaacaacatcatgttcgacccacacaagaatgaccccctcgtgcaggagaatggatgtgaggaatacggaatcatgtgccccatggaggaggtgatgtctgccgcaatgtacaaggagattctggacagcaaaattaaggaaagcttgcccatcgacatcgaccagctatctggacgcgatttttgccactcaaagaagatgacaggatcaaacactgaagagattgactctagaatccgggacgcaggcaatgattcggcgtctaccgcccctcgctccacggaggagtcactctcagaagatgttttcaccgagtcagaattatcccccatcagagaggagctggtgagttctgatgaactgcggcaagataaatcttccggagcatcctctgaaagcgtacagactgtcaatcaggctgaggtggagtcccttaccgtgaagagtgaatccactggaactcccggtcatttgcggagcgacaccgagcactcgacgaacgaggtgggcactctgtgccacaaaacagacctgaataatctcgagatggccattaaagaggaccagattgctgataattttcagggaatttctggccctaaagaagatagcacaagcataaaggggaatagtgatcaggattcttttttacatgagaattcactgcatcaggaggagagccagaaagaaaacatgccttgtggcgagacggcagaatttaaacagaagcagtccgtcaacaaggggaagcagggcaaggaacagaaccaagacagtcaaacagaagcggaggagctgaggaaactttggaaaacacatacgatgcagcagaccaaacagcagcgtgaaaacatccagcaagtgtctcagaaggaagccaaacataagatcacctccgctgacggccacatcgaaagtaagtgttacagggtcaacgaggtgtcatcatccaactgcatggtatccccaagtttccttacggacagtaaggctgccgtcccttag

SEQ ID NO: 270732 - DNA, 1512 bp, Artificial Sequence
  derived and/or modified sequence
atgttctgccagaggaaggacaccggccagaagaagaccctggacaagaaggatggccgcaggatgtccttccagaagcccaagggcaccatcgagtacacagtggagagccgggacagcctgaacagcatcgccctgaagtttgacaccaccccaaatgagctggtgcagctgaacaagctgttcagcagagctgtggtgacaggccaggtgctgtatgtgcctgaccctgaatatgtgtcctctgtggagagcagccccagcctgagccctgtgagccccctgagccccaccagcagcgaggccgagtttgacaagaccaccaacccagatgtgcaccccacagaggccacccccagcagcaccttcaccggcatccggcctgcccgggtggtgagcagcaccagcgaggaggaggaggccttcacagagaagttcctgaagatcaactgcaagtacatcaccagcggcaagggcaccgtgtctggagtgctgctggtgacccccaacaacatcatgtttgacccccacaagaatgaccccctggtgcaggagaatggctgtgaggagtatggcatcatgtgccccatggaggaggtgatgtctgctgccatgtacaaggagatcctggacagcaagatcaaggagagcctgcccatcgacatcgaccagctgagcggccgggacttctgccacagcaagaagatgacaggcagcaacacagaggagattgacagccgcatcagagatgctggaaatgattctgccagcacagcccccaggagcacagaggagagcctgtctgaagatgtgttcacagaaagtgagctgagccccatccgggaggagctggtgtccagtgatgagctgcggcaggacaagagcagcggggccagcagcgagagcgtgcagacagtgaaccaggccgaggtggagagcctgactgtgaagtctgagagcacaggcaccccaggccacctgcggagtgacacagagcacagcaccaatgaggtgggcaccctgtgccacaagacagacctgaacaacctggagatggccatcaaggaggaccagattgctgacaacttccagggcatcagcggccccaaggaggacagcaccagcatcaagggcaacagcgaccaggacagcttcctgcacgagaacagcctgcaccaggaggagagccagaaggagaacatgccctgtggggagacagctgagttcaagcagaagcagagcgtgaacaagggcaagcagggcaaggagcagaaccaggacagccagacagaggccgaggagctgaggaagctgtggaagacccacaccatgcagcagaccaagcagcagcgggagaacatccagcaggtgtcccagaaggaggccaagcacaagatcaccagcgcagatggccacatcgagagcaagtgctacagagtgaatgaggtgagcagcagcaactgcatggtgagccccagcttcctgacagacagcaaggctgctgtgccctag

SEQ ID NO: 270733 - DNA, 1512 bp, Artificial Sequence
  derived and/or modified sequence
atgttctgccagcggaaggacaccggccagaagaagaccctggacaaaaaagacggcagaaggatgtcctttcaaaagccaaaaggaacaatagaatataccgttgaatcccgcgattctctaaatagcatagctctgaaattcgacaccacacctaacgagctggtccagctgaacaagctttttagccgcgccgttgtgacaggtcaagttctttacgtacccgaccctgagtatgtctcaagtgtagagtcaagtccatcactcagccctgtttctcctttgtctccaaccagttctgaggccgaattcgacaaaacaaccaacccagatgtgcacccaaccgaagcaacgcccagctccacctttactggaattagacccgcccgcgtcgtctcgtcaaccagtgaggaagaggaagcattcactgaaaagtttctgaaaattaattgcaagtatataacaagcggcaaaggcactgttagcggtgtgctgctggttacacccaacaacatcatgtttgatcctcacaaaaacgaccccttggtgcaggaaaatggatgtgaagagtacggtatcatgtgtcccatggaagaggtaatgagcgcagccatgtataaggagattctagattctaaaattaaggagagcctccccatcgacattgaccagttgtcagggcgagatttttgtcatagcaagaagatgactggcagcaacacagaggagatcgacagtaggatccgtgacgcgggcaacgactctgccagcacagctccaaggtccacggaggaaagcttatcagaagacgtctttactgagtcggagctaagccccatccgggaggagctcgtatccagcgacgagttgcgccaggacaaatcttcgggcgcatcctcggagtccgtgcagactgtcaaccaggctgaagtggaatccctgacggttaaatctgagagtacgggcactcctggccatctccggtctgatacggagcacagcaccaacgaagtcggcacactctgccacaagaccgacctgaataatctagagatggcaatcaaagaggatcagatagcagataatttccaaggaatctccgggcccaaagaggacagcacctctatcaaggggaactccgaccaggattctttcctacacgaaaactctctgcaccaagaagagtcacagaaggaaaacatgccttgcggcgagactgccgaatttaaacagaaacagagtgtgaataaaggcaagcagggcaaggaacagaatcaggactcacagaccgaagccgaggagttgaggaagctgtggaaaacacatacaatgcagcagaccaaacagcagcgagagaacatccaacaggtgtcccaaaaggaggcaaaacataagatcaccagcgctgacggccacatagagtccaaatgctaccgtgtcaatgaggtgagctcatccaattgcatggtatccccatcatttctcacagacagcaaggcagccgtcccgtag

SEQ ID NO: 270734 - DNA, 2007 bp, Artificial Sequence
  derived and/or modified sequence
actgctagctgagcaaggttcgaaggaaggacctcagaaatgttctgccagcgcaaagacactggccaaaagaagaccctagacaagaaagatggaagacgaatgtcttttcagaaacctaaagggactattgagtatactgttgaatcaagggattctttgaatagcatagccctgaagtttgatacaacacctaacgaacttgttcaattaaataagttattctcccgagcagttgttactggacaggttctgtatgttcctgatcctgaatatgtctccagtgttgagagctctccatctctaagccccgtaagtcctctgtcaccaacatcatctgaggctgaatttgataagaccactaatcctgatgtccatccaacagaagcaactccctcatctactttcactggtattcgacctgcacgagttgtatcttcaacttctgaggaggaggaagcatttactgagaaatttcttaaaattaattgcaaatatattaccagtggcaagggcacagtcagtggtgtgctgctagttacaccaaataatataatgtttgatccacataaaaatgaccctttggttcaagagaatggctgtgaggaatatggcatcatgtgtccaatggaagaggtgatgtcagctgcaatgtacaaagaaattttggatagcaaaataaaggaatctttacccatagatatagatcagctatcaggaagggacttctgccattcaaagaaaatgacaggaagtaacactgaggaaatagactcaagaatccgagatgcaggtaatgatagtgccagcactgctcctaggagcactgaggagtctctttctgaagatgtgttcacagaatcagaactttcccctatacgagaggagcttgtatcttcagatgaactgcgacaagataaatcttctggtgcgtcatcagaatctgtgcaaactgtcaatcaggctgaagtagaaagtctgacagtcaaatcagaatctactggtactcctggtcacttaagatctgatactgaacattctacaaatgaagttgggactttatgtcataaaactgatttaaataatcttgaaatggccattaaggaagatcagattgcagataactttcaaggaatatcaggtcctaaagaagacagcacaagtataaaaggtaattcagaccaggattcttttcttcatgagaattcgttacaccaagaagagagtcaaaaagaaaatatgccttgtggggaaacagcagaatttaaacaaaagcaaagtgttaacaaaggaaaacaaggaaaggagcaaaatcaggactcacagacagaggcagaagagctacgcaaactttggaaaacccatactatgcaacaaactaaacagcaaagggaaaatattcaacaagtgtcacaaaaagaagctaagcataaaattacatctgctgatggacacatagaaagtaagtgttatagagtaaatgaagttagttcatccaattgtatggtgtctccgtctttcctcactgactcaaaagccgctgtaccttagggcaacctgaaggataagtgagtgacccttgaccggtgattctctggggacaagtatatacagtctccagtgtctactgtcttttcttatcccacaggtggattgtacacataatgagcatcattgctacccaccatgtttaaacattcttggctcactacatcgtatcattaaacaatttatttcttgagaaattgcacaaaagctgtataatacctttgatcactccattttctcttaaaaagtttttggtgtgttaccattaaaaatgtcttttttcatatataacattttaattgccaaagttgtaatcccatcttttataaaatgtacagttaaacctaaaagtgtacttacagaattcttccacgtatcgagaagtttcatcatcatcatctaattattttcttttaaaaacctgccctcaggacaaataaaaacactattttatctgtc

SEQ ID NO: 270735 - DNA, 1512 bp, Artificial Sequence
  derived and/or modified sequence
atgttctgccaaaggaaagataccggacagaaaaagaccctggataaaaaagatggccgacggatgtctttccagaaaccaaaaggcactattgagtataccgtcgagagcagagattctttgaatagcatagcgcttaagtttgatacgactcctaatgagctagtgcaactgaacaagctgttctctagggccgtggtcaccgggcaggtattatacgtgccagacccagagtacgtttctagcgtggaaagttccccttccctctcacccgtcagtccgctttctcctactagcagcgaggccgagtttgataaaacaactaatccagatgtgcaccccaccgaagctacaccttcttctacgtttacaggcatcagaccagcacgcgtggtatcatctacatccgaggaagaggaagcgtttaccgaaaaattcctgaagattaattgtaagtatataacttccggcaagggtacagtaagtggcgtgttattagtgacgccgaataatatcatgtttgatccgcataagaatgatcctttggtacaggagaatggctgtgaagaatatgggatcatgtgccccatggaggaggttatgtccgccgctatgtacaaagagatcttggactccaagatcaaagagtcgctgcccatcgatattgatcaactgtccggcagggacttctgccactccaaaaagatgaccggtagcaatacagaagagatagattcacgaattagagatgcgggtaatgatagcgccagtacggcccctaggtcaaccgaggagagcctctccgaggatgtttttacagagtcggagctaagtcctattagagaggagctggtgtcttctgatgagctgagacaagacaagagctccggcgctagcagcgagagcgtgcagactgtgaatcaggccgaggtcgagagcctgaccgtgaaaagcgaaagtacaggaacaccagggcacctgaggagtgatacggagcacagtactaacgaagttgggaccctttgtcacaagaccgacttaaacaatctggagatggctatcaaggaggatcagatcgctgataactttcaaggcatctcaggtcccaaggaagatagtactagcattaaaggcaacagcgatcaggactcattcctgcacgagaattctctgcaccaagaagaatcccaaaaggagaatatgccctgcggggaaacagcagagtttaagcaaaagcagtccgtcaataagggcaagcaaggcaaggaacagaaccaagactcgcagaccgaggcagaggagctgcgtaagctttggaaaacccatacaatgcagcaaaccaaacaacagcgggaaaacatccagcaggtatctcagaaagaagctaaacacaagattacatccgcagacggtcacatagagtcaaaatgctatagagtcaatgaagtgagcagctccaactgcatggtgagcccttcttttctgaccgacagcaaggccgcagtcccttag

SEQ ID NO: 270736 - DNA, 1512 bp, Artificial Sequence
  derived and/or modified sequence
atgttctgccagagaaaggacaccggccagaagaagaccctggacaagaaggacggcagaagaatgagcttccagaagcccaagggcaccatcgagtacaccgtggagagcagagacagcctgaacagcatcgccctgaagttcgacaccacccccaacgagctggtgcagctgaacaagctgttcagcagagccgtggtgaccggccaggtgctgtacgtgcccgaccccgagtacgtgagcagcgtggagagcagccccagcctgagccccgtgagccccctgagccccaccagcagcgaggccgagttcgacaagaccaccaaccccgacgtgcaccccaccgaggccacccccagcagcaccttcaccggcatcagacccgccagagtggtgagcagcaccagcgaggaggaggaggccttcaccgagaagttcctgaagatcaactgcaagtacatcaccagcggcaagggcaccgtgagcggcgtgctgctggtgacccccaacaacatcatgttcgacccccacaagaacgaccccctggtgcaggagaacggctgcgaggagtacggcatcatgtgccccatggaggaggtgatgagcgccgccatgtacaaggagatcctggacagcaagatcaaggagagcctgcccatcgacatcgaccagctgagcggcagagacttctgccacagcaagaagatgaccggcagcaacaccgaggagatcgacagcagaatcagagacgccggcaacgacagcgccagcaccgcccccagaagcaccgaggagagcctgagcgaggacgtgttcaccgagagcgagctgagccccatcagagaggagctggtgagcagcgacgagctgagacaggacaagagcagcggcgccagcagcgagagcgtgcagaccgtgaaccaggccgaggtggagagcctgaccgtgaagagcgagagcaccggcacccccggccacctgagaagcgacaccgagcacagcaccaacgaggtgggcaccctgtgccacaagaccgacctgaacaacctggagatggccatcaaggaggaccagatcgccgacaacttccagggcatcagcggccccaaggaggacagcaccagcatcaagggcaacagcgaccaggacagcttcctgcacgagaacagcctgcaccaggaggagagccagaaggagaacatgccctgcggcgagaccgccgagttcaagcagaagcagagcgtgaacaagggcaagcagggcaaggagcagaaccaggacagccagaccgaggccgaggagctgagaaagctgtggaagacccacaccatgcagcagaccaagcagcagagagagaacatccagcaggtgagccagaaggaggccaagcacaagatcaccagcgccgacggccacatcgagagcaagtgctacagagtgaacgaggtgagcagcagcaactgcatggtgagccccagcttcctgaccgacagcaaggccgccgtgccctag

SEQ ID NO: 270737 - DNA, 3291 bp, Artificial Sequence
  derived and/or modified sequence
atgctgctggagctggccggccaggaggccctgaagcccgccggcgccatctacatggagaagagcggctgcagccccttccccgtgtgctgggccaaggagtacgacagatacctggccagcagcaagatcatggccgccgcctacctggaccccaacctgaaccacacccccaacagcagcaccaagacccacctgggcaccggcatggagagaagccccggcgccatggagagagtgctgaaggtgttccactacttcgagagcaacagcgagcccaccacctgggccagcatcatcagacacggcgacgccaccgacgtgagaggcatcatccagaagatcgtggacagccacaaggtgaagcacgtggcctgctacggcttcagactgagccacctgagaagcgaggaggtgcactggctgcacgtggacatgggcgtgagcagcgtgagagagaagtacgagctggcccacccccccgaggagtggaagtacgagctgagaatcagatacctgcccaagggcttcctgaaccagttcaccgaggacaagcccaccctgaacttcttctaccagcaggtgaagagcgactacatgctggagatcgccgaccaggtggaccaggagatcgccctgaagctgggctgcctggagatcagaagaagctactgggagatgagaggcaacgccctggagaagaagagcaactacgaggtgctggagaaggacgtgggcctgaagagattcttccccaagagcctgctggacagcgtgaaggccaagaccctgagaaagctgatccagcagaccttcagacagttcgccaacctgaacagagaggagagcatcctgaagttcttcgagatcctgagccccgtgtacagattcgacaaggagtgcttcaagtgcgccctgggcagcagctggatcatcagcgtggagctggccatcggccccgaggagggcatcagctacctgaccgacaagggctgcaaccccacccacctggccgacttcacccaggtgcagaccatccagtacagcaacagcgaggacaaggacagaaagggcatgctgcagctgaagatcgccggcgcccccgagcccctgaccgtgaccgcccccagcctgaccatcgccgagaacatggccgacctgatcgacggctactgcagactggtgaacggcaccagccagagcttcatcatcagaccccagaaggagggcgagagagccctgcccagcatccccaagctggccaacagcgagaagcagggcatgagaacccacgccgtgagcgtgagcgagaccgacgactacgccgagatcatcgacgaggaggacacctacaccatgcccagcaccagagactacgagatccagagagagagaatcgagctgggcagatgcatcggcgagggccagttcggcgacgtgcaccagggcatctacatgagccccgagaaccccgccctggccgtggccatcaagacctgcaagaactgcaccagcgacagcgtgagagagaagttcctgcaggaggccctgaccatgagacagttcgaccacccccacatcgtgaagctgatcggcgtgatcaccgagaaccccgtgtggatcatcatggagctgtgcaccctgggcgagctgagaagcttcctgcaggtgagaaagtacagcctggacctggccagcctgatcctgtacgcctaccagctgagcaccgccctggcctacctggagagcaagagattcgtgcacagagacatcgccgccagaaacgtgctggtgagcagcaacgactgcgtgaagctgggcgacttcggcctgagcagatacatggaggacagcacctactacaaggccagcaagggcaagctgcccatcaagtggatggcccccgagagcatcaacttcagaagattcaccagcgccagcgacgtgtggatgttcggcgtgtgcatgtgggagatcctgatgcacggcgtgaagcccttccagggcgtgaagaacaacgacgtgatcggcagaatcgagaacggcgagagactgcccatgccccccaactgcccccccaccctgtacagcctgatgaccaagtgctgggcctacgaccccagcagaagacccagattcaccgagctgaaggcccagctgagcaccatcctggaggaggagaaggcccagcaggaggagagaatgagaatggagagcagaagacaggccaccgtgagctgggacagcggcggcagcgacgaggccccccccaagcccagcagacccggctaccccagccccagaagcagcgagggcttctaccccagcccccagcacatggtgcagaccaaccactaccaggtgagcggctaccccggcagccacggcatcaccgccatggccggcagcatctaccccggccaggccagcctgctggaccagaccgacagctggaaccacagaccccaggagatcgccatgtggcagcccaacgtggaggacagcaccgtgctggacctgagaggcatcggccaggtgctgcccacccacctgatggaggagagactgatcagacagcagcaggagatggaggaggaccagagatggctggagaaggaggagagattcctgaagcccgacgtgagactgagcagaggcagcatcgacagagaggacggcagcctgcagggccccatcggcaaccagcacatctaccagcccgtgggcaagcccgaccccgccgccccccccaagaagccccccagacccggcgcccccggccacctgggcagcctggccagcctgagcagccccgccgacagctacaacgagggcgtgaagctgcagccccaggagatcagccccccccccaccgccaacctggacagaagcaacgacaaggtgtacgagaacgtgaccggcctggtgaaggccgtgatcgagatgagcagcaagatccagcccgccccccccgaggagtacgtgcccatggtgaaggaggtgggcctggccctgagaaccctgctggccaccgtggacgagaccatccccctgctgcccgccagcacccacagagagatcgagatggcccagaagctgctgaacagcgacctgggcgagctgatcaacaagatgaagctggcccagcagtacgtgatgaccagcctgcagcaggagtacaagaagcagatgctgaccgccgcccacgccctggccgtggacgccaagaacctgctggacgtgatcgaccaggccagactgaagatgctgggccagaccagaccccactag

SEQ ID NO: 270738 - DNA, 3291 bp, Artificial Sequence
  derived and/or modified sequence
atgcttctcgaactagcgggccaggaggctctgaaacctgccggcgctatctacatggaaaaatctggctgttctccattcccagtatgctgggccaaggagtacgatcgttacctcgcctcctcgaaaatcatggccgccgcttacctcgacccgaatttaaatcatacgccaaacagttccactaaaacccacctggggaccggcatggaacgctcgcccggagcgatggagcgtgtgttgaaggtgttccattatttcgagtcaaatagcgagccaactacctgggcctccattattcggcatggcgacgctacggacgtgaggggcatcattcagaaaatcgtggatagccacaaggtaaagcacgtcgcctgttatggattcaggctgagccatctaagatccgaggaggtgcattggcttcatgtcgacatgggggtgtcatccgtacgggagaaatatgaactggcgcacccccccgaggagtggaagtacgagctcagaatcagatatctacccaaaggctttctgaatcaattcaccgaggataagcccacacttaattttttctatcagcaggtcaaaagtgattatatgttggagatcgctgatcaggtggaccaagagatcgccctgaaacttggctgtttggaaattcgacgcagctactgggagatgcggggcaacgcactcgagaaaaagagcaactacgaagtgcttgaaaaggatgtcgggttgaaacggtttttcccaaaatcgctgctggattctgtcaaagctaaaactctgcgcaaactaatacagcagacgttcaggcagtttgccaacctgaatagggaagagagtatcctgaagttctttgaaatactgagcccagtttacaggttcgacaaggagtgcttcaaatgtgccctcgggagttcctggattatctctgtcgaactagcaattggtcctgaagagggcattagctatctcactgacaagggctgcaatcctacgcacctggcagacttcacacaggttcagacgatccaatactctaatagcgaagataaggatagaaagggcatgttgcagctaaagatcgcgggcgcaccagagcccctgactgtgacagctccttctctgaccatcgcagaaaatatggccgatctgattgacgggtattgtcggctggtcaatggcacgtcgcagtcttttattatcaggccacagaaagaaggggaaagggctctcccctcaattccgaaattagctaactccgagaagcagggcatgagaactcatgccgtctccgtgtcggagaccgacgattacgccgagatcattgatgaagaggacacctatactatgccatcaacgcgggactacgagattcagcgggagcgcattgaactgggtaggtgtattggtgagggtcagtttggagatgtacaccaaggtatctacatgtcgcccgaaaaccccgcgcttgccgtagctattaaaacctgcaagaattgtactagcgactcagtgcgggaaaaattcctgcaggaggccctaactatgcgtcagttcgatcacccccacattgtgaagctaattggtgtgattactgagaaccccgtgtggattattatggagctttgcactctgggagaattgaggtcctttcttcaagtgagaaagtattccctggacctggcgtctctgatactttatgcatatcagctctctacagctctggcataccttgagtctaaacgattcgttcatagggacatagccgcacgtaacgtgctcgtgtcttctaacgattgtgtcaaactgggtgatttcggattgagccgctacatggaagactctacctactacaaagcctccaagggtaagctgccaattaagtggatggcccctgaatccatcaatttccggcgctttacctctgccagcgacgtgtggatgttcggggtctgcatgtgggaaattcttatgcacggagtgaagccatttcaaggagtgaagaacaatgacgtaattgggaggatcgaaaatggcgaaaggctgcccatgccgccaaattgtccccctacgctgtactctctaatgacgaaatgctgggcctacgacccttcacggcgcccccgcttcaccgagctcaaggcccagttgagtactatcctcgaggaagagaaggcacagcaagaggaaaggatgcggatggaaagccgtcggcaggccactgttagctgggattccggcggctctgatgaagcccctcccaagccgagtcggcctggatatccatccccgcgttcatcggaaggcttttatcccagcccccagcatatggtccaaactaatcactatcaggtttccggttacccaggcagccacggaataactgctatggctggatccatctatccaggccaagcttctctgttggatcaaactgacagctggaaccatcgcccacaggaaatcgcaatgtggcagcctaatgttgaagactccactgttctagacctccgaggcatcgggcaagtgctgcccactcaccttatggaagaaagattaataaggcaacagcaggagatggaggaggatcagagatggttggagaaagaagaacggtttctcaaacccgacgtacggttgagccgcggtagtatcgacagggaggatggcagcttacaggggcctatcggaaatcagcacatttatcagccagtgggcaaacccgatcccgccgcaccaccaaagaaacctcctcgccctggcgcacctggccacctgggaagcctggctagtctgtcaagcccagcggattcttacaatgaaggcgtcaagctgcagcctcaggaaattagccccccccctacagctaacctggatagatcaaatgacaaggtctacgaaaacgtcacaggtcttgtgaaggctgtaatagaaatgtctagcaagatccagcctgctcctccagaggagtacgtgcccatggtgaaggaagtaggactggcccttcgcaccctgctcgctacagttgatgaaactattcctctgcttccagcatctacacaccgcgagatcgagatggcacagaaactgttaaactcagatctaggggagttgataaataagatgaaactggcccagcagtacgttatgactagtctgcagcaggagtacaaaaaacagatgctaaccgcagcacacgccttagccgtggacgccaaaaatctcctggacgtcatagatcaggcgcgtctaaagatgctgggccaaactcggcctcactag

SEQ ID NO: 270739 - DNA, 3291 bp, Artificial Sequence
  derived and/or modified sequence
atgcttctcgagcttgccggtcaggaagccctaaagcccgctggggccatctatatggaaaaatcgggctgctcaccatttcccgtatgctgggcgaaagaatatgacagataccttgcgtcctcgaagattatggccgcagcatatctggatcccaatctgaatcatactcctaacagttctaccaaaacacatctaggcaccgggatggagcgtagtcctggagcaatggagcgggtcctcaaggtgttccattacttcgaaagtaactccgagcccaccacatgggcctcgatcattcgccatggcgacgctactgatgtgcgtggcatcatacagaagattgtggattcacacaaggtaaagcacgtggcttgctatggctttcggctgtcacatttaagatccgaggaggttcattggctgcacgtggatatgggcgtctcttcagtgagggagaagtacgagctggctcatcccccggaggagtggaaatacgagctaaggatccggtatcttcctaaggggttcttaaaccaattcactgaggacaagccaacgctgaattttttttaccagcaggtcaaaagtgattatatgctcgaaatcgcagaccaggtggaccaagaaattgcccttaagctgggatgccttgaaatccggcgctcttactgggaaatgaggggtaacgccctggagaagaagtctaactatgaggtgctggagaaagatgtgggcttaaaacgtttcttccccaagtccctcttggactcagttaaggcaaaaacactcagaaagctgatacagcagacgttcagacagtttgctaacctcaacagggaggagtccattctcaagttttttgagatattgtcacctgtgtacaggttcgacaaggaatgctttaaatgtgctcttggaagttcttggatcatctctgtcgagctggccatcggcccagaggaaggaatctcctatcttactgacaaggggtgtaatcccacccatctggcagacttcacacaagtccagaccatccagtactcaaactctgaagacaaagaccgtaagggcatgctccagctgaagatagcaggggctcctgaacctctgactgtaacggcgccttcccttaccatagctgagaacatggcagatctgatcgacggctattgtcgcctcgtcaacggtacctcacagagttttattatccgcccacagaaagaaggagaacgtgccttgcctagtataccaaaactggccaactcagaaaagcaggggatgcggacccatgccgtctcagtcagcgagactgacgactacgcagagattattgacgaagaagacacttatacaatgccttcaacaagggattatgagattcagcgagaaagaattgagctgggtcggtgcatcggcgaaggccagtttggcgacgtccatcagggcatctatatgtcccctgagaaccccgccctcgccgtggccatcaagacttgtaagaactgcacaagcgatagcgtgagggagaagttcctacaagaggcactgacaatgcggcagttcgaccaccctcatatcgtgaagctgatcggcgtgataaccgagaaccctgtctggatcataatggagctgtgcacgctcggtgagctccgcagctttcttcaggtgaggaaatacagtctcgatttagcaagcctgatcttatatgcctatcagctgagcaccgccctcgcttatcttgaatccaagcgtttcgttcaccgggacatcgctgcccggaatgtactggtgtcaagcaatgactgcgtgaagctaggagattttggcctcagtaggtatatggaggactcaacctattacaaagctagcaagggtaaactgcctattaagtggatggcacctgagagcatcaacttccgtcgcttcacttccgcttccgacgtatggatgtttggcgtatgtatgtgggagattctgatgcatggcgtgaagcccttccaaggcgtgaaaaacaacgatgtgattggcagaatagaaaatggagaaagactccccatgccgccaaattgccccccaaccctgtattccctaatgactaagtgctgggcctatgacccatcacgccggccacgcttcacggagctgaaggcacagttgtcgacaattctggaagaggagaaagcgcaacaagaggagcggatgcgcatggaaagccgacgtcaagcaaccgtctcatgggattccggcggatccgacgaggctccacccaagcctagccgtcccgggtacccatcaccacggtcttctgaagggttctacccgagccctcagcacatggtgcaaaccaaccattaccaagtgtcggggtaccccggctcacacgggatcacagccatggctgggtccatatacccaggacaggcctccctgctggatcaaaccgactcctggaaccatcgtccgcaggagattgcaatgtggcagccgaacgtggaagatagtactgtgctggatttgagaggcattggacaggtgctgcctacacacctcatggaggagaggctaattagacaacagcaggagatggaagaggaccagaggtggctggaaaaagaggagaggttcctgaagcctgatgtgcgcctgtctcgaggatccattgatcgtgaggatggttcactccagggtccgataggaaatcagcatatttatcagcccgttggtaagcccgaccccgctgcccctccaaagaaaccccccaggccaggagcccccgggcacctgggctcgcttgcatctttgtcctctccagccgattcttataatgaaggagttaaactacagcctcaggagatttcaccacctcctacggccaacctggatcgctccaacgacaaggtatacgagaacgtgacagggctcgtcaaggcggtgatcgagatgtcgtcaaaaatccaacctgcaccacccgaagagtacgttccgatggtgaaagaggtgggactcgcactgagaactctgttggccacagtggacgagacaatcccactactgccagcttctacccatagagagatcgaaatggcacaaaaactgctgaatagcgacttgggcgagctgataaataaaatgaagctcgcccagcagtacgtcatgactagcctccaacaagaatataaaaagcaaatgctgaccgctgcccacgctctggcagtggacgccaagaacctgctagacgtgattgaccaagccagacttaagatgctgggccagacaaggccgcactag

SEQ ID NO: 270740 - DNA, 3291 bp, Artificial Sequence
  derived and/or modified sequence
atgctgctggagctggccggccaggaggccctgaagccagctggggccatctacatggagaagagcggctgcagccccttccctgtgtgctgggccaaggagtatgaccgctacctggccagcagcaagatcatggctgctgcctacctggaccccaacctgaaccacacccccaacagcagcaccaagacccacctgggcaccggcatggagaggagccctggggccatggagcgggtgctgaaggtgttccactactttgagagcaacagcgagcccaccacctgggccagcatcatcagacatggagatgccacagatgtgcggggcatcatccagaagatcgtggacagccacaaggtgaagcacgtggcctgctacggcttccggctgagccacctgcggtctgaggaggtgcactggctgcacgtggacatgggcgtgtcctctgtgcgggagaagtatgagctggcccaccccccagaggagtggaagtatgagctgcgcatccgctacctgcccaagggcttcctgaaccagttcacagaggacaagcccaccctgaacttcttctaccagcaggtgaagagtgactacatgctggagattgctgaccaggtggaccaggagatcgccctgaagctgggctgcctggagatcagaagaagctactgggagatgagaggaaatgccctggagaagaagagcaactatgaggtgctggagaaggatgtgggcctgaagcgcttcttccccaagagcctgctggacagcgtgaaggccaagaccctgaggaagctgatccagcagaccttccggcagtttgccaacctgaaccgggaggagagcatcctgaagttctttgagatcctgagccctgtgtacagatttgacaaggagtgcttcaagtgtgccctgggcagctcctggatcatctctgtggagctggccatcggccctgaggagggcatctcctacctgacagacaagggctgcaaccccacccacctggccgacttcacccaggtgcagaccatccagtacagcaacagcgaggacaaggacaggaagggcatgctgcagctgaagattgctggggcccctgagcccctgactgtgacagcccccagcctgaccatcgccgagaacatggctgacctgattgatggctactgccgcctggtgaatggcaccagccagagcttcatcatccggccccagaaggagggggagcgggccctgcccagcatccccaagctggccaacagcgagaagcagggcatgaggacccatgctgtgtctgtgtctgaaacagatgattatgcagagatcattgatgaggaggacacctacaccatgcccagcacccgggactatgagatccagcgggagcgcatcgagctgggccgctgcatcggggagggccagtttggagatgtgcaccagggcatctacatgagcccagaaaatcctgccctggccgtggccatcaagacctgcaagaactgcaccagtgacagcgtgcgggagaagttcctgcaggaggccctgaccatgaggcagtttgaccacccccacatcgtgaagctgattggagtcatcacagagaaccctgtgtggatcatcatggagctgtgcaccctgggggagctgcgctccttcctgcaggtgaggaagtacagcctggacctggccagcctcatcctgtatgcctaccagctgagcacagccctggcctacctggagagcaagagatttgtgcaccgggacattgctgccagaaatgtgctggtgagcagcaatgactgtgtgaagctgggggactttggcctgagccgctacatggaggacagcacctactacaaggccagcaagggcaagctgcccatcaagtggatggcccctgagagcatcaacttccgccgcttcaccagcgccagtgatgtgtggatgtttggagtgtgcatgtgggagatcctgatgcacggcgtgaagcccttccagggcgtgaagaacaatgatgtgattggaagaattgaaaatggagagcggctgcccatgccacccaactgcccccccaccctgtacagcctgatgaccaagtgctgggcctatgaccccagcagaagaccccgcttcacagagctgaaggcccagctgagcaccatcctggaggaggagaaggcccagcaggaggagaggatgaggatggagagccggcggcaggccaccgtgtcctgggacagcggcggcagtgatgaggccccacccaagcccagccggcccggctaccccagccccaggagcagcgagggcttctaccccagcccccagcacatggtgcagaccaaccactaccaggtgtctggctacccaggcagccacggcatcacagccatggccggcagcatctacccaggccaggccagcctgctggaccagacagacagctggaaccaccggccccaggagatcgccatgtggcagcccaacgtggaggacagcacagtgctggacctgcggggcatcggccaggtgctgcccacccacctgatggaggagcggctcatccggcagcagcaggagatggaggaggaccagcgctggctggagaaggaggagcgcttcctgaagccagatgtgcggctgagccggggcagcattgacagagaagatggcagcctgcagggccccatcggcaaccagcacatctaccagcctgtgggcaagccagaccctgctgccccacccaagaagccacccaggcctggggcccctggccacctgggcagcctggccagcctgagcagccctgctgacagctacaatgaaggagtgaagctgcagccccaggagatcagccccccacccacagccaacctggacaggagcaatgacaaggtgtatgaaaatgtgacaggcctggtgaaggccgtcatcgagatgagcagcaagatccagcctgcccctcctgaggagtatgtgcccatggtgaaggaggtgggcctggccctgcggaccctgctggccaccgtggatgagaccatccccctgctgcctgccagcacccaccgggagattgagatggcccagaagctgctgaacagcgacctgggggagctgatcaacaagatgaagctggcccagcagtatgtgatgaccagcctgcagcaggagtacaagaagcagatgctgacagctgcccacgccctggccgtggatgccaagaacctgctggatgtgattgaccaggcccggctgaagatgctgggccagacccggccccactag

SEQ ID NO: 270741 - DNA, 3291 bp, Artificial Sequence
  derived and/or modified sequence
atgctgctggagctggccggccaggaggccctgaagcccgccggcgctatctacatggaaaaaagcggttgctcaccgtttcctgtctgttgggccaaagaatacgataggtacctggcgtccagcaagatcatggccgcagcctacctggatcctaacttgaaccacacgccaaatagctctacaaagacacacctgggtactggcatggagagaagccctggcgcaatggagagagtgctaaaggtatttcactatttcgaatccaactccgagcccactacatgggcctcaattatcaggcacggcgacgcaaccgacgtgagagggatcatccagaagattgtggacagccacaaggttaagcatgtggcttgctatggctttaggctctcgcacttacgatccgaggaagtgcattggctgcacgtggacatgggtgtatcctcagtgcgtgagaagtacgaactcgcccatccccctgaggagtggaagtacgaactgagaattagatatttgcctaaggggttcttgaaccagtttaccgaggacaaacccacactcaacttcttttatcaacaggttaagtctgactacatgctggaaatcgccgaccaagtcgaccaggagatcgccctgaaactgggatgcttggagatcaggcggtcatattgggaaatgcggggcaatgctctcgagaagaagagcaattacgaggttctggagaaagacgttggattgaagcgattttttccgaaatccctgctcgacagcgtcaaagctaagactctccgcaaactgatccaacagacattcagacagtttgccaatctgaatcgggaggagtctatactgaaattttttgagatcctgtctccggtctaccgcttcgataaagaatgctttaaatgtgcccttggctcctcatggataatctctgtcgaattggccattgggccagaagaaggaattagctatcttacagataagggctgtaatcccacacatctcgcagatttcacacaggtgcagaccattcaatactcgaactctgaagataaggacaggaaaggcatgttgcagcttaagattgcgggggcaccagagcccctgaccgtgaccgcgccatccctgactatcgccgagaatatggctgacctaatcgacggctattgcaggctggtaaatggcacctcacagtctttcatcatccgaccgcaaaaggaaggcgagagggccctccctagcatccccaagctcgcaaacagcgaaaaacaaggcatgcggacccacgccgtgtcagtttctgagactgatgattacgccgagatcatcgatgaggaagatacatacaccatgccctccacgagggattacgaaattcagagggagagaattgagttgggacggtgtatcggcgagggacagttcggggacgttcaccaaggcatctacatgtctcccgagaacccagccctagctgttgccataaagacctgcaagaattgtaccagcgattcggtcagggagaagtttttgcaggaggccctgaccatgagacagtttgatcacccacacatcgtaaagctaatcggggtgatcactgagaatccggtctggatcatcatggagctctgcactttaggggaactgagatcgttcctccaggtcagaaagtactccttagacctcgcctccttaatcctatacgcataccagctctctacagcactggcgtacctggaaagcaagagattcgtgcacagggacatcgctgcaaggaatgtccttgtttccagcaatgattgcgtaaagttgggcgattttggattgtctagatacatggaggactctacctattataaagccagcaagggcaagctccccattaaatggatggccccggaaagtatcaattttcggcggttcacaagcgcctcagatgtgtggatgtttggggtctgtatgtgggaaatactaatgcacggggttaaaccattccagggagtgaaaaataacgatgtgatagggagaatcgagaacggtgaaagattgcctatgcccccaaactgtcccccgacactttactccctgatgacaaaatgttgggcctacgacccttcccggcgtccccggttcaccgagttaaaagctcagctttcaacgatcttggaggaggaaaaggcccagcaggaggagcgcatgaggatggaatcaaggcggcaagctacagttagttgggattctggaggatctgatgaggccccacccaagccttctcggcctggctacccttcacctcggtctagtgagggcttttatccatcaccgcagcacatggtgcagactaaccattatcaggtgtcaggctaccccggaagccatggcattaccgctatggccggtagtatctatccaggccaggcatcactgcttgaccaaactgatagttggaatcatagacctcaggagatcgcaatgtggcagcccaatgtggaagactctaccgttctggacctgcgcggcattgggcaggtcctgcctacacatcttatggaagagagactcatccgccagcagcaggaaatggaggaagaccagcgctggttggagaaggaagagcgatttctcaagcctgatgtacgactcagcagagggtccatcgacagggaagacggcagtttgcagggtcccatcggcaatcagcacatttatcaacctgtcggcaaacccgacccagcagcaccaccaaaaaagccacccaggccgggtgcacccggacatctggggagcctggcatcactttcatccccagccgatagctataatgagggcgtgaaactgcagcctcaggagatctcccctccccctactgccaaccttgatcgctctaatgacaaagtgtacgaaaacgttacagggttggtcaaggccgtcatcgaaatgtcctccaaaatacaaccagctccgccggaggagtacgtccctatggtcaaagaagtggggctggcccttcgaactctcctggccactgtcgacgagaccatcccgctgttacctgccagtacccacagagaaatcgagatggcgcagaagttactcaacagcgatctgggagaacttatcaataagatgaagctggcgcaacaatacgttatgaccagcctgcagcaagaatacaagaagcagatgctgactgctgcgcacgctctggccgttgacgccaagaaccttctggatgtcatcgaccaagcccgcctgaaaatgttaggtcaaacccgcccccattag

SEQ ID NO: 270742 - DNA, 3291 bp, Artificial Sequence
  derived and/or modified sequence
atgctgctggagctggccggccaggaggccctgaagcccgccggcgctatttatatggagaaatccggatgctctcctttccccgtctgctgggctaaggaatacgataggtaccttgcgtctagtaagataatggccgcagcatacctggacccgaacctcaatcacaccccaaactcctcaactaagactcatctgggcactggtatggagcggagtcccggcgctatggaaagggtgctcaaggtgttccactatttcgaaagtaatagtgagcctacaacctgggcgtctataatacgtcacggagacgccacagacgttagaggcatcatccagaaaattgtggatagtcacaaggtaaaacacgtcgcctgctacggatttcggctaagccacctaaggagcgaggaggtgcactggcttcatgtggacatgggcgtgagttccgtgagggaaaagtatgagcttgctcaccccccggaggaatggaaatatgagttgaggatcaggtatcttcctaaggggttcctgaatcaattcactgaagacaagccaacactgaacttcttctaccagcaggtgaagtcggattacatgctggaaatagcagatcaggtggaccaggaaattgcactgaagctgggatgtctcgagattcggagaagttactgggagatgaggggcaatgctctggaaaagaagtccaattatgaggtcctggagaaggatgtgggtttgaaacgattcttcccaaaaagcctgttggatagcgtcaaagctaagacgctgcggaaattgatccagcaaactttcaggcagtttgctaacctcaaccgggaggagagtatcttaaaatttttcgagatcctgtcgccagtctaccgttttgataaggagtgctttaagtgtgcactgggatcctcctggattatcagtgttgagctggcaatcggccccgaagagggcatatcatacctcacagacaagggatgtaaccccacccatctggccgacttcacacaagtgcagaccatacagtattcgaattccgaggataaagaccgaaagggaatgctgcagttgaagatcgccggcgctccggagccattgactgtgacggcaccgagcctgaccattgccgaaaacatggctgaccttattgatgggtattgtagactagtcaacgggacttctcagtcctttatcattagaccgcagaaagagggcgaaagagccctgcccagcattcctaagctcgctaattccgaaaaacaggggatgcgcacccatgctgtgtcagtttcagagaccgacgattacgccgagatcattgatgaggaggacacatacaccatgccgagcacacgagattatgagatacagcgcgaacgaattgagctcggcaggtgcatcggagaaggacagtttggtgacgtgcaccagggtatctacatgtctccagagaaccccgccctcgcagtcgcaataaagacgtgtaagaactgcacgagtgactccgtccgtgagaagtttcttcaagaagccttgacaatgcggcagtttgaccatccgcacatagtaaaacttatcggcgtaatcacagagaatccggtctggatcatcatggaactctgtacccttggcgagctgcggagtttcctgcaggtgcgcaaatactccctggatctcgcctcattaatactttatgcctaccaactgagtaccgccctcgcatatctcgagagtaaacggttcgttcatagagatattgctgctaggaacgtcctggtgagcagcaacgactgtgtgaagctgggcgatttcggactgtctaggtatatggaagattctacgtactataaagcttccaaaggtaagttgccaatcaaatggatggccccagagtcaatcaatttccggcggtttacaagcgctagcgacgtctggatgttcggcgtgtgcatgtgggaaatcctgatgcacggcgtaaagcctttccagggtgtgaagaacaacgacgtaattggcaggatagagaacggagaaagattgcccatgccccccaactgtccacccaccttatactccctcatgactaagtgctgggcctatgatccctccagacggcctaggtttacagaattaaaagcacagctgagtacaatcctggaggaagaaaaggcacaacaggaagaacggatgcgcatggagtctagacgccaggcaaccgtgtcctgggactccggagggtccgacgaggcacctccgaaaccttccaggcctggctatccatcccctcggtcatccgaggggttctacccttccccccagcatatggtccagactaatcattaccaggtgtctggatatccgggttcccatggaatcacagcgatggctggttctatctatcccggtcaggcttcactactcgaccagaccgattcttggaaccacagacctcaggagattgccatgtggcaaccgaatgtggaagatagtactgtcctcgatctccgaggcatcgggcaggtcttgccaactcatctcatggaggaaaggttgatccggcagcagcaggaaatggaagaggaccaaagatggctggagaaggaagagcggtttctgaaaccagacgttcgcctgagcagaggatcaattgaccgcgaggacgggtcactgcagggtcccatcgggaatcagcacatttatcaacccgtgggtaaaccagacccggcagctcctcccaaaaaacctccccgtcctggcgctccaggacacctgggtagtctggcaagcttgtcctccccagccgactcctataacgaaggggtcaagctgcagccccaggaaatttccccacccccaactgccaatctagacaggtcaaatgacaaggtttatgagaatgttacaggactggtcaaggctgtcatcgagatgtcatctaaaatacagcccgcaccgccggaggaatatgtacctatggttaaagaggttggactggcgttacgaacacttctcgcaacagtggatgagactattccattattgcctgctagcacacatcgcgagatcgaaatggcgcagaagctattgaactcagacctaggggagttgattaacaagatgaaacttgcacaacaatacgtgatgacctcccttcagcaggagtacaagaagcagatgttaacggctgcgcacgctttggccgtggacgccaagaacctcttggacgtgatcgaccaggccaggctgaaaatgctgggacagactcgcccacattag

SEQ ID NO: 270743 - DNA, 3291 bp, Artificial Sequence
  derived and/or modified sequence
atgctgctggagctagcaggccaggaagcccttaagcctgctggggctatatatatggagaaatctgggtgttcgcctttcccggtatgttgggccaaagagtatgaccgctacctggcctcatctaaaattatggccgcagcttacctggatccaaacctgaaccatacgccaaacagcagcacgaagacacatctgggcaccggcatggaaaggtccccaggggctatggagagagtgctgaaagtgtttcattacttcgaatctaatagcgagcctaccacctgggcctccattattaggcatggggatgcaaccgacgtgcgaggcatcatccagaagatcgtggactctcataaggtgaagcatgtggcatgctacggattcaggctttcacacctccggagtgaggaggttcactggttacacgtagatatgggagtttcctctgtgcgagaaaaatatgagctggcccacccgccagaggagtggaaatatgagctcaggatccggtacctgcctaagggctttctgaatcaattcacggaggacaagccgactctgaattttttttaccaacaggtcaagagcgactatatgctggaaatcgctgatcaggtggaccaggagattgccctgaagctaggttgtctcgagatacgcaggtcctattgggaaatgagaggaaatgccctggagaagaaatctaactatgaggtcttggaaaaagacgttgggctgaaaagattcttccctaagagccttctggattcagtgaaggccaaaacactgcgcaagttgattcagcagacatttcgtcagttcgctaacctgaaccgcgaagaatcaattctgaagttctttgaaattttatccccggtgtacaggtttgacaaagagtgttttaaatgtgcgctggggagcagctggatcattagcgttgaactcgcaatcggtccagaggagggcatcagctatttgacagataaagggtgtaaccccactcatctggctgatttcacacaggttcagaccatccagtacagtaacagtgaagacaaagacagaaaaggcatgcttcagctgaagattgccggagcccctgagccactcacagtgaccgccccttctctgaccatcgccgagaatatggccgacctgatcgatggatattgtagactggttaacgggacatcgcagagctttattattagaccacagaaggaaggagaacgcgctctccccagcatcccaaagctggccaatagtgaaaagcagggtatgagaacccacgctgtgtctgtctcagagacggatgattacgctgaaatcattgacgaggaggacacatacactatgccctctacgcgtgattacgaaatccaacgggagcggatcgaactgggacgctgcattggagagggtcaatttggcgatgttcatcaaggcatctatatgtccccagagaatcccgctctggctgtagccatcaagacatgcaaaaactgtacctccgatagtgtccgggagaagtttctgcaggaggcactgactatgagacagtttgatcatcctcacatcgtgaagctgattggcgtgattacagagaatcccgtatggataattatggaactttgcaccctaggggagttgaggtcgtttctacaggtaagaaagtactccctggatttagcctccttgattctctatgcatatcagctatccactgccttagcctatctagagtctaagaggtttgtgcatcgggacatagctgccagaaatgttctagttagcagcaatgattgtgtgaagttgggcgattttggattgagtcggtatatggaagactctacttactacaaagccagcaagggaaagctgcccattaagtggatggccccagaatcaattaatttcaggagattcaccagcgccagtgacgtgtggatgttcggcgtttgcatgtgggagatactgatgcacggcgttaagcctttccagggcgtgaagaataatgacgttatcgggagaatcgagaatggggaacggctccccatgcctcccaactgccctccaactctgtacagtcttatgacaaaatgctgggcctacgatcctagcagacgacctaggtttactgaattaaaggcccagctgtcaaccattctggaggaggagaaggcccaacaagaagagcgcatgagaatggagagtcgtcggcaggcgactgtctcatgggactcgggcggttctgacgaggccccacccaagcccagtcgccctggatatccgagcccaagatcctccgaagggttttatccatccccccagcacatggtgcagacaaatcattatcaggtctccggttatcccggatcccatggaatcaccgctatggcaggatcaatatatcctggacaagcatcattgcttgatcaaacagacagctggaatcatcggccacaggagattgcaatgtggcagccgaacgtggaggatagcactgtgctggatctgaggggcatcggccaggtactcccaacacatctgatggaggagcgtctgattcgacagcagcaggagatggaagaggaccagcggtggctggagaaggaagagaggttcttgaagcccgacgtcaggttgtcccggggatccattgatcgcgaagatggcagcctgcaagggccaatcggtaaccagcatatctatcagcccgtcggcaaacctgatcctgccgcaccccctaaaaagcctcctagaccgggagcgccaggtcatctggggtctctcgcctctctgtcatcaccagccgactcttacaatgagggtgtgaaactccaaccgcaggagatatccccaccacctacagccaaccttgaccgtagcaacgataaagtctatgagaatgtgaccgggctggtgaaggcagtcatcgaaatgagctccaagattcagcccgctccccctgaggaatatgtgcccatggtgaaggaagtagggcttgcgttgcgaactctccttgctactgtggacgaaactattcccctgctgcctgcgtctacccaccgggaaatagagatggcccagaaacttttgaactcagacttgggtgagctaatcaacaaaatgaagcttgcacagcaatatgttatgacatccctacagcaggaatacaaaaagcaaatgctgacggctgcacatgccctggccgtggatgcgaagaacctgcttgatgtgattgaccaggccaggctgaagatgttggggcagacaagaccacattag

SEQ ID NO: 270744 - DNA, 3291 bp, Artificial Sequence
  derived and/or modified sequence
atgctgcttgaattagccggtcaagaagctttaaagcccgctggggctatttatatggagaagtccggatgtagcccttttcctgtgtgctgggccaaagaatacgataggtacctggcatcttcaaaaatcatggccgcagcttatctggaccctaacctgaatcatactccaaactcgagcaccaaaacccacctgggcaccgggatggagcgatccccaggagccatggaacgggtcttgaaagtgttccactatttcgaatccaattccgagcccaccacctgggccagcatcattcgccatggcgatgccaccgacgtccgagggatcattcagaaaatcgtggatagccataaagtcaagcatgtcgcctgctacggattcaggttatcccacctgcggtctgaggaggtacattggttacatgtcgatatgggagtatccagcgtacgagagaagtatgagctggcacacccccctgaagagtggaaatacgaactgcgcatcagatatctgccaaagggattcctgaaccaattcaccgaagataaaccgacactaaattttttttaccaacaagtgaaatctgactatatgctggagatcgctgatcaagtggaccaagaaatcgctctgaagttgggttgcctcgaaattcgaaggtcgtattgggagatgcgcggaaacgccctggagaagaaaagcaattacgaagttcttgaaaaggacgttggcctgaagcgctttttccctaaaagcctgctcgactccgtgaaggcaaagactttgcgcaagttaattcaacagacttttcgccagttcgctaacctaaacagggaagagagcattctgaagttttttgagatactgtctccggtgtaccgctttgataaggaatgtttcaaatgcgcgctcggctcaagctggataatctccgtggagcttgcaatcgggcctgaggaaggcatttcttacctgactgacaaaggatgcaaccccactcacttagcagattttactcaggtgcaaactatccagtactctaatagcgaagataaagatcgcaagggcatgctgcaattaaagattgccggagccccagagccactcaccgtcacagctccatcactgacaatcgcggaaaatatggccgacctgatcgacggatactgccgtctggtgaacggtactagccaatcttttatcatccgtccacaaaaggaaggagaaagagctttgcccagtatacccaaactggctaatagcgagaaacaagggatgcggacccatgcggttagcgtgtccgaaaccgatgattacgctgagatcatcgatgaggaggacacctacaccatgccatcgacccgggattatgagattcagagagagagaatcgaactgggcagatgcattggagagggtcagttcggagatgtgcaccagggtatttatatgagcccagagaaccctgctctggccgttgctataaagacatgcaagaattgcacttctgactccgtccgcgaaaagttcctccaagaggccctcactatgcgacagtttgatcacccccatatagtaaaattaatcggggtgattacagaaaatccggtctggatcatcatggaactatgtaccctcggtgagcttcgatccttcttgcaagtacgcaaatacagcctagatctggcctcactgatcctttatgcttaccagctgagtaccgctttggcctatcttgagagcaaacgattcgtacaccgggacattgccgctcggaatgtcctggtgagttccaatgactgcgtcaaactgggtgactttgggctgagtaggtacatggaagactccacatactataaggcatccaaaggcaagctgccaattaagtggatggcccctgagagcatcaattttcggagattcacctctgcctctgatgtgtggatgtttggagtgtgtatgtgggagatcctgatgcacggagtgaagcccttccaaggggtgaaaaacaacgatgtgatagggagaatcgaaaacggtgagcgactgcctatgcctcccaactgcccgccaaccctgtatagcctcatgaccaaatgttgggcctacgacccatcccgcagaccacggttcacagagctgaaggcccaattaagcactattctggaagaggagaaagctcaacaggaggagcgcatgcgaatggagagccgaaggcaagcaacagtctcatgggacagcggtgggtccgacgaggctcccccaaagccttctcgaccagggtaccctagccctcgatcttcggaaggtttctacccgagtcctcaacacatggtgcaaacgaaccattaccaggtttcgggttatcccggaagccacgggattaccgcaatggccggttctatctaccccggacaagcatctctgcttgaccaaacggattcatggaatcatcggcctcaggagatcgctatgtggcagcctaatgtagaggactccactgtcctagatctgcgaggcatcggacaggttctgcctacccacctgatggaagaaagactgatccggcagcagcaggaaatggaagaagatcagagatggttggaaaaggaggagaggttcctgaaacctgatgtccgcctctctagagggtcaatcgacagagaagacgggtcacttcaagggccaatcgggaaccagcacatctaccagccagtcggcaagcctgatccagccgctccgcctaaaaagcctccacgccctggcgcaccaggtcatctgggctccctggccagtctcagctcccctgcggactcctacaacgaaggcgtgaagctgcagccacaagagatctctccacccccaacggcaaacctcgacaggagcaacgataaggtgtatgagaatgtcacagggctcgtgaaggcggttatcgagatgagtagcaaaattcaacctgctccacctgaagaatatgttcctatggtcaaagaggtcggactagcgttgcgcacacttctcgccacggtagatgagacaataccgctcctgcccgcaagtacacatagggagatcgaaatggcccaaaagctgctgaatagtgatctaggggaactgattaacaagatgaagcttgcccaacagtatgtgatgacctcgctgcagcaggagtacaagaagcagatgctcacagctgctcacgcactggccgttgacgctaaaaacctactcgacgtcatagatcaggccagactgaaaatgcttggccaaacgcggcctcactag

SEQ ID NO: 270745 - DNA, 4661 bp, Artificial Sequence
  derived and/or modified sequence
taggaacacagagccatggggtcacattactaagctggtttcattctgttcagtagcttgatctagccaggatggtctgtgtttcagattgcggaagcatgagaagattctgtaactgagaggcattcttcaagctgctggaaaatattacagaaggaacaccttccaaattttgcttcaagctctgaaaaaaggagcacacaggggaaccttagtcttgcttgtggatcgaagcaaatactatcacagcgaggaactgggactttgtgtgcagactcctggcttgatctttataggattgggtgtatgttgttggaactggcaggccaagaggccctgaaaccagcaggtgccatctatatggagaaaagcggatgtagtccatttccagtgtgttgggctaaagaatatgacagatacctagcatctagcaaaataatggcagctgcttaccttgaccccaacttgaatcacacaccaaattcgagtactaagactcacctgggtactggtatggaacgttctcctggtgcaatggagcgagtattaaaggtctttcattattttgaaagcaatagtgagccaaccacctgggccagtattatcaggcatggagatgctactgatgtcaggggcatcattcagaagatagtggacagtcacaaagtaaagcatgtggcctgctatggattccgcctcagtcacctgcggtcagaggaggttcactggcttcacgtggatatgggcgtctccagtgtgagggagaagtatgagcttgctcacccaccagaggagtggaaatatgaattgagaattcgttatttgccaaaaggatttctaaaccagtttactgaagataagccaactttgaatttcttctatcaacaggtgaagagcgattatatgttagagatagctgatcaagtggaccaggaaattgctttgaagttgggttgtctagaaatacggcgatcatactgggagatgcggggcaatgcactagaaaagaagtctaactatgaagtattagaaaaagatgttggtttaaagcgattttttcctaagagtttactggattctgtcaaggccaaaacactaagaaaactgatccaacaaacatttagacaatttgccaaccttaatagagaagaaagtattctgaaattctttgagatcctgtctccagtctacagatttgataaggaatgcttcaagtgtgctcttggttcaagctggattatttcagtggaactggcaatcggcccagaagaaggaatcagttacctaacggacaagggctgcaatcccacacatcttgctgacttcactcaagtgcaaaccattcagtattcaaacagtgaagacaaggacagaaaaggaatgctacaactaaaaatagcaggtgcacccgagcctctgacagtgacggcaccatccctaaccattgcggagaatatggctgacctaatagatgggtactgccggctggtgaatggaacctcgcagtcatttatcatcagacctcagaaagaaggtgaacgggctttgccatcaataccaaagttggccaacagcgaaaagcaaggcatgcggacacacgccgtctctgtgtcagaaacagatgattatgctgagattatagatgaagaagatacttacaccatgccctcaaccagggattatgagattcaaagagaaagaatagaacttggacgatgtattggagaaggccaatttggagatgtacatcaaggcatttatatgagtccagagaatccagctttggcggttgcaattaaaacatgtaaaaactgtacttcggacagcgtgagagagaaatttcttcaagaagccttaacaatgcgtcagtttgaccatcctcatattgtgaagctgattggagtcatcacagagaatcctgtctggataatcatggagctgtgcacacttggagagctgaggtcatttttgcaagtaaggaaatacagtttggatctagcatctttgatcctgtatgcctatcagcttagtacagctcttgcatatctagagagcaaaagatttgtacacagggacattgctgctcggaatgttctggtgtcctcaaatgattgtgtaaaattaggagactttggattatcccgatatatggaagatagtacttactacaaagcttccaaaggaaaattgcctattaaatggatggctccagagtcaatcaattttcgacgttttacctcagctagtgacgtatggatgtttggtgtgtgtatgtgggagatactgatgcatggtgtgaagccttttcaaggagtgaagaacaatgatgtaatcggtcgaattgaaaatggggaaagattaccaatgcctccaaattgtcctcctaccctctacagccttatgacgaaatgctgggcctatgaccccagcaggcggcccaggtttactgaacttaaagctcagctcagcacaatcctggaggaagagaaggctcagcaagaagagcgcatgaggatggagtccagaagacaggccacagtgtcctgggactccggagggtctgatgaagcaccgcccaagcccagcagaccgggttatcccagtccgaggtccagcgaaggattttatcccagcccacagcacatggtacaaaccaatcattaccaggtttctggctaccctggttcacatggaatcacagccatggctggcagcatctatccaggtcaggcatctcttttggaccaaacagattcatggaatcatagacctcaggagatagcaatgtggcagcccaatgtggaggactctacagtattggacctgcgagggattgggcaagtgttgccaacccatctgatggaagagcgtctaatccgacagcaacaggaaatggaagaagatcagcgctggctggaaaaagaggaaagatttctgaaacctgatgtgagactctctcgaggcagtattgacagggaggatggaagtcttcagggtccgattggaaaccaacatatatatcagcctgtgggtaaaccagatcctgcagctccaccaaagaaaccgcctcgccctggagctcccggtcatctgggaagccttgccagcctcagcagccctgctgacagctacaacgagggtgtcaagcttcagccccaggaaatcagcccccctcctactgccaacctggaccggtcgaatgataaggtgtacgagaatgtgacgggcctggtgaaagctgtcatcgagatgtccagtaaaatccagccagccccaccagaggagtatgtccctatggtgaaggaagtcggcttggccctgaggacattattggccactgtggatgagaccattcccctcctaccagccagcacccaccgagagattgagatggcacagaagctattgaactctgacctgggtgagctcatcaacaagatgaaactggcccagcagtatgtcatgaccagcctccagcaagagtacaaaaagcaaatgctgactgctgctcacgccctggctgtggatgccaaaaacttactcgatgtcattgaccaagcaagactgaaaatgcttgggcagacgagaccacactgagcctcccctaggagcacgtcttgctaccctcttttgaagatgttctctagccttccaccagcagcgaggaattaaccctgtgtcctcagtcgccagcacttacagctccaacttttttgaatgaccatctggttgaaaaatctttctcatataagtttaaccacactttgatttgggttcattttttgttttgtttttttcaatcatgatattcagaaaaatccaggatccaaaatgtggcgtttttctaagaatgaaaattatatgtaagcttttaagcatcatgaagaacaatttatgttcacattaagatacgttctaaagggggatggccaaggggtgacatcttaattcctaaactaccttagctgcatagtggaagaggagagcatgaagcaaagaattccaggaaacccaagaggctgagaattcttttgtctaccatagaattattatccagactggaatttttgtttgttagaacacccttcagttgcaatatgctaatcccactttacaaagaatataaaagctatattttgaagacttgagttatttcagaaaaaactacagccctttttgtcttacctgccttttactttcgtgtggatatgtgaagcattgggtcgggaactagctgtagaacacaactaaaaactcatgtcttttttcacagaataatgtgccagttttttgtagcaatgttatttctcttggaagcagaaatgctttgtaccagagcacctccaaactgcattgaggagaagttccagaaccatcccctttttccatttttatataatttataaagaaagattaaagccatgttgactattttacagccactggagttaactaacccttccttgtatctgtcttcccaggagagaatgaagcaaaacaggaatttggttttcttttgatgtccagttacaccatccattctgttaattttgaaaaaatataccctccctttagtttgttgggggatataaattattctcaggaagaatataatgaactgtacagttactttgacctattaaaaaggtgttaccagtaaa

SEQ ID NO: 270746 - DNA, 4439 bp, Artificial Sequence
  derived and/or modified sequence
tctctgactgcaatggaaagaggaaagagaaattagaagtatttttttaaattgtcatttgatttcttcagagttattgtgggcttctgaactattgcggaagcatgagaagattctgtaactgagaggcattcttcaagctgctggaaaatattacagaaggaacaccttccaaattttgcttcaagctctgaaaaaaggagcacacaggggaaccttagtcttgcttgtggatcgaagcaaatactatcacagcgaggaactgggactttgtgtgcagactcctggcttgatctttataggattgggtgtatgttgttggaactggcaggccaagaggccctgaaaccagcaggtgccatctatatggagaaaagcggatgtagtccatttccagtgtgttgggctaaagaatatgacagatacctagcatctagcaaaataatggcagctgcttaccttgaccccaacttgaatcacacaccaaattcgagtactaagactcacctgggtactggtatggaacgttctcctggtgcaatggagcgagtattaaaggtctttcattattttgaaagcaatagtgagccaaccacctgggccagtattatcaggcatggagatgctactgatgtcaggggcatcattcagaagatagtggacagtcacaaagtaaagcatgtggcctgctatggattccgcctcagtcacctgcggtcagaggaggttcactggcttcacgtggatatgggcgtctccagtgtgagggagaagtatgagcttgctcacccaccagaggagtggaaatatgaattgagaattcgttatttgccaaaaggatttctaaaccagtttactgaagataagccaactttgaatttcttctatcaacaggtgaagagcgattatatgttagagatagctgatcaagtggaccaggaaattgctttgaagttgggttgtctagaaatacggcgatcatactgggagatgcggggcaatgcactagaaaagaagtctaactatgaagtattagaaaaagatgttggtttaaagcgattttttcctaagagtttactggattctgtcaaggccaaaacactaagaaaactgatccaacaaacatttagacaatttgccaaccttaatagagaagaaagtattctgaaattctttgagatcctgtctccagtctacagatttgataaggaatgcttcaagtgtgctcttggttcaagctggattatttcagtggaactggcaatcggcccagaagaaggaatcagttacctaacggacaagggctgcaatcccacacatcttgctgacttcactcaagtgcaaaccattcagtattcaaacagtgaagacaaggacagaaaaggaatgctacaactaaaaatagcaggtgcacccgagcctctgacagtgacggcaccatccctaaccattgcggagaatatggctgacctaatagatgggtactgccggctggtgaatggaacctcgcagtcatttatcatcagacctcagaaagaaggtgaacgggctttgccatcaataccaaagttggccaacagcgaaaagcaaggcatgcggacacacgccgtctctgtgtcagaaacagatgattatgctgagattatagatgaagaagatacttacaccatgccctcaaccagggattatgagattcaaagagaaagaatagaacttggacgatgtattggagaaggccaatttggagatgtacatcaaggcatttatatgagtccagagaatccagctttggcggttgcaattaaaacatgtaaaaactgtacttcggacagcgtgagagagaaatttcttcaagaagccttaacaatgcgtcagtttgaccatcctcatattgtgaagctgattggagtcatcacagagaatcctgtctggataatcatggagctgtgcacacttggagagctgaggtcatttttgcaagtaaggaaatacagtttggatctagcatctttgatcctgtatgcctatcagcttagtacagctcttgcatatctagagagcaaaagatttgtacacagggacattgctgctcggaatgttctggtgtcctcaaatgattgtgtaaaattaggagactttggattatcccgatatatggaagatagtacttactacaaagcttccaaaggaaaattgcctattaaatggatggctccagagtcaatcaattttcgacgttttacctcagctagtgacgtatggatgtttggtgtgtgtatgtgggagatactgatgcatggtgtgaagccttttcaaggagtgaagaacaatgatgtaatcggtcgaattgaaaatggggaaagattaccaatgcctccaaattgtcctcctaccctctacagccttatgacgaaatgctgggcctatgaccccagcaggcggcccaggtttactgaacttaaagctcagctcagcacaatcctggaggaagagaaggctcagcaagaagagcgcatgaggatggagtccagaagacaggccacagtgtcctgggactccggagggtctgatgaagcaccgcccaagcccagcagaccgggttatcccagtccgaggtccagcgaaggattttatcccagcccacagcacatggtacaaaccaatcattaccaggtttctggctaccctggttcacatggaatcacagccatggctggcagcatctatccaggtcaggcatctcttttggaccaaacagattcatggaatcatagacctcaggagatagcaatgtggcagcccaatgtggaggactctacagtattggacctgcgagggattgggcaagtgttgccaacccatctgatggaagagcgtctaatccgacagcaacaggaaatggaagaagatcagcgctggctggaaaaagaggaaagatttctgaaacctgatgtgagactctctcgaggcagtattgacagggaggatggaagtcttcagggtccgattggaaaccaacatatatatcagcctgtgggtaaaccagatcctgcagctccaccaaagaaaccgcctcgccctggagctcccggtcatctgggaagccttgccagcctcagcagccctgctgacagctacaacgagggtgtcaagcttcagccccaggaaatcagcccccctcctactgccaacctggaccggtcgaatgataaggtgtacgagaatgtgacgggcctggtgaaagctgtcatcgagatgtccagtaaaatccagccagccccaccagaggagtatgtccctatggtgaaggaagtcggcttggccctgaggacattattggccactgtggatgagaccattcccctcctaccagccagcacccaccgagagattgagatggcacagaagctattgaactctgacctgggtgagctcatcaacaagatgaaactggcccagcagtatgtcatgaccagcctccagcaagagtacaaaaagcaaatgctgactgctgctcacgccctggctgtggatgccaaaaacttactcgatgtcattgaccaagcaagactgaaaatgcttgggcagacgagaccacactgagcctcccctaggagcacgtcttgctaccctcttttgaagatgttctctagccttccaccagcagcgaggaattaaccctgtgtcctcagtcgccagcacttacagctccaacttttttgaatgaccatctggttgaaaaatctttctcatataagtttaaccacactttgatttgggttcattttttgttttgtttttttcaatcatgatattcagaaaaatccaggatccaaaatgtggcgtttttctaagaatgaaaattatatgtaagcttttaagcatcatgaagaacaatttatgttcacattaagatacgttctaaagggggatggccaaggggtgacatcttaattcctaaactaccttagctgcatagtggaagaggagagcatgaagcaaagaattccaggaaacccaagaggctgagaattcttttgtctaccatagaattattatccagactggaatttttgtttgttagaacacccttcagttgcaatatgctaatcccactttacaaagaatataaaagctatattttgaagacttgagttatttcagaaaaaactacagccctttttgtcttacctgccttttactttcgtgtggatatgtgaagcattgggtcgggaactagctgtagaacacaactaaaaactcatgtcttttttcacagaataatgtgccagttttttgtagcaatgttatttctcttggaagcagaaatgctttgtaccagagcacctccaaactgcattgaggagaagttccagaaccatcccctttttccatttttatataatttataaagaaagattaaagccatgttgactatt

SEQ ID NO: 270747 - protein, 172 aa, Artificial Sequence
  derived and/or modified sequence
MYLDNSSIEEASGVYPIDDDDYASASGSGADEDVESPELTTSRPLPKILLTSAAPKVETTTLNIQNKIPAQTKSPEETDKEKVHLSDSERKMDPAEEDTNVYTEKHSDSLFKRTEVLAAVIAGGVIGFLFAIFLILLLVYRMRKKDEGSYDLGERKPSSAAYQKAPTKEFYA

SEQ ID NO: 270748 - DNA, 1318 bp, Artificial Sequence
  derived and/or modified sequence
gtctttgttccagagcatttgccaaagccaggtatgtccagtcaaagggataatgcaaccgatagctcccaagcctccatatcctcagctgttgcttgttgccactgaggggtggacatgttttcatttggcatcttacatgtgagcatcatgactacagactcatcttataccaattaaataataaactccactctgtgggcagaggttctgtctggagagagcagagctgacatctgataaagacatgtaccttgacaacagctccattgaagaagcttcaggagtgtatcctattgatgacgatgactacgcttctgcgtctggctcgggagctgatgaggatgtagagagtccagagctgacaacatctcgaccacttccaaagatactgttgactagtgctgctccaaaagtggaaaccacgacgctgaatatacagaacaagatacctgctcagacaaagtcacctgaagaaactgataaagagaaagttcacctctctgactcagaaaggaaaatggacccagccgaagaggatacaaatgtgtatactgagaaacactcagacagtctgtttaaacggacagaagtcctagcagctgtcattgctggtggagttattggctttctctttgcaatttttcttatcctgctgttggtgtatcgcatgagaaagaaggatgaaggaagctatgaccttggagaacgcaaaccatccagtgctgcttatcagaaggcacctactaaggagttttatgcgtaaaactccaacttagtgtctctatttatgagatcactgaacttttcaaaataaagcttttgcatagaataatgaagatctttgttttttgttttcattaaagagccattctggcactttaatgataaaatcccattgtatttaaaacatttcatgtatttctttagaacaacataaaattaaaatttaacatctgcagtgttctgtgaatagcagtggcaaaatattatgttatgaaaaccctcgatgttcatggaattggtttaaacttttatgcgcaaatacaaaatgattgtctttttcctatgactcaaagatgaaagctgtttcatttgtgtcagcatgtctcagattgaccttaccaagttggtcttactttgttaatttatctgttgtccccttcctctcctctgccctcccttcttgtgcccttaaaaccaaaccctatgccttttgtagctgtcatggtgcaatttgtctttggaaaattcagataatggtaatttagtgtatatgtgattttcaaatatgtaaactttaacttccactttgtat

SEQ ID NO: 270749 - DNA, 677 bp, Artificial Sequence
  derived and/or modified sequence
gcaccaactccgtgtcgggagtgcagaaaccaacaaagagcagagctgacatctgataaagacatgtaccttgacaacagctccattgaagaagcttcaggagtgtatcctattgatgacgatgactacgcttctgcgtctggctcgggagctgatgaggatgtagagagtccagagctgacaacatctcgaccacttccaaagatactgttgactagtgctgctccaaaagtggaaaccacgacgctgaatatacagaacaagatacctgctcagacaaagtcacctgaagaaactgataaagagaaagttcacctctctgactcagaaaggaaaatggacccagccgaagaggatacaaatgtgtatactgagaaacactcagacagtctgtttaaacggacagaagtcctagcagctgtcattgctggtggagttattggctttctctttgcaatttttcttatcctgctgttggtgtatcgcatgagaaagaaggatgaaggaagctatgaccttggagaacgcaaaccatccagtgctgcttatcagaaggcacctactaaggagttttatgcgtaaaactccaacttagtgtctctatttatgagatcactgaacttttcaaaataaagcttttgcatagaataatgaagatctttgttttttgttttcat

SEQ ID NO: 270750 - protein, 340 aa, Artificial Sequence
  derived and/or modified sequence
MVTLRKRTLKVLTFLVLFIFLTSFFLNYSHTMVATTWFPKQMVLELSENLKRLIKHRPCTCTHCIGQRKLSAWFDERFNQTMQPLLTAQNALLEDDTYRWWLRLQREKKPNNLNDTIKELFRVVPGNVDPMLEKRSVGCRRCAVVGNSGNLRESSYGPEIDSHDFVLRMNKAPTAGFEADVGTKTTHHLVYPESFRELGDNVSMILVPFKTIDLEWVVSAITTGTISHTYIPVPAKIRVKQDKILIYHPAFIKYVFDNWLQGHGRYPSTGILSVIFSMHVCDEVDLYGFGADSKGNWHHYWENNPSAGAFRKTGVHDADFESNVTATLASINKIRIFKGR

SEQ ID NO: 270751 - protein, 49 aa, Artificial Sequence
  derived and/or modified sequence
MVTLRKRTLKVLTFLVLFIFLTSFFLNYSHTMVATTWFPKQMVLELSEN

SEQ ID NO: 270752 - protein, 72 aa, Artificial Sequence
  derived and/or modified sequence
MVTLRKRTLKVLTFLVLFIFLTSFFLNYSHTMVATTWFPKQMVLELSENLKRLIKHRPCTCTHCIGQRKLSA

SEQ ID NO: 270753 - protein, 47 aa, Artificial Sequence
  derived and/or modified sequence
MVTLRKRTLKVLTFLVLFIFLTSFFLNYSHTMVATTWFPKQMVLELS

SEQ ID NO: 270754 - DNA, 1023 bp, Artificial Sequence
  derived and/or modified sequence
atggtgaccctgagaaagagaaccctgaaggtgctgaccttcctggtgctgttcatcttcctgaccagcttcttcctgaactacagccacaccatggtggccaccacctggttccccaagcagatggtgctggagctgagcgagaacctgaagagactgatcaagcacagaccctgcacctgcacccactgcatcggccagagaaagctgagcgcctggttcgacgagagattcaaccagaccatgcagcccctgctgaccgcccagaacgccctgctggaggacgacacctacagatggtggctgagactgcagagagagaagaagcccaacaacctgaacgacaccatcaaggagctgttcagagtggtgcccggcaacgtggaccccatgctggagaagagaagcgtgggctgcagaagatgcgccgtggtgggcaacagcggcaacctgagagagagcagctacggccccgagatcgacagccacgacttcgtgctgagaatgaacaaggcccccaccgccggcttcgaggccgacgtgggcaccaagaccacccaccacctggtgtaccccgagagcttcagagagctgggcgacaacgtgagcatgatcctggtgcccttcaagaccatcgacctggagtgggtggtgagcgccatcaccaccggcaccatcagccacacctacatccccgtgcccgccaagatcagagtgaagcaggacaagatcctgatctaccaccccgccttcatcaagtacgtgttcgacaactggctgcagggccacggcagataccccagcaccggcatcctgagcgtgatcttcagcatgcacgtgtgcgacgaggtggacctgtacggcttcggcgccgacagcaagggcaactggcaccactactgggagaacaaccccagcgccggcgccttcagaaagaccggcgtgcacgacgccgacttcgagagcaacgtgaccgccaccctggccagcatcaacaagatcagaatcttcaagggcagatag

SEQ ID NO: 270755 - DNA, 150 bp, Artificial Sequence
  derived and/or modified sequence
atggtgaccctgagaaagagaaccctgaaggtgctgaccttcctggtgctgttcatcttcctgaccagcttcttcctgaactacagccacaccatggtggccaccacctggttccccaagcagatggtgctggagctgagcgagaactag

SEQ ID NO: 270756 - DNA, 219 bp, Artificial Sequence
  derived and/or modified sequence
atggtgaccctgagaaagagaaccctgaaggtgctgaccttcctggtgctgttcatcttcctgaccagcttcttcctgaactacagccacaccatggtggccaccacctggttccccaagcagatggtgctggagctgagcgagaacctgaagagactgatcaagcacagaccctgcacctgcacccactgcatcggccagagaaagctgagcgcctag

SEQ ID NO: 270757 - DNA, 144 bp, Artificial Sequence
  derived and/or modified sequence
atggtgaccctgagaaagagaaccctgaaggtgctgaccttcctggtgctgttcatcttcctgaccagcttcttcctgaactacagccacaccatggtggccaccacctggttccccaagcagatggtgctggagctgagctag

SEQ ID NO: 270758 - DNA, 1023 bp, Artificial Sequence
  derived and/or modified sequence
atggtcacacttagaaaaaggaccctgaaggtgctcacttttctggtgctgttcatcttcctgacctcattctttctcaactactcccacaccatggtggccaccacctggtttcctaagcaaatggtgcttgaactttctgagaacctgaagagattgatcaaacataggccgtgtacctgtacgcattgtattggacagaggaaattgtcagcctggtttgacgaaaggtttaatcagactatgcagccgcttctgaccgcgcagaacgctttgcttgaggatgacacttataggtggtggctcaggcttcagagagagaaaaagccaaacaacctgaacgatacgattaaggaattgttcagggtggtgccaggtaacgtagaccccatgctcgagaaacgttccgtgggctgtaggagatgtgctgtagtaggaaattctggcaacctgcgcgagagtagctacggccccgaaatcgattcccacgacttcgtgctgaggatgaataaggcccccaccgctggtttcgaggctgacgtgggtaccaagaccactcatcatctggtgtacccagagagcttcagggaactgggcgacaatgtctccatgatactggtgccgtttaaaacaattgacctcgagtgggtggtatccgccattacaacagggactatctcacatacgtacatccccgtgccggcgaaaataagagtaaagcaagacaaaattttaatctaccatcccgcttttattaagtacgtcttcgacaattggctccaggggcatggacgctacccctcgaccgggatcctgagtgttatatttagcatgcacgtgtgcgatgaggttgacctctacggcttcggcgccgactcaaagggcaactggcaccattactgggaaaataacccatccgcaggagcattccgaaagactggtgtgcacgacgctgattttgaaagtaatgtcactgcaacgcttgctagcatcaacaagatacgcatcttcaaagggcgctag

SEQ ID NO: 270759 - DNA, 1023 bp, Artificial Sequence
  derived and/or modified sequence
atggtgaccctcaggaagcgtacactgaaggttctcacatttctagtgctatttatcttcttgacttccttttttctgaattactcgcacactatggtggctacaacatggttcccaaaacagatggtcctcgagttatccgaaaatcttaaacgattgatcaagcatagaccatgcacatgcacccactgcatcggccaacgcaaactctccgcgtggttcgacgagagattcaatcagactatgcagccactgctgaccgcccagaacgctctgctggaggatgatacatatcgctggtggctcagactgcagagagaaaaaaagcccaacaatctgaatgacactataaaggaactcttcagagtggtgccagggaacgtcgatccaatgttagaaaagcgtagcgtcggttgcagacggtgcgcggtggtggggaatagtgggaacctgcgggaaagcagctatgggcccgagatcgattcacatgattttgttctgagaatgaataaagcccccaccgcgggtttcgaagcagacgtgggtaccaaaacaacacatcacttggtctatcccgagtcgtttagggaactgggcgacaacgtcagtatgattctcgtgccatttaaaacgatcgacttggagtgggtggttagcgccatcaccacaggtactatctcacacacgtatatcccagtgccagcaaagatccgggtgaagcaggataaaatcctgatctaccaccctgccttcattaagtacgtgtttgataattggctccaggggcacggtcggtacccttctacgggcattctaagcgtgatcttcagcatgcatgtctgcgacgaagtggacttatatggtttcggcgccgatagcaagggcaactggcaccactactgggagaacaacccaagcgctggggccttcagaaaaacaggagtacacgacgccgatttcgagtctaatgtgactgcaacgctcgcttccatcaacaaaatccgtattttcaaggggaggtag

SEQ ID NO: 270760 - DNA, 150 bp, Artificial Sequence
  derived and/or modified sequence
atggtaacactgcgcaagcgcaccctgaaagttctgacctttcttgtcttgttcatattcctgacgtcatttttcctgaactattctcacacgatggtggccacgacctggtttcctaagcagatggtgctcgagctctcagaaaactag

SEQ ID NO: 270761 - DNA, 1023 bp, Artificial Sequence
  derived and/or modified sequence
atggtcacccttcgcaagcgaaccctcaaggtactcaccttcctggtgctgttcatttttctgacaagcttctttctcaattattcacacaccatggtcgcaaccacatggttccctaaacagatggtgctcgaactctccgaaaatctgaaaaggctaattaagcaccggccttgcacatgcacccactgcatcggccaaagaaaattgagcgcctggtttgatgagcggttcaatcagaccatgcagcccctgctgaccgcccagaatgcgctcttagaagacgacacatatcggtggtggctgaggctccagcgggaaaagaagccaaacaatttaaacgacacaataaaggagctttttagagttgtccccgggaacgtggacccaatgttggagaagcggagtgtcggctgccgccggtgcgcagtcgtcgggaactcagggaatctgcgggagagctcctacggacctgagattgacagtcatgatttcgtgctgaggatgaataaagctcccactgcaggattcgaagcggatgtgggcacaaaaactacacatcatcttgtttatcccgaaagcttccgcgaactcggggataacgtctcgatgattttggtcccatttaagactatcgaccttgaatgggttgtgtccgccataactaccggtactatttctcacacctacataccagtacccgccaaaataagagtcaaacaagacaagatcctcatttaccaccctgcctttattaagtatgtgttcgataactggctccaagggcacggtcggtatccatccacgggcattctaagcgtgatttttagcatgcatgtgtgcgacgaagtagacctgtacgggttcggggccgatagcaaaggtaactggcatcattattgggagaacaatccatcggccggtgcctttagaaagacgggggtgcatgacgcagattttgagtctaacgttactgccacattggcatccatcaacaagatccgaatcttcaagggccgttag

SEQ ID NO: 270762 - DNA, 1023 bp, Artificial Sequence
  derived and/or modified sequence
atggttacgctgagaaagcggacgctcaaagtacttacgttcctcgtcttgtttatttttctcacgagtttttttcttaactacagccacacaatggttgctaccacctggttcccaaaacagatggttctagagttatctgagaacttgaaaaggctcatcaagcacagaccatgtacctgtacacactgtataggccagagaaagctctccgcatggttcgacgagcgtttcaatcagaccatgcaacctctcctgacagcccaaaatgccctcctcgaggacgacacttatcgttggtggctgaggttgcaacgggagaaaaagccaaataatctgaatgacacaattaaggagttattcagagtggtacctggaaatgtagatccaatgcttgagaagcgttctgttgggtgcagaaggtgcgccgtcgtcgggaattctggaaatctccgagagtccagctatgggccggagattgactcccacgacttcgttctgaggatgaacaaggccccaaccgccggctttgaagctgatgttgggaccaagaccactcatcacctggtttaccctgaatcatttcgcgaactgggagataatgtatctatgattttagtaccatttaagacaatcgacctcgagtgggtcgtgagcgctattaccaccggcactatcagtcacacttacattcccgtgcccgcaaagatcagagtaaaacaagacaagattctgatctaccatccagcgttcataaagtatgttttcgataactggttgcagggacacgggaggtacccctcaaccggtatcctgagtgtgattttcagcatgcacgtctgcgacgaggtcgacctctacggattcggagctgacagcaaggggaactggcaccactattgggagaacaatccatccgctggagcgtttcggaagaccggcgtccatgatgcagactttgaatccaacgtgaccgctaccctggcctccattaacaaaatcagaatttttaaaggcagatag

SEQ ID NO: 270763 - DNA, 219 bp, Artificial Sequence
  derived and/or modified sequence
atggtcacactgaggaaaaggacgctaaaggtcctgacatttctggtgctcttcatcttcctaacatcatttttcctcaattactcccacaccatggtggcgactacatggttcccaaagcagatggtgctggagctgtccgagaacctcaaaagactcatcaaacataggccatgcacttgcactcactgtattgggcaacgcaaactgtccgcctag

SEQ ID NO: 270764 - DNA, 144 bp, Artificial Sequence
  derived and/or modified sequence
atggtgacgctgcgtaagcgaaccttgaaggtcttgaccttcctagttttatttatttttttaacatctttttttctgaattactctcacaccatggtggctaccacctggttccctaagcagatggtgttggaactatcatag

SEQ ID NO: 270765 - DNA, 1023 bp, Artificial Sequence
  derived and/or modified sequence
atggtgaccctgaggaagaggaccctgaaggtgctgaccttcctggtgctcttcatcttcctgaccagcttcttcctgaactacagccacaccatggtggccaccacctggttccccaagcagatggtgctggagctgtctgagaacctgaagaggctcatcaagcaccggccctgcacctgcacccactgcatcggccagaggaagctgagcgcctggtttgatgagcgcttcaaccagaccatgcagcccctgctgacagcccagaatgccctgctggaggatgacacctaccgctggtggctgcggctgcagcgggagaagaagcccaacaacctgaatgacaccatcaaggagctgttccgggtggtgcctggaaatgtggaccccatgctggagaagaggtctgtgggctgccgccgctgtgctgtggtgggcaacagcggcaacctgcgggagagcagctatggccctgagattgacagccatgactttgtgctgaggatgaacaaggcccccacagctggctttgaagcagatgtgggcaccaagaccacccaccacctggtgtacccagagagcttccgggagctgggggacaacgtgtccatgatcctggtgcccttcaagaccatcgacctggagtgggtggtgtctgccatcaccaccggcaccatcagccacacctacatccctgtgcctgccaagatccgggtgaagcaggacaagatcctgatctaccacccagccttcatcaagtatgtgtttgacaactggctgcagggccacggccgctaccccagcacaggcatcctgagcgtcatcttctccatgcacgtgtgtgatgaggtggacctgtatggctttggagctgacagcaagggcaactggcaccactactgggagaacaaccccagcgctggggccttcaggaagacaggagtgcatgatgctgactttgagagcaatgtgacagccaccctggccagcatcaacaagatccgcatcttcaagggccgctag

SEQ ID NO: 270766 - DNA, 150 bp, Artificial Sequence
  derived and/or modified sequence
atggtgaccctgaggaagaggaccctgaaggtgctgaccttcctggtgctcttcatcttcctgaccagcttcttcctgaactacagccacaccatggtggccaccacctggttccccaagcagatggtgctggagctgtctgagaactag

SEQ ID NO: 270767 - DNA, 219 bp, Artificial Sequence
  derived and/or modified sequence
atggtgaccctgaggaagaggaccctgaaggtgctgaccttcctggtgctcttcatcttcctgaccagcttcttcctgaactacagccacaccatggtggccaccacctggttccccaagcagatggtgctggagctgtctgagaacctgaagaggctcatcaagcaccggccctgcacctgcacccactgcatcggccagaggaagctgagcgcctag

SEQ ID NO: 270768 - DNA, 144 bp, Artificial Sequence
  derived and/or modified sequence
atggtgaccctgaggaagaggaccctgaaggtgctgaccttcctggtgctcttcatcttcctgaccagcttcttcctgaactacagccacaccatggtggccaccacctggttccccaagcagatggtgctggagctgtcctag

SEQ ID NO: 270769 - DNA, 1023 bp, Artificial Sequence
  derived and/or modified sequence
atggtgaccctgcggaagcggaccctgaaggtgctgaccttcctggtcttgtttatctttctgacaagtttcttcctaaactattcccatacgatggtggcaaccacttggttccccaaacaaatggttttggagctgagcgagaacctaaaacgactgatcaagcaccggccctgcacttgcacccattgcatcggtcagaggaaactgtcggcttggttcgatgaacggttcaaccagactatgcagccattgctgaccgctcaaaatgctctgctggaagacgatacttaccggtggtggcttcgccttcagagggaaaaaaagccgaataacctgaacgacactatcaaagagttattccgtgtcgtgccaggcaacgttgacccaatgctggaaaagaggagtgtcggttgtcgcagatgcgccgtcgtaggaaattccggaaatctgcgggaaagttcctacggccctgagatcgacagccatgatttcgtactgcggatgaacaaggccccaacagcaggcttcgaagctgacgtcggtaccaagacaacacaccacctggtgtatcctgaatccttcagggagttaggggataatgtgagcatgattttggtgccttttaagacaattgacttggaatgggtggtgtccgctattactacgggcactataagtcatacttacattcccgtgcccgcaaaaatacgcgtgaaacaggacaaaatcctcatttatcaccctgcttttataaagtacgtgttcgacaactggctgcagggtcatggacgctacccttccaccggtatcctgtccgtcatattcagcatgcacgtctgtgacgaagtggatctgtacggatttggcgccgattccaaaggtaactggcaccattattgggaaaataatccatccgccggagcattcaggaaaaccggtgtgcacgacgcagacttcgagagtaatgttactgctaccctcgcgagcataaacaagatccgaatttttaagggtcggtag

SEQ ID NO: 270770 - DNA, 1023 bp, Artificial Sequence
  derived and/or modified sequence
atggtgaccctgcggaagcggaccctgaaggtgctgaccttcctggttctcttcatatttttaacatcattctttctgaactattctcacacaatggtggccaccacatggttcccaaaacagatggtactggaactctctgagaacttgaagagactgattaaacaccgtccttgcacctgcacacactgcattggccagaggaagctttcggcctggtttgacgagcggtttaatcagacaatgcagcccctattgacggcgcagaatgccctgctggaggatgacacctaccggtggtggctgcgattgcagcgcgaaaagaagcctaataacctgaatgacacgattaaagagctgttccgtgtcgtgccaggtaacgtcgatccaatgttggaaaaaaggagcgtgggatgtcgacggtgcgctgtggtcgggaactcgggaaatctgagggagtcatcttatggtcctgagattgactcccacgactttgtcctcaggatgaataaagcgccaacagccggattcgaggcagacgtgggcaccaaaactacccaccacctcgtctaccccgaaagttttcgcgagctcggcgacaatgtgagcatgatcctggtgccatttaagactatcgacttagaatgggtagtttccgccatcaccacaggtacaatcagtcatacttacattccagtccccgccaagatcagagtcaagcaggataaaattctgatctaccatcctgcattcatcaaatacgtttttgataactggcttcaggggcacggtcggtaccctagcaccgggatcttatcagtgatcttcagcatgcacgtgtgcgacgaggtcgatctgtacggtttcggggcggatagtaaaggtaactggcaccattactgggagaataacccatcagccggtgcttttcgcaagacaggagtgcatgatgcggactttgagagcaatgtgactgctactttggctagcatcaataaaatccgcatattcaagggcaggtag

SEQ ID NO: 270771 - DNA, 150 bp, Artificial Sequence
  derived and/or modified sequence
atggtgaccctgcggaagcggaccctgaaggtgctgaccttcctggtactgttcatatttctaacctcattctttctgaattatagccatactatggtcgcaacaacgtggttcccaaaacagatggtgctcgaattaagcgaaaattag

SEQ ID NO: 270772 - DNA, 1023 bp, Artificial Sequence
  derived and/or modified sequence
atggtgaccctgcggaagcggaccctgaaggtgctgaccttcctggtgctgtttattttcctgacatcgttctttctgaactacagccataccatggtagcaactacctggttccccaaacagatggtcctggagctctccgaaaatctgaagagattaattaagcataggccatgcacatgcactcattgcattgggcagagaaaactttcagcatggtttgatgagcgattcaaccaaactatgcagccactcctcaccgctcagaatgctttactggaagatgatacgtatcgctggtggctcagattacagcgagaaaagaagcctaacaacctaaatgatacgatcaaggagctgttccgcgtggttcctgggaacgtagatcccatgctcgaaaaaaggagcgtaggctgtcgcaggtgtgcagtggtaggcaactccggaaacctcagggagtctagttacggtcctgaaatagactcccatgactttgtgcttaggatgaataaagctcccaccgcgggcttcgaggcggatgtcggaacaaaaacgacgcatcatctcgtgtatccggagtccttcagagagctgggtgacaatgtttccatgatcctggtgccctttaaaacgatcgatctggaatgggtggtttcagccattacaactggcaccatatcgcacacatacatccccgtgcccgctaagatcagagtgaaacaggataagatactgatataccacccagccttcatcaaatatgttttcgacaactggcttcaaggtcacggtaggtacccaagcactggcattctgagcgtgatcttttctatgcacgtctgtgacgaggtggacctgtacggctttggagctgattccaaaggcaactggcaccactactgggaaaacaatccgtccgcaggtgcgttccgaaaaaccggggtgcatgatgccgattttgaaagcaacgttacggccaccctggcttcaataaacaagatccggatctttaagggcaggtag

SEQ ID NO: 270773 - DNA, 1023 bp, Artificial Sequence
  derived and/or modified sequence
atggtgaccctgcggaagcggaccctgaaggtgctgaccttcctggtcctcttcatctttctgacatcgtttttcctaaattacagtcataccatggtagctaccacttggtttcctaagcagatggttctggagttatctgaaaaccttaaacgcctgatcaagcaccgcccctgtacctgtacccattgtatcggccaaagaaaactgagcgcgtggttcgatgaaaggttcaaccaaacgatgcagcctctgctgaccgctcagaacgctctccttgaagatgacacatatcggtggtggttgaggctgcaacgggaaaaaaagccaaataatctgaacgatactattaaggagttgttcagggtcgttcccggcaacgtagaccccatgctggagaaacgcagcgtggggtgccggcggtgtgcggtggtggggaacagcggaaacctccgcgagagctcatacggaccagagatcgatagtcacgactttgtgctccggatgaataaagcgcctactgcaggcttcgaggctgatgtcggtacaaaaaccactcaccatctagtatatccagagtcgttccgagaactgggcgataacgtaagcatgatccttgtgcctttcaagacaattgacctggagtgggtggtaagtgccattactacaggaaccatctctcacacatacattccagtgccagctaaaatccgagttaagcaggataagatcctcatctaccaccccgcctttattaaatatgtgttcgataactggctccagggacacggacgttatcctagcaccggcatactgtccgtgatttttagtatgcacgtttgtgatgaggtagatctctacgggttcggtgcagactccaagggaaactggcatcattattgggagaataacccaagcgcgggagcattccgcaaaacgggtgtgcacgatgcagacttcgagtccaatgtgacagccactctggcaagtatcaacaaaatccggatattcaaggggaggtag

SEQ ID NO: 270774 - DNA, 219 bp, Artificial Sequence
  derived and/or modified sequence
atggtgaccctgcggaagcggaccctgaaggtgctgaccttcctggtgctcttcatattcctcactagttttttcttaaactatagccacacaatggtggcaacaacgtggttccccaaacagatggtactggaactgagtgagaatttgaagcgcttgattaaacaccgtccctgcacctgcacacactgcattgggcagaggaagttaagtgcatag

SEQ ID NO: 270775 - DNA, 144 bp, Artificial Sequence
  derived and/or modified sequence
atggtgaccctgcggaagcggaccctgaaggtgctgaccttcctggtgctgttcatttttctgaccagctttttcctcaactactctcacacaatggtggccaccacatggtttcccaagcagatggttctggagctgtcatag

SEQ ID NO: 270776 - DNA, 1023 bp, Artificial Sequence
  derived and/or modified sequence
atggtgacgttgagaaagaggacgctgaaggtgctgacgttccttgttctcttcatctttctgactagtttctttctgaactacagtcacactatggtagccactacgtggtttccaaaacagatggtcctggaactgtctgagaatctgaagcggctaattaagcatcgcccatgcacttgcacccattgcatagggcaacggaaattgtctgcctggtttgacgagagatttaatcagacgatgcagccccttcttacggcccaaaatgcgctcctggaggacgacacataccggtggtggctccgtctgcagagagagaagaagcccaataatctaaatgacaccatcaaggaactgtttagagtggtaccgggaaatgttgatcccatgcttgagaaacgaagcgtagggtgtcgaagatgtgccgtcgtgggcaatagcggaaatctgcgggagagtagttatgggcctgagatcgattcccacgacttcgtgctgcgtatgaacaaggctccaactgccggattcgaggccgatgtagggaccaaaaccacacaccacctcgtttatccagagtctttccgagagttgggggataatgtttctatgatcctagttccatttaaaaccatcgatctggaatgggtggtgagcgcgattactacaggcacaatttcacacacatacatcccagtacctgctaagattcgggtgaagcaagacaaaattctgatatatcatcccgctttcattaagtatgtattcgacaactggctgcaaggccacggacgctatccctctacgggtatcctgagcgtcattttctcaatgcacgtctgtgatgaagtggatctttatggatttggcgctgattcaaaaggcaactggcatcattattgggaaaataatccaagtgcaggtgcattccgaaaaaccggggtgcacgacgctgatttcgagagtaacgtcaccgccacgcttgcttccatcaataagatccggatcttcaagggaagatag

SEQ ID NO: 270777 - DNA, 1023 bp, Artificial Sequence
  derived and/or modified sequence
atggtgacgctccgcaagcgcacacttaaggtcctcacattcttagttttatttatcttcctgacctcattcttcctaaactactcacatacgatggtggctactacctggtttcctaagcagatggtgttggagctgtccgagaacctgaaacgactgattaagcacaggccatgtacctgtacgcactgtattggccaacgtaagctgtctgcatggttcgacgagcgctttaatcagacgatgcagcctctgctgactgcacagaatgccctgctggaagatgatacctataggtggtggctccgcctccaaagagagaagaaacctaataatttgaatgatactatcaaagagctattcagggtagtgcctggtaacgtcgatcccatgctcgagaagcggtcagtgggctgtcgaaggtgcgctgtggtggggaacagcgggaatctgcgggaatctagttatggacctgagattgactcccacgactttgtactgaggatgaacaaagcacctaccgccggtttcgaggctgacgtggggacgaaaacaacccaccacttagtgtaccccgagagtttccgtgagttgggagacaatgtgtctatgatcctagttccttttaagaccatcgaccttgaatgggttgtgtccgcgatcaccactgggacaatcagccatacatatatcccggtgcccgcaaagatccgcgtaaagcaggacaagatcctgatctaccaccctgcgttcataaaatacgtcttcgacaactggcttcagggccacggccgatacccctccaccgggattttgagtgtcatcttcagtatgcacgtgtgcgacgaggttgacctgtacggcttcggagcagactctaaagggaattggcaccactactgggagaataatccttctgctggagcgtttcgcaagactggtgtccacgacgccgacttcgaaagtaacgttaccgcgactcttgcctctatcaacaagatccgaatcttcaaggggcgatag

SEQ ID NO: 270778 - DNA, 150 bp, Artificial Sequence
  derived and/or modified sequence
atggtgactctgcgaaagcgcactctgaaggtcttaacctttcttgtattatttatatttctgacgagtttttttcttaactattcccatactatggtggctaccacctggttccccaagcagatggtgttggaactgagtgaaaactag

SEQ ID NO: 270779 - DNA, 1023 bp, Artificial Sequence
  derived and/or modified sequence
atggtgacactccggaaaaggaccttaaaagtactgaccttcttggttctgttcatttttttgacgagcttcttcctgaactattcacacacgatggttgccactacgtggttcccaaagcagatggtcttggagttgtctgagaatctaaaacggcttattaaacaccgcccttgcacctgtactcactgtatcggacagagaaagctcagtgcctggtttgacgagcgcttcaaccaaacgatgcaacctttgctaaccgcccaaaacgcccttcttgaagatgacacttataggtggtggctgcgactgcagcgcgagaagaaacccaataacttaaacgacaccattaaggaattgtttcgggtggtgcctggcaatgtcgacccgatgctcgagaagaggtccgtggggtgcagaagatgcgcagtggttggaaactccggtaacctccgggaatccagctatggccctgagattgacagccacgattttgttctgaggatgaataaggctccgaccgctgggttcgaagccgacgtgggcacaaagaccacgcatcacctcgtgtaccctgaaagcttcagggaattgggggacaacgtcagcatgatcctggttccattcaaaaccattgatctggagtgggtggtctctgccattaccacggggacgataagccacacatacatccctgtgcctgccaaaattcgggtaaagcaggataaaatcctcatctaccaccccgcatttatcaaatacgtcttcgacaactggctgcagggacatggcaggtatccctcaacaggaatattgtctgttatattcagcatgcatgtgtgcgacgaggtggatctgtatggctttggcgcagacagcaagggaaactggcaccactactgggaaaacaatccaagcgccggagcattcagaaagactggggtgcacgatgcagacttcgaatctaatgttacagcaaccctggccagcattaacaagattcgaatattcaaagggaggtag

SEQ ID NO: 270780 - DNA, 1023 bp, Artificial Sequence
  derived and/or modified sequence
atggtgaccctgagaaaacgaacgctgaaagtattgacatttctggtactctttatttttctcaccagcttctttcttaattactctcacacgatggtcgcgacaacctggttcccaaaacagatggtgttggaattatcagagaacctgaaacggcttataaagcaccgcccttgtacctgtactcattgtattgggcaacgaaaactttccgcatggttcgatgagagattcaaccagaccatgcagccgcttcttaccgcccaaaacgcactccttgaagatgatacatacagatggtggctcagactacagagagagaaaaaacctaacaacctgaacgatacgatcaaagaactgtttcgagtcgtccccggaaatgttgaccctatgctggagaagcgttcagtcggctgtcggagatgcgcggtggtgggcaactcgggaaacctgcgcgaatcttcatacggcccagagattgattcacacgacttcgtattgaggatgaataaagctccaaccgcaggctttgaagctgacgtcggaaccaagacgactcaccatcttgtgtaccccgagagtttccgcgaattgggcgacaatgtctccatgatactggttccttttaagacaatcgatcttgagtgggtggtctctgctatcacaaccggtaccatctctcatacatacatccccgtacctgcaaagatcagggtgaagcaggataaaattctcatctaccatcccgcttttattaagtatgttttcgacaactggcttcaaggtcacggcagatatccatccactggtattctcagcgtgatttttagcatgcacgtgtgtgacgaggtggatttgtacggattcggcgcagatagcaagggcaactggcatcactactgggaaaacaacccctcagctggcgcattccggaaaacaggagttcacgatgccgacttcgaatccaatgtaacagccacactggctagcatcaataaaatccggatcttcaaaggcagatag

SEQ ID NO: 270781 - DNA, 219 bp, Artificial Sequence
  derived and/or modified sequence
atggtgacccttaggaaaaggacgcttaaggttctaaccttcctggtcctgtttattttcctcacctcgttcttcttgaactacagccacacgatggttgccacgacatggttcccaaaacagatggtgctggagcttagcgaaaaccttaaaaggttgataaagcaccggccttgtacttgcacacactgtattggacagagaaaattgtccgcctag

SEQ ID NO: 270782 - DNA, 144 bp, Artificial Sequence
  derived and/or modified sequence
atggtgaccctgaggaaaagaactctgaaggtgctaactttcttggtcttattcatctttcttacctctttcttcctgaattattcccataccatggttgctacaacctggtttccaaagcaaatggtgctcgagctgtcatag

SEQ ID NO: 270783 - DNA, 1023 bp, Artificial Sequence
  derived and/or modified sequence
atggtgacgcttcgcaagcggacactcaaagtcctcacctttctggtgctgttcatcttcttgacttcattctttttgaattacagccacaccatggttgccactacctggttccccaagcaaatggtgcttgaactctcagaaaatctgaaacggttgatcaaacataggccttgtacatgtacccattgcatcgggcagcgcaagctgagtgcttggttcgacgaaagatttaatcagaccatgcagccattgctgactgcgcagaacgccctgttagaggatgacacctaccggtggtggctccgcctgcagagagagaagaaacccaacaatctcaatgacacgattaaagagctgtttcgggttgtaccgggcaatgtcgatccgatgcttgaaaagagatccgttggatgccgtcgctgtgctgtggttggcaactccggtaacctgagggaatcttcctatgggccagaaattgacagccacgattttgtgttacgaatgaataaagcccctaccgcgggttttgaagccgatgttggcaccaaaactactcatcacttggtttaccccgagagcttcagagagcttggtgacaatgtcagcatgatcctagtcccattcaaaacaattgatctcgaatgggtcgtatcagcaatcaccaccggtactatcagccacacttatatccccgtgcccgccaagattcgcgtcaagcaagacaaaatactcatctaccatcctgcatttattaagtatgtttttgacaattggctgcaaggacatgggcggtatcccagcacgggcattctttctgtgatctttagcatgcacgtgtgcgacgaagtcgacctgtacggctttggagccgactctaaaggtaattggcatcactattgggagaataacccctcagcaggtgcctttagaaaaacgggtgtgcacgacgcagattttgagtccaatgttacggccacgcttgccagcatcaacaagattcgtatcttcaaaggcagatag

SEQ ID NO: 270784 - DNA, 1023 bp, Artificial Sequence
  derived and/or modified sequence
atggtgacactgcgtaagcgtactctgaaggtgctcaccttccttgtgctctttatctttctgacaagttttttcttaaactactcacacaccatggtggccacaacctggtttccaaagcagatggtgctcgagctgagtgaaaatctcaaaaggctaattaaacatagaccctgcacttgcacacactgtatcggccaaagaaagttaagcgcctggttcgacgagaggtttaatcagacaatgcaacccttactgacagcacagaacgcgctgctggaagatgatacgtatcggtggtggcttaggctgcagagggaaaagaagcccaacaacttgaacgacacaattaaggaactgtttcgtgtagtgccagggaacgtggacccaatgttggagaagagatcagtgggctgcaggcgatgcgccgttgtgggaaactcagggaacttgagagagagcagctacggccccgaaattgactctcacgactttgtcctgagaatgaacaaggccccaactgccggctttgaggctgacgtcgggaccaagacaacacaccatctagtatatccagaaagcttccgcgagctcggagacaatgttagcatgatcctagtgccttttaaaactatcgacttggagtgggttgtgagcgccattaccactggtacaatttcgcacacatatattccggtccccgctaagatcagagtgaaacaagacaaaatcctcatttatcatccggccttcatcaaatatgtttttgacaattggttacaggggcacggcagataccccagcacaggcatcctgagcgtgatattttctatgcatgtctgcgatgaggttgacctgtatggttttggggcagatagcaaaggaaactggcatcattattgggaaaacaatcccagcgctggcgcatttcgtaaaactggtgtgcacgacgcagattttgagagcaatgtaaccgcaactttggcctctataaataagattcggattttcaagggacggtag

SEQ ID NO: 270785 - DNA, 150 bp, Artificial Sequence
  derived and/or modified sequence
atggtcacattgcgtaagaggactctaaaagtcctgactttcctggtactcttcattttccttacatcattttttctcaactactctcacactatggtcgcgacaacatggttccccaaacaaatggtactggagcttagcgagaactag

SEQ ID NO: 270786 - DNA, 1023 bp, Artificial Sequence
  derived and/or modified sequence
atggtcactctccgaaaaagaaccctcaaagtgcttacctttttagtattatttatctttctaacctctttttttctgaactactcacacactatggttgccaccacatggttcccaaaacaaatggtcctcgagctaagcgaaaacctcaagcgcctgataaagcacagaccatgtacctgcactcactgcatcgggcaaaggaagttatccgcatggtttgatgaacggttcaaccagaccatgcagccccttctgaccgcgcagaatgccctcctggaggatgacacctatcggtggtggttaagactccagagagaaaagaaaccaaacaatctgaatgacacaattaaagagttatttcgggtcgttccagggaatgtcgaccctatgctcgaaaaacgaagtgtaggctgtaggagatgtgccgttgtcggtaattccgggaatctgagggaaagttcttacggtcccgagatagatagccatgactttgttctgagaatgaataaggcccccactgccggcttcgaagctgatgttggcacaaagactactcaccacctggtgtatccggaatccttcagagagctgggggataacgtgtctatgattcttgttccattcaaaaccatcgatctggaatgggtggtgagcgcaatcaccacaggcaccatctcccatacctacatccctgtacctgccaaaatacgtgtcaaacaggataaaatattaatctatcaccccgcttttatcaaatacgtctttgacaactggttgcagggacacggccggtatccctccaccggaatcctgagtgtgatcttttcgatgcacgtgtgcgatgaagtagatctgtatggatttggtgcggacagcaaaggcaattggcaccattactgggaaaataatccgagtgccggagcttttcgtaagacaggcgtgcacgatgcagatttcgagtcaaatgtaacagcaacacttgccagtattaacaaaatccgtatcttcaaggggagatag

SEQ ID NO: 270787 - DNA, 1023 bp, Artificial Sequence
  derived and/or modified sequence
atggtcaccctccgaaaaaggaccctcaaggtcctgacattcttggtactttttatcttccttacctcattctttctgaattactctcatacaatggtggcaaccacttggtttccgaaacagatggtcctcgagctaagcgagaatctcaagcgactaatcaagcacagaccgtgtacatgcacccattgtattggccaaaggaaattgagcgcatggttcgacgagagatttaaccaaacaatgcagcccctccttaccgcacagaatgctctcctggaagatgacacatacaggtggtggctaaggttgcagagggaaaagaaacctaacaacctcaatgacactatcaaagagctgtttagggtagttcctggcaatgttgatccaatgctcgaaaaacggtccgtcggctgccgacgctgtgcggtggtgggtaatagcggcaacctacgggaatcttcatatggaccggagattgatagccatgactttgtgctgcggatgaacaaagctccaactgctgggtttgaagcagatgtgggtacaaagacgacacaccacctcgtgtatcctgagagttttcgggagctcggagacaacgtaagcatgattctcgtgcctttcaagacaatcgatctcgaatgggttgttagtgctatcacaacaggaacaatcagccacacatatataccggttcccgccaagatccgagtgaaacaggataagattctcatctaccacccagccttcatcaaatacgttttcgataattggctgcagggtcatggacgatacccgagtacaggaatactgtctgttattttttcgatgcacgtttgcgacgaagtagatttatacggctttggtgccgatagtaaggggaattggcaccactactgggaaaataacccgtccgccggggctttcaggaagaccggagtgcacgacgcagacttcgaatccaatgtcacggccacacttgcctcgatcaataagatacggatctttaagggacggtag

SEQ ID NO: 270788 - DNA, 219 bp, Artificial Sequence
  derived and/or modified sequence
atggtgactctgcgcaaaaggactcttaaagtactaaccttcctggtgctttttatatttctgactagtttctttctaaattacagccatactatggtggcaactacgtggttccctaaacagatggtgctcgaacttagcgaaaatttgaaacgccttatcaaacatcgcccatgtacatgtacacactgcatcggacaaaggaagttatctgcctag

SEQ ID NO: 270789 - DNA, 144 bp, Artificial Sequence
  derived and/or modified sequence
atggtaacactcaggaaacgtaccctcaaagttctgacctttcttgtgttgttcattttcctgacttcattctttctcaattattcccacactatggtagcaacaacctggttccccaagcagatggtgctggagctctcgtag

SEQ ID NO: 270790 - DNA, 1023 bp, Artificial Sequence
  derived and/or modified sequence
atggtgacactccgcaaacgcacgctaaaggttttaaccttccttgttctattcatattcctgacttcattttttcttaactatagccacaccatggtcgccactacttggttcccgaagcagatggtgcttgagctctctgagaacctgaagcgcctgatcaagcataggccctgtacgtgcacccactgtatcggccaacgcaagctctctgcctggttcgatgagaggttcaatcagacaatgcagccacttctaaccgctcaaaatgcccttctggaagatgatacctaccgctggtggctgcggctgcaacgtgagaaaaagccgaacaacttaaatgatacgatcaaggagctgtttagggtggtacccgggaacgtcgatcctatgcttgagaagagatctgtcggttgtcgcagatgcgccgtagtaggaaattcaggaaacctcagggagagctcgtatggaccagaaatcgattctcacgattttgtccttagaatgaataaagctcccaccgctgggtttgaggccgacgtcggaactaaaacaacacaccatcttgtctacccggaatcattcagggaattaggggataatgtgtctatgatcttagtgccatttaagacaattgacttagagtgggttgtctccgctatcactactggaactatatctcatacttatatacccgtcccggcgaaaattcgggtcaaacaagataagatactcatatatcaccccgccttcattaaatatgtcttcgataattggttacagggtcacgggcgctacccttccacaggaatactgagcgtgattttctctatgcatgtttgcgatgaagtggacctgtacggatttggagcagactctaaaggaaattggcatcactactgggagaacaaccctagcgctggagctttccggaaaacaggcgtgcatgacgctgactttgaatcaaatgttaccgcaacgttagcaagcatcaacaaaattagaatattcaaagggaggtag

SEQ ID NO: 270791 - DNA, 1023 bp, Artificial Sequence
  derived and/or modified sequence
atggtaacgctgcgcaaaaggactctgaaagtcctgactttcctggttctttttatattcctcaccagcttctttctaaattactctcacacaatggtggcgacaacttggtttccaaagcagatggtgctcgagctgtcagagaacctaaaaagattaatcaagcacagaccttgcacttgcacgcattgcatcggacagagaaagttatcagcatggttcgacgagcgatttaatcagacgatgcagcccctgttgaccgcccagaacgctctgctggaggatgatacctacagatggtggctcagactgcagagggaaaaaaaacccaataatctgaatgacactattaaggagctcttccgcgtcgtcccaggcaatgtagatcctatgttagaaaaaagatctgtgggatgtcggcggtgtgcggtagttggtaactcggggaatctgagagaatcctcctacggcccagagattgattctcacgatttcgtactgagaatgaataaggcaccaacagcgggctttgaagccgatgtggggactaaaacaacacaccacctcgtttatcctgaatctttccgagaattgggtgataatgtgtccatgatattggtgccgtttaaaaccatcgaccttgaatgggtcgtgtctgcaatcactaccggaaccattagccatacctatattcccgtccccgccaaaatcagagtcaaacaggacaaaattctcatatatcatcccgccttcattaaatatgtcttcgataactggcttcaagggcatggtcgatacccatccaccggcattttatctgttattttcagcatgcatgtgtgtgacgaagttgatctctacggatttggagccgattcaaaagggaattggcatcactactgggaaaataatccatcagccggagcctttaggaaaaccggggtccatgacgccgatttcgagtctaacgtaacagcaacactggccagcatcaataaaatacgaatctttaaagggaggtag

SEQ ID NO: 270792 - DNA, 1023 bp, Artificial Sequence
  derived and/or modified sequence
atggtaacccttaggaaacgaacactgaaagtgctgaccttcctggttctgtttatttttctcactagctttttcctaaattacagtcatactatggtcgcaaccacttggttcccgaagcaaatggtcctcgagctgtccgaaaacttgaagagattgatcaaacacaggccctgcacctgcacgcattgcatcggccagcgcaagctgagcgcttggtttgacgagagattcaaccagactatgcagcccctcctgacagcccagaacgcacttcttgaagacgatacctatcgttggtggttacgactgcaaagggagaaaaagcctaacaacttgaatgacacaattaaggagctgtttagagtggttccaggcaatgtggatccaatgctcgagaaaagatccgtgggctgccgccggtgtgcagtggtcgggaacagcgggaacctgagagaatcatcttacggcccggaaatagacagtcatgatttcgtgctgagaatgaacaaggcgccaacagctggctttgaagctgacgtgggcaccaagacaactcaccaccttgtgtatcctgagtcattccgagagctcggggacaacgtatccatgatcctggtgcccttcaaaaccattgacctcgaatgggtagtctccgctattactaccggtacaatctcccacacgtatatccccgtcccagcaaagataagagttaagcaagacaaaatcctgatataccatcctgcctttatcaagtacgtgtttgacaactggctgcaagggcacggtagatacccaagcaccgggattttgagtgtgatttttagtatgcacgtgtgcgacgaagtggatctctatggatttggagctgattctaaaggcaattggcaccactactgggaaaacaaccccagcgccggagcatttagaaaaacaggagtgcacgacgcagactttgagtcgaacgttaccgccaccctagccagcattaacaaaatacggatcttcaagggcagatag

SEQ ID NO: 270793 - DNA, 1023 bp, Artificial Sequence
  derived and/or modified sequence
atggtaacccttcgtaaaagaaccctcaaggtgctgactttccttgtgttgttcatattcctcacatctttttttttaaattactctcacaccatggtagccaccacatggttccccaaacaaatggtcctcgaactctccgagaacctcaagaggttgattaaacatcgcccatgcacgtgtactcactgcattggacagcggaaattatctgcctggttcgatgagcgcttcaatcagacaatgcaacccctcctgacagcccagaatgccctactggaagacgatacctatcgttggtggttacggctgcagagagagaagaaacccaataacctaaacgatacgatcaaggagctttttagggtggtgcctggtaatgtagaccctatgctggagaagagatcagtgggttgccgcaggtgcgcggtggtcggaaattccggcaaccttcgggaatctagttatgggcctgaaattgactctcacgatttcgtcttgagaatgaacaaagcacccacagcaggatttgaagccgacgtgggaacaaagactacccatcacctcgtctatccggagtcctttagagagctgggcgacaacgtttctatgattttagttccattcaagactatcgacttggagtgggtcgtgtctgctattacaacagggacaatatctcatacttatattcctgtgcccgcaaagattagagtcaaacaagacaaaatcctgatataccatcccgcttttattaaatacgttttcgacaactggctgcaaggtcacggtagatatccctccactggcattctttccgtgatattctccatgcacgtctgcgatgaagtggacctatatgggttcggcgccgattctaagggaaactggcaccattattgggaaaacaatccttctgcaggagcttttagaaaaaccggagtccatgatgccgatttcgaaagtaacgtaacggccaccctcgcttccatcaataaaatacgcattttcaaaggtcggtag

SEQ ID NO: 270794 - DNA, 6967 bp, Artificial Sequence
  derived and/or modified sequence
cccgcctcctcgcttcctcggctccagcctccgccggcggagcccactatgccagacagtttcgacactttgcaaagacaaagagccctagaccggagggaggaggaggaggaagaagagcggagagagaaggaagaggcgatgtgagctgggaagggggcaagtgtccgggacacccacacccctgtattctcctccgaaccccttcatgcccaaatcccggaaactccagcgtgtctccagccgtgttggtaccattttcagatttcatcttcctaaactggaaatgtcaatgagaggaaattaacacccccaagagctgcagtgagcaaatgcattgagcttgggtcaggacaattccatttggggaccagagatggacggtcactcagcctatggaggtaaagtgactaatctgaacaaagcagagactccactgatgagaaaagcagatgacagacaaccttctgtgccttcatcaagctggttgtgtacccaccatgtccctggcgacaggatgggaaagaaaaagccctaattaaggatcgtcagaaaccacagttggaggaggacggcagagacagtttccctccccgctataccaacacccttccttcgaggtcctcgctcctgagggaccctggactgtcacagagattaatgaccccttatcttctttggatgtgaaaggaaatcactggttaaagcttgatcgagagacattatcagctctttaaggattgcagaagaataggctactttattttctgaaaaggtaaatatatgcaagcaaagccaacatgccacgaatggcgttggtctaccacacagccgtgtctgggacacagttgggggtcatcccccagcaggagtgaagtcgagcttagcggcccttgtgtcctcccttggaattcctgccatcccttttgattgagcctccacctctgggatttttcttccatttttctcctctcttaggagggagttcctgctacccatcgtgggaggccaccatcaggactgcgaagatggtgaccctgcggaagaggaccctgaaagtgctcaccttcctcgtgctcttcatcttcctcacctccttcttcctgaactactcccacaccatggtggccaccacctggttccccaagcagatggtcctggagctctccgagaacctgaagagactgatcaagcacaggccttgcacctgcacccactgcatcgggcagcgcaagctctcggcctggttcgatgagaggttcaaccagaccatgcagccgctgctgaccgcccagaacgcgctcttggaggacgacacctaccgatggtggctgaggctccagcgggagaagaagcccaataacttgaatgacaccatcaaggagctgttcagagtggtgcctgggaatgtggaccctatgctggagaagaggtcggtgggctgccggcgctgcgccgttgtgggcaactcgggcaacctgagggagtcttcttatgggcctgagatagacagtcacgactttgtcctcaggatgaacaaggcgcccacggcagggtttgaagctgatgttgggaccaagaccacccaccatctggtgtaccctgagagcttccgggagctgggagataatgtcagcatgatcctggtgcccttcaagaccatcgacttggagtgggtggtgagcgccatcaccacgggcaccatttcccacacctacatcccggttcctgcaaagatcagagtgaaacaggataagatcctgatctaccacccagccttcatcaagtatgtctttgacaactggctgcaagggcacgggcgatacccatctaccggcatcctctcggtcatcttctcaatgcatgtctgcgatgaggtggacttgtacggcttcggggcagacagcaaagggaactggcaccactactgggagaacaacccatccgcgggggcttttcgcaagacgggggtgcacgatgcagactttgagtctaacgtgacggccaccttggcctccatcaataaaatccggatcttcaaggggagatgacgcagtgaagggctgaggatggacgcactgtcacacctctgcatttccagccccagcatcttgctggagccgttccatcccggagcttggaggggcagcctcaggtgtgtgcctgggcaccgctcacagcctcttgcacccagccgttggcagcatctactcagcaaggtcactaagctctgccagcgtggcagagcatgtcttggaacctgtcttgagtggggacaacgtccccccactgctgccctagagctggggagacgctgggaaaggttcaacctccacacactaaaatcattttggctcctggggcaagcttggggaatgaatgtggaagatgcctatattctgagagacaggacagtttcccaggaagatgggcagagacttgagtggcgattacctccagcacagagacgtgccaggcggtgttggcgctcggggcgagatgctgcccttctttgcacgaagcctggcctcttgcttggcgtgataaccctgtcatcttcccaaagctcatttatgagccaccagaggctcctaccccaaagattttcacagaaacttgaggccaggtgccgtggctcacacctgtaatctgaacactttgggaggccgaggcgggaggatcacttgagcccaggagttcaagaccagcctgggcaacatagtgagactcctgtctctacaaaaataaaagatttaaaaaaattagccaggcacggtggcacacacttgtagccccagctactagggaggctgaggagggaggatctcttgtgcctaggagttcgaggctgcagtgggctgtgatcacaccactgcactccagcctgggcaacagagtgagaccctgtctctgaaaaaaaaaaaaaaagaaaagaaaaaaaaccccaaacttggcaccgtgtttctgactcctgcagatgcctcttcccaagcagttgttcctttgagtagtcagtctcatggttctaatcgtggcgagagcggatctgaccacttccatgtgcctttgtatttgggaaagaaaagcatgcattggctgaaatgaaacaaaagcccttacttgggaaaagggacccccaccagcggccctgcttgctccgtagctgggaacatcttttctggtttcctgagccagcacctgaattgcaacgaagctctgaggatactcaacaccacccagcagtgcgtcagaatggaacgtacattctcattctcagactgttcaatatggtgcccgtaacctccaaagccacacaggaggctgccagcagcattttccccaagggcctgagctcagggtcaagtccctgctggccatcttggggctgtcactgggggtctgggtcaaggacatcccaggaatggtaactgccacatacctcatcttcttactccccagctactctcttttcctcattagccttcctgattatttattgatttcttttttttattcaactgacattgtttgcaccctggctctgttggtggtcctggtgttttaatgaagcttgcctcacccagtagctgggaaattaggtgggggtgcttaagggaggtttgtaggagtcctcggacgtgggatattgggggtatctagggcttggatggtttgtggaatgtcctcagcatcctcccgtcccaacccaaccttccttcttcctcattgtggacttggatttattctcaggctaggagtctccaaaactccgtgaaaccttattgctgctgggtgtggagtggagagtgacaggaatgtgggggacggtgattgttggctccagttactaatgtttaagcagaaaaaccactttcttgttgaaaatatccctgaaaaggtcgctgctgctttgaggaggcgtgactttttcctggtggagtgtgacggaggcatggggcctgtgctcccaggctcgggggagccccctctgcacacggggagggaggaacttggggacatcagtcatgggtcacaggtggcttcaggccattcacaagagtccccggaagttgcgtgccaagtttggttttttccctgaatctctgcatatgagcatttttctggagaaaggaccatagcttttattagattctcaaaggttcagaatggggaatgtgttaaacaaaccgaaaacctgtttcagctttaaaatcctccaaaactttaaagacttttcttttttctgagaaaggctggtaaatcactgagtcatcattcagaacatacagcctcgaagggcagagctcacacccatatatgacgttaagagctcaacaaatgtttgttgagtgactgagtgaccccaggggcagactccagatcatcagacactgatacagagagcgatgctatctcctcaactctccctcttctcctaaaagctgagtctatatagggatgacaggctcaggctgagcagtcgacttctctgggttttgctgtgtaagaataggtccctcaacatgaagatgtgtctgcgtctgagccagatgctgcctgggtcggttgcctggcctccgtctggtctccctccctcctactagggtggtcaagctgtgagatctcttccagcctccaaatccagctttcccattttactgatgagaaaatcaaggccacattgcagctgggtggggagtggagcgtgacaggcacgggagaggacagcgattgttgactctagttcctgatgtttaatcagaaaaaccacttttcctgtagagcacatttcctaaaaggctgctgctgtgtagggaggtgtggccttttcctggtgcagtgtgaaggagggaagtgacgggcagtcgtgaactgtctgggacagatagcacaagtcagagtttgagcaaaactagggtgttaccggcgctatgttgaaattgtctggaggcgggctttcccagcgagtctccattcagcatctggaaaaagtgtaaccagaatggaggtgtctgactctcctgtgctctctcagcgccgagctctagctgcaggctgcctgggtggccttctcacaccctcccgtgcaggagactgcatttctctttcccacagcccagcagatagctcattggcttagcaatgggcacttaacagaatccagttgttgcagccagaattaaatgcaccagtctggcttaaaccaactggaactcatccctggggtgaaggtggctgggaattagacaagagtgtgtgttagccaaaaggcacatgcatgctgtcagcaggagaatgaggagcactggttctgggcaggcagtggcaggggctccctcaggcccctgattcccagcccacagctctttctactctgcagacagagttccttggagactggccctgcattcaggcagggagcagaggggtccctgcctgcagcacccagagctgaacctgaagctacaaagatgggctgatgaggtggcccatgaggtgtcagcaacatcccaaccccctgggtctccccagtgagtcagggcactgatttgctatagctggagctacatgcacctctcctcccctcagccaccttttaggggagaaaggagggcagatttgtaacctctggttctctgcagggatcctgggctggaagaaagttcataaatggatgaatgccttttaaaactccagcttttccaagcatcattcaccaaagcatttggttaggcttagagagaaaagctggatatgagaaaatagaatgtaaaataggagggaaaaaaaaaaagaaggtggagagggcagttaagatctgggtgattctttagggaaacggctggttgagaggctttgatggaatcccattctctgctgtggccagaaggtggtgctagaggccagtcccacttggatgtgaccctggcctctgccaggattcaaaccacaaagaacatttggaactgggatgtttgctttgaagcagcccgaaaacaagtgaaaggaaaccaagataactctctctccctccgctggcaaggatcaaaaataccttgtgcagggaagcccgagcctcgaggggccactgcccagctaaagatgactggacaccagccatgcaccatcaggaaccagcacctgtcctcacccctgagaagagccccgggggtatcattatatccatcgcagacatctggtttgcagcaaatgtggctacacgccatcaggattatcctgccctgtggactgggctagctagttttgagatagagtcaacctccccatttttgtttgtcatgaaaacaccagctcctgcacccctggggtgctacctgacacctgtgcaaagaaaaggaggaaaacttagaagaaaaggcagagacaggcaagacagcatctcacagcttgtcaggatcagggcattaccgactattttttcttaccaaaagagcactgaatttcctaggggaaggtgagccacctttacacctcctgtcctccctcccagcccgtcaagcgatcccatcacccagcctcatcactcagcttcttcctagtacaaaactgccatcggttgtacgtcctgagctgtgggacgtcagctttaaccctagcctgtctcagggcctcgccctccagccccccgccccttagggtgatcgtgggtttcttcccttcctcctgcacaatcgcttcccttcactgaattcccttcaaagccaaagtttcttgagcactttttcttgtgtgcagtcttgtgtgtttgggtgttggtgtttttaaatttgctttctattcccccctgcctctctccatgtcgttacgcagctgagcactggttgggatgcattcgaatgacttcagcaagatcctgctttcctcagcccccgctctgttttatttattgtttaatatttccaatgatccaaatcaaagtgaataaacaaagagctattttattgtt

SEQ ID NO: 270795 - DNA, 6316 bp, Artificial Sequence
  derived and/or modified sequence
gcagatgacagacaaccttctgtgccttcatcaagctggttgtgtacccaccatgtccctggcgacaggatgggaaagaaaaagccctaattaaggatcgtcagaaaccacagttggaggaggacggcagagacagtttccctccccgctataccaacacccttccttcgaggtcctcgctcctgagggaccctggactgtcacagagattaatgaccccttatcttctttggatgtgaaaggaaatcactggttaaagcttgatcgagagacattatcagctctttaaggattgcagaagaataggctactttattttctgaaaaggagggagttcctgctacccatcgtgggaggccaccatcaggactgcgaagatggtgaccctgcggaagaggaccctgaaagtgctcaccttcctcgtgctcttcatcttcctcacctccttcttcctgaactactcccacaccatggtggccaccacctggttccccaagcagatggtcctggagctctccgagaacctgaagagactgatcaagcacaggccttgcacctgcacccactgcatcgggcagcgcaagctctcggcctggttcgatgagaggttcaaccagaccatgcagccgctgctgaccgcccagaacgcgctcttggaggacgacacctaccgatggtggctgaggctccagcgggagaagaagcccaataacttgaatgacaccatcaaggagctgttcagagtggtgcctgggaatgtggaccctatgctggagaagaggtcggtgggctgccggcgctgcgccgttgtgggcaactcgggcaacctgagggagtcttcttatgggcctgagatagacagtcacgactttgtcctcaggatgaacaaggcgcccacggcagggtttgaagctgatgttgggaccaagaccacccaccatctggtgtaccctgagagcttccgggagctgggagataatgtcagcatgatcctggtgcccttcaagaccatcgacttggagtgggtggtgagcgccatcaccacgggcaccatttcccacacctacatcccggttcctgcaaagatcagagtgaaacaggataagatcctgatctaccacccagccttcatcaagtatgtctttgacaactggctgcaagggcacgggcgatacccatctaccggcatcctctcggtcatcttctcaatgcatgtctgcgatgaggtggacttgtacggcttcggggcagacagcaaagggaactggcaccactactgggagaacaacccatccgcgggggcttttcgcaagacgggggtgcacgatgcagactttgagtctaacgtgacggccaccttggcctccatcaataaaatccggatcttcaaggggagatgacgcagtgaagggctgaggatggacgcactgtcacacctctgcatttccagccccagcatcttgctggagccgttccatcccggagcttggaggggcagcctcaggtgtgtgcctgggcaccgctcacagcctcttgcacccagccgttggcagcatctactcagcaaggtcactaagctctgccagcgtggcagagcatgtcttggaacctgtcttgagtggggacaacgtccccccactgctgccctagagctggggagacgctgggaaaggttcaacctccacacactaaaatcattttggctcctggggcaagcttggggaatgaatgtggaagatgcctatattctgagagacaggacagtttcccaggaagatgggcagagacttgagtggcgattacctccagcacagagacgtgccaggcggtgttggcgctcggggcgagatgctgcccttctttgcacgaagcctggcctcttgcttggcgtgataaccctgtcatcttcccaaagctcatttatgagccaccagaggctcctaccccaaagattttcacagaaacttgaggccaggtgccgtggctcacacctgtaatctgaacactttgggaggccgaggcgggaggatcacttgagcccaggagttcaagaccagcctgggcaacatagtgagactcctgtctctacaaaaataaaagatttaaaaaaattagccaggcacggtggcacacacttgtagccccagctactagggaggctgaggagggaggatctcttgtgcctaggagttcgaggctgcagtgggctgtgatcacaccactgcactccagcctgggcaacagagtgagaccctgtctctgaaaaaaaaaaaaaaagaaaagaaaaaaaaccccaaacttggcaccgtgtttctgactcctgcagatgcctcttcccaagcagttgttcctttgagtagtcagtctcatggttctaatcgtggcgagagcggatctgaccacttccatgtgcctttgtatttgggaaagaaaagcatgcattggctgaaatgaaacaaaagcccttacttgggaaaagggacccccaccagcggccctgcttgctccgtagctgggaacatcttttctggtttcctgagccagcacctgaattgcaacgaagctctgaggatactcaacaccacccagcagtgcgtcagaatggaacgtacattctcattctcagactgttcaatatggtgcccgtaacctccaaagccacacaggaggctgccagcagcattttccccaagggcctgagctcagggtcaagtccctgctggccatcttggggctgtcactgggggtctgggtcaaggacatcccaggaatggtaactgccacatacctcatcttcttactccccagctactctcttttcctcattagccttcctgattatttattgatttcttttttttattcaactgacattgtttgcaccctggctctgttggtggtcctggtgttttaatgaagcttgcctcacccagtagctgggaaattaggtgggggtgcttaagggaggtttgtaggagtcctcggacgtgggatattgggggtatctagggcttggatggtttgtggaatgtcctcagcatcctcccgtcccaacccaaccttccttcttcctcattgtggacttggatttattctcaggctaggagtctccaaaactccgtgaaaccttattgctgctgggtgtggagtggagagtgacaggaatgtgggggacggtgattgttggctccagttactaatgtttaagcagaaaaaccactttcttgttgaaaatatccctgaaaaggtcgctgctgctttgaggaggcgtgactttttcctggtggagtgtgacggaggcatggggcctgtgctcccaggctcgggggagccccctctgcacacggggagggaggaacttggggacatcagtcatgggtcacaggtggcttcaggccattcacaagagtccccggaagttgcgtgccaagtttggttttttccctgaatctctgcatatgagcatttttctggagaaaggaccatagcttttattagattctcaaaggttcagaatggggaatgtgttaaacaaaccgaaaacctgtttcagctttaaaatcctccaaaactttaaagacttttcttttttctgagaaaggctggtaaatcactgagtcatcattcagaacatacagcctcgaagggcagagctcacacccatatatgacgttaagagctcaacaaatgtttgttgagtgactgagtgaccccaggggcagactccagatcatcagacactgatacagagagcgatgctatctcctcaactctccctcttctcctaaaagctgagtctatatagggatgacaggctcaggctgagcagtcgacttctctgggttttgctgtgtaagaataggtccctcaacatgaagatgtgtctgcgtctgagccagatgctgcctgggtcggttgcctggcctccgtctggtctccctccctcctactagggtggtcaagctgtgagatctcttccagcctccaaatccagctttcccattttactgatgagaaaatcaaggccacattgcagctgggtggggagtggagcgtgacaggcacgggagaggacagcgattgttgactctagttcctgatgtttaatcagaaaaaccacttttcctgtagagcacatttcctaaaaggctgctgctgtgtagggaggtgtggccttttcctggtgcagtgtgaaggagggaagtgacgggcagtcgtgaactgtctgggacagatagcacaagtcagagtttgagcaaaactagggtgttaccggcgctatgttgaaattgtctggaggcgggctttcccagcgagtctccattcagcatctggaaaaagtgtaaccagaatggaggtgtctgactctcctgtgctctctcagcgccgagctctagctgcaggctgcctgggtggccttctcacaccctcccgtgcaggagactgcatttctctttcccacagcccagcagatagctcattggcttagcaatgggcacttaacagaatccagttgttgcagccagaattaaatgcaccagtctggcttaaaccaactggaactcatccctggggtgaaggtggctgggaattagacaagagtgtgtgttagccaaaaggcacatgcatgctgtcagcaggagaatgaggagcactggttctgggcaggcagtggcaggggctccctcaggcccctgattcccagcccacagctctttctactctgcagacagagttccttggagactggccctgcattcaggcagggagcagaggggtccctgcctgcagcacccagagctgaacctgaagctacaaagatgggctgatgaggtggcccatgaggtgtcagcaacatcccaaccccctgggtctccccagtgagtcagggcactgatttgctatagctggagctacatgcacctctcctcccctcagccaccttttaggggagaaaggagggcagatttgtaacctctggttctctgcagggatcctgggctggaagaaagttcataaatggatgaatgccttttaaaactccagcttttccaagcatcattcaccaaagcatttggttaggcttagagagaaaagctggatatgagaaaatagaatgtaaaataggagggaaaaaaaaaaagaaggtggagagggcagttaagatctgggtgattctttagggaaacggctggttgagaggctttgatggaatcccattctctgctgtggccagaaggtggtgctagaggccagtcccacttggatgtgaccctggcctctgccaggattcaaaccacaaagaacatttggaactgggatgtttgctttgaagcagcccgaaaacaagtgaaaggaaaccaagataactctctctccctccgctggcaaggatcaaaaataccttgtgcagggaagcccgagcctcgaggggccactgcccagctaaagatgactggacaccagccatgcaccatcaggaaccagcacctgtcctcacccctgagaagagccccgggggtatcattatatccatcgcagacatctggtttgcagcaaatgtggctacacgccatcaggattatcctgccctgtggactgggctagctagttttgagatagagtcaacctccccatttttgtttgtcatgaaaacaccagctcctgcacccctggggtgctacctgacacctgtgcaaagaaaaggaggaaaacttagaagaaaaggcagagacaggcaagacagcatctcacagcttgtcaggatcagggcattaccgactattttttcttaccaaaagagcactgaatttcctaggggaaggtgagccacctttacacctcctgtcctccctcccagcccgtcaagcgatcccatcacccagcctcatcactcagcttcttcctagtacaaaactgccatcggttgtacgtcctgagctgtgggacgtcagctttaaccctagcctgtctcagggcctcgccctccagccccccgccccttagggtgatcgtgggtttcttcccttcctcctgcacaatcgcttcccttcactgaattcccttcaaagccaaagtttcttgagcactttttcttgtgtgcagtcttgtgtgtttgggtgttggtgtttttaaatttgctttctattcccccctgcctctctccatgtcgttacgcagctgagcactggttgggatgcattcgaatgacttcagcaagatcctgctttcctcagcccccgctctgttttatttattgtttaatatttccaatgatccaaatcaaagtgaataaacaaagagctattttattgtt

SEQ ID NO: 270796 - DNA, 684 bp, Artificial Sequence
  derived and/or modified sequence
gatgctgtcatcagggagcttgggggacaggcttcttggagtgtccccctggtgggacctggaatgtgttgaacttggctgagtggtgcaagggatcccctggtgccatccctgccaaagaccctatcagtgtcatgagcctgaggatgaaatctcccgatggatgacagacaaccttctgtgccttcatcaagctggttgtgtacccaccatgtccctggcgacaggatgggaaagaaaaagccctaattaaggatcgtcagaaaccacagttggaggaggacggcagagacagtttccctccccgctataccaacacccttccttcgaggtcctcgctcctgagggaccctggactgtcacagagattaatgaccccttatcttctttggatgtgaaaggaaatcactggttaaagcttgatcgagagacattatcagctctttaaggattgcagaagaataggctactttattttctgaaaaggagggagttcctgctacccatcgtgggaggccaccatcaggactgcgaagatggtgaccctgcggaagaggaccctgaaagtgctcaccttcctcgtgctcttcatcttcctcacctccttcttcctgaactactcccacaccatggtggccaccacctggttccccaagcagatggtcctggagctctccgagaacc

SEQ ID NO: 270797 - DNA, 6951 bp, Artificial Sequence
  derived and/or modified sequence
cctcggctccagcctccgccggcggagcccactatgccagacagtttcgacactttgcaaagacaaagagccctagaccggagggaggaggaggaggaagaagagcggagagagaaggaagaggcgatgtgagctgggaagggggcaagtgtccgggacacccacacccctgtattctcctccgaaccccttcatgcccaaatcccggaaactccagcgtgtctccagccgtgttggtaccattttcagatttcatcttcctaaactggaaatgtcaatgagaggaaattaacacccccaagagctgcagtgagcaaatgcattgagcttgggtcaggacaattccatttggggaccagagatggacggtcactcagcctatggagatgaagaaactgaggttcagagaggttaagagactccactgaggtcacacagccgatgacagacaaccttctgtgccttcatcaagctggttgtgtacccaccatgtccctggcgacaggatgggaaagaaaaagccctaattaaggatcgtcagaaaccacagttggaggaggacggcagagacagtttccctccccgctataccaacacccttccttcgaggtcctcgctcctgagggaccctggactgtcacagagattaatgaccccttatcttctttggatgtgaaaggaaatcactggttaaagcttgatcgagagacattatcagctctttaaggattgcagaagaataggctactttattttctgaaaaggtaaatatatgcaagcaaagccaacatgccacgaatggcgttggtctaccacacagccgtgtctgggacacagttgggggtcatcccccagcaggagtgaagtcgagcttagcggcccttgtgtcctcccttggaattcctgccatcccttttgattgagcctccacctctgggatttttcttccatttttctcctctcttaggagggagttcctgctacccatcgtgggaggccaccatcaggactgcgaagatggtgaccctgcggaagaggaccctgaaagtgctcaccttcctcgtgctcttcatcttcctcacctccttcttcctgaactactcccacaccatggtggccaccacctggttccccaagcagatggtcctggagctctccgagaacctgaagagactgatcaagcacaggccttgcacctgcacccactgcatcgggcagcgcaagctctcggcctggttcgatgagaggttcaaccagaccatgcagccgctgctgaccgcccagaacgcgctcttggaggacgacacctaccgatggtggctgaggctccagcgggagaagaagcccaataacttgaatgacaccatcaaggagctgttcagagtggtgcctgggaatgtggaccctatgctggagaagaggtcggtgggctgccggcgctgcgccgttgtgggcaactcgggcaacctgagggagtcttcttatgggcctgagatagacagtcacgactttgtcctcaggatgaacaaggcgcccacggcagggtttgaagctgatgttgggaccaagaccacccaccatctggtgtaccctgagagcttccgggagctgggagataatgtcagcatgatcctggtgcccttcaagaccatcgacttggagtgggtggtgagcgccatcaccacgggcaccatttcccacacctacatcccggttcctgcaaagatcagagtgaaacaggataagatcctgatctaccacccagccttcatcaagtatgtctttgacaactggctgcaagggcacgggcgatacccatctaccggcatcctctcggtcatcttctcaatgcatgtctgcgatgaggtggacttgtacggcttcggggcagacagcaaagggaactggcaccactactgggagaacaacccatccgcgggggcttttcgcaagacgggggtgcacgatgcagactttgagtctaacgtgacggccaccttggcctccatcaataaaatccggatcttcaaggggagatgacgcagtgaagggctgaggatggacgcactgtcacacctctgcatttccagccccagcatcttgctggagccgttccatcccggagcttggaggggcagcctcaggtgtgtgcctgggcaccgctcacagcctcttgcacccagccgttggcagcatctactcagcaaggtcactaagctctgccagcgtggcagagcatgtcttggaacctgtcttgagtggggacaacgtccccccactgctgccctagagctggggagacgctgggaaaggttcaacctccacacactaaaatcattttggctcctggggcaagcttggggaatgaatgtggaagatgcctatattctgagagacaggacagtttcccaggaagatgggcagagacttgagtggcgattacctccagcacagagacgtgccaggcggtgttggcgctcggggcgagatgctgcccttctttgcacgaagcctggcctcttgcttggcgtgataaccctgtcatcttcccaaagctcatttatgagccaccagaggctcctaccccaaagattttcacagaaacttgaggccaggtgccgtggctcacacctgtaatctgaacactttgggaggccgaggcgggaggatcacttgagcccaggagttcaagaccagcctgggcaacatagtgagactcctgtctctacaaaaataaaagatttaaaaaaattagccaggcacggtggcacacacttgtagccccagctactagggaggctgaggagggaggatctcttgtgcctaggagttcgaggctgcagtgggctgtgatcacaccactgcactccagcctgggcaacagagtgagaccctgtctctgaaaaaaaaaaaaaaagaaaagaaaaaaaaccccaaacttggcaccgtgtttctgactcctgcagatgcctcttcccaagcagttgttcctttgagtagtcagtctcatggttctaatcgtggcgagagcggatctgaccacttccatgtgcctttgtatttgggaaagaaaagcatgcattggctgaaatgaaacaaaagcccttacttgggaaaagggacccccaccagcggccctgcttgctccgtagctgggaacatcttttctggtttcctgagccagcacctgaattgcaacgaagctctgaggatactcaacaccacccagcagtgcgtcagaatggaacgtacattctcattctcagactgttcaatatggtgcccgtaacctccaaagccacacaggaggctgccagcagcattttccccaagggcctgagctcagggtcaagtccctgctggccatcttggggctgtcactgggggtctgggtcaaggacatcccaggaatggtaactgccacatacctcatcttcttactccccagctactctcttttcctcattagccttcctgattatttattgatttcttttttttattcaactgacattgtttgcaccctggctctgttggtggtcctggtgttttaatgaagcttgcctcacccagtagctgggaaattaggtgggggtgcttaagggaggtttgtaggagtcctcggacgtgggatattgggggtatctagggcttggatggtttgtggaatgtcctcagcatcctcccgtcccaacccaaccttccttcttcctcattgtggacttggatttattctcaggctaggagtctccaaaactccgtgaaaccttattgctgctgggtgtggagtggagagtgacaggaatgtgggggacggtgattgttggctccagttactaatgtttaagcagaaaaaccactttcttgttgaaaatatccctgaaaaggtcgctgctgctttgaggaggcgtgactttttcctggtggagtgtgacggaggcatggggcctgtgctcccaggctcgggggagccccctctgcacacggggagggaggaacttggggacatcagtcatgggtcacaggtggcttcaggccattcacaagagtccccggaagttgcgtgccaagtttggttttttccctgaatctctgcatatgagcatttttctggagaaaggaccatagcttttattagattctcaaaggttcagaatggggaatgtgttaaacaaaccgaaaacctgtttcagctttaaaatcctccaaaactttaaagacttttcttttttctgagaaaggctggtaaatcactgagtcatcattcagaacatacagcctcgaagggcagagctcacacccatatatgacgttaagagctcaacaaatgtttgttgagtgactgagtgaccccaggggcagactccagatcatcagacactgatacagagagcgatgctatctcctcaactctccctcttctcctaaaagctgagtctatatagggatgacaggctcaggctgagcagtcgacttctctgggttttgctgtgtaagaataggtccctcaacatgaagatgtgtctgcgtctgagccagatgctgcctgggtcggttgcctggcctccgtctggtctccctccctcctactagggtggtcaagctgtgagatctcttccagcctccaaatccagctttcccattttactgatgagaaaatcaaggccacattgcagctgggtggggagtggagcgtgacaggcacgggagaggacagcgattgttgactctagttcctgatgtttaatcagaaaaaccacttttcctgtagagcacatttcctaaaaggctgctgctgtgtagggaggtgtggccttttcctggtgcagtgtgaaggagggaagtgacgggcagtcgtgaactgtctgggacagatagcacaagtcagagtttgagcaaaactagggtgttaccggcgctatgttgaaattgtctggaggcgggctttcccagcgagtctccattcagcatctggaaaaagtgtaaccagaatggaggtgtctgactctcctgtgctctctcagcgccgagctctagctgcaggctgcctgggtggccttctcacaccctcccgtgcaggagactgcatttctctttcccacagcccagcagatagctcattggcttagcaatgggcacttaacagaatccagttgttgcagccagaattaaatgcaccagtctggcttaaaccaactggaactcatccctggggtgaaggtggctgggaattagacaagagtgtgtgttagccaaaaggcacatgcatgctgtcagcaggagaatgaggagcactggttctgggcaggcagtggcaggggctccctcaggcccctgattcccagcccacagctctttctactctgcagacagagttccttggagactggccctgcattcaggcagggagcagaggggtccctgcctgcagcacccagagctgaacctgaagctacaaagatgggctgatgaggtggcccatgaggtgtcagcaacatcccaaccccctgggtctccccagtgagtcagggcactgatttgctatagctggagctacatgcacctctcctcccctcagccaccttttaggggagaaaggagggcagatttgtaacctctggttctctgcagggatcctgggctggaagaaagttcataaatggatgaatgccttttaaaactccagcttttccaagcatcattcaccaaagcatttggttaggcttagagagaaaagctggatatgagaaaatagaatgtaaaataggagggaaaaaaaaaaagaaggtggagagggcagttaagatctgggtgattctttagggaaacggctggttgagaggctttgatggaatcccattctctgctgtggccagaaggtggtgctagaggccagtcccacttggatgtgaccctggcctctgccaggattcaaaccacaaagaacatttggaactgggatgtttgctttgaagcagcccgaaaacaagtgaaaggaaaccaagataactctctctccctccgctggcaaggatcaaaaataccttgtgcagggaagcccgagcctcgaggggccactgcccagctaaagatgactggacaccagccatgcaccatcaggaaccagcacctgtcctcacccctgagaagagccccgggggtatcattatatccatcgcagacatctggtttgcagcaaatgtggctacacgccatcaggattatcctgccctgtggactgggctagctagttttgagatagagtcaacctccccatttttgtttgtcatgaaaacaccagctcctgcacccctggggtgctacctgacacctgtgcaaagaaaaggaggaaaacttagaagaaaaggcagagacaggcaagacagcatctcacagcttgtcaggatcagggcattaccgactattttttcttaccaaaagagcactgaatttcctaggggaaggtgagccacctttacacctcctgtcctccctcccagcccgtcaagcgatcccatcacccagcctcatcactcagcttcttcctagtacaaaactgccatcggttgtacgtcctgagctgtgggacgtcagctttaaccctagcctgtctcagggcctcgccctccagccccccgccccttagggtgatcgtgggtttcttcccttcctcctgcacaatcgcttcccttcactgaattcccttcaaagccaaagtttcttgagcactttttcttgtgtgcagtcttgtgtgtttgggtgttggtgtttttaaatttgctttctattcccccctgcctctctccatgtcgttacgcagctgagcactggttgggatgcattcgaatgacttcagcaagatcctgctttcctcagcccccgctctgttttatttattgtttaatatttccaatgatccaaatcaaagtgaataaacaaagagctatttta

SEQ ID NO: 270798 - DNA, 2580 bp, Artificial Sequence
  derived and/or modified sequence
accggagggaggaggaggaggaagaagagcggagagagaaggaagaggcgatgtgagctgggaagggggcaagtgtccgggacacccacacccctgtattctcctccgaaccccttcatgcccaaatcccggaaactccagcgtgtctccagccgtgttggtaccattttcagatttcatcttcctaaactggaaatgtcaatgagaggaaattaacacccccaagagctgcagtgagcaaatgcattgagcttgggtcaggacaattccatttggggaccagagatggacggtcactcagcctatggagatgaagaaactgaggttcagagaggttaagagactccactgaggtcacacagccgatgacagacaaccttctgtgccttcatcaagctggttgtgtacccaccatgtccctggcgacaggatgggaaagaaaaagccctaattaaggatcgtcagaaaccacagttggaggaggacggcagagacagtttccctccccgctataccaacacccttccttcgaggtcctcgctcctgagggaccctggactgtcacagagattaatgaccccttatcttctttggatgtgaaaggaaatcactggttaaagcttgatcgagagacattatcagctctttaaggattgcagaagaataggctactttattttctgaaaaggagggagttcctgctacccatcgtgggaggccaccatcaggactgcgaagatggtgaccctgcggaagaggaccctgaaagtgctcaccttcctcgtgctcttcatcttcctcacctccttcttcctgaactactcccacaccatggtggccaccacctggttccccaagcagatggtcctggagctctccgagaacctgaagagactgatcaagcacaggccttgcacctgcacccactgcatcgggcagcgcaagctctcggcctggttcgatgagaggttcaaccagaccatgcagccgctgctgaccgcccagaacgcgctcttggaggacgacacctaccgatggtggctgaggctccagcgggagaagaagcccaataacttgaatgacaccatcaaggagctgttcagagtggtgcctgggaatgtggaccctatgctggagaagaggtcggtgggctgccggcgctgcgccgttgtgggcaactcgggcaacctgagggagtcttcttatgggcctgagatagacagtcacgactttgtcctcaggatgaacaaggcgcccacggcagggtttgaagctgatgttgggaccaagaccacccaccatctggtgtaccctgagagcttccgggagctgggagataatgtcagcatgatcctggtgcccttcaagaccatcgacttggagtgggtggtgagcgccatcaccacgggcaccatttcccacacctacatcccggttcctgcaaagatcagagtgaaacaggataagatcctgatctaccacccagccttcatcaagtatgtctttgacaactggctgcaagggcacgggcgatacccatctaccggcatcctctcggtcatcttctcaatgcatgtctgcgatgaggtggacttgtacggcttcggggcagacagcaaagggaactggcaccactactgggagaacaacccatccgcgggggcttttcgcaagacgggggtgcacgatgcagactttgagtctaacgtgacggccaccttggcctccatcaataaaatccggatcttcaaggggagatgacgcagtgaagggctgaggatggacgcactgtcacacctctgcatttccagccccagcatcttgctggagccgttccatcccggagcttggaggggcagcctcaggtgtgtgcctgggcaccgctcacagcctcttgcacccagccgttggcagcatctactcagcaaggtcactaagctctgccagcgtggcagagcatgtcttggaacctgtcttgagtggggacaacgtccccccactgctgccctagagctggggagacgctgggaaaggttcaacctccacacactaaaatcattttggctcctggggcaagcttggggaatgaatgtggaagatgcctatattctgagagacaggacagtttcccaggaagatgggcagagacttgagtggcgattacctccagcacagagacgtgccaggcggtgttggcgctcggggcgagatgctgcccttctttgcacgaagcctggcctcttgcttggcgtgataaccctgtcatcttcccaaagctcatttatgagccaccagaggctcctaccccaaagattttcacagaaacttgaggccaggtgccgtggctcacacctgtaatctgaacactttgggaggccgaggcgggaggatcacttgagcccaggagttcaagaccagcctgggcaacatagtgagactcctgtctctacaaaaataaaagatttaaaaaaattagccaggcacggtggcacacacttgtagccccagctactagggaggctgaggagggaggatctcttgtgcctaggagttcgaggctgcagtgggctgtgatcacac

SEQ ID NO: 270799 - DNA, 895 bp, Artificial Sequence
  derived and/or modified sequence
ggaatgtgttgaacttggctgagtggtgcaagggatcccctggtgccatccctgccaaagaccctatcagtgtcatgagcctgaggatgaaatctcccgatggatgacagacaaccttctgtgccttcatcaagctggttgtgtacccaccatgtccctggcgacaggatgggaaagaaaaagccctaattaaggatcgtcagaaaccacagttggaggaggacggcagagacagtttccctccccgctataccaacacccttccttcgaggtcctcgctcctgagggaccctggactgtcacagagattaatgaccccttatcttctttggatgtgaaaggaaatcactggttaaagcttgatcgagagacattatcagctctttaaggattgcagaagaataggctactttattttctgaaaaggtaaatatatgcaagcaaagccaacatgccacgaatggcgttggtctaccacacagccgtgtctgggacacagttgggggtcatcccccagcaggagtgaagtcgagcttagcggcccttgtgtcctcccttggaattcctgccatcccttttgattgagcctccacctctgggatttttcttccatttttctcctctcttaggagggagttcctgctacccatcgtgggaggccaccatcaggactgcgaagatggtgaccctgcggaagaggaccctgaaagtgctcaccttcctcgtgctcttcatcttcctcacctccttcttcctgaactactcccacaccatggtggccaccacctggttccccaagcagatggtcctggagctctccgagaacctgaagagactgatcaagcacaggccttgcacctgcacccactgcatcgggcagcgcaagctctcggcc

SEQ ID NO: 270800 - DNA, 741 bp, Artificial Sequence
  derived and/or modified sequence
ggtgactctcttctctccccacactgagtggcttgaaagggctcagaggcttcacatgagcacttaacatttactgtgtatatctgagccaagtagggaaagaaactgtctcaccaatcctcacgccctctccccatgctaagtctcccgagtattttcttctgtttttcagatgaagaaactgaggttcagagaggttaagagactccactgaggtcacacagccgatgacagacaaccttctgtgccttcatcaagctggttgtgtacccaccatgtccctggcgacaggatgggaaagaaaaagccctaattaaggatcgtcagaaaccacagttggaggaggacggcagagacagtttccctccccgctataccaacacccttccttcgaggtcctcgctcctgagggaccctggactgtcacagagattaatgaccccttatcttctttggatgtgaaaggaaatcactggttaaagcttgatcgagagacattatcagctctttaaggattgcagaagaataggctactttattttctgaaaaggagggagttcctgctacccatcgtgggaggccaccatcaggactgcgaagatggtgaccctgcggaagaggaccctgaaagtgctcaccttcctcgtgctcttcatcttcctcacctccttcttcctgaactactcccacaccatggtggccaccacctggttccccaagcagatggtcctggagctctcc

SEQ ID NO: 270801 - RNA, 150 nt, Artificial Sequence
  derived and/or modified sequence
auggucacauugcguaagaggacucuaaaaguccugacuuuccugguacucuucauuuuccuuacaucauuuuuucucaacuacucucacacuauggucgcgacaacaugguuccccaaacaaaugguacuggagcuuagcgagaacuag

SEQ ID NO: 270802 - RNA, 219 nt, Artificial Sequence
  derived and/or modified sequence
auggugacucugcgcaaaaggacucuuaaaguacuaaccuuccuggugcuuuuuauauuucugacuaguuucuuucuaaauuacagccauacuaugguggcaacuacgugguucccuaaacagauggugcucgaacuuagcgaaaauuugaaacgccuuaucaaacaucgcccauguacauguacacacugcaucggacaaaggaaguuaucugccuag

SEQ ID NO: 270803 - RNA, 144 nt, Artificial Sequence
  derived and/or modified sequence
augguaacacucaggaaacguacccucaaaguucugaccuuucuuguguuguucauuuuccugacuucauucuuucucaauuauucccacacuaugguagcaacaaccugguuccccaagcagauggugcuggagcucucguag

SEQ ID NO: 270804 - protein, 887 aa, Artificial Sequence
  derived and/or modified sequence
MALVLEIFTLLASICWVSANIFEYQVDAQPLRPCELQRETAFLKQADYVPQCAEDGSFQTVQCQNDGRSCWCVGANGSEVLGSRQPGRPVACLSFCQLQKQQILLSGYINSTDTSYLPQCQDSGDYAPVQCDVQQVQCWCVDAEGMEVYGTRQLGRPKRCPRSCEIRNRRLLHGVGDKSPPQCSAEGEFMPVQCKFVNTTDMMIFDLVHSYNRFPDAFVTFSSFQRRFPEVSGYCHCADSQGRELAETGLELLLDEIYDTIFAGLDLPSTFTETTLYRILQRRFLAVQSVISGRFRCPTKCEVERFTATSFGHPYVPSCRRNGDYQAVQCQTEGPCWCVDAQGKEMHGTRQQGEPPSCAEGQSCASERQQALSRLYFGTSGYFSQHDLFSSPEKRWASPRVARFATSCPPTIKELFVDSGLLRPMVEGQSQQFSVSENLLKEAIRAIFPSRGLARLALQFTTNPKRLQQNLFGGKFLVNVGQFNLSGALGTRGTFNFSQFFQQLGLASFLNGGRQEDLAKPLSVGLDSNSSTGTPEAAKKDGTMNKPTVGSFGFEINLQENQNALKFLASLLELPEFLLFLQHAISVPEDVARDLGDVMETVLSSQTCEQTPERLFVPSCTTEGSYEDVQCFSGECWCVNSWGKELPGSRVRGGQPRCPTDCEKQRARMQSLMGSQPAGSTLFVPACTSEGHFLPVQCFNSECYCVDAEGQAIPGTRSAIGKPKKCPTPCQLQSEQAFLRTVQALLSNSSMLPTLSDTYEGQFSLEEKSLSLKIMQYFSHFIRSGNPNYPYEFSRKVPTFATPWPDFVPRAGGENYKEFSELLPNRQGLKKADCSFWSKYISSLKTSADGAKGGQSAESEEEELTAGSGLREDLLSLQEPGSKTYSK

SEQ ID NO: 270805 - protein, 1138 aa, Artificial Sequence
  derived and/or modified sequence
MMQKFEKVPESKVIFDANAPVAVRSKVPDSEFPVMQCLTDCTEDEACSFFTVSTTEPEISCDFYAWTSDNVACMTSDQKRDALGNSKATSFGSLRCQVKVRSHGQDSPAVYLKKGAIICGLLSSPSVLLCNVKDWMDPSEAWANATCPGVTYDQESHQVILRLGDQEFIKSLTPLEGTQDTFTNFQQVYLWKDSDMGSRPESMGCRKDTVPRPASPTEAGLTTELFSPVDLNQVIVNGNQSLSSQKHWLFKHLFSAQQANLWCLSRCVQEHSFCQLAEITESASLYFTCTLYPEAQVCDDIMESNAQGCRLILPQMPKALFRKKVILEDKVKNFYTRLPFQKLMGISIRNKVPMSEKSISNGFFECERRCDADPCCTGFGFLNVSQLKGGEVTCLTLNSLGIQMCSEENGGAWRILDCGSPDIEVHTYPFGWYQKPIAQNNAPSFCPLVVLPSLTEKVSLDSWQSLALSSVVVDPSIRHFDVAHVSTAATSNFSAVRDLCLSECSQHEACLITTLQTQPGAVRCMFYADTQSCTHSLQGQNCRLLLREEATHIYRKPGISLLSYEASVPSVPISTHGRLLGRSQAIQVGTSWKQVDQFLGVPYAAPPLAERRFQAPEPLNWTGSWDASKPRASCWQPGTRTSTSPGVSEDCLYLNVFIPQNVAPNASVLVFFHNTMDREESEGWPAIDGSFLAAVGNLIVVTASYRVGVFGFLSSGSGEVSGNWGLLDQVAALTWVQTHIRGFGGDPRRVSLAADRGGADVASIHLLTARATNSQLFRRAVLMGGSALSPAAVISHERAQQQAIALAKEVSCPMSSSQEVVSCLRQKPANVLNDAQTKLLAVSGPFHYWGPVIDGHFLREPPARALKRSLWVEVDLLIGSSQDDGLINRAKAVKQFEESRGRTSSKTAFYQALQNSLGGEDSDARVEAAATWYYSLEHSTDDYASFSRALENATRDYFIICPIIDMASAWAKRARGNVFMYHAPENYGHGSLELLADVQFALGLPFYPAYEGQFSLEEKSLSLKIMQYFSHFIRSGNPNYPYEFSRKVPTFATPWPDFVPRAGGENYKEFSELLPNRQGLKKADCSFWSKYISSLKTSADGAKGGQSAESEEEELTAGSGLREDLLSLQEPGSKTYSK

SEQ ID NO: 270806 - DNA, 3417 bp, Artificial Sequence
  derived and/or modified sequence
atgatgcagaagttcgagaaggtgcccgagagcaaggtgatcttcgacgccaacgcccccgtggccgtgagaagcaaggtgcccgacagcgagttccccgtgatgcagtgcctgaccgactgcaccgaggacgaggcctgcagcttcttcaccgtgagcaccaccgagcccgagatcagctgcgacttctacgcctggaccagcgacaacgtggcctgcatgaccagcgaccagaagagagacgccctgggcaacagcaaggccaccagcttcggcagcctgagatgccaggtgaaggtgagaagccacggccaggacagccccgccgtgtacctgaagaagggcgccatcatctgcggcctgctgagcagccccagcgtgctgctgtgcaacgtgaaggactggatggaccccagcgaggcctgggccaacgccacctgccccggcgtgacctacgaccaggagagccaccaggtgatcctgagactgggcgaccaggagttcatcaagagcctgacccccctggagggcacccaggacaccttcaccaacttccagcaggtgtacctgtggaaggacagcgacatgggcagcagacccgagagcatgggctgcagaaaggacaccgtgcccagacccgccagccccaccgaggccggcctgaccaccgagctgttcagccccgtggacctgaaccaggtgatcgtgaacggcaaccagagcctgagcagccagaagcactggctgttcaagcacctgttcagcgcccagcaggccaacctgtggtgcctgagcagatgcgtgcaggagcacagcttctgccagctggccgagatcaccgagagcgccagcctgtacttcacctgcaccctgtaccccgaggcccaggtgtgcgacgacatcatggagagcaacgcccagggctgcagactgatcctgccccagatgcccaaggccctgttcagaaagaaggtgatcctggaggacaaggtgaagaacttctacaccagactgcccttccagaagctgatgggcatcagcatcagaaacaaggtgcccatgagcgagaagagcatcagcaacggcttcttcgagtgcgagagaagatgcgacgccgacccctgctgcaccggcttcggcttcctgaacgtgagccagctgaagggcggcgaggtgacctgcctgaccctgaacagcctgggcatccagatgtgcagcgaggagaacggcggcgcctggagaatcctggactgcggcagccccgacatcgaggtgcacacctaccccttcggctggtaccagaagcccatcgcccagaacaacgcccccagcttctgccccctggtggtgctgcccagcctgaccgagaaggtgagcctggacagctggcagagcctggccctgagcagcgtggtggtggaccccagcatcagacacttcgacgtggcccacgtgagcaccgccgccaccagcaacttcagcgccgtgagagacctgtgcctgagcgagtgcagccagcacgaggcctgcctgatcaccaccctgcagacccagcccggcgccgtgagatgcatgttctacgccgacacccagagctgcacccacagcctgcagggccagaactgcagactgctgctgagagaggaggccacccacatctacagaaagcccggcatcagcctgctgagctacgaggccagcgtgcccagcgtgcccatcagcacccacggcagactgctgggcagaagccaggccatccaggtgggcaccagctggaagcaggtggaccagttcctgggcgtgccctacgccgccccccccctggccgagagaagattccaggcccccgagcccctgaactggaccggcagctgggacgccagcaagcccagagccagctgctggcagcccggcaccagaaccagcaccagccccggcgtgagcgaggactgcctgtacctgaacgtgttcatcccccagaacgtggcccccaacgccagcgtgctggtgttcttccacaacaccatggacagagaggagagcgagggctggcccgccatcgacggcagcttcctggccgccgtgggcaacctgatcgtggtgaccgccagctacagagtgggcgtgttcggcttcctgagcagcggcagcggcgaggtgagcggcaactggggcctgctggaccaggtggccgccctgacctgggtgcagacccacatcagaggcttcggcggcgaccccagaagagtgagcctggccgccgacagaggcggcgccgacgtggccagcatccacctgctgaccgccagagccaccaacagccagctgttcagaagagccgtgctgatgggcggcagcgccctgagccccgccgccgtgatcagccacgagagagcccagcagcaggccatcgccctggccaaggaggtgagctgccccatgagcagcagccaggaggtggtgagctgcctgagacagaagcccgccaacgtgctgaacgacgcccagaccaagctgctggccgtgagcggccccttccactactggggccccgtgatcgacggccacttcctgagagagccccccgccagagccctgaagagaagcctgtgggtggaggtggacctgctgatcggcagcagccaggacgacggcctgatcaacagagccaaggccgtgaagcagttcgaggagagcagaggcagaaccagcagcaagaccgccttctaccaggccctgcagaacagcctgggcggcgaggacagcgacgccagagtggaggccgccgccacctggtactacagcctggagcacagcaccgacgactacgccagcttcagcagagccctggagaacgccaccagagactacttcatcatctgccccatcatcgacatggccagcgcctgggccaagagagccagaggcaacgtgttcatgtaccacgcccccgagaactacggccacggcagcctggagctgctggccgacgtgcagttcgccctgggcctgcccttctaccccgcctacgagggccagttcagcctggaggagaagagcctgagcctgaagatcatgcagtacttcagccacttcatcagaagcggcaaccccaactacccctacgagttcagcagaaaggtgcccaccttcgccaccccctggcccgacttcgtgcccagagccggcggcgagaactacaaggagttcagcgagctgctgcccaacagacagggcctgaagaaggccgactgcagcttctggagcaagtacatcagcagcctgaagaccagcgccgacggcgccaagggcggccagagcgccgagagcgaggaggaggagctgaccgccggcagcggcctgagagaggacctgctgagcctgcaggagcccggcagcaagacctacagcaagtag

SEQ ID NO: 270807 - DNA, 3417 bp, Artificial Sequence
  derived and/or modified sequence
atgatgcaaaaattcgagaaggtccctgagtctaaggtcatctttgacgcgaatgctcctgttgccgttcgctcaaaggtgccagacagcgaattccccgtgatgcagtgcctgaccgactgcacggaagacgaggcctgctcatttttcacagtgtcaaccacagagccggagatcagctgcgacttctacgcttggacaagcgataacgttgcctgcatgacatccgatcagaaaagggacgccctgggcaattccaaagccacctccttcgggtcactgcgttgccaagttaaagtgaggagtcatggacaggattcccctgccgtctacctcaagaaaggggctatcatctgcgggctgttatccagtccgagtgtgctgctctgcaacgtcaaagactggatggacccttccgaggcctgggctaacgccacctgtcccggagtcacctacgatcaggaatctcaccaagtgattctgcggctcggcgatcaggagttcattaagagcctgacccctctggaaggcacacaagacacatttaccaattttcaacaggtatacttatggaaagactcagatatgggtagtcggcccgaatccatgggctgccgcaaggacactgtcccccgacccgctagcccaactgaggccgggttaacaacagagctcttttcacccgtggacctcaatcaggtgattgtaaatggaaaccagtccttatcatcccagaagcactggttgttcaaacatctgttttccgcccagcaagctaacctgtggtgcctcagtcgctgtgtccaggagcatagtttttgccagctggccgagattaccgagagtgcttctctgtacttcacttgcactctatacccagaggcacaggtctgtgacgatattatggagtctaacgcacaagggtgtaggctgatcctcccacagatgccaaaggccttatttcggaagaaggtgatccttgaggataaggtgaaaaacttttacacaagactgccatttcagaaattgatgggcatctccattaggaacaaggtccccatgtctgagaagagcatctctaacggattctttgagtgcgaacggagatgcgacgcggacccctgttgtacaggtttcggatttttaaacgtgtctcagttgaaggggggagaggttacttgtttaacccttaacagcttagggatccagatgtgtagtgaagaaaatgggggagcttggaggatcctagactgtgggtcacccgacatcgaagtccacacatatccctttgggtggtaccagaaacccatcgctcagaataacgccccctctttttgccccctggtggtacttccttcgttaactgaaaaagtatcccttgacagttggcagagcctcgctctaagcagcgtcgtggtagatccatcaatcaggcacttcgacgtggcacacgtttcaactgctgccacaagtaatttcagcgcggtgcgggacctgtgtctttccgagtgtagccaacacgaagcttgcctgattaccacactgcagacccagccaggggcagtccggtgtatgttctacgccgatacccaatcatgtacccattctctgcaaggtcagaattgccgtcttcttttacgcgaagaagccacccatatctaccggaagccaggcatcagcctcctatcttacgaagcaagtgtgccatctgttcctatcagtactcacggtagactgcttggccgctcacaagctatccaagtcggtaccagttggaaacaggtggaccaattcctgggcgtgccatatgccgcacctcctctagcagagaggcgctttcaagctcccgagcccttgaactggactggttcttgggacgctagcaagcctcgagccagctgttggcaaccgggcacacgaactagtacatcacccggagtgtcggaagactgcctgtacctgaacgtgttcattccacagaacgtggcacccaacgccagcgtcttggtcttttttcacaatactatggaccgcgaagaatctgagggttggccagctattgatggctcctttctggctgctgttggcaatttgatcgttgttacagcctcctacagggtgggcgtgttcggttttctgtcctcaggtagcggcgaagttagcggcaactggggactgttagaccaggtcgcagctctcacatgggttcagactcatataaggggattcggcggcgatcctagaagagttagcctggctgctgatcggggcggtgccgatgtcgcaagcattcacctactgaccgccagggccactaacagccagctgtttaggcgcgccgtcttaatgggaggctctgctttgagcccggctgctgtcataagccatgaaagggcccaacagcaagctatagctctggccaaagaagtatcatgtccaatgagcagctcccaggaagttgttagctgcttgaggcagaagcccgccaatgtgctgaatgacgctcaaaccaaattgctggccgtcagtggccctttccattattggggacctgtaatcgacggacactttctgcgcgagccccctgcccgcgccctgaaaagatctctgtgggtggaagtggacctcctgatcggctcctcacaagacgacggactgatcaatcgtgccaaggcggttaaacagttcgaagaaagcaggggccggactagcagcaagactgcattctatcaggccctccagaactcccttggcggagaagattctgacgcaagggtggaggccgcagccacatggtactactcattggaacactcgacagacgattatgcctctttctcacgagcccttgaaaatgccacccgtgattactttatcatttgccctatcatagacatggcttcagcatgggccaaaagagcgcggggcaatgtgttcatgtaccatgcccccgagaactacggtcacggttcactcgagctgctcgcagacgttcagttcgctctgggacttccattttatcctgcttatgagggccagttctccctggaggagaaatcactgtccctgaaaattatgcagtacttttcacacttcatcaggtctggaaaccccaattatccctatgaattctctcgcaaggtgcctacttttgctacaccatggcccgatttcgtgcctcgagccggtggtgaaaattataaagaattctccgagctcctgcccaatcgacaggggctgaagaaggccgattgcagtttttggtcaaagtatatttcctcacttaagacaagcgctgacggagcaaaagggggtcaaagtgccgaaagcgaagaggaggaactcaccgctggatccggcctgcgcgaggatctactgagcttacaggagcctggttcaaagacctactctaaatag

SEQ ID NO: 270808 - DNA, 3417 bp, Artificial Sequence
  derived and/or modified sequence
atgatgcagaagtttgagaaggtgcctgagagcaaggtgatctttgatgccaatgcccctgtggccgtgcgcagcaaggtgcctgacagcgagttccctgtgatgcagtgcctgacagactgcacagaagatgaggcctgcagcttcttcaccgtgtccaccacagagcctgagatcagctgtgacttctacgcctggaccagtgacaacgtggcctgcatgaccagtgaccagaagagagatgccctgggcaacagcaaggccaccagctttggcagcctgcgctgccaggtgaaggtgcgcagccacggccaggacagccctgctgtgtacctgaagaagggggccatcatctgtggcctgctgagcagccccagcgtgctgctgtgcaatgtgaaggactggatggaccccagcgaggcctgggccaatgccacctgccctggggtgacctatgaccaggagagccaccaggtgatcctgcggctgggggaccaggagttcatcaagagcctgacccccctggagggcacccaggacaccttcaccaacttccagcaggtgtacctgtggaaggacagcgacatgggcagcaggcctgagagcatgggctgcaggaaggacacagtgcccaggcctgccagccccacagaagctggcctgaccacagagctgttcagccctgtggacctgaaccaggtgattgtgaatggaaaccagagcctgagcagccagaagcactggctgttcaagcacctgttcagcgcccagcaggccaacctgtggtgcctgagccgctgtgtgcaggagcacagcttctgccagctggccgagatcacagagagcgccagcctgtacttcacctgcaccctgtacccagaggcccaggtgtgtgatgacatcatggagagcaatgcccagggctgccgcctcatcctgccccagatgcccaaggccctcttcaggaagaaggtgatcctggaggacaaggtgaagaacttctacacccggctgcccttccagaagctgatgggcatcagcatccggaacaaggtgcccatgtctgagaagagcatcagcaatggcttctttgaatgtgagcggcgctgtgatgctgacccctgctgcaccggcttcggcttcctgaatgtgtcccagctgaagggcggggaggtgacctgcctgaccctgaacagcctgggcatccagatgtgcagcgaggagaatggaggagcctggaggatcctggactgtggcagcccagacatcgaggtgcacacctaccccttcggctggtaccagaagcccatcgcccagaacaatgcccccagcttctgccccctggtggtgctgcccagcctgacagagaaggtgtccctggacagctggcagagcctggccctgagctctgtggtggtggaccccagcatccgccactttgatgtggcccacgtgtccacagctgccaccagcaacttctctgctgtgcgggacctgtgcctgtctgaatgttcccagcacgaggcctgcctgatcaccaccctgcagacccagcctggagctgtgcgctgcatgttttatgctgacacccagagctgcacccacagcctgcagggccagaactgccgcctgctgctgcgggaggaggccacccacatctacaggaagccaggcatcagcctgctgtcctatgaggcctctgtgcccagcgtgcccatcagcacccacggccgcctgctgggccgcagccaggccatccaggtgggcacctcctggaagcaggtggaccagttcctgggcgtgccctatgctgccccacccctggccgagcggcgcttccaggcccctgagcccctgaactggacaggctcctgggatgccagcaagccccgggccagctgctggcagcccggcaccaggaccagcaccagccctggggtgtctgaggactgcctgtacctgaatgtgttcatcccccagaatgtggccccaaatgcctctgtgctggtgttcttccacaacaccatggaccgggaggagagcgagggctggccagccattgatggcagcttcctggccgctgtgggcaacctgattgtggtgacagccagctacagagtgggcgtgtttggcttcctgagcagcggcagcggggaggtgtctggcaactggggcctgctggaccaggtggccgccctgacctgggtgcagacccacatccggggctttggaggagacccccggcgggtgtccctggccgctgacagaggaggagcagatgtggccagcatccacctgctgacagcccgggccaccaacagccagctgttccggcgggctgtgctgatgggcggcagcgccctgagccctgctgctgtgatcagccatgagcgggcccagcagcaggccatcgccctggccaaggaggtgtcctgccccatgagcagcagccaggaggtggtgtcctgcctgcggcagaagccagccaacgtgctgaatgatgcccagaccaagctgctggccgtgtctggccccttccactactggggccctgtgattgatggccacttcctgcgggagcccccagcccgggccctgaagaggagcctgtgggtggaggtggacctgctgattggcagcagccaggatgatggcctcatcaacagagccaaggctgtgaagcagtttgaggagagccggggccgcaccagcagcaagacagccttctaccaggccctgcagaacagcctgggcggggaggacagtgatgcccgggtggaggccgccgccacctggtactacagcctggagcacagcacagatgattatgccagcttcagccgggccctggagaatgccacccgggactacttcatcatctgccccatcatcgacatggccagcgcctgggccaagagggcccggggaaatgtgttcatgtaccacgccccagaaaattatggccacggcagcctggagctgctggctgatgtgcagtttgccctgggcctgcccttctacccagcctatgagggccagttcagcctggaggagaagagcctgagcctgaagatcatgcagtacttcagccacttcatccgcagcggcaaccccaactacccctatgagttcagcaggaaggtgcccacctttgccaccccctggccagactttgtgcccagggctggaggagagaactacaaggagttcagcgagctgctgcccaaccggcagggcctgaagaaggctgactgcagcttctggagcaagtacatcagcagcctgaagaccagcgcagatggagccaagggcggccagagcgctgagagcgaggaggaggagctgacagctggcagcggcctgcgggaggacctgctgagcctgcaggagcccggcagcaagacctacagcaagtag

SEQ ID NO: 270809 - DNA, 3417 bp, Artificial Sequence
  derived and/or modified sequence
atgatgcagaagttcgagaaggtgcccgagagcaaggtgatcttcgacgccaatgccccagtggccgttcggtctaaagtacccgactctgaatttccagtgatgcagtgtcttactgactgcaccgaagatgaagcatgctcattttttaccgtgtcaaccacggagcctgagatttcatgtgacttttacgcttggacgtcggacaatgtcgcctgcatgacatccgatcagaagagggacgctctgggcaatagcaaagccaccagctttggatcattgagatgtcaggtaaaggtccgatctcacgggcaagacagcccagctgtttatctaaagaagggagccatcatatgcggtcttttgtcatccccaagcgtgttactctgtaatgtcaaggactggatggatccttctgaggcatgggccaatgcgacatgtcccggtgtgacctacgaccaggaaagtcaccaggtgatcctgagactaggagaccaggagttcatcaagagcctgacccctctggagggaactcaggacacatttactaactttcaacaggtgtatctgtggaaagattcagatatgggctcacgacctgaatccatggggtgccgaaaggacactgtccctcgccctgcctccccaactgaagcaggcctcactacagagctcttttcacctgtagatctgaatcaggtcattgtaaacgggaaccaatcactttcgtcccaaaaacattggttgtttaaacatctgttttccgcgcagcaagctaatctgtggtgcctctctcgctgcgtacaggagcacagcttttgccagttggcagagataacagaatctgctagtctttactttacttgtaccctttacccagaggctcaggtatgcgacgacatcatggaaagcaatgcacagggctgtcgcttaatcctcccacagatgccgaaagcccttttcagaaagaaggtgatcctcgaggacaaagtgaagaatttttacacccgcctccccttccaaaagttaatggggatttctatacgcaataaggtccctatgagtgagaaatctattagcaacggattcttcgagtgcgaacgcagatgcgatgccgacccatgttgcactggcttcggcttcctcaatgtgtcacagctaaaagggggggaggtaacatgtctcaccctgaatagtcttggtatccagatgtgctccgaagaaaacggcggcgcttggaggattctggactgtgggtcacccgacatcgaggttcatacctatccctttgggtggtaccaaaagcccatagctcagaacaacgcgcctagcttctgccccctcgtggtgctccctagcctcaccgagaaggttagcctggactcttggcaatctctcgctctgagctctgtagtagtggacccctctatcagacactttgacgtagcgcatgtctctacagcagccactagcaatttttccgctgtgagagatttgtgtctgtctgagtgctcacagcacgaggcgtgtctcatcacaaccttgcaaactcagcctggagccgtgcggtgtatgttttacgccgacacccaatcttgtacacacagtctgcagggccagaactgccgcctcctgcttagggaggaggcgacccacatctaccggaaacccgggatctctctgctcagttacgaagcctcggtccctagcgtgcctatttctactcacggccgcttactaggtaggagtcaggcaattcaggttggcacctcctggaagcaggtggaccagttcctgggcgtgccgtacgcagccccccctctcgctgagcgccggttccaggctcctgagccattgaactggacaggttcctgggacgcaagtaagccgcgtgcaagctgctggcagcctggcacccgcacctcaacttctcctggggtgagcgaggactgtctgtatcttaatgtgtttattccccaaaatgtggccccaaatgcatctgtgctcgttttctttcataataccatggacagagaagagtcggagggatggcccgcaatcgacggctcattcctggccgccgtcggaaaccttatcgtggtaacggcctcctaccgcgtgggcgtgttcggttttcttagcagcgggagcggagaagtgtcaggtaattggggcctgcttgatcaggttgccgcactcacatgggtacaaacccatatcaggggttttggaggtgatcctagacgcgtgtctctggcagcggatcggggcggggccgatgtggcctccattcatctgcttacagctagggccacaaactcccagctcttccggagggcagtgttaatggggggttctgccctttcacccgcagctgttatttctcacgaacgggcacagcaacaagctatcgccctggccaaagaggtctcatgtcctatgtcaagctcacaggaggttgttagctgtctgagacagaagccagccaatgtcttaaacgatgcacagacaaagttgctggccgtcagcggcccgtttcactactggggcccagtaattgacgggcacttcctaagagagccccctgcacgggcgctcaagagatcactgtgggtggaggtagatctgctgatcggatcttcccaggacgatgggctaattaaccgcgctaaagcagttaagcagtttgaagagtctcgaggaaggacatcaagcaagaccgctttctatcaagccctccagaatagtttgggaggggaagattcggatgcacgtgttgaagcggccgcaacctggtactactccttggagcattccaccgatgactacgcctccttttcacgtgctctagagaacgctacacgggactatttcatcatttgccccataatagacatggcatcagcctgggcaaagcgagctcgggggaatgtatttatgtaccacgctcctgagaattatggccatggcagtctggaactcctcgccgacgtgcagtttgcactcggactgcctttttaccccgcttacgaaggacaattttctctcgaggaaaaatcgttgagtcttaagattatgcaatactttagtcactttatacggagtggaaatcctaactacccctatgagttctcgcgcaaggtgcccacgttcgcaacaccctggcctgattttgttcctcgagccggcggcgagaattataaggaattttcagagctgctgccaaatcggcaaggtctcaagaaagccgactgtagcttctggtcaaagtacatctccagcttgaagacttctgctgatggtgctaaaggaggacagtccgcagagagcgaggaggaggagctgaccgctggcagtgggctccgcgaggatctgctctctttacaggaacctggttctaaaacgtacagtaaatag

SEQ ID NO: 270810 - DNA, 3417 bp, Artificial Sequence
  derived and/or modified sequence
atgatgcagaagttcgaaaaagtcccggagtccaaggtcatctttgatgctaatgccccagtggctgttagatccaaggttcccgattccgaatttccagtgatgcagtgcctgacagattgtacggaggacgaagcatgctcattctttacagtgtccaccacagagcctgaaatttcgtgtgacttctacgcctggacctctgacaatgtcgcttgcatgacgtccgaccagaaaagagatgctttaggcaatagcaaggcgacatcgtttggaagcctgagatgccaggtgaaagtgaggagccacggacaggacagccccgctgtctaccttaagaaaggcgcaatcatttgtggcctcttgtcttcgccatcagtactgctttgcaacgtcaaggattggatggatccctccgaagcatgggctaacgccacgtgtcccggtgttacatacgaccaagaaagccatcaggtcatcttgcgccttggtgaccaggagttcatcaagtctctgacccctttagaaggcacacaggataccttcaccaactttcagcaagtttacctttggaaagattccgatatgggatcaaggcctgaaagtatggggtgtaggaaagacaccgttcccaggccagcatcgcctacagaagctggactcacaacagaactgttcagccctgtagatttgaatcaagttattgttaatggcaaccagagcctgtcctcccaaaagcactggttgtttaagcatctattctctgctcaacaggcaaacctctggtgtctgtcacggtgtgtgcaagaacattccttttgtcagctcgccgagatcactgaatctgcatccctgtactttacgtgtacgctttaccctgaagcacaggtctgtgacgacattatggagtctaacgcccaaggatgccgtcttattctgccccaaatgcccaaggcactgtttcggaagaaagtgatactggaggataaagtcaagaacttctacacgcggctccccttccagaagctcatgggtattagcatcaggaacaaggtgcctatgtccgagaagtctatatcgaatggcttttttgaatgcgagcgccgttgcgacgccgacccttgttgcaccgggtttggcttcctgaatgtttcgcagcttaagggcggagaggtcacatgtttgaccctcaactccttaggtatccagatgtgcagcgaagaaaatggaggcgcatggagaatcttggactgcggttcccctgatatcgaggtccatacatacccatttgggtggtaccagaaaccaatagctcagaacaatgctcccagcttttgccccttggttgtgctgcctagtctaacagaaaaggtgagtctcgattcatggcaatccctcgctttgtcttctgtggtggtagatccctccatccggcacttcgacgtcgcccacgtaagtactgccgctacgtctaacttttccgcggtgagggacctctgcctctctgagtgttcacagcatgaggcttgtctgatcaccaccctgcagacccaaccaggggcagttaggtgcatgttttacgccgacacccagagctgcacgcattctttgcaaggtcagaactgcaggttactattaagggaggaagctacccatatctatcggaaacccggaattagcctgctgagttatgaagcctctgtcccttccgtgcctatctctacccacgggaggctccttgggaggtcccaagctatccaggtggggacttcctggaagcaagttgaccagttcctgggggtcccctacgctgcgccacctctggccgagagacggtttcaagcacctgagcctctgaactggactggtagctgggacgcctcaaaacctcgggcatcttgctggcagcccggtacccgcacaagcacatcgcctggtgtgagcgaagactgtctctacctgaatgtattcattcctcagaatgtggcaccaaatgcctctgtgctggtttttttccacaatacaatggatcgcgaggaatctgaaggatggccagccatcgacgggtcatttctggccgcagtcggcaatttaatcgtggtgaccgcttcctatcgcgtaggggtctttggatttctgtcctctggatctggtgaagtatcaggaaactggggactgctagatcaggtggcagcgcttacctgggtacagacccacatccgcggtttcggcggtgacccacggcgtgtgtccttggccgcagaccgtggcggagccgatgtggcctctatacaccttctgactgcacgcgcaactaactctcagctgttcagacgtgctgtgctgatggggggtagcgccctctctcctgccgcagtgatttcccacgagagggctcagcagcaggcgatcgcattggcgaaggaggtgtcatgccctatgagttcctcacaggaagtggtgtcctgcctgcgccagaagccggcaaatgtgctgaacgacgctcaaaccaagttgctggctgtttcaggtccctttcattactggggtccagttattgatggccactttctgagggaacccccagcccgagccctgaaaaggtctctctgggtggaagtggatctgctaattgggagctctcaggacgacggactgatcaacagggcaaaggctgtaaagcagtttgaggaatccagaggcagaacaagctccaaaacagccttttaccaggctctgcaaaactcactgggcggagaggattcggacgcaagagtagaggcagcagcgacttggtattattcccttgaacactcaacagatgactatgcttcctttagtagagccctggagaatgccacccgggactactttattatatgtccgatcattgatatggcgagtgcctgggcaaaacgcgcacgagggaatgtatttatgtatcacgcacccgagaactacggacacgggagcctggagctgcttgccgacgtccagttcgccttagggctgcccttctacccagcctatgaaggacagttcagccttgaagagaaatcactgtcacttaagatcatgcagtactttagtcattttatcagaagtgggaatcctaactacccttacgagttcagccggaaagtcccaactttcgccaccccttggcctgactttgtgcctcgggctggaggagaaaattataaagaattttcggaacttttaccaaaccgacaaggcctgaagaaagcggactgtagcttctggtcaaaatatatcagcagcttgaagacgtcagccgatggcgcaaagggaggacagtctgctgagagtgaagaggaagagctcactgctggctctggactccgcgaagacctgctttcattgcaggagcctggatccaagacctactctaaatag

SEQ ID NO: 270811 - DNA, 3706 bp, Artificial Sequence
  derived and/or modified sequence
ccaagaacaggcagggagcttggcctgtgtcccatgtcctgtgggcagaacgaccatttctgctggagctttcagccagactcactgtgtcactgactgtcagaggaacgaagcaggcctgcaatgtgaccagaatggccagtatcgagccagccagaaggacaggggcagtgggaaggccttctgtgtggacggcgaggggcggaggctgccatggtgggaaacagaggcccctcttgaggactcacagtgtttgatgatgcagaagtttgagaaggttccagaatcaaaggtgatcttcgacgccaatgctcctgtggctgtcagatccaaagttcctgattctgagttccccgtgatgcagtgcttgacagattgcacagaggacgaggcctgcagcttcttcaccgtgtccacgacggagccagagatttcctgtgatttctatgcttggacaagtgacaatgttgcctgcatgacttctgaccagaaacgagatgcactggggaactcaaaggccaccagctttggaagtcttcgctgccaggtgaaagtgaggagccatggtcaagattctccagctgtgtatttgaaaaagggtgccatcatctgtgggttgctgagctcacccagtgtcctgctttgtaatgtcaaagactggatggatccctctgaagcctgggctaatgctacatgtcctggtgtgacatatgaccaggagagccaccaggtgatattgcgtcttggagaccaggagttcatcaagagtctgacacccttagaaggaactcaagacacctttaccaattttcagcaggtttatctctggaaagattctgacatggggtctcggcctgagtctatgggatgtagaaaagacacagtgccaaggccagcatctccaacagaagcaggtttgacaacagaacttttctcccctgtggacctcaaccaggtcattgtcaatggaaatcaatcactatccagccagaagcactggcttttcaagcacctgttttcagcccagcaggcaaacctatggtgcctttctcgttgtgtgcaggagcactctttctgtcagctcgcagagataacagagagtgcatccttgtacttcacctgcaccctctacccagaggcacaggtgtgtgatgacatcatggagtccaatgcccagggctgcagactgatcctgcctcagatgccaaaggccctgttccggaagaaagttatactggaagataaagtgaagaacttttacactcgcctgccgttccaaaaactgatggggatatccattagaaataaagtgcccatgtctgaaaaatctatttctaatgggttctttgaatgtgaacgacggtgcgatgcggacccatgctgcactggctttggatttctaaatgtttcccagttaaaaggaggagaggtgacatgtctcactctgaacagcttgggaattcagatgtgcagtgaggagaatggaggagcctggcgcattttggactgtggctctcctgacattgaagtccacacctatcccttcggatggtaccagaagcccattgctcaaaataatgctcccagtttttgccctttggttgttctgccttccctcacagagaaagtgtctctggactcgtggcagtccctggccctctcttcagtggttgttgatccatccattaggcactttgatgttgcccatgtcagcactgctgccaccagcaatttctctgctgtccgagacctctgtttgtcggaatgttcccaacatgaggcctgtctcatcaccactctgcaaacccaacctggggctgtgagatgtatgttctatgctgatactcaaagctgcacacatagtctgcagggtcagaactgccgacttctgcttcgtgaagaggccacccacatctaccggaagccaggaatctctctgctcagctatgaggcatctgtaccttctgtgcccatttccacccatggccggctgctgggcaggtcccaggccatccaggtgggtacctcatggaagcaagtggaccagttccttggagttccatatgctgccccgcccctggcagagaggcgcttccaggcaccagagcccttgaactggacaggctcctgggatgccagcaagccaagggccagctgctggcagccaggcaccagaacatccacgtctcctggagtcagtgaagattgtttgtatctcaatgtgttcatccctcagaatgtggcccctaacgcgtctgtgctggtgttcttccacaacaccatggacagggaggagagtgaaggatggccggctatcgacggctccttcttggctgctgttggcaacctcatcgtggtcactgccagctaccgagtgggtgtcttcggcttcctgagttctgggtccggagaggtgagtggcaactgggggctgctggaccaggtggcggctctgacctgggtgcagacccacatccgaggatttggcggggaccctcggcgcgtgtccctggcagcagaccgtggcggggctgatgtggccagcatccaccttctcacggccagggccaccaactcccaacttttccggagagctgtgctgatgggaggctccgcactctccccggccgccgtcatcagccatgagagggctcagcagcaggcaattgctttggcaaaggaggtcagttgccccatgtcatccagccaagaagtggtgtcctgcctccgccagaagcctgccaatgtcctcaatgatgcccagaccaagctcctggccgtgagtggccctttccactactggggtcctgtgatcgatggccacttcctccgtgagcctccagccagagcactgaagaggtctttatgggtagaggtcgatctgctcattgggagttctcaggacgacgggctcatcaacagagcaaaggctgtgaagcaatttgaggaaagtcgaggccggaccagtagcaaaacagccttttaccaggcactgcagaattctctgggtggcgaggactcagatgcccgcgtcgaggctgctgctacatggtattactctctggagcactccacggatgactatgcctccttctcccgggctctggagaatgccacccgggactactttatcatctgccctataatcgacatggccagtgcctgggcaaagagggcccgaggaaacgtcttcatgtaccatgctcctgaaaactacggccatggcagcctggagctgctggcggatgttcagtttgccttggggcttcccttctacccagcctacgaggggcagttttctctggaggagaagagcctgtcgctgaaaatcatgcagtacttttcccacttcatcagatcaggaaatcccaactacccttatgagttctcacggaaagtacccacatttgcaaccccctggcctgactttgtaccccgtgctggtggagagaactacaaggagttcagtgagctgctccccaatcgacagggcctgaagaaagccgactgctccttctggtccaagtacatctcgtctctgaagacatctgcagatggagccaagggcgggcagtcagcagagagtgaagaggaggagttgacggctggatctgggctaagagaagatctcctaagcctccaggaaccaggctctaagacctacagcaagtgaccagcccttgagctccccaaaaacctcacccga

SEQ ID NO: 270812 - DNA, 2664 bp, Artificial Sequence
  derived and/or modified sequence
atggccctggtgctggagatcttcaccctgctggccagcatctgctgggtgagcgccaacatcttcgagtaccaggtggacgcccagcccctgagaccctgcgagctgcagagagagaccgccttcctgaagcaggccgactacgtgccccagtgcgccgaggacggcagcttccagaccgtgcagtgccagaacgacggcagaagctgctggtgcgtgggcgccaacggcagcgaggtgctgggcagcagacagcccggcagacccgtggcctgcctgagcttctgccagctgcagaagcagcagatcctgctgagcggctacatcaacagcaccgacaccagctacctgccccagtgccaggacagcggcgactacgcccccgtgcagtgcgacgtgcagcaggtgcagtgctggtgcgtggacgccgagggcatggaggtgtacggcaccagacagctgggcagacccaagagatgccccagaagctgcgagatcagaaacagaagactgctgcacggcgtgggcgacaagagccccccccagtgcagcgccgagggcgagttcatgcccgtgcagtgcaagttcgtgaacaccaccgacatgatgatcttcgacctggtgcacagctacaacagattccccgacgccttcgtgaccttcagcagcttccagagaagattccccgaggtgagcggctactgccactgcgccgacagccagggcagagagctggccgagaccggcctggagctgctgctggacgagatctacgacaccatcttcgccggcctggacctgcccagcaccttcaccgagaccaccctgtacagaatcctgcagagaagattcctggccgtgcagagcgtgatcagcggcagattcagatgccccaccaagtgcgaggtggagagattcaccgccaccagcttcggccacccctacgtgcccagctgcagaagaaacggcgactaccaggccgtgcagtgccagaccgagggcccctgctggtgcgtggacgcccagggcaaggagatgcacggcaccagacagcagggcgagccccccagctgcgccgagggccagagctgcgccagcgagagacagcaggccctgagcagactgtacttcggcaccagcggctacttcagccagcacgacctgttcagcagccccgagaagagatgggccagccccagagtggccagattcgccaccagctgcccccccaccatcaaggagctgttcgtggacagcggcctgctgagacccatggtggagggccagagccagcagttcagcgtgagcgagaacctgctgaaggaggccatcagagccatcttccccagcagaggcctggccagactggccctgcagttcaccaccaaccccaagagactgcagcagaacctgttcggcggcaagttcctggtgaacgtgggccagttcaacctgagcggcgccctgggcaccagaggcaccttcaacttcagccagttcttccagcagctgggcctggccagcttcctgaacggcggcagacaggaggacctggccaagcccctgagcgtgggcctggacagcaacagcagcaccggcacccccgaggccgccaagaaggacggcaccatgaacaagcccaccgtgggcagcttcggcttcgagatcaacctgcaggagaaccagaacgccctgaagttcctggccagcctgctggagctgcccgagttcctgctgttcctgcagcacgccatcagcgtgcccgaggacgtggccagagacctgggcgacgtgatggagaccgtgctgagcagccagacctgcgagcagacccccgagagactgttcgtgcccagctgcaccaccgagggcagctacgaggacgtgcagtgcttcagcggcgagtgctggtgcgtgaacagctggggcaaggagctgcccggcagcagagtgagaggcggccagcccagatgccccaccgactgcgagaagcagagagccagaatgcagagcctgatgggcagccagcccgccggcagcaccctgttcgtgcccgcctgcaccagcgagggccacttcctgcccgtgcagtgcttcaacagcgagtgctactgcgtggacgccgagggccaggccatccccggcaccagaagcgccatcggcaagcccaagaagtgccccaccccctgccagctgcagagcgagcaggccttcctgagaaccgtgcaggccctgctgagcaacagcagcatgctgcccaccctgagcgacacctacgagggccagttcagcctggaggagaagagcctgagcctgaagatcatgcagtacttcagccacttcatcagaagcggcaaccccaactacccctacgagttcagcagaaaggtgcccaccttcgccaccccctggcccgacttcgtgcccagagccggcggcgagaactacaaggagttcagcgagctgctgcccaacagacagggcctgaagaaggccgactgcagcttctggagcaagtacatcagcagcctgaagaccagcgccgacggcgccaagggcggccagagcgccgagagcgaggaggaggagctgaccgccggcagcggcctgagagaggacctgctgagcctgcaggagcccggcagcaagacctacagcaagtag

SEQ ID NO: 270813 - DNA, 2664 bp, Artificial Sequence
  derived and/or modified sequence
atggcattggtgctggaaatctttactcttttggcatcaatctgctgggttagcgccaatatctttgagtatcaggtcgacgcgcagcctctgcgcccctgcgaactgcagcgagagacggcttttctcaagcaagctgactacgtgccacagtgtgcggaagatggatccttccagaccgtgcagtgccagaacgatggaagatcctgttggtgtgtgggtgctaacggtagtgaggtgctaggatcacggcaacccggaagaccggtcgcctgcctgtctttctgtcagctgcagaaacagcaaatactactgagtgggtacatcaatagcaccgatacatcttacctgccccaatgtcaagacagtggagactacgctcccgtgcagtgcgatgtgcagcaggtgcagtgctggtgcgtagacgcagagggtatggaggtctatgggacaagacagctcggaaggcccaaacgctgcccccggtcttgcgagataaggaaccgtaggctcctgcatggcgttggggacaagtcacctccccaatgtagcgccgaaggtgaatttatgccggtgcagtgcaaattcgtgaataccacagatatgatgatttttgacttagtgcacagttacaaccggtttcctgatgccttcgtcacgtttagctcttttcagcgcagatttcccgaagtgtcagggtattgtcattgtgcggattctcagggcagagagttggctgagaccggcctggaacttctgctcgatgaaatttacgacacgatctttgccggacttgatcttccaagcacctttaccgagactaccctataccgaatcctgcaaagaagatttctagccgtgcagagcgtgatctcaggcagattcaggtgtccgacaaaatgtgaggtcgaacgctttacagccacttctttcggacatccttatgtgccctcctgtcggcgaaacggggactaccaagcagttcagtgccaaaccgagggcccttgttggtgcgtcgacgcccagggaaaggaaatgcatggaacccgtcagcaaggggaaccgcctagttgtgccgagggccagtcttgtgcctctgagcggcagcaagcgctttcccgcctttactttggcaccagcggatactttagccagcacgaccttttcagctctcccgaaaagcggtgggcctcgcccagggtagccaggtttgccacaagttgccctcctacaataaaagagctgtttgtggactcagggctactacgacccatggtcgaaggccagtcccaacaattcagtgtatcagaaaatcttctgaaagaggccattcgggccatctttccttctcgaggactggcacgtctagccctgcagttcacgactaaccccaagcgccttcagcagaacctgtttgggggaaagtttctggtcaacgtcggccaatttaacttatccggtgctctcggcacccgcggaacctttaatttctctcaattctttcagcaactggggctggccagttttctgaatggaggcaggcaggaggacttagccaagccgctgtctgtggggctggattccaattcctcaaccgggactcccgaggccgccaagaaagacggaacaatgaataagcctactgtggggtctttcggttttgaaataaacctccaagagaaccagaatgccttaaaattcctggcttctttactggagctgcctgagtttctgctgttcctccaacacgctataagcgttcccgaagatgttgctcgggacctcggcgatgtgatggagactgtcctttcctcccagacctgcgagcaaacgccagaacggctattcgtgcctagttgtaccaccgaaggctcctatgaggatgtccaatgttttagcggcgaatgctggtgcgtaaacagctggggaaaagaattgcccggctcacgcgtgaggggagggcaacctagatgccctacagactgcgagaagcagagagcgaggatgcaatctctgatgggctctcagccggcagggagcacattgttcgtgccggcttgcacatccgagggccacttcctcccagtacaatgttttaactccgaatgttactgcgtggacgccgaagggcaggcaattcccggcactagatctgcaatcggcaaacctaaaaagtgtcccacaccatgtcagctgcagagcgaacaggctttcctgcggacagtgcaggcacttcttagcaactcttccatgctacccaccctatctgatacatacgaaggtcaattcagcttggaagagaaaagcctttcactcaaaatcatgcaatatttcagccacttcatccggtctggtaacccaaattatccatacgaattctcacggaaagtgccaactttcgccaccccttggcccgacttcgtccctcgcgctggtggggaaaattacaaggagtttagcgagctgctgcctaataggcaaggcttgaagaaggcagattgctcattttggtcaaagtacatctcatccctgaagacaagtgcagatggggctaaggggggacagtcggcagagtccgaggaggaggagctgaccgcagggtctggccttcgtgaagatctactatccctgcaggagccaggatctaagacctactcaaagtag

SEQ ID NO: 270814 - DNA, 2664 bp, Artificial Sequence
  derived and/or modified sequence
atggccctggtgctggagatcttcaccctgctggccagcatctgctgggtgtctgccaacatctttgagtaccaggtggatgcccagcccctgcggccctgtgagctgcagcgggagacagccttcctgaagcaggccgactatgtgccccagtgtgccgaggatggcagcttccagacagtgcagtgccagaatgatggccgcagctgctggtgtgtgggcgccaacggcagcgaggtgctgggcagccggcagcccggccggcctgtggcctgcctgtccttctgccagctgcagaagcagcagatcctgctgagcggctacatcaacagcacagacaccagctacctgccccagtgccaggacagcggggactatgcccctgtgcagtgtgatgtgcagcaggtgcagtgctggtgtgtggatgctgagggcatggaggtgtatggcacccggcagctgggccggcccaagcgctgccccaggagctgtgagatccggaacagaaggctgctgcatggagtgggggacaagagccccccccagtgcagcgctgagggggagttcatgcctgtgcagtgcaagtttgtgaacaccacagacatgatgatctttgacctggtgcacagctacaaccgcttcccagatgcctttgtgaccttcagcagcttccagaggcgcttccctgaggtgtctggctactgccactgtgccgacagccagggccgggagctggccgagaccggcctggagctgctgctggatgagatctatgacaccatctttgctggcctggacctgcccagcaccttcacagagaccaccctgtaccgcatcctgcagaggcgcttcctggccgtgcagagcgtcatcagcggccgcttccgctgccccaccaagtgtgaggtggagcgcttcaccgccaccagctttggccacccctacgtgcccagctgcagaagaaatggagactaccaggccgtgcagtgccagacagagggcccctgctggtgtgtggatgcccagggcaaggagatgcacggcacccggcagcagggcgagccccccagctgtgccgagggccagagctgtgccagcgagcggcagcaggccctgagccggctgtacttcggcaccagcggctacttcagccagcacgacctcttcagcagccctgagaagcgctgggccagcccccgggtggccaggtttgccaccagctgcccccccaccatcaaggagctgtttgtggacagcggcctgctgcggcccatggtggagggccagagccagcagttctctgtgtctgagaacctgctgaaggaggccatccgggccatcttccccagccggggcctggcccggctggccctgcagttcaccaccaaccccaagaggctgcagcagaacctgtttggaggcaagttcctggtgaatgtgggccagttcaacctgagcggggccctgggcacccggggcaccttcaacttcagccagttcttccagcagctgggcctggccagcttcctgaatggaggccggcaggaggacctggccaagcccctgtctgtgggcctggacagcaacagcagcacaggcaccccagaggccgccaagaaggatggcaccatgaacaagcccaccgtgggcagctttggatttgagatcaacctgcaggagaaccagaatgccctgaagttcctggccagcctgctggagctgcctgagttcctgctcttcctgcagcacgccatctctgtgcctgaagatgtggcccgggacctgggagatgtgatggagaccgtgctgagcagccagacctgtgagcagaccccagagcggctgtttgtgcccagctgcaccacagagggcagctatgaagatgtgcagtgcttctctggagagtgctggtgtgtgaacagctggggcaaggagctgcccggcagccgggtgcggggcggccagccccgctgccccacagactgtgagaagcagagggccaggatgcagagcctgatgggcagccagcctgctggcagcaccctgtttgtgcctgcctgcaccagcgagggccacttcctgcctgtgcagtgcttcaacagcgagtgctactgtgtggatgctgagggccaggccatccctggcaccaggtctgccatcggcaagcccaagaagtgccccaccccctgccagctgcagagcgagcaggccttcctgaggacagtgcaggccctgctgagcaacagctccatgctgcccaccctgagtgacacctatgagggccagttcagcctggaggagaagagcctgagcctgaagatcatgcagtacttcagccacttcatccgcagcggcaaccccaactacccctatgagttcagcaggaaggtgcccacctttgccaccccctggccagactttgtgcccagggctggaggagagaactacaaggagttcagcgagctgctgcccaaccggcagggcctgaagaaggctgactgcagcttctggagcaagtacatcagcagcctgaagaccagcgcagatggagccaagggcggccagagcgctgagagcgaggaggaggagctgacagctggcagcggcctgcgggaggacctgctgagcctgcaggagcccggcagcaagacctacagcaagtag

SEQ ID NO: 270815 - DNA, 2664 bp, Artificial Sequence
  derived and/or modified sequence
atggccctggtgctggagatcttcaccctgctggccagcatctgctgggtgagcgccaacatctttgagtatcaagtggatgcccagcctctgaggccctgcgagcttcaaagggagacggcctttctgaagcaggccgactacgtgccccaatgtgccgaggacggaagtttccagaccgtacagtgccagaatgacggtcgcagttgttggtgcgttggcgccaacgggagcgaggtgttaggctctaggcagcccggtcgccctgtagcctgcctgtccttctgtcaacttcagaaacagcagatactgctcagtggctatattaactctacagacacttcgtatttgcctcagtgtcaggattccggcgactatgccccagtgcaatgtgacgtgcaacaagtgcaatgctggtgcgtggacgcagaaggaatggaagtgtacggtactcggcagcttggtcggccaaagagatgtcctcgctcgtgtgaaatccggaaccggagactgctccacggggtgggcgataaatccccgcctcagtgctccgcagagggagagtttatgcccgtgcagtgcaagttcgtcaacacaactgacatgatgatcttcgacctggtacatagttataacaggttccccgatgcgtttgttacgttttcttcgtttcaaagaagattcccagaggtaagtgggtactgtcactgtgccgattcgcaggggcgggaactggccgagacaggcctggaactgctgctcgatgagatctacgataccatctttgctggcctcgatctcccatctacctttaccgagaccactctttataggatattacagcgcaggttcctggcggtccagtctgtgatctctgggaggttccggtgccctacaaagtgtgaggtggagcgctttaccgcaacctccttcgggcatccctatgtaccatcatgtagaagaaacggggactatcaagcagtccagtgtcaaaccgagggcccatgctggtgtgtggacgcacaaggcaaggagatgcacggcactaggcagcagggtgagccacccagctgcgctgaagggcagtcctgtgccagcgaaagacagcaggccctgagtcggttgtacttcgggacaagcggttacttttcgcagcacgatctcttcagctcacccgagaaaagatgggcgtctcctcgagtcgctagattcgcaactagctgcccccccacgattaaagaactttttgtcgattccggtttgctgaggcccatggtagaaggccagtcacagcaatttagcgtgagcgagaacttactaaaggaggccattcgggcgatcttccccagccggggactcgccaggctcgcgctgcagtttaccacgaaccccaagcgactgcagcagaatctctttgggggaaaatttttagtgaatgtcggacagtttaacctgagtggtgcactcggaactagaggcacattcaatttctcccaattcttccagcaactgggtctggccagcttcctaaatggcggccggcaagaagatctcgcgaaaccattaagtgtgggtctggatagcaactcaagcaccggcacccccgaggccgccaaaaaagatggcacgatgaacaaacccaccgttgggtcattcggattcgagatcaatctacaggagaatcagaacgccttgaagttccttgcttccctgcttgagcttcctgagtttctccttttccttcagcatgccatcagtgtacctgaggacgttgcacgagacctgggggatgttatggagaccgtactatcttctcagacctgcgagcagacacctgagcggctgtttgtccctagttgcaccacggagggctcgtacgaagatgtgcagtgcttttctggcgagtgttggtgcgtaaactcctgggggaaggaactcccagggagtagggtacgaggcggacagccgcggtgtccaacagactgcgaaaaacagcgggcccggatgcaatcccttatgggatctcagccagccggcagcactctgtttgtgcccgcctgtacaagcgaggggcatttcctgcccgtgcagtgctttaactccgagtgttattgcgtggacgcagaagggcaagctatcccgggtacgaggtcagctattgggaagcctaagaagtgtccaacaccctgccagctgcaaagcgagcaggcttttctgaggactgtacaggccctcctgtccaactcatcgatgctccctacactgtctgatacctacgaagggcaatttagcctggaagagaagagcctcagcctcaaaatcatgcagtacttttcacacttcataagaagcgggaatcccaattatccgtacgagttctccagaaaggtcccaaccttcgccaccccctggcccgattttgtaccaagggccggcggcgagaactataaggaattttccgaacttctgccaaacaggcagggcctgaagaaagccgattgtagcttctggtcgaagtacatctccagccttaaaacatctgccgacggcgccaagggcggccaatccgccgagtccgaggaggaggagcttactgctggctccgggttgcgtgaagaccttctttctctccaggaaccgggatcaaagacctactccaagtag

SEQ ID NO: 270816 - DNA, 2664 bp, Artificial Sequence
  derived and/or modified sequence
atggctctggtacttgaaatctttaccttgctggccagtatttgctgggtttccgcgaacatctttgaataccaggtcgacgcccagccacttcgcccatgcgagctacagagggaaaccgcctttttgaaacaggccgactacgtccctcaatgcgctgaggacggaagttttcaaacagtccagtgtcaaaacgatggcaggagctgctggtgcgtgggcgcaaatggctcagaagtgctcggcagcagacaaccagggaggcctgttgcttgtctaagtttctgtcagctgcagaaacaacaaatactcctctccggctacatcaactctactgataccagttatcttccccaatgccaggattccggggattacgctcctgtacagtgcgatgtgcaacaggttcagtgctggtgtgttgacgcggagggcatggaggtttacggaacccgacagttgggcagacccaagcggtgccctaggtcatgtgagatccgcaacaggcggctcctgcacggagttggagacaagtctccgccacagtgtagcgcagagggggaattcatgccagtccagtgcaaattcgtcaacacaacagatatgatgattttcgatctggtacacagttataacagattccctgacgcattcgtgaccttcagctctttccagcgtagattccccgaagtgtccggctactgccattgcgccgacagtcaaggacgcgagctggcggaaacgggcctcgaattgctcctggatgaaatttatgacactattttcgcagggttagatctgccatccacttttactgagacaacgctctatcggatcctccagcgccgatttctagccgtacagagtgtaatctccggcaggtttcggtgccccaccaagtgtgaggtagaacgctttacagctacctccttcggccacccatatgtgccgtcctgtcgcagaaatggggactaccaagcagtccaatgccagaccgaagggccttgctggtgtgtcgatgcccaggggaaggaaatgcacggcacaagacaacaaggcgagccaccatcctgtgctgaaggacagtcatgcgcaagtgagaggcagcaggcattatccaggctttatttcggtacatcgggctacttttcgcagcacgacctgttctcctcaccggagaagcggtgggcctccccacgcgttgccaggttcgctacgtcctgcccccctaccatcaaggagttgttcgtggactcaggccttctgagaccaatggtcgagggccaatcccagcagttcagtgtgtctgagaacctgcttaaagaggctattagggccatattcccttctcgcggacttgctagactggcactccagttcacaacaaatcctaagagacttcagcagaatttattcggcggaaagttccttgtgaacgttggacagtttaacctcagtggagcactcggtacaaggggcacatttaacttttcccagttcttccagcagctgggcctggcttccttcctcaacggcggaagacaggaagacctcgcaaagccactatccgtgggactggattccaacagttcgactgggacccctgaggcggctaagaaagatgggaccatgaacaagccgaccgtaggcagtttcggatttgagataaacctccaggagaaccagaatgccctgaagtttctggcttcgctcctggaactaccggaatttttattgtttctacagcatgcgatcagtgtgccagaagatgtcgcgagggacctaggggatgtaatggaaaccgtcctctcatctcaaacttgcgagcagacccctgaacgcctcttcgtgccttcatgcacaacagagggaagctacgaggacgtgcagtgtttttcaggcgaatgctggtgcgtgaattcctggggaaaggagcttccaggcagcagagttcgcggagggcagccaaggtgtcctaccgactgtgaaaagcaacgggctcggatgcaatcccttatggggtctcagcccgctgggtcaaccctgttcgtcccagcttgcacaagcgaggggcactttctcccggttcagtgttttaattcagagtgttattgcgtcgatgcagagggccaagcgattccgggtacccgctccgcaatcggaaaacccaaaaaatgccccacaccctgtcagctgcagagcgaacaagcatttctgcgcaccgtgcaagcactgcttagtaacagcagtatgctgcccacactgagtgacacttatgagggacagtttagtctggaagagaagtccctcagtttaaagattatgcagtatttttcacacttcatcagatcaggaaaccccaactacccctatgaatttagccgtaaagtgcctacctttgcgacaccttggcccgattttgtgcccagagccggtggtgaaaactataaggaattttctgaacttttgcctaaccggcaggggcttaagaaagcggactgttctttttggtctaagtatatttcctctctcaagacttctgctgatggcgcaaagggaggccagtccgctgagagtgaggaagaggagcttactgcgggaagcgggctacgagaagacctgctttccttgcaggagcctggcagcaaaacttattccaagtag

SEQ ID NO: 270817 - DNA, 2664 bp, Artificial Sequence
  derived and/or modified sequence
atggccctggtcctggagatcttcaccctgctggcctccatctgctgggtgtcggccaatatcttcgagtaccaggtggatgcccagccccttcgtccctgtgagctgcagagggaaacggcctttctgaagcaagcagactacgtgccccagtgtgcagaggatggcagcttccagactgtccagtgccagaacgacggccgctcctgctggtgtgtgggtgccaacggcagtgaagtgctgggcagcaggcagccaggacggcctgtggcttgtctgtcattttgtcagctacagaaacagcagatcttactgagtggctacattaacagcacagacacctcctacctccctcagtgtcaggattcaggggactacgcgcctgttcagtgtgatgtgcagcaggtccagtgctggtgtgtggacgcagaggggatggaggtgtatgggacccgccagctggggaggccaaagcgatgtccaaggagctgtgaaataagaaatcgtcgtcttctccacggggtgggagataagtcaccaccccagtgttctgcggagggagagtttatgcctgtccagtgcaaatttgtcaacaccacagacatgatgatttttgatctggtccacagctacaacaggtttccagatgcatttgtgaccttcagttccttccagaggaggttccctgaggtatctgggtattgccactgtgctgacagccaagggcgggaactggctgagacaggtttggagttgttactggatgaaatttatgacaccatttttgctggcctggaccttccttccaccttcactgaaaccaccctgtaccggatactgcagagacggttcctcgcagttcaatcagtcatctctggcagattccgatgccccacaaaatgtgaagtggagcggtttacagcaaccagctttggtcacccctatgttccaagctgccgccgaaatggcgactatcaggcggtgcagtgccagacggaagggccctgctggtgtgtggacgcccaggggaaggaaatgcatggaacccggcagcaaggggagccgccatcttgtgctgaaggccaatcttgtgcctccgaaaggcagcaggccttgtccagactctactttgggacctcaggctacttcagccagcacgacctgttctcttccccagagaaaagatgggcctctccaagagtagccagatttgccacatcctgcccacccacgatcaaggagctctttgtggactctgggcttctccgcccaatggtggagggacagagccaacagttttctgtctcagaaaatcttctcaaagaagccatccgagcaatttttccctcccgagggctggctcgtcttgcccttcagtttaccaccaacccaaagagactccagcaaaacctttttggagggaaatttttggtgaatgttggccagtttaacttgtctggagcccttggcacaagaggcacatttaacttcagtcaatttttccagcaacttggtcttgcaagcttcttgaatggagggagacaagaagatttggccaagccactctctgtgggattagattcaaattcttccacaggaacccctgaagctgctaagaaggatggtactatgaataagccaactgtgggcagctttggctttgaaattaacctacaagagaaccaaaatgccctcaaattccttgcttctctcctggagcttccagaattccttctcttcttgcaacatgctatctctgtgccagaagatgtggcaagagatttaggtgatgtgatggaaacggtactcagctcccagacctgtgagcagacacctgaaaggctatttgtcccatcatgcacgacagaaggaagctatgaggatgtccaatgcttttccggagagtgctggtgtgtgaattcctggggcaaagagcttccaggctcaagagtcagaggtggacagccaaggtgccccacagactgtgaaaagcaaagggctcgcatgcaaagcctcatgggcagccagcctgctggctccaccttgtttgtccctgcttgtactagtgagggacatttcctgcctgtccagtgcttcaactcagagtgctactgtgttgatgctgagggtcaggccattcctggaactcgaagtgcaatagggaagcccaagaaatgccccacgccctgtcaattacagtctgagcaagctttcctcaggacggtgcaggccctgctctctaactccagcatgctacccaccctttccgacacctacgaggggcagttttctctggaggagaagagcctgtcgctgaaaatcatgcagtacttttcccacttcatcagatcaggaaatcccaactacccttatgagttctcacggaaagtacccacatttgcaaccccctggcctgactttgtaccccgtgctggtggagagaactacaaggagttcagtgagctgctccccaatcgacagggcctgaagaaagccgactgctccttctggtccaagtacatctcgtctctgaagacatctgcagatggagccaagggcgggcagtcagcagagagtgaagaggaggagttgacggctggatctgggctaagagaagatctcctaagcctccaggaaccaggctctaagacctacagcaagtga

SEQ ID NO: 270818 - protein, 1780 aa, Artificial Sequence
  derived and/or modified sequence
MKIFQRKMRYWLLPPFLAIVYFCTIVQGQVAPPTRLRYNVISHDSIQISWKAPRGKFGGYKLLVTPTSGGKTNQLNLQNTATKAIIQGLMPDQNYTVQIIAYNKDKESKPAQGQFRIKDLEKRKDPKPRVKVVDRGNGSRPSSPEEVKFVCQTPAIADIVILVDGSWSIGRFNFRLVRHFLENLVTAFDVGSEKTRIGLAQYSGDPRIEWHLNAFSTKDEVIEAVRNLPYKGGNTLTGLALNYIFENSFKPEAGSRTGVSKIGILITDGKSQDDIIPPSRNLRESGVELFAIGVKNADVNELQEIASEPDSTHVYNVAEFDLMHTVVESLTRTLCSRVEEQDREIKASAHAITGPPTELITSEVTARSFMVNWTHAPGNVEKYRVVYYPTRGGKPDEVVVDGTVSSTVLKNLMSLTEYQIAVFAIYAHTASEGLRGTETTLALPMASDLLLYDVTENSMRVKWDAVPGASGYLILYAPLTEGLAGDEKEMKIGETHTDIELSGLLPNTEYTVTVYAMFGEEASDPVTGQETTLALSPPRNLRISNVGSNSARLTWDPTSRQINGYRIVYNNADGTEINEVEVDPITTFPLKGLTPLTEYTIAIFSIYDEGQSEPLTGVFTTEEVPAQQYLEIDEVTTDSFRVTWHPLSADEGLHKLMWIPVYGGKTEEVVLKEEQDSHVIEGLEPGTEYEVSLLAVLDDGSESEVVTAVGTTLDSFWTEPATTIVPTTSVTSVFQTGIRNLVVGDETTSSLRVKWDISDSDVQQFRVTYMTAQGDPEEEVIGTVMVPGSQNNLLLKPLLPDTEYKVTVTPIYTDGEGVSVSAPGKTLPSSGPQNLRVSEEWYNRLRITWDPPSSPVKGYRIVYKPVSVPGPTLETFVGADINTILITNLLSGMDYNVKIFASQASGFSDALTGMVKTLFLGVTNLQAKHVEMTSLCAHWQVHRHATAYRVVIESLQDRQKQESTVGGGTTRHCFYGLQPDSEYKISVYTKLQEIEGPSVSIMEKTQSLPTRPPTFPPTIPPAKEVCKAAKADLVFMVDGSWSIGDENFNKIISFLYSTVGALNKIGTDGTQVAMVQFTDDPRTEFKLNAYKTKETLLDAIKHISYKGGNTKTGKAIKYVRDTLFTAESGTRRGIPKVIVVITDGRSQDDVNKISREMQLDGYSIFAIGVADADYSELVSIGSKPSARHVFFVDDFDAFKKIEDELITFVCETASATCPVVHKDGIDLAGFKMMEMFGLVEKDFSSVEGVSMEPGTFNVFPCYQLHKDALVSQPTRYLHPEGLPSDYTISFLFRILPDTPQEPFALWEILNKNSDPLVGVILDNGGKTLTYFNYDQSGDFQTVTFEGPEIRKIFYGSFHKLHIVVSETLVKVVIDCKQVGEKAMNASANITSDGVEVLGKMVRSRGPGGNSAPFQLQMFDIVCSTSWANTDKCCELPGLRDDESCPDLPHSCSCSETNEVALGPAGPPGGPGLRGPKGQQGEPGPKGPDGPRGEIGLPGPQGPPGPQGPSGLSIQGMPGMPGEKGEKGDTGLPGPQGIPGGVGSPGRDGSPGQRGLPGKDGSSGPPGPPGPIGIPGTPGVPGITGSMGPQGALGPPGVPGAKGERGERGDLQSQAMVRSVARQVCEQLIQSHMARYTAILNQIPSHSSSIRTVQGPPGEPGRPGSPGAPGEQGPPGTPGFPGNAGVPGTPGERGLTGIKGEKGNPGVGTQGPRGPPGPAGPSGESRPGSPGPPGSPGPRGPPGHLGVPGPQGPSGQPGYCDPSSCSAYGVRDLIPYNDYQH

SEQ ID NO: 270819 - protein, 534 aa, Artificial Sequence
  derived and/or modified sequence
MKIFQRKMRYWLLPPFLAIVYFCTIVQGQVAPPTRLRYNVISHDSIQISWKAPRGKFGGYKLLVTPTSGGKTNQLNLQNTATKAIIQGLMPDQNYTVQIIAYNKDKESKPAQGQFRIKDLEKRKDPKPRVKVVDRGNGSRPSSPEEVKFVCQTPAIADIVILVDGSWSIGRFNFRLVRHFLENLVTAFDVGSEKTRIGLAQYSGDPRIEWHLNAFSTKDEVIEAVRNLPYKGGNTLTGLALNYIFENSFKPEAGSRTGVSKIGILITDGKSQDDIIPPSRNLRESGVELFAIGVKNADVNELQEIASEPDSTHVYNVAEFDLMHTVVESLTRTLCSRVEEQDREIKASAHAITGPPTELITSEVTARSFMVNWTHAPGNVEKYRVVYYPTRGGKPDEVVVDGTVSSTVLKNLMSLTEYQIAVFAIYAHTASEGLRGTETTLALPMASDLLLYDVTENSMRVKWDAVPGASGYLILYAPLTEGLAGDEKEMKIGETHTDIELSGLLPNTEYTVTVYAMFGEEASDPVTGQETTSP

SEQ ID NO: 270820 - DNA, 5343 bp, Artificial Sequence
  derived and/or modified sequence
atgaagatcttccagagaaagatgagatactggctgctgccccccttcctggccatcgtgtacttctgcaccatcgtgcagggccaggtggccccccccaccagactgagatacaacgtgatcagccacgacagcatccagatcagctggaaggcccccagaggcaagttcggcggctacaagctgctggtgacccccaccagcggcggcaagaccaaccagctgaacctgcagaacaccgccaccaaggccatcatccagggcctgatgcccgaccagaactacaccgtgcagatcatcgcctacaacaaggacaaggagagcaagcccgcccagggccagttcagaatcaaggacctggagaagagaaaggaccccaagcccagagtgaaggtggtggacagaggcaacggcagcagacccagcagccccgaggaggtgaagttcgtgtgccagacccccgccatcgccgacatcgtgatcctggtggacggcagctggagcatcggcagattcaacttcagactggtgagacacttcctggagaacctggtgaccgccttcgacgtgggcagcgagaagaccagaatcggcctggcccagtacagcggcgaccccagaatcgagtggcacctgaacgccttcagcaccaaggacgaggtgatcgaggccgtgagaaacctgccctacaagggcggcaacaccctgaccggcctggccctgaactacatcttcgagaacagcttcaagcccgaggccggcagcagaaccggcgtgagcaagatcggcatcctgatcaccgacggcaagagccaggacgacatcatcccccccagcagaaacctgagagagagcggcgtggagctgttcgccatcggcgtgaagaacgccgacgtgaacgagctgcaggagatcgccagcgagcccgacagcacccacgtgtacaacgtggccgagttcgacctgatgcacaccgtggtggagagcctgaccagaaccctgtgcagcagagtggaggagcaggacagagagatcaaggccagcgcccacgccatcaccggcccccccaccgagctgatcaccagcgaggtgaccgccagaagcttcatggtgaactggacccacgcccccggcaacgtggagaagtacagagtggtgtactaccccaccagaggcggcaagcccgacgaggtggtggtggacggcaccgtgagcagcaccgtgctgaagaacctgatgagcctgaccgagtaccagatcgccgtgttcgccatctacgcccacaccgccagcgagggcctgagaggcaccgagaccaccctggccctgcccatggccagcgacctgctgctgtacgacgtgaccgagaacagcatgagagtgaagtgggacgccgtgcccggcgccagcggctacctgatcctgtacgcccccctgaccgagggcctggccggcgacgagaaggagatgaagatcggcgagacccacaccgacatcgagctgagcggcctgctgcccaacaccgagtacaccgtgaccgtgtacgccatgttcggcgaggaggccagcgaccccgtgaccggccaggagaccaccctggccctgagcccccccagaaacctgagaatcagcaacgtgggcagcaacagcgccagactgacctgggaccccaccagcagacagatcaacggctacagaatcgtgtacaacaacgccgacggcaccgagatcaacgaggtggaggtggaccccatcaccaccttccccctgaagggcctgacccccctgaccgagtacaccatcgccatcttcagcatctacgacgagggccagagcgagcccctgaccggcgtgttcaccaccgaggaggtgcccgcccagcagtacctggagatcgacgaggtgaccaccgacagcttcagagtgacctggcaccccctgagcgccgacgagggcctgcacaagctgatgtggatccccgtgtacggcggcaagaccgaggaggtggtgctgaaggaggagcaggacagccacgtgatcgagggcctggagcccggcaccgagtacgaggtgagcctgctggccgtgctggacgacggcagcgagagcgaggtggtgaccgccgtgggcaccaccctggacagcttctggaccgagcccgccaccaccatcgtgcccaccaccagcgtgaccagcgtgttccagaccggcatcagaaacctggtggtgggcgacgagaccaccagcagcctgagagtgaagtgggacatcagcgacagcgacgtgcagcagttcagagtgacctacatgaccgcccagggcgaccccgaggaggaggtgatcggcaccgtgatggtgcccggcagccagaacaacctgctgctgaagcccctgctgcccgacaccgagtacaaggtgaccgtgacccccatctacaccgacggcgagggcgtgagcgtgagcgcccccggcaagaccctgcccagcagcggcccccagaacctgagagtgagcgaggagtggtacaacagactgagaatcacctgggacccccccagcagccccgtgaagggctacagaatcgtgtacaagcccgtgagcgtgcccggccccaccctggagaccttcgtgggcgccgacatcaacaccatcctgatcaccaacctgctgagcggcatggactacaacgtgaagatcttcgccagccaggccagcggcttcagcgacgccctgaccggcatggtgaagaccctgttcctgggcgtgaccaacctgcaggccaagcacgtggagatgaccagcctgtgcgcccactggcaggtgcacagacacgccaccgcctacagagtggtgatcgagagcctgcaggacagacagaagcaggagagcaccgtgggcggcggcaccaccagacactgcttctacggcctgcagcccgacagcgagtacaagatcagcgtgtacaccaagctgcaggagatcgagggccccagcgtgagcatcatggagaagacccagagcctgcccaccagaccccccaccttcccccccaccatcccccccgccaaggaggtgtgcaaggccgccaaggccgacctggtgttcatggtggacggcagctggagcatcggcgacgagaacttcaacaagatcatcagcttcctgtacagcaccgtgggcgccctgaacaagatcggcaccgacggcacccaggtggccatggtgcagttcaccgacgaccccagaaccgagttcaagctgaacgcctacaagaccaaggagaccctgctggacgccatcaagcacatcagctacaagggcggcaacaccaagaccggcaaggccatcaagtacgtgagagacaccctgttcaccgccgagagcggcaccagaagaggcatccccaaggtgatcgtggtgatcaccgacggcagaagccaggacgacgtgaacaagatcagcagagagatgcagctggacggctacagcatcttcgccatcggcgtggccgacgccgactacagcgagctggtgagcatcggcagcaagcccagcgccagacacgtgttcttcgtggacgacttcgacgccttcaagaagatcgaggacgagctgatcaccttcgtgtgcgagaccgccagcgccacctgccccgtggtgcacaaggacggcatcgacctggccggcttcaagatgatggagatgttcggcctggtggagaaggacttcagcagcgtggagggcgtgagcatggagcccggcaccttcaacgtgttcccctgctaccagctgcacaaggacgccctggtgagccagcccaccagatacctgcaccccgagggcctgcccagcgactacaccatcagcttcctgttcagaatcctgcccgacaccccccaggagcccttcgccctgtgggagatcctgaacaagaacagcgaccccctggtgggcgtgatcctggacaacggcggcaagaccctgacctacttcaactacgaccagagcggcgacttccagaccgtgaccttcgagggccccgagatcagaaagatcttctacggcagcttccacaagctgcacatcgtggtgagcgagaccctggtgaaggtggtgatcgactgcaagcaggtgggcgagaaggccatgaacgccagcgccaacatcaccagcgacggcgtggaggtgctgggcaagatggtgagaagcagaggccccggcggcaacagcgcccccttccagctgcagatgttcgacatcgtgtgcagcaccagctgggccaacaccgacaagtgctgcgagctgcccggcctgagagacgacgagagctgccccgacctgccccacagctgcagctgcagcgagaccaacgaggtggccctgggccccgccggcccccccggcggccccggcctgagaggccccaagggccagcagggcgagcccggccccaagggccccgacggccccagaggcgagatcggcctgcccggcccccagggcccccccggcccccagggccccagcggcctgagcatccagggcatgcccggcatgcccggcgagaagggcgagaagggcgacaccggcctgcccggcccccagggcatccccggcggcgtgggcagccccggcagagacggcagccccggccagagaggcctgcccggcaaggacggcagcagcggcccccccggcccccccggccccatcggcatccccggcacccccggcgtgcccggcatcaccggcagcatgggcccccagggcgccctgggcccccccggcgtgcccggcgccaagggcgagagaggcgagagaggcgacctgcagagccaggccatggtgagaagcgtggccagacaggtgtgcgagcagctgatccagagccacatggccagatacaccgccatcctgaaccagatccccagccacagcagcagcatcagaaccgtgcagggcccccccggcgagcccggcagacccggcagccccggcgcccccggcgagcagggcccccccggcacccccggcttccccggcaacgccggcgtgcccggcacccccggcgagagaggcctgaccggcatcaagggcgagaagggcaaccccggcgtgggcacccagggccccagaggcccccccggccccgccggccccagcggcgagagcagacccggcagccccggcccccccggcagccccggccccagaggcccccccggccacctgggcgtgcccggcccccagggccccagcggccagcccggctactgcgaccccagcagctgcagcgcctacggcgtgagagacctgatcccctacaacgactaccagcactag

SEQ ID NO: 270821 - DNA, 1605 bp, Artificial Sequence
  derived and/or modified sequence
atgaagatcttccagagaaagatgagatactggctgctgccccccttcctggccatcgtgtacttctgcaccatcgtgcagggccaggtggccccccccaccagactgagatacaacgtgatcagccacgacagcatccagatcagctggaaggcccccagaggcaagttcggcggctacaagctgctggtgacccccaccagcggcggcaagaccaaccagctgaacctgcagaacaccgccaccaaggccatcatccagggcctgatgcccgaccagaactacaccgtgcagatcatcgcctacaacaaggacaaggagagcaagcccgcccagggccagttcagaatcaaggacctggagaagagaaaggaccccaagcccagagtgaaggtggtggacagaggcaacggcagcagacccagcagccccgaggaggtgaagttcgtgtgccagacccccgccatcgccgacatcgtgatcctggtggacggcagctggagcatcggcagattcaacttcagactggtgagacacttcctggagaacctggtgaccgccttcgacgtgggcagcgagaagaccagaatcggcctggcccagtacagcggcgaccccagaatcgagtggcacctgaacgccttcagcaccaaggacgaggtgatcgaggccgtgagaaacctgccctacaagggcggcaacaccctgaccggcctggccctgaactacatcttcgagaacagcttcaagcccgaggccggcagcagaaccggcgtgagcaagatcggcatcctgatcaccgacggcaagagccaggacgacatcatcccccccagcagaaacctgagagagagcggcgtggagctgttcgccatcggcgtgaagaacgccgacgtgaacgagctgcaggagatcgccagcgagcccgacagcacccacgtgtacaacgtggccgagttcgacctgatgcacaccgtggtggagagcctgaccagaaccctgtgcagcagagtggaggagcaggacagagagatcaaggccagcgcccacgccatcaccggcccccccaccgagctgatcaccagcgaggtgaccgccagaagcttcatggtgaactggacccacgcccccggcaacgtggagaagtacagagtggtgtactaccccaccagaggcggcaagcccgacgaggtggtggtggacggcaccgtgagcagcaccgtgctgaagaacctgatgagcctgaccgagtaccagatcgccgtgttcgccatctacgcccacaccgccagcgagggcctgagaggcaccgagaccaccctggccctgcccatggccagcgacctgctgctgtacgacgtgaccgagaacagcatgagagtgaagtgggacgccgtgcccggcgccagcggctacctgatcctgtacgcccccctgaccgagggcctggccggcgacgagaaggagatgaagatcggcgagacccacaccgacatcgagctgagcggcctgctgcccaacaccgagtacaccgtgaccgtgtacgccatgttcggcgaggaggccagcgaccccgtgaccggccaggagaccaccagcccctag

SEQ ID NO: 270822 - DNA, 5343 bp, Artificial Sequence
  derived and/or modified sequence
atgaaaatcttccagagaaaaatgcgatattggctcctgccacccttcctagccattgtgtatttttgtacaattgtgcagggccaggtggcccctccaacccgcctcagatacaatgtcatttcccatgattctattcagatttcatggaaggctccccgcggtaagtttgggggatacaaactgttggtcacccctacctctggcgggaagaccaatcaattgaacctgcaaaacacagccaccaaggcgatcatccaaggcctcatgcctgatcagaattatacagtccagattattgcatataacaaggacaaggagagtaaacctgcccagggacagtttcgcattaaggatctagagaagagaaaggacccgaagcctcgcgtcaaggtggtggaccgtggaaacggtagcagaccctccagtccggaggaggtaaaattcgtgtgtcaaacaccggccatcgcggacatagttatcctagtcgacggctcttggtccattggaagattcaacttccgcctggtacggcactttctggagaatttagtaaccgcattcgatgtggggtctgagaagacgagaatagggctggcccagtattccggcgatcctagaatagaatggcacctcaatgcgttctcaacaaaggacgaagtgatcgaggcagtgcggaacctgccttataaaggcggaaacacacttaccggcctggccctgaactatatctttgagaactccttcaaacccgaggcaggcagtagaacaggcgtgagcaaaatcggtatcctgattacagatgggaaaagtcaagacgacatcatacctccctcccgtaacctcagggaatccggggtggagctgttcgctatcggggtgaaaaacgcagacgtgaacgagctgcaggagattgcctccgaaccggattcgactcacgtatataacgtggctgaattcgacctgatgcacacggttgtagagagccttaccaggaccctatgctcgagagtcgaggaacaggatcgagagattaaggcttccgcccacgctatcacaggtccccccacggagcttataacctctgaagtcactgccaggtccttcatggtgaactggacccatgcacccggcaatgtcgagaagtaccgcgtggtctactacccaacccggggcggcaagcccgacgaggtggtggtcgacggaaccgtctcttccactgtgctgaaaaaccttatgtcactaacggagtaccagattgctgtttttgccatatacgcccatacggcatccgagggcttgaggggaacggaaaccacactggcacttccgatggccagtgacttgcttctctacgatgtaaccgagaatagcatgagagtcaagtgggacgccgtgccaggagcaagcggatacctaatcctctacgctccactgactgagggcttagccggggatgagaaggagatgaagatcggcgaaacccacactgacattgagctatcaggactgcttcccaacaccgaatacacggtaaccgtttacgcaatgtttggcgaggaggctagcgacccagtgacagggcaggaaactaccctggccctgagccccccccgaaaccttaggatctccaacgtcggctcgaactccgctagactgacatgggacccaacaagcagacagatcaatggatacaggattgtgtacaacaatgcagatggtaccgaaattaatgaggtggaagtcgaccccattaccacattcccactgaaggggctcacaccattgacagaatatacaatagcaattttctccatatatgatgaaggacagtctgaacctctgactggggtgttcacgactgaagaggttcccgcacaacagtatctcgaaatcgacgaggtgacaactgatagtttcagggtgacatggcatcctttgagtgcagacgagggtttacataagttgatgtggattcctgtgtacggcgggaagaccgaagaggtggtgctgaaagaggagcaggattcccatgtaatcgagggtctcgagcctggtaccgagtacgaagtctcattgttagctgtgctggacgatggtagtgaaagcgaggtggtcaccgccgtgggaactaccctggacagcttttggacagaacccgcaactactattgtgcccaccacctcagtaacctctgtttttcagacgggtattcgcaacctggtggtcggcgatgagaccacaagtagcctccgcgtgaagtgggacatctcagattccgacgtgcagcagttcagagtcacatatatgaccgctcagggggaccccgaggaggaagtgattggcacggtgatggtgccaggctcacagaataatttacttctgaagcccttattacccgacactgagtacaaggtcaccgtgactcctatctacaccgacggtgaaggggtgtcagtgtccgcccctggcaaaacactgccaagttccggaccccagaacttgagggtgagtgaagagtggtataatcggctgcggatcacctgggaccctccatccagccccgttaaagggtatagaatcgtgtacaagcccgtctcagttccaggacccactctggagactttcgtcggagctgacataaacacgatcctcataacaaatttgctgagcggcatggactataatgtgaagatcttcgctagccaggccagcgggttttccgatgcgctgactggcatggtgaagaccctgtttctgggtgtgacaaacttgcaggcaaagcatgtcgagatgacctcgctgtgtgctcactggcaggttcaccgacatgcaacagcatatagagtggtgatcgagtcccttcaggataggcagaaacaagaaagcacagtgggcggggggaccacccgccactgcttctatggactgcaacccgactccgagtacaagatctctgtgtacacaaagctgcaggagattgaaggtccttccgtctccatcatggaaaagacacagtccctcccaacgagaccccctaccttccctcctacaatacccccagcaaaggaagtctgcaaggctgctaaggctgatcttgtcttcatggtggatgggtcttggtcgatcggcgacgaaaacttcaacaagattattagtttcctctactcaaccgtgggcgccctcaacaagatcgggactgacggaacccaggtcgctatggtccaatttacagacgatccgcgaactgagttcaaactgaacgcctacaagacaaaggagacactgctcgacgccatcaagcatatttcttacaagggaggcaacaccaaaactggcaaggccatcaaatatgtccgtgatacattgttcacagccgagtctgggaccagaaggggcatccctaaggtcatcgtggtgatcaccgatgggagatctcaggatgatgtcaacaagatttcaagggaaatgcagctcgacggctattctatctttgcaataggcgtggctgacgctgattattccgagctggtgagcattggatcgaaaccaagtgcacggcacgtatttttcgtggacgactttgatgccttcaagaaaattgaagacgaattgatcacgtttgtatgcgaaaccgcgtcagccacctgcccggtcgttcacaaagatggcatcgatctggccggttttaagatgatggaaatgttcggattggtggaaaaagacttcagcagcgtggaaggggtatcgatggagccgggcaccttcaatgtttttccctgttaccagctgcataaagacgccctggtcagtcagcccactaggtaccttcatcccgaggggttgccatctgattatacgatttccttcttgttcagaatattgccagatacaccacaagagccgtttgctctctgggagattcttaataaaaactcagatcccttggtaggcgtgattctggataacggtggaaagaccctcacttatttcaactatgatcagagtggtgattttcagaccgtgacatttgaaggtcccgaaattcgaaaaattttctatggatcatttcacaagctccatattgtggtgtctgagaccctagttaaggtggttatcgactgtaagcaggtcggggagaaggccatgaacgcttccgccaacattaccagtgacggcgtggaggttctgggaaaaatggtgcgctcacggggtccaggcgggaacagcgctccattccagcttcagatgttcgacatcgtttgcagtacgtcctgggccaatacagataaatgttgcgaattgcccggcttacgcgatgatgagtcctgccctgacctgcctcacagttgttcctgtagcgagacaaacgaggtggcattggggccagctgggccccctggcggcccagggctgaggggccccaaggggcagcagggggaacctggacctaagggccccgatgggccccgcggggagatcggactccccggaccacaggggccacccgggcctcagggtcccagcggcctgtctatccagggcatgcctggaatgcccggcgagaagggcgagaagggtgacactggtctgccggggcctcagggcattcccgggggtgtcgggagccccggccgtgacggctctccaggccagagaggcctccctggaaaggacggatccagtggccctcccggcccacccgggcccataggaattcccggaaccccaggggtccctgggatcacgggtagtatgggacctcaaggggccctcgggcccccaggggtcccgggggcgaaaggcgagaggggtgagagaggcgatctgcagtcccaggcaatggtgcgttccgtggcgcgccaagtgtgcgagcagttgatccaatcacatatggccaggtacaccgccattttaaatcagatccccagtcacagttcttctattagaacagtgcaaggtccacccggagaacccggccggccaggctcccccggagcccccggggaacaaggaccccctggtactcccggcttccccggtaacgcaggcgtccctggcacccctggcgaacggggactgactggcatcaagggggaaaaaggcaacccaggcgtcggaacgcagggaccaaggggcccgcctggcccagcagggccttccggcgaaagcagacccggatcaccaggcccacctggctccccgggccctcgtgggccccccggtcacttgggggtgcccggtccccaaggcccgtccggacagcccggctactgtgatccttcctcctgctccgcttatggagtccgggatctaatcccatacaatgattaccaacattag

SEQ ID NO: 270823 - DNA, 1605 bp, Artificial Sequence
  derived and/or modified sequence
atgaaaattttccaaaggaagatgcgctattggttgctccccccatttctggctatcgtgtatttttgcacaatagttcaaggccaggtggcaccccctacaaggctgcggtataatgtgatcagccacgattctattcagatttcttggaaggcccctcgaggcaagttcggagggtacaaactcctagtcaccccgaccagcggtggtaaaacaaatcagctgaatctgcaaaacactgcgactaaggcaatcatacagggcctcatgccggaccagaattacactgtgcagatcatcgcttataacaaggataaggaaagcaagccagcccaggggcagtttcgcataaaggatctggagaaaagaaaagatccaaaacctcgcgtaaaggtggtggaccgggggaatggctcaaggcccagctctccggaggaagtgaaattcgtatgtcagacgccagcaatagccgacatcgtcatactggtggacggctcttggtccattgggcgctttaactttagactcgtccgtcacttcctggaaaatctcgtgaccgcatttgatgtgggttccgagaagacgagaatcggcctagctcagtacagtggggatcctagaattgagtggcacctcaacgctttctcaactaaggacgaggtgatagaggccgtgagaaacttgccatataagggtgggaacaccctgaccgggctggcacttaattatatcttcgagaattcattcaaaccagaagccggctcacgcactggcgtgtccaaaatcggcatcctaattaccgacggaaaatcccaggacgatatcatcccaccgtcacgcaatcttagggagagcggggtggagctcttcgctattggagtcaaaaacgccgacgtgaatgagttgcaagagattgccagtgagccggatagcacccatgtgtataatgtggccgagttcgacctgatgcataccgtggtagagtcactgacccggacgctgtgctcccgggtggaggaacaagacagagaaataaaagctagtgcccacgctatcactggaccgcccaccgagctaataacgtcagaagtgacagcccgatcattcatggttaactggacccacgcacctggcaacgtcgagaaatatagggtcgtatactatcctaccagaggggggaagccagacgaggttgtcgtggacggcacggtcagttccactgtgctaaagaatctcatgagtctgactgagtaccagattgccgtattcgccatctatgcacatacggccagcgaaggcttgcggggtactgaaacgacactagccctcccgatggcaagcgaccttttactctatgatgtcaccgaaaatagtatgagagtgaaatgggatgcagtgcccggagcttccgggtacctaattctctacgctccactgactgaagggctggccggggacgaaaaagaaatgaagataggggaaacacacaccgatattgagctgtctgggctgctacccaacacagagtacactgtcacggtctatgccatgttcggggaagaagcttcggaccccgttacggggcaggaaacaacgagcccttag

SEQ ID NO: 270824 - DNA, 5343 bp, Artificial Sequence
  derived and/or modified sequence
atgaagatcttccagaggaagatgagatactggctgctgccccccttcctggccatcgtgtacttctgcaccatcgtgcagggccaggtggccccacccacccggctgcgctacaacgtcatcagccatgacagcatccagatctcctggaaggccccccggggcaagtttggaggctacaagctgctggtgacccccaccagcggcggcaagaccaaccagctgaacctgcagaacacagccaccaaggccatcatccagggcctgatgccagaccagaactacacagtgcagatcatcgcctacaacaaggacaaggagagcaagccagcccagggccagttccgcatcaaggacctggagaagaggaaggaccccaagccccgggtgaaggtggtggacagaggaaatggcagccggcccagcagccctgaggaggtgaagtttgtgtgccagaccccagccatcgctgacatcgtcatcctggtggatggctcctggagcatcggccgcttcaacttccggctggtgcgccacttcctggagaacctggtgacagcctttgatgtgggcagcgagaagaccagaattggcctggcccagtacagcggggacccccgcatcgagtggcacctgaatgccttcagcaccaaggatgaagtcatcgaggccgtgaggaacctgccctacaagggcggcaacaccctgaccggcctggccctgaactacatctttgagaacagcttcaagccagaggccggcagcaggactggagtgtccaagattggcatcctgatcacagatggcaagagccaggatgacatcatcccccccagcaggaacctgcgggagagcggcgtggagctgtttgccatcggcgtgaagaatgctgatgtgaatgagctgcaggagatcgccagcgagccagacagcacccacgtgtacaacgtggccgagtttgacctgatgcacacagtggtggagagcctgaccaggaccctgtgcagccgggtggaggagcaggaccgggagatcaaggccagcgcccacgccatcactggaccacccacagagctgatcaccagcgaggtgacagcccggagcttcatggtgaactggacccacgcccctggaaatgtggagaagtacagagtggtgtactaccccacccggggcggcaagccagatgaggtggtggtggatggcaccgtgagcagcacagtgctgaagaacctgatgagcctgacagagtaccagattgctgtgtttgccatctatgcccacacagccagcgagggcctgcggggcacagagaccaccctggccctgcccatggccagtgacctgctgctgtatgatgtgacagagaacagcatgagggtgaagtgggatgctgtgcctggggccagcggctacctgatcctgtatgcccccctgacagagggcctggccggagatgagaaggagatgaagatcggggagacccacacagacatcgagctgagcggcctgctgcccaacacagagtacacagtgacagtgtatgccatgtttggagaggaggccagtgaccctgtgacaggccaggagaccaccctggccctgagccccccaagaaacctgcgcatcagcaatgtgggcagcaacagcgcccggctgacctgggaccccaccagccggcagatcaatggctacagaattgtgtacaacaatgctgatggaacagagatcaatgaggtggaggtggaccccatcaccaccttccccctgaagggcctgacccccctgacagagtacaccatcgccatcttcagcatctatgatgagggccagagcgagcccctgactggagtcttcaccacagaggaggtgcctgcccagcagtacctggagattgatgaggtgaccacagacagcttccgggtgacctggcaccccctgtctgcagatgagggcctgcacaagctgatgtggatccctgtgtatggaggcaagacagaggaggtggtgctgaaggaggagcaggacagccacgtgattgagggcctggagcctggaacagaatatgaggtgtccctgctggccgtgctggatgatggcagcgagagcgaggtggtgacagctgtgggcaccaccctggacagcttctggacagagcccgccaccaccatcgtgcccaccacctctgtgaccagcgtcttccagacaggcatccggaacctggtggtgggagatgagaccaccagcagcctgcgggtgaagtgggacatcagtgacagtgatgtgcagcagttccgggtgacctacatgacagcccagggcgaccctgaggaggaggtgattggaacagtgatggtgcccggcagccagaacaacctgctgctgaagcccctgctgcctgacacagagtacaaggtgacagtgacccccatctacacagatggagaaggagtgtctgtgtctgcccctgggaagaccctgcccagcagcggcccccagaacctgcgggtgtctgaggagtggtacaaccggctgcgcatcacctgggacccccccagcagccctgtgaagggctacagaattgtgtacaagcctgtgtctgtgcccggccccaccctggagacctttgtgggcgctgacatcaacaccatcctgatcaccaacctgctgagcggcatggactacaacgtgaagatctttgccagccaggccagcggcttcagtgatgccctgaccggcatggtgaagaccctcttcctgggcgtgaccaacctgcaggccaagcacgtggagatgaccagcctgtgtgcccactggcaggtgcacagacatgccacagcctacagagtggtgattgagagcctgcaggaccggcagaagcaggagagcacagtgggcggcggcaccaccaggcactgcttctacggcctgcagccagattctgagtacaagatctctgtgtacaccaagctgcaggagattgagggccccagcgtgtccatcatggagaagacccagagcctgcccacccggccccccaccttcccccccaccatccccccagccaaggaggtgtgcaaggccgccaaggctgacctggtgttcatggtggatggctcctggagcattggagatgagaacttcaacaagatcatctccttcctgtacagcacagtgggcgccctgaacaagattggaacagatggcacccaggtggccatggtgcagttcacagatgaccccaggacagagttcaagctgaatgcctacaagaccaaggagaccctgctggatgccatcaagcacatctcctacaagggcggcaacaccaagacaggcaaggccatcaagtatgtgcgggacaccctcttcaccgctgagagcggcacccggcggggcatccccaaggtgattgtggtgatcacagatggccgcagccaggatgatgtgaacaagatcagccgggagatgcagctggatggctacagcatctttgccatcggcgtggctgatgctgactacagcgagctggtgtccatcggcagcaagcccagcgcccggcacgtgttctttgtggatgactttgatgccttcaagaagattgaagatgagctgatcacctttgtgtgtgaaacagccagcgccacctgccctgtggtgcacaaggatggcatcgacctggccggcttcaagatgatggagatgtttggcctggtggagaaggacttcagctctgtggagggcgtgtccatggagcccggcaccttcaacgtgttcccctgctaccagctgcacaaggatgccctggtgtcccagcccacccgctacctgcaccctgagggcctgcccagcgactacaccatctccttcctgttccgcatcctgcctgacaccccccaggagccctttgccctgtgggagatcctgaacaagaacagcgaccccctggtgggcgtcatcctggacaatggaggcaagaccctgacctacttcaactatgaccagagcggggacttccagacagtgacctttgagggccctgagatcaggaagatcttctacggcagcttccacaagctgcacatcgtggtgtctgagaccctggtgaaggtggtgattgactgcaagcaggtgggggagaaggccatgaatgccagcgccaacatcaccagtgatggagtggaggtgctgggcaagatggtgcgcagccggggccctgggggcaacagcgcccccttccagctgcagatgtttgacatcgtgtgcagcacctcctgggccaacacagacaagtgctgtgagctgcccggcctgagagatgatgagagctgcccagacctgccccacagctgcagctgcagcgagaccaatgaggtggccctgggccctgctggccccccaggcggccctggcctgcggggccccaagggccagcagggcgagcccggccccaagggcccagatggccccagaggagagatcggcctgcccggcccccagggccccccaggcccccagggccccagcggcctgagcatccagggcatgcctggcatgcctggagagaagggggagaagggggacaccggcctgcccggcccccagggcatccctgggggcgtgggcagccctggaagagatggcagccctggccagaggggcctgcccgggaaggatggcagcagcggccccccaggccccccaggccccatcggcatccctggcaccccaggagtgcccggcatcaccggctccatgggcccccagggcgccctgggccccccaggagtgcctggggccaagggggagcggggggagcggggggacctgcagagccaggccatggtgcgctctgtggcccggcaggtgtgtgagcagctgatccagagccacatggcccgctacacagccatcctgaaccagatccccagccacagcagcagcatcagaacagtgcagggccccccaggagagcccggccggcccggcagccctggggcccctggagagcagggccccccaggcaccccaggcttccctggaaatgccggcgtgcccggcaccccaggagagcggggcctgaccggcatcaagggggagaagggcaaccctggggtgggcacccagggcccccggggccccccaggccctgctggccccagcggggagagccggcccggcagccctggccccccaggcagccctggcccccggggccccccaggccacctgggcgtgcccggcccccagggccccagcggccagcccggctactgtgaccccagcagctgcagcgcctatggagtgcgggacctgatcccctacaatgactaccagcactag

SEQ ID NO: 270825 - DNA, 1605 bp, Artificial Sequence
  derived and/or modified sequence
atgaagatcttccagaggaagatgagatactggctgctgccccccttcctggccatcgtgtacttctgcaccatcgtgcagggccaggtggccccacccacccggctgcgctacaacgtcatcagccatgacagcatccagatctcctggaaggccccccggggcaagtttggaggctacaagctgctggtgacccccaccagcggcggcaagaccaaccagctgaacctgcagaacacagccaccaaggccatcatccagggcctgatgccagaccagaactacacagtgcagatcatcgcctacaacaaggacaaggagagcaagccagcccagggccagttccgcatcaaggacctggagaagaggaaggaccccaagccccgggtgaaggtggtggacagaggaaatggcagccggcccagcagccctgaggaggtgaagtttgtgtgccagaccccagccatcgctgacatcgtcatcctggtggatggctcctggagcatcggccgcttcaacttccggctggtgcgccacttcctggagaacctggtgacagcctttgatgtgggcagcgagaagaccagaattggcctggcccagtacagcggggacccccgcatcgagtggcacctgaatgccttcagcaccaaggatgaagtcatcgaggccgtgaggaacctgccctacaagggcggcaacaccctgaccggcctggccctgaactacatctttgagaacagcttcaagccagaggccggcagcaggactggagtgtccaagattggcatcctgatcacagatggcaagagccaggatgacatcatcccccccagcaggaacctgcgggagagcggcgtggagctgtttgccatcggcgtgaagaatgctgatgtgaatgagctgcaggagatcgccagcgagccagacagcacccacgtgtacaacgtggccgagtttgacctgatgcacacagtggtggagagcctgaccaggaccctgtgcagccgggtggaggagcaggaccgggagatcaaggccagcgcccacgccatcactggaccacccacagagctgatcaccagcgaggtgacagcccggagcttcatggtgaactggacccacgcccctggaaatgtggagaagtacagagtggtgtactaccccacccggggcggcaagccagatgaggtggtggtggatggcaccgtgagcagcacagtgctgaagaacctgatgagcctgacagagtaccagattgctgtgtttgccatctatgcccacacagccagcgagggcctgcggggcacagagaccaccctggccctgcccatggccagtgacctgctgctgtatgatgtgacagagaacagcatgagggtgaagtgggatgctgtgcctggggccagcggctacctgatcctgtatgcccccctgacagagggcctggccggagatgagaaggagatgaagatcggggagacccacacagacatcgagctgagcggcctgctgcccaacacagagtacacagtgacagtgtatgccatgtttggagaggaggccagtgaccctgtgacaggccaggagaccaccagcccctag

SEQ ID NO: 270826 - DNA, 5343 bp, Artificial Sequence
  derived and/or modified sequence
atgaagatcttccagcggaagatgcggtactggctgctgccccccttcttggctattgtgtatttctgtaccattgttcaaggacaggttgcgccgcctacccgcctgcgctacaacgttatttcccacgactccatccaaatctcctggaaagcaccaaggggaaagttcggaggctacaaactgttagttacacccacatccgggggcaaaaccaatcagctgaatctgcagaatactgctaccaaggcgattattcagggcctcatgcccgatcagaactatacggtgcagatcatcgcctacaacaaagacaaggaaagcaagcccgcacagggccagtttaggatcaaagatttggaaaaacgcaaagaccccaagcctagagtcaaagtcgtggaccgaggtaacggcagtaggccgtcctcacccgaagaagtgaaatttgtgtgccagacaccggctatagctgacattgtgatcctcgtggacggttcttggtctatcggaaggttcaactttaggcttgtacgccatttcctggagaacctagtgacggcgttcgacgtggggtctgagaagacaagaataggactcgctcagtacagcggcgaccccaggatagaatggcatcttaacgctttcagtactaaagatgaggtcattgaggccgtccgcaacctcccttataaagggggaaatacactgacgggcctcgcccttaattatatttttgaaaacagtttcaagcccgaagcaggcagccgcaccggcgtctcgaagatcggaatcctgatcacagacggaaagagtcaggacgacatcatcccaccatcaaggaacttgcgtgaaagcggcgtggaactgttcgcaattggagtgaaaaacgccgatgtgaacgagctgcaggaaatcgcctctgagcctgatagtactcacgtgtacaatgtggctgagtttgatctgatgcatacggtggtggaaagtctcacccgtacgctttgttcaagagtggaagagcaggaccgcgagatcaaggcaagcgcgcatgcaatcaccggtcctcccacggagctgatcactagcgaggtaactgcccgctcttttatggtgaactggactcacgcacccggaaacgttgagaaatatcgggtcgtttattatcctacaagaggggggaaacctgacgaagtagtggtggacggaacagttagttccactgtgcttaagaaccttatgtcgctgaccgagtatcagattgcagtgtttgccatctacgcccataccgcaagtgagggcttacgtggcaccgagacgaccttggcgctccctatggcttctgacctcctgctgtacgatgtcactgagaatagcatgcgcgtgaagtgggatgccgtccctggagcctcagggtacctcatcctatatgcccccctcactgaaggacttgccggcgacgaaaaggaaatgaagattggcgaaacccacacagacatagagttgtccggattgcttcctaacactgaatacacagtgaccgtctacgcaatgtttggcgaagaggcttcggatcctgtgacaggccaggaaacgacgctggccctgtcaccccccaggaatctaaggatcagcaacgtgggttccaacagtgctcgcctcacctgggacccgacatcccgccaaataaacgggtatcgtattgtttacaacaacgccgacgggaccgagattaatgaggtggaggtggaccccatcactacattcccactcaagggacttaccccactaaccgaatatacaattgccatctttagcatttacgatgaaggccaaagcgaacccctaactggcgtattcaccacagaagaggtgccggcccaacaatacttggaaatcgacgaggttacgacagatagcttccgtgtgacctggcatcccttatcagcggacgaggggctgcacaaactgatgtggattcctgtatatgggggaaagaccgaggaggttgtgctaaaagaggagcaagactcacacgtgattgagggactggaacctgggacagaatatgaggtgagcctgcttgcggtactcgatgatggatccgagtcagaagttgtgacggcggtgggcactactttggattctttttggactgagccagcaacaacgatagtccctacaacctccgtgacctccgtcttccaaactggcatcagaaacctggtggtgggcgacgaaacaacctcctccttgcgcgtcaagtgggatatttccgattctgacgtgcaacagttccgggtaacgtacatgacagctcagggagatcccgaggaggaggtaataggaacagtgatggtgccagggtcccagaacaacttgctcctgaaaccgctcctgcccgacactgaatataaagtaacagtaacccctatctacactgacggcgaaggagtcagcgtatccgcacccggtaaaactctccctagcagtggcccccagaacctccgggtgtcggaggagtggtataacaggttgagaatcacctgggaccccccctcgtcaccagttaaaggataccgcatcgtgtataagccagtgtccgtgcctggaccgacactcgaaaccttcgtgggagcagatatcaacacaatcctgattacaaatttactgagcggcatggactacaatgtgaaaatcttcgcctcccaggccagtgggttttctgatgctctcaccggcatggtgaagactctttttctgggtgtgactaacctgcaggcaaagcatgtggagatgacatccctttgtgctcactggcaggtgcatcgccacgcgaccgcctatagggtcgttattgaatctctgcaggaccggcagaagcaggagtcaaccgtgggagggggaaccaccagacattgtttttatggcttgcaaccagactccgagtacaagatttctgtgtacactaagcttcaggaaatcgagggcccaagcgtgtccataatggaaaaaacccagtccctccccactcgcccccccacgttcccaccaactatcccgcccgctaaggaagtatgcaaagccgctaaggccgacctggtgttcatggtggatggaagttggtcaatcggagatgaaaacttcaacaaaataatcagcttcctgtacagcacagtgggagcccttaataaaatcggcaccgatggcactcaggtggccatggtgcagttcacggacgaccctcggaccgagttcaagctgaacgcatacaagaccaaggagaccctgcttgacgctattaagcacatctcctacaagggtgggaatacaaagactggaaaggcaattaagtatgtgcgggatacactctttacagcagaatcaggtacacgccgcggaatccccaaggtcattgtagttattaccgacgggcgaagtcaggacgacgttaacaaaattagcagggaaatgcaattggatgggtacagcattttcgccattggcgtggccgacgcggattactcggaactggtgtccattggaagtaaacctagcgcacgtcatgtgtttttcgtagacgattttgatgcctttaaaaaaatcgaagacgaactgatcactttcgtctgtgagaccgcctccgctacgtgtcctgtggtccataaggacggaatcgacttggctggattcaaaatgatggagatgttcggcctcgtggagaaggacttttcatccgttgagggggtgagcatggagccaggtacctttaacgtctttccctgttatcagctccacaaggacgctctggtctcacagcccactagatatctgcatcctgagggactcccatccgactacaccattagcttcctttttcgcatcctgcccgatactcctcaggaacccttcgcgctctgggagatcctaaataaaaactcggaccctctggttggcgtcattctagacaatgggggtaaaaccctgacttatttcaattatgaccagagcggcgatttccagacagtgacattcgaaggtcctgagattcggaaaatcttttacgggtcattccacaagctgcacatcgtggtgtctgagacactggtcaaggtagtcattgattgtaaacaggtgggcgagaaggccatgaacgcttctgccaacatcactagtgatggggttgaggtactgggcaaaatggtcagatcaagaggtccaggcggtaatagcgctccttttcagcttcagatgttcgatatcgtatgtagtacctcttgggccaatactgacaaatgttgcgaactgccaggactgagggatgatgaatcctgtccagacctgccacactcgtgcagctgttctgagactaacgaggtggcgctgggcccagcaggccccccaggaggcccaggtctccgcggacctaagggccagcaaggggagcctggtcccaagggtccggacggacctaggggcgaaatagggcttccaggaccacagggccctccaggccctcagggaccttctgggctgagtattcagggaatgcccgggatgcccggcgaaaaaggcgaaaaaggtgacacagggctgccagggccccagggcattcctggcggcgttggaagcccaggccgggacgggtctccaggtcagagaggtctgcctggaaaagacgggtccagcggccctccaggcccgccaggaccaatcggaattccagggacaccaggagtgccaggcatcaccgggtccatgggaccccagggtgctctgggaccacccggagtccccggcgccaagggcgaaaggggcgaacggggagacctccagtctcaggcaatggtgagatcagtggccaggcaggtttgcgaacaactcattcagtcacatatggctcgctacaccgccatcctcaatcagattccatcccattcatcaagcatccgcacggtccagggccccccaggcgaaccaggcaggccgggttctcccggtgctccaggcgaacaaggtcccccgggcactcccggattcccaggcaacgccggtgtgcccggtacaccgggcgagaggggcctgactggaataaaaggggaaaagggaaacccgggagttggcacacaggggcctcgaggccccccaggaccagcaggaccaagtggggaatcccgccctggctcgcccggtccgccaggctcccctggccctagaggtccacccggccacctgggcgtgccggggccgcaggggccttccggccagcctggatattgcgatccctcttcatgctcagcatatggcgtgcgcgatctgattccttataatgactaccagcattag

SEQ ID NO: 270827 - DNA, 1605 bp, Artificial Sequence
  derived and/or modified sequence
atgaagatcttccagcggaagatgcggtactggctgctgccccccttcctcgctatcgtctacttctgcacaatcgtacaggggcaagtggctccccccacacggttgcggtacaatgtgatcagccacgacagcatccagatctcctggaaagcccctcgcggcaaattcgggggctacaaactgttggtgactcccacttcaggtggcaaaacaaatcagttgaatcttcagaacaccgctacgaaggcgattatacagggactcatgcctgaccagaactacactgtgcagattatcgcgtataacaaagataaggaaagcaagccggctcaagggcaatttcgaatcaaggacctggaaaaaagaaaggaccccaaaccccgcgtcaaagtggtcgatagaggcaatggatcgcggcctagttcacccgaagaagtcaaatttgtatgccaaacaccagcaattgcagacatcgtgatactggtggatggatcctggtcaatagggagattcaactttagacttgtgcgacacttcttagagaacctggtcacagccttcgacgtcggatcggagaaaacgcgcataggtctggctcagtactccggagacccaaggattgagtggcatctaaatgccttcagcaccaaagatgaggtcattgaagcggtccgcaatctcccctacaagggaggtaacaccttgaccggcctggccctcaactacatctttgaaaattcttttaaacccgaagcaggttcccgcaccggcgttagtaaaattggaatactcatcacagacgggaagtcgcaggacgacatcattcccccatcacggaacctgcgcgagtctggagtggagttatttgctattggggtgaaaaatgctgacgtgaacgaactgcaggagatagcatctgaacccgatagtacacacgtatataacgtggccgagttcgaccttatgcatacagtggtcgagagcctgactcggacattgtgcagcagggtcgaagagcaggatagggagatcaaggcatccgcgcacgccatcaccgggccacccactgagctgattacgtctgaggtgacagcaagaagttttatggttaattggactcatgcacccgggaatgtggagaagtatcgcgtcgtgtactacccaacccggggcggcaagccagacgaggtggtggtggacggaacggtctcctccaccgtcttaaaaaatttaatgagtctcacggagtatcagattgccgtgtttgcgatttatgcacacaccgcctcagaggggctgaggggaaccgaaacaaccctggcgttaccgatggcctcagaccttctgctatacgacgtgaccgagaatagcatgagggtgaagtgggacgcagtgccaggcgcgagtggctatctgatcttatacgcgcccctcacagaggggttggctggcgatgaaaaagagatgaagattggcgaaacccataccgacatcgaactgagtggcctgctacctaataccgaatacaccgtgactgtctatgctatgttcggagaggaggcatccgaccctgtgacaggccaagaaacaacttccccttag

SEQ ID NO: 270828 - DNA, 6163 bp, Artificial Sequence
  derived and/or modified sequence
atctgatcctgggctcccagctggagaggcggaggcagctccagggggctggaagtggaagcgcagcggcagaaggagagggagagagaaagagagagaggctaattaaaaaaggatactccgagggaagagagcaagggcggtgcgccgccaaggaccaactagcggcggagcttcgatcttgcctaggcgcggagagctcccaacctgggctggaaccttgcccagcacaggtggctgctacaccccatgtaaaaagcggaaaataaaatgaagattttccagcgcaagatgcggtactggttgcttccaccttttttggcaattgtttatttctgcaccattgtccaaggtcaagtggctccacccacaaggttaagatataatgtaatatctcatgacagtatacagatttcatggaaggctccaagagggaaatttggtggttacaaacttcttgtgactccaacttcaggtggaaaaactaaccagctgaatctgcagaacactgcaactaaagcaattattcaaggccttatgccagaccagaattacacagttcaaattattgcatacaataaagataaagaaagcaagccagctcaaggccaattcagaattaaagatttagaaaaaagaaaggatccaaagcccagagtcaaagttgtggacagaggaaatgggagtagaccatcttcaccagaagaagtgaaatttgtctgtcaaactccagcaattgctgacattgtaatcctggtcgatggttcatggagtattggaagattcaacttcagactggttcggcatttcttggaaaacctggttacagcattcgatgtgggctcagagaagacacgaattggtcttgcacagtatagtggtgaccccagaatagaatggcacttgaatgcatttagcacaaaagatgaagtgattgaagctgtccgaaacctcccatataaaggaggaaatacactaacaggtcttgctttgaactacatttttgaaaatagcttcaaaccagaagcaggatcaaggactggagtatccaaaattggcattttaatcacagatggaaaatcccaagatgacattattccaccatctagaaatcttcgtgagtctggtgtagaactgtttgccataggggtgaaaaacgcggatgtgaatgagctgcaggagatcgcctctgaaccagacagcactcatgtgtacaatgttgccgaattcgatctgatgcacacagttgtggagagtctgaccaggactctctgctctagagtggaagaacaggacagagaaattaaagcctcagcccatgccatcactgggccgcctacggagttgattacttctgaagtcactgccagaagctttatggttaactggactcatgccccaggaaatgtggaaaaatacagagttgtgtattatcctaccaggggtggaaaaccagacgaggtggtggtagatggaactgtatcttccacagtgttgaaaaacttgatgtctttaactgaatatcagatagcagtctttgcaatctatgcccacactgctagtgaaggcctacggggaactgaaactacacttgctttaccgatggcttctgaccttctactgtacgacgtgactgagaacagcatgcgagtcaaatgggatgcagtgcctggggcctcaggttacctgatcctttatgctcctctaacagagggcctggctggggatgaaaaagagatgaaaattggagagacccacacagatattgaattgagtgggttgttgcccaatacagaatacacagtcacagtttatgccatgtttggagaagaggccagtgatcctgttacgggacaagaaacaacattggctttaagtccaccaagaaacctgagaatctccaatgttggctctaacagtgctcgattaacctgggacccaacttcaagacagatcaatggttatcgaattgtatataacaatgcagatgggactgaaatcaatgaggttgaagtcgatcctattactaccttccctctgaagggcttgacacctctcacagagtatactattgctattttctccatctatgatgaaggacagtcagagcctctgactggagtttttaccaccgaggaagttccagcccagcaatacttagaaattgatgaggtgacgacagacagttttagggtgacctggcatcccctctcagctgatgaagggctacacaaattgatgtggattccagtctatggggggaagactgaggaggttgtcctgaaagaagagcaggactcacatgttattgaaggcctggagcccggtacggagtatgaagtttcactattggccgtacttgatgatggaagcgagagtgaggtggtgactgctgtcgggaccacacttgacagtttttggacagaaccagctacaaccatagtgcctaccacatctgtgacttcagttttccagacgggaatcagaaacctagttgtaggtgatgaaactacttctagcctgcgggtaaaatgggacatttctgacagcgatgtgcagcagtttagggtgacctacatgacagctcaaggggaccctgaggaagaagtcataggaacggttatggtgcctggaagccagaacaacctccttctgaagcctctgcttcctgatactgaatacaaagtcacagtgactcccatctacacggatggcgaaggcgtcagcgtctccgctcctggaaaaaccttaccatcctcggggccccagaacttgcgggtgtccgaggaatggtataaccggttgcgcattacgtgggaccccccatcttccccggtgaaaggctatagaattgtctacaaacctgtcagtgttcctggtccaacactggaaacgtttgtgggagctgacattaacaccatccttatcacaaacctcctcagcggaatggactacaatgtgaagatatttgcctcccaggcctcaggcttcagcgacgccctgacaggcatggtgaaaacattgttcttgggtgttaccaatctccaagccaaacatgttgaaatgaccagcttgtgtgcccactggcaggtacatcgccatgccacagcctatagggttgttatagaatccctccaggataggcaaaagcaagaatccactgtgggtggagggacaaccaggcattgcttctatggacttcagcctgattctgaatataaaatcagtgtttatacaaagctccaggagattgaaggacctagtgtgagcataatggaaaaaacacaatcacttcctacacgaccaccaacttttcctccaaccattccaccagcaaaagaagtatgtaaggcggccaaggctgacctggtatttatggtggatggatcctggagcattggagatgaaaatttcaataagatcatcagctttctatacagcactgttggagccctgaacaagattggcacagatggaacccaagttgcaatggttcagttcactgatgatcccagaacagaatttaaactaaatgcttacaaaaccaaagagactcttcttgatgcaattaaacacatttcatacaaaggaggaaatacaaaaacaggaaaagcaattaagtatgttcgagataccttgttcactgcagagtcaggtacaagaaggggcatcccaaaggttatcgtggttataactgatggaagatcacaagatgatgtgaacaaaatctccagggagatgcaattagatggctatagcatttttgcaattggtgtggccgatgcagattactcggagttggttagcattggcagtaagcccagcgcacgccatgtcttctttgtggatgactttgacgcctttaagaaaatcgaagatgagttaattacttttgtctgcgaaacagcatcagcaacctgtccagtggtacacaaggatggcattgatcttgcaggatttaagatgatggaaatgtttggtttggttgaaaaagatttttcatcagtggaaggggtttctatggagcctggtaccttcaatgtgtttccatgttaccaactccataaagatgccctggtttcccagccaaccaggtacttgcacccagaaggattgccctccgactacacaatcagttttctattccggattcttcctgacactccacaggagccatttgctctttgggagattttaaataaaaattctgacccattggttggggttattttagacaatggtgggaaaactctaacatatttcaactatgaccagagtggggattttcaaactgttactttcgaaggacctgaaattaggaaaattttttatggaagctttcacaagctacacattgttgtcagtgagactttggtcaaagtggttattgactgcaagcaagtgggtgagaaggcaatgaacgcatcagctaatatcacgtcagatggtgtagaagtgctagggaaaatggttcgatcaagaggaccaggtggaaactctgcaccgttccagttacagatgtttgatattgtttgctccacatcatgggccaatacagacaaatgctgtgaacttccaggcctgagagatgatgagtcttgcccagaccttccccattcctgctcctgttctgaaaccaatgaagtggctctgggaccagcgggcccaccaggtggtccaggactccgaggaccaaagggccagcaaggtgaaccgggtccaaagggaccagatggccctcggggtgaaattggtctgccaggacctcagggtccacctggacctcaaggaccaagtggtctgtccattcaaggaatgcccggaatgccaggagaaaaaggagagaaaggagatactggccttccaggtccacagggtatcccaggaggcgttggttcaccaggacgtgatggctcaccaggccagaggggccttccgggaaaggatggatcctcgggacctccaggaccaccagggccaataggcattcctggcacccctggagtcccagggatcacaggaagcatgggaccgcaaggcgccctgggaccacctggtgtccctggagcaaagggggaacgaggagagcggggtgacctgcagtctcaagccatggtgagatcagtggcgcgtcaagtatgcgaacagctcatccagagtcacatggccaggtacactgccatcctcaaccagattcccagccactcctcatccatccggactgtccaagggcctcctggggagcctgggaggccaggctcacctggagcccctggtgaacaaggacccccaggcacaccaggcttccccggaaatgcaggcgtgccagggaccccaggagaacgaggtctaactggtatcaaaggagaaaaaggaaatccaggcgttggaacccaaggtccaagaggcccccctggaccagcaggaccttcaggggagagtcggcctggcagccctgggccccctggctctcctggaccaagaggcccaccaggtcatctgggggttcctggaccccaaggtccttctggccagcctggatattgtgacccctcatcatgttctgcctatggtgtgagagatctgatcccctacaatgattaccagcactgaagtggaaatcctccactctggttccattggccccagacatttagctgtggatacagaactgtcctgtcaaccaccaccaccaccaagcccctgcccctaacaatggacactctgcttccctgcttcttctgcatccctgccttcccactttcaaacctcttgcccactctgctccaaacatgatggagtgataacatcggaacttaaccaaatcatatatgtctattttaatagacactgactgctccatgtcagcctggatagaggtatatgatcgtgtgccaagaatttatcccagactcccctgtgtgacagcttcataataaagttacttaactgtgcctcttcctccttcctctccccacacaggatggatgggcatctttctccttgaccaccctactctcccttcctcccctgatcacctcccctccctgctcttccctggtgatggacttctaacatgagattttttaaaaaaatttctatttcttttataattttgctgagttttcagggtttcttctgtaaataaaacataatatttaaa

SEQ ID NO: 270829 - DNA, 3085 bp, Artificial Sequence
  derived and/or modified sequence
ctctagatttttagacatattttgaaagtctttcatcaccagatttcaaaggtgttgatagatatctatttttaaacatggaaagatggtggtgcaatggccagtggctgctacaccccatgtaaaaagcggaaaataaaatgaagattttccagcgcaagatgcggtactggttgcttccaccttttttggcaattgtttatttctgcaccattgtccaaggtcaagtggctccacccacaaggttaagatataatgtaatatctcatgacagtatacagatttcatggaaggctccaagagggaaatttggtggttacaaacttcttgtgactccaacttcaggtggaaaaactaaccagctgaatctgcagaacactgcaactaaagcaattattcaaggccttatgccagaccagaattacacagttcaaattattgcatacaataaagataaagaaagcaagccagctcaaggccaattcagaattaaagatttagaaaaaagaaaggatccaaagcccagagtcaaagttgtggacagaggaaatgggagtagaccatcttcaccagaagaagtgaaatttgtctgtcaaactccagcaattgctgacattgtaatcctggtcgatggttcatggagtattggaagattcaacttcagactggttcggcatttcttggaaaacctggttacagcattcgatgtgggctcagagaagacacgaattggtcttgcacagtatagtggtgaccccagaatagaatggcacttgaatgcatttagcacaaaagatgaagtgattgaagctgtccgaaacctcccatataaaggaggaaatacactaacaggtcttgctttgaactacatttttgaaaatagcttcaaaccagaagcaggatcaaggactggagtatccaaaattggcattttaatcacagatggaaaatcccaagatgacattattccaccatctagaaatcttcgtgagtctggtgtagaactgtttgccataggggtgaaaaacgcggatgtgaatgagctgcaggagatcgcctctgaaccagacagcactcatgtgtacaatgttgccgaattcgatctgatgcacacagttgtggagagtctgaccaggactctctgctctagagtggaagaacaggacagagaaattaaagcctcagcccatgccatcactgggccgcctacggagttgattacttctgaagtcactgccagaagctttatggttaactggactcatgccccaggaaatgtggaaaaatacagagttgtgtattatcctaccaggggtggaaaaccagacgaggtggtggtagatggaactgtatcttccacagtgttgaaaaacttgatgtctttaactgaatatcagatagcagtctttgcaatctatgcccacactgctagtgaaggcctacggggaactgaaactacacttgctttaccgatggcttctgaccttctactgtacgacgtgactgagaacagcatgcgagtcaaatgggatgcagtgcctggggcctcaggttacctgatcctttatgctcctctaacagagggcctggctggggatgaaaaagagatgaaaattggagagacccacacagatattgaattgagtgggttgttgcccaatacagaatacacagtcacagtttatgccatgtttggagaagaggccagtgatcctgttacgggacaagaaacaacatcaccttaattattaagagattcactaactcctacaagatctttattgtcaaagaatcagtatgtattgaattaatgaaagaactgggctttgaggttaggaaacatcatgcttcgtggctatggctgtggctttaagtccaccaagaaacctgagaatctccaatgttggctctaacagtgctcgattaacctgggacccaacttcaagacagatcaatggttatcgaattgtatataacaatgcagatgggactgaaatcaatgaggttgaagtcgatcctattactaccttccctctgaagggcttgacacctctcacagagtatactattgctattttctccatctatgatgaaggacagtcagagcctctgactggagtttttaccaccgaggaagttccagcccagcaatacttagaaattgatgaggtgacgacagacagttttagggtgacctggcatcccctctcagctgatgaagggctacacaaattgatgtggattccagtctatggggggaagactgaggaggttgtcctgaaagaagagcaggactcacatgttattgaaggcctggagcccggtacggagtatgaagtttcactattggccgtacttgatgatggaagcgagagtgaggtggtgactgctgtcgggaccacacttgacagtttttggacagaaccagctacaaccatagtgcctaccacatctgtgacttcagttttccagacgggaatcagaaacctagttgtaggtgatgaaactacttctagcctgcgggtaaaatgggacatttctgacagcgatgtgcagcagtttagggtgacctacatgacagctcaaggggaccctgaggaagaagtcataggaacggtctgtataaattcaactgactagaaactctgcagatgttactaacacagctaataagactgtcttcggagatcaatgcaaactttactgctcttttctcagtgactctgccatctccagaaactaatgttctctgttaatctgactccactactggcttcttagtgacctttataaatccaaaacttgctccatgtacaacttgctccaagttaataacctctgaacattgtttcaaatattgcttctcttctgctgccttgcacctgttcgagcaccaaagttgggtcataaaaggccatatgcacttgtgtctgtatatatgtatgtatagacatgtataaaagtttaatatagaaaataatttcttctgcccttggaaatctgataaaaaaacttttaagcaaaggacacagaaaaggtcttctatatggtatagtgaaaatattcttaataaaataccatccgt

SEQ ID NO: 270830 - DNA, 5342 bp, Artificial Sequence
  derived and/or modified sequence
atgaagatttttcagcggaagatgaggtactggctgctgccgccattccttgcaattgtgtacttctgcacaatcgtgcaagggcaggtggccccaccaacgaggttgcggtataacgtgatttcccacgactcgatccagatctcctggaaagcgccacgtgggaagttcggcggatataagctgttggtgacacccacaagcggtgggaagactaaccagctcaatctgcaaaacacagctaccaaagcgataattcagggattaatgccagatcaaaattacaccgtgcagatcattgcgtacaacaaagataaggagtccaaacctgcccagggtcagtttaggatcaaagatctggagaaacgcaaagaccccaagcctcgtgtcaaggtggtcgatcgaggaaatgggagtcgacctagctctcccgaggaagtcaagtttgtttgtcagacaccggcaatcgctgacattgtcatcctagttgatggaagctggtctatcgggaggttcaactttcgactggtgcgccacttcctggagaacctggtcacggcatttgacgtgggttccgaaaagacaaggataggactcgcacagtattctggggatcccagaatcgaatggcatctcaacgcctttagcacaaaagatgaggtgatcgaagcagtgaggaatcttccatataagggcggtaacactctgactggactagccctgaattacatcttcgaaaactccttcaagccagaagctggttctagaaccggcgtcagcaaaatcggaattctcataactgacggaaaatctcaggacgatattatcccaccgagtcgcaatttgcgggagagtggagtggaactgttcgccattggtgtcaagaatgctgacgtgaacgaacttcaagagatagcatcagagcccgattcaacgcacgtgtataatgtggctgaattcgacctcatgcatacagtagtagagtccctgactagaaccctgtgttccagggttgaagaacaggatagagaaatcaaggcttccgcacatgctatcactggcccacccacagaactcattacatccgaagtcacggcacgtagctttatggtaaattggacgcacgccccaggaaacgtggaaaagtacagggtggtgtactatccgactcggggaggtaaacccgacgaggtggtggtggacggcaccgtgagcagcaccgtattaaagaaccttatgtcactgaccgagtatcagatagcagtgttcgctatctatgcccacacggcatcagaggggcttcgcggaaccgagaccactttggccctgccaatggcaagcgacctgctgctgtacgacgtaacagagaactcgatgcgagtgaaatgggatgcagtgcccggtgctagtggatacttaattctttacgccccactcaccgagggtttggctggggatgaaaaggaaatgaagatcggtgaaacacatacagatatcgaattatccggcctgcttcctaacacagaatacacggtgacagtctacgccatgtttggtgaagaagcgagtgaccccgtaacaggtcaagagactactcttgccctttctcctcctagaaacctgagaataagcaatgtcgggtccaacagtgctcgccttacatgggacccgaccagtcgacagatcaacggatacaggattgtgtacaataacgccgacgggacagaaatcaatgaggttgaagttgatcctattacaacattccctttgaagggattaactcccctgacagagtacacgatagctatcttttctatctacgatgaggggcagtccgaaccattgaccggcgttttcacaacagaggaagtgcctgcccagcaatatctggagatcgatgaagtcaccacagacagtttcagggtgacctggcatcccctctcagcggatgaggggctgcacaagcttatgtggatcccagtgtatggcggtaagaccgaggaggtggtactcaaagaggaacaagacagtcacgtgatcgaaggtctggaacccggaacggagtatgaagtgtccctcctggccgtcctagatgacggatcagagtccgaagtagtgacagcagtgggtacaacgctggattccttttggactgagcctgcaacaacgatcgttcctactacatccgtgacatcagtctttcaaaccggaatccgtaacctggtagtgggcgatgaaactactagcagcctccgtgtgaaatgggatatctctgattcggatgtgcagcaatttagggtcacatacatgaccgcccagggagaccctgaggaagaagtgatcggcacagtgatggtccctgggtcccagaacaatttgctgctgaaacccctactacctgatacagaatacaaagtgacagtcacccccatctatacagacggcgaaggggtgagcgtgtcagcacccggaaagacgctgccttcttcaggtcctcagaacctcagagtttctgaggaatggtacaatcgcttacgtatcacctgggacccgcctagctcccccgtgaaaggctaccgcatcgtgtacaaaccggtgtccgtacctgggccaactctggagacatttgttggcgctgacattaacacaatccttattaccaacttgctgagcggcatggattacaacgtgaaaatctttgcaagtcaggcatctggattctctgatgcactcaccggcatggtgaagacccttttcctgggcgtaacaaatctccaggctaaacacgtcgagatgacatccctttgcgcccattggcaggtgcaccgccacgccaccgcataccgggtcgtgatcgaatccttgcaggaccgccagaaacaagagagtactgttggaggagggactacacgccactgcttctacggattacagccagacagcgagtacaagatctccgtgtacaccaagctccaggagatcgagggaccctccgtgagcattatggaaaaaacacaaagcctgccaacgcggcctcctacgttccccccaaccatccccccagccaaagaggtttgtaaggccgcaaaggctgacttggttttcatggtggatggatcatggagcattggtgatgagaattttaacaaaattatctctttcctctactctaccgtgggagcgctgaataagattggcactgatggtacccaagtggccatggtgcagttcacagacgacccaaggaccgagtttaaattgaacgcctacaagacaaaagaaaccctcttagacgcaattaaacatatcagttataaagggggaaacacaaaaaccggaaaggctatcaaatatgtccgggacactctctttaccgcagagtccggcacaagaaggggaatccccaaggtaattgttgtgatcacagacggcagatcccaggatgatgtcaacaaaataagccgggagatgcaactcgatggatatagtatattcgcgattggcgtcgcggatgctgattactcagagctggtttcaatcgggagtaagcctagtgccaggcatgtgttcttcgtggacgattttgatgctttcaagaagatcgaggacgagcttataaccttcgtgtgtgaaaccgcaagtgcaacctgtcctgtggtacacaaggatgggatcgaccttgctggctttaaaatgatggagatgttcggccttgtggaaaaggacttctcaagtgtggagggcgtgtcgatggagccgggaacttttaacgtgtttccgtgctaccaactgcacaaagacgccctcgtgtcccaacccacccgatacttgcacccagagggactgccctctgattatacgatatccttcttattcaggattctgcctgataccccccaggagcccttcgctttgtgggaaattctgaacaagaactctgatccgcttgttggtgtgattcttgataacggtggaaaaaccctcacctactttaactacgatcaatccggcgattttcagactgtcaccttcgagggaccagagattcggaagatcttttacggcagtttccacaagctacacatcgtcgtgagtgaaactctggttaaggtggtgatcgactgtaaacaggtcggcgaaaaggccatgaatgccagtgctaacatcacttctgatggggtggaagtcctgggtaagatggtcaggagcaggggccctggaggcaactctgcaccctttcagctccagatgttcgatatcgtgtgctcgacctcatgggctaacacagacaagtgctgcgagttacctggcttgcgcgatgacgaatcctgcccagaccttccacatagctgttcatgtagtgagactaatgaggtggccctcggaccagctgggccaccgggaggcccaggactgcggggacccaaagggcagcagggggagccaggccctaagggtccagatgggccacggggtgagatcggactgcccggaccacagggcccacccggtccgcaagggccttctggcctgtccattcaggggatgcctggcatgccgggagaaaagggggagaaaggggacacgggtctgccagggccacaaggtattcctggcggtgttggctccccgggtcgggacggctcacccggacagcgcggattgccgggaaaggatggatcaagcggccctccagggcctcctggcccaatcggaatccccggtactccaggcgttccagggatcaccgggtccatgggaccgcagggggctctcggaccacctggcgtgcccggtgccaagggggagaggggggagcgtggggacctgcagtcccaggccatggtcaggtccgttgccagacaggtttgcgagcagctgatacagtcccatatggctcgatacacggccatactgaaccaaattccctctcactccagttccatcagaactgttcagggcccacccggtgagccgggtaggcccggatctccaggagcccctggcgagcaggggcctcctggcaccccaggattcccaggaaatgctggcgtgcccggtaccccaggcgagcggggattgacagggatcaagggcgagaagggaaatcctggggtgggtactcagggcccacgcggaccccctggccctgctggcccaagcggagagagtagacctggctctccaggtcccccaggtagcccaggacctcggggaccccctggtcaccttggagtgccaggtccccaggggcctagtggccagcccggatactgcgacccttctagttgtagtgcctatggagtgcgagacctgatcccctacaatgattatcaacatta

SEQ ID NO: 270831 - DNA, 1605 bp, Artificial Sequence
  derived and/or modified sequence
atgaagatttttcagaggaagatgaggtactggcttcttcctccgttcctggccatcgtatatttctgtactatagtgcaaggccaggtcgcccctccgaccaggcttaggtataacgtgatctctcatgactccattcagattagctggaaggcgccacgcggaaaattcggcggttacaagttgctcgtgactccaacatccgggggaaagacaaaccagttgaatcttcagaatacagcgactaaagccattattcaggggttgatgccggatcagaactacaccgtgcagatcatcgcttataataaggacaaggagagcaagcccgcacaggggcagttcagaataaaggacctcgagaaaaggaaggacccaaagccgagggtgaaggtggtggatcggggtaatgggagccggccatccagtccagaggaagtcaagttcgtgtgtcagacgccagcgatcgcggatatcgtaatcctagtggacggttcctggtctatagggaggtttaacttccgcctggtcaggcattttctggagaacttggtcacagccttcgatgtagggtccgaaaagactcggatcggactggcacagtactccggggacccccgaatcgaatggcacctcaatgcattttcaacgaaagacgaggttattgaggccgtccgaaacctgccgtataagggcggaaacactctcactggtctcgctctgaattacatcttcgagaactccttcaagccagaagcaggctcccgaacaggcgtcagtaaaattggtatccttatcactgatggaaaatctcaggacgatatcatccccccttcacgcaacttgcgtgaatctggcgtggagttgtttgctattggggtgaagaatgccgatgtgaatgagctgcaagagatcgcaagcgaacctgacagtacgcatgtatacaacgtcgccgaatttgatctgatgcacaccgtcgtcgagtcacttacgcggaccctttgcagtagggtcgaggagcaggatcgggagatcaaagcttctgcacacgctatcaccggtccacccaccgagctcatcacaagtgaggtgactgcgagaagtttcatggttaactggacccacgctcccggtaacgttgaaaaatatcgggtcgtgtactaccccacccgtggagggaagcctgatgaggtagttgtggatgggacggtcagtagtactgtgctcaagaatctaatgtccctgactgagtatcaaattgctgtctttgcaatttatgcccatactgcttccgagggactgcggggtaccgaaactacactggcactgccaatggcctccgacttgctcctgtacgatgtaactgagaattccatgcgcgtaaagtgggatgctgtgccgggtgccagtggttacttaattctatacgccccactcaccgaaggcctggccggtgacgagaaggaaatgaaaatcggggagactcacaccgatatcgagctttctgggctgctgcctaatacagaatacactgtgacagtgtacgccatgtttggtgaagaggcgtccgaccctgtcactgggcaggagacaacatccccttag

SEQ ID NO: 270832 - protein, 470 aa, Artificial Sequence
  derived and/or modified sequence
MGIWTSGTDIFLSLWEIYVSPRSPGWMDFIQHLGVCCLVALISVGLLSVAACWFLPSIIAAAASWIITCVLLCCSKHARCFILLVFLSCGLREGRNALIAAGTGIVILGHVENIFHNFKGLLDGMTCNLRAKSFSIHFPLLKKYIEAIQWIYGLATPLSVFDDLVSWNQTLAVSLFSPSHVLEAQLNDSKGEVLSVLYQMATTTEVLSSLGQKLLAFAGLSLVLLGTGLFMKRFLGPCGWKYENIYITRQFVQFDERERHQQRPCVLPLNKEERRKYVIIPTFWPTPKERKNLGLFFLPILIHLCIWVLFAAVDYLLYRLIFSVSKQFQSLPGFEVHLKLHGEKQGTQDIIHDSSFNISVFEPNCIPKPKFLLSETWVPLSVILLILVMLGLLSSILMQLKILVSASFYPSVERKRIQYLHAKLLKKRSKQPLGEVKRRLSLYLTKIHFWLPVLKMIRKKQMDMASADKS

SEQ ID NO: 270833 - DNA, 1413 bp, Artificial Sequence
  derived and/or modified sequence
atgggcatctggaccagcggcaccgacatcttcctgagcctgtgggagatctacgtgagccccagaagccccggctggatggacttcatccagcacctgggcgtgtgctgcctggtggccctgatcagcgtgggcctgctgagcgtggccgcctgctggttcctgcccagcatcatcgccgccgccgccagctggatcatcacctgcgtgctgctgtgctgcagcaagcacgccagatgcttcatcctgctggtgttcctgagctgcggcctgagagagggcagaaacgccctgatcgccgccggcaccggcatcgtgatcctgggccacgtggagaacatcttccacaacttcaagggcctgctggacggcatgacctgcaacctgagagccaagagcttcagcatccacttccccctgctgaagaagtacatcgaggccatccagtggatctacggcctggccacccccctgagcgtgttcgacgacctggtgagctggaaccagaccctggccgtgagcctgttcagccccagccacgtgctggaggcccagctgaacgacagcaagggcgaggtgctgagcgtgctgtaccagatggccaccaccaccgaggtgctgagcagcctgggccagaagctgctggccttcgccggcctgagcctggtgctgctgggcaccggcctgttcatgaagagattcctgggcccctgcggctggaagtacgagaacatctacatcaccagacagttcgtgcagttcgacgagagagagagacaccagcagagaccctgcgtgctgcccctgaacaaggaggagagaagaaagtacgtgatcatccccaccttctggcccacccccaaggagagaaagaacctgggcctgttcttcctgcccatcctgatccacctgtgcatctgggtgctgttcgccgccgtggactacctgctgtacagactgatcttcagcgtgagcaagcagttccagagcctgcccggcttcgaggtgcacctgaagctgcacggcgagaagcagggcacccaggacatcatccacgacagcagcttcaacatcagcgtgttcgagcccaactgcatccccaagcccaagttcctgctgagcgagacctgggtgcccctgagcgtgatcctgctgatcctggtgatgctgggcctgctgagcagcatcctgatgcagctgaagatcctggtgagcgccagcttctaccccagcgtggagagaaagagaatccagtacctgcacgccaagctgctgaagaagagaagcaagcagcccctgggcgaggtgaagagaagactgagcctgtacctgaccaagatccacttctggctgcccgtgctgaagatgatcagaaagaagcagatggacatggccagcgccgacaagagctag

SEQ ID NO: 270834 - DNA, 1413 bp, Artificial Sequence
  derived and/or modified sequence
atgggcatatggactagcgggacggatatattcctgagcctttgggagatctacgtgtccccccggagccctggatggatggattttattcagcatctcggtgtttgctgtctggtggcactgatcagcgtaggtctgctatccgtggccgcgtgctggtttttgccttcaataatagccgctgccgcctcatggattataacatgtgtgcttctttgttgctcaaagcacgctagatgctttatattactcgtttttctcagttgcggactgcgggaaggacggaatgctttgatcgctgcagggacgggaatcgtgatcctgggccacgtcgagaatatctttcataacttcaaagggcttctcgatggcatgacatgtaatctgcgcgctaagagcttctctattcacttccccttactgaaaaagtatattgaggcgattcagtggatttatgggctggctacccctctcagcgtatttgacgacttggtttcctggaaccagacactggcagtgtcactgttctcacccagtcacgtgctagaggcccagctaaacgattccaagggcgaagtcctgagcgtactgtatcagatggccaccacaactgaggtgcttagctcactgggacaaaagctccttgcctttgccgggctgtcactggtgctccttgggaccgggttgtttatgaaaaggttcttgggtccttgcgggtggaaatacgagaacatttatatcacccgccaatttgttcaattcgacgagcgggagcgacaccagcagaggccttgcgtgctccccctgaataaggaggagcggcggaaatacgtcattattcccaccttctggcctacacctaaggagagaaagaacctcggattgttctttctacctattctgatccacctgtgtatatgggtgctctttgcagccgtagattacctgctgtatcggctgatcttcagcgtttccaagcaattccagagcctaccaggattcgaggtccacctgaagcttcatggtgaaaaacagggcacacaggatattatccatgacagctcgttcaatatctcggtgttcgagccgaactgcattccaaagcccaaattcttgctgtcggaaacctgggtgccactcagcgtcattctgctgattctggtcatgctgggcctgctatcaagcatcctaatgcagctgaagattttggtgtcagccagtttttacccatctgtcgaacgtaagcgtatccagtatctccatgcaaaattgttaaagaagaggagcaaacagccacttggggaggtaaagcgtagattgagcctttatcttacgaagattcacttctggttacctgtgctgaagatgatcaggaaaaaacaaatggacatggcctcagccgataaatcttag

SEQ ID NO: 270835 - DNA, 1413 bp, Artificial Sequence
  derived and/or modified sequence
atgggcatctggaccagcggcacagacatcttcctgagcctgtgggagatctacgtgagccccaggagccctggctggatggacttcatccagcacctgggcgtgtgctgcctggtggccctgatctctgtgggcctgctgtctgtggccgcctgctggttcctgcccagcatcatcgctgctgctgcctcctggatcatcacctgtgtgctgctgtgctgcagcaagcacgcccgctgcttcatcctgctggtgttcctgagctgtggcctgcgggagggcagaaatgccctgattgctgctggcactggaattgtcatcctgggccacgtggagaacatcttccacaacttcaagggcctgctggatggcatgacctgcaacctgcgggccaagagcttcagcatccacttccccctgctgaagaagtacatcgaggccatccagtggatctacggcctggccacccccctgtctgtgtttgatgacctggtgtcctggaaccagaccctggccgtgtccctcttcagccccagccacgtgctggaggcccagctgaatgacagcaagggggaggtgctgtctgtgctgtaccagatggccaccaccacagaggtgctgagcagcctgggccagaagctgctggcctttgctggcctgagcctggtgctgctgggcaccggcctcttcatgaagcgcttcctgggcccctgtggctggaagtatgagaacatctacatcacccggcagtttgtgcagtttgatgagcgggagcggcaccagcagaggccctgtgtgctgcccctgaacaaggaggagaggaggaaatatgtgatcatccccaccttctggcccacccccaaggagaggaagaacctgggcctcttcttcctgcccatcctgatccacctgtgcatctgggtgctgtttgctgctgtggactacctgctgtaccgcctcatcttctctgtgtccaagcagttccagagcctgcccggctttgaggtgcacctgaagctgcatggagagaagcagggcacccaggacatcatccatgacagcagcttcaacatctctgtgtttgagcccaactgcatccccaagcccaagttcctgctgtctgagacctgggtgcccctgagcgtcatcctgctgatcctggtgatgctgggcctgctgagcagcatcctgatgcagctgaagatcctggtgtctgccagcttctaccccagcgtggagaggaagaggatccagtacctgcacgccaagctgctgaagaagaggagcaagcagcccctgggggaggtgaagaggcggctgagcctgtacctgaccaagatccacttctggctgcctgtgctgaagatgatcaggaagaagcagatggacatggccagcgctgacaagagctag

SEQ ID NO: 270836 - DNA, 1413 bp, Artificial Sequence
  derived and/or modified sequence
atgggcatctggaccagcggcaccgacatcttcctgagcctgtgggaaatatatgtcagcccgcggtcccccgggtggatggactttatacagcacttgggcgtgtgctgcctagttgcgcttattagcgtcggcctcctgtccgtggccgcctgttggtttcttcctagcatcattgctgccgcagcatcctggatcattacgtgtgtgctcttgtgctgctcaaaacatgcccggtgctttattttgctggtgttcctgtcatgtggactgcgcgagggccggaacgctctgatcgcagccgggactggcatagtgatactgggccacgtggagaacatatttcacaactttaaaggcctgcttgacgggatgacttgtaatctacgagccaagtcttttagcatccacttcccgttactaaagaagtatatcgaggccattcagtggatttatggcctcgccacccccctaagcgtgtttgacgacctcgtttcgtggaaccagaccctggccgtatcactgtttagtccttcccacgttttggaagcgcagcttaacgattccaagggggaggtgctttctgtgttgtatcagatggcaacaactaccgaagttctctctagcttgggacaaaagctgctcgctttcgctggtttgtccctcgtcctcctgggcaccgggcttttcatgaagaggtttctaggaccctgcgggtggaaatacgagaatatctatataacacgccagttcgtccagttcgatgaacgcgagcgccaccagcagcgcccttgtgttcttcctctgaacaaagaagagagacgaaagtatgtgattatcccgactttctggcctacccccaaagagagaaaaaatcttggcctttttttcctgccgattttgattcatttgtgcatatgggtactattcgcagcggttgattatctcctgtaccgcctgatttttagcgtttccaaacaattccaatccctgcctgggttcgaggtgcacctgaaactacacggggagaaacaggggacccaagatatcatccacgacagttctttcaacatctcagtttttgaaccaaactgtatcccgaaaccaaagtttttgctgagcgagacgtgggtgccattaagtgtcatattactcatcctggtgatgctaggccttctgtcctccattttgatgcagctgaaaatactcgtcagcgcctcattctacccctccgtcgaaaggaaaagaatccagtatcttcatgccaagttgcttaaaaaacgaagcaagcaaccactgggagaagttaagcgtagactctcactttatttaaccaagatccatttttggttgcctgtgcttaaaatgatcagaaaaaagcagatggatatggcatctgcagacaaatcatag

SEQ ID NO: 270837 - DNA, 1413 bp, Artificial Sequence
  derived and/or modified sequence
atgggtatctggacctccggtaccgacatctttctaagcctatgggaaatatatgtgtcgccccgtagccccggttggatggacttcatccagcatctcggggtgtgctgtctggtggccctcatctcggtcgggttgctctctgtggctgcctgctggttcctgccttctataatagcagctgctgccagctggattataacctgcgttttgctttgctgcagcaagcacgccaggtgtttcattctgttggtgttcctgtcatgcgggttgagggagggtcgaaacgcattaattgccgctggaacggggatagttatactcggtcatgtggagaacatcttccacaacttcaaaggcttgcttgacggcatgacgtgcaatctccgggctaaatctttctctattcacttccctttactgaaaaagtacatcgaggccatccagtggatctatgggcttgctaccccgctgagcgtcttcgacgacctcgtttcttggaaccagacacttgccgtgagcctgttcagcccatctcacgtgctggaggctcaactgaacgatagtaaaggcgaggttctaagcgtgttgtaccagatggccaccaccaccgaagtgcttagctcacttggccagaaactgctagcatttgcagggttgagtctcgtactgcttgggacaggcttgttcatgaaacgttttttgggtccctgcggctggaaatacgagaacatctatattacccgccagtttgtgcaatttgatgaacgcgaacgacatcagcagcgcccatgcgtgcttccactcaacaaggaggagcgtcgtaagtatgttatcattcctaccttctggcccactccaaaggagcgtaagaatctgggactcttttttctgcctattctgatacacttatgcatctgggtgctttttgcagcggtcgactatctgttgtatcgcctgattttcagtgttagcaagcagttccagtctctgccgggattcgaggttcacctaaaactgcatggtgaaaagcagggtactcaggatattattcacgacagttcattcaatataagtgtcttcgaaccgaactgtatcccaaagccaaaattcctgctgagtgaaacttgggtccccctttccgtgattctactgatcctggtgatgctggggctgctttcttcaattctgatgcaactgaagatcctggtttccgccagtttctaccccagcgttgagcggaagcgaatccaatacctgcacgccaaactgttgaaaaaacgcagtaagcagcctctaggggaagtaaagcgacgcttgagcctctacctgactaaaatccatttttggctacctgtgctgaaaatgatcaggaagaagcagatggatatggccagcgccgacaagtcctag

SEQ ID NO: 270838 - DNA, 1953 bp, Artificial Sequence
  derived and/or modified sequence
gcatttctgcattcgaagaagaatctgagagaaacctgacgcagggagcatgggtatctggacctcaggcactgatatcttcctaagtctttgggagatttacgtgtctccaagaagccccggatggatggactttatccagcatttgggagtttgctgtttggttgctcttatttcagtgggcctcctgtctgtggccgcctgctggtttctgccatcaatcatagcggccgctgcctcctggattatcacgtgtgttctgctgtgttgctccaagcatgcacgatgttttattcttcttgtctttctctcttgtggcctgcgtgaaggcaggaatgctttgattgcagctggcacagggatcgtcatcttgggacacgtagaaaatatttttcacaactttaaaggtctcctagatggtatgacttgcaacctaagggcaaagagcttttccatacattttccacttttgaaaaaatatattgaggcaattcagtggatttatggccttgccactccactaagtgtatttgatgaccttgtttcttggaaccagaccctggcagtctctcttttcagtcccagccatgtcctggaggcacagctaaatgacagcaaaggggaagtcctgagcgtcttgtaccagatggcaacaaccacagaggtgttgtcctccctgggtcagaagctacttgcctttgcagggctttcgctcgtcctgcttggcactggcctcttcatgaagcgatttttgggcccttgtggttggaagtatgaaaacatctacatcaccagacaatttgttcagtttgatgaaagggagagacatcaacagaggccctgtgtgctcccgctgaataaggaggaaaggaggaagtatgtcatcatcccgactttctggccgactcctaaagaaaggaaaaacctggggctgtttttcctccccatacttatccatctctgcatctgggtgctgtttgcagctgtagattatctgctgtatcggctcattttctcagtgagcaagcagtttcaaagcttgccagggtttgaggttcacttgaaactgcacggagagaaacaaggaactcaagatattatccatgattcttcctttaatatatctgtgtttgaacccaactgtatcccaaaaccaaaattccttctatctgagacctgggttcctctcagtgttattcttttgatattagtgatgctgggactgttgtcctctatccttatgcaacttaaaatcctggtgtcagcatctttctaccccagcgtggagaggaagcgcatccaatatctgcatgcaaagctgcttaaaaaaagatcaaagcagccgctgggagaagtcaaaagacggctgagtctctatcttacaaagattcatttctggcttccagtcctgaaaatgattaggaagaagcaaatggacatggcaagtgcagacaagtcatgagagaccccgactactcctcagccacatcgcaccaacaattctcttcaggtctaggatggcagtcactattcatgccggataatagagaactatgtgacgcagtcctctcaggagtctgagtttacagagccaacttgcagcacctggttatgcctcctttcatctcaaagccaaagagctgccaggtaaatggttatgtggtctatgttccaaacaaaccacatgatcttgcctgtgtcacaatgtaacaagactctagctgggtcccctggtgatgagtttcagcatagaataatgttcaaggaaaagaaaacgaaaacagtttaaatctctaccacagcctcacaagcaaatgctaaggggaacatacatgtaaaaagccagcaaactatcttcaaactcttccgtccttaatgtcttccatggctattgcccccacaatggtctcttttctccctgctcccttattaaagaactctttctgaaaccca

SEQ ID NO: 270839 - protein, 403 aa, Artificial Sequence
  derived and/or modified sequence
MTPPLLHHDLKTQNILLDNEFHVKIADFGLSKWRMMSLSQSRSSKSAPEGGTIIYMPPENYEPGQKSRASIKHDIYSYAVITWEVLSRKQPFEDVTNPLQIMYSVSQGHRPVINEESLPYDIPHRARMISLIESGWAQNPDERPSFLKCLIELEPVLRTFEEITFLEAVIQLKKTKLQSVSSAIHLCDKKKMELSLNIPVNHGPQEESCGSSQLHENSGSPETSRSLPAPQDNDFLSRKAQDCYFMKLHHCPGNHSWDSTISGSQRAAFCDHKTTPCSSAIINPLSTAGNSERLQPGIAQQWIQSKREDIVNQMTEACLNQSLDALLSRDLIMKEDYELVSTKPTRTSKVRQLLDTTDIQGEEFAKVIVQKLKDNKQMGLQPYPEILVVSRSPSLNLLQNKSM

SEQ ID NO: 270840 - DNA, 1212 bp, Artificial Sequence
  derived and/or modified sequence
atgaccccccccctgctgcaccacgacctgaagacccagaacatcctgctggacaacgagttccacgtgaagatcgccgacttcggcctgagcaagtggagaatgatgagcctgagccagagcagaagcagcaagagcgcccccgagggcggcaccatcatctacatgccccccgagaactacgagcccggccagaagagcagagccagcatcaagcacgacatctacagctacgccgtgatcacctgggaggtgctgagcagaaagcagcccttcgaggacgtgaccaaccccctgcagatcatgtacagcgtgagccagggccacagacccgtgatcaacgaggagagcctgccctacgacatcccccacagagccagaatgatcagcctgatcgagagcggctgggcccagaaccccgacgagagacccagcttcctgaagtgcctgatcgagctggagcccgtgctgagaaccttcgaggagatcaccttcctggaggccgtgatccagctgaagaagaccaagctgcagagcgtgagcagcgccatccacctgtgcgacaagaagaagatggagctgagcctgaacatccccgtgaaccacggcccccaggaggagagctgcggcagcagccagctgcacgagaacagcggcagccccgagaccagcagaagcctgcccgccccccaggacaacgacttcctgagcagaaaggcccaggactgctacttcatgaagctgcaccactgccccggcaaccacagctgggacagcaccatcagcggcagccagagagccgccttctgcgaccacaagaccaccccctgcagcagcgccatcatcaaccccctgagcaccgccggcaacagcgagagactgcagcccggcatcgcccagcagtggatccagagcaagagagaggacatcgtgaaccagatgaccgaggcctgcctgaaccagagcctggacgccctgctgagcagagacctgatcatgaaggaggactacgagctggtgagcaccaagcccaccagaaccagcaaggtgagacagctgctggacaccaccgacatccagggcgaggagttcgccaaggtgatcgtgcagaagctgaaggacaacaagcagatgggcctgcagccctaccccgagatcctggtggtgagcagaagccccagcctgaacctgctgcagaacaagagcatgtag

SEQ ID NO: 270841 - DNA, 1212 bp, Artificial Sequence
  derived and/or modified sequence
atgacaccccctctgctccaccatgacctgaaaacacagaacatccttctcgataatgaattccatgtcaaaattgctgactttgggctttcgaaatggcgtatgatgtcattatcccagtcccgcagttccaaatcggctccagagggggggacgattatatacatgccgccagagaactacgaacccggccagaagagccgggcctcaatcaaacatgacatatactcctacgctgtgattacatgggaggttctgagccgcaagcagccttttgaagacgttactaacccactacagatcatgtatagcgtgagccaagggcacaggcctgtgattaatgaggagtctcttccttatgacattccacatcgagctaggatgatcagcctaatcgaatcgggatgggcccagaatcccgacgagcggccatcatttcttaagtgtctaattgagttagagcccgtacttagaactttcgaagagatcaccttcctggaggctgtgatacaactcaagaagactaaacttcagagtgtcagtagcgctattcatctctgcgataaaaaaaagatggagctttctctgaatataccggtgaaccacggaccacaggaggagtcttgtggatcctctcagctacatgagaactcagggtcacccgaaacttccagatccttacctgctccacaggacaacgactttctctcccgcaaggctcaggattgctactttatgaaactgcaccactgtcccgggaatcacagctgggactccactatctccgggtctcagcgcgccgccttctgcgaccataagacaacgccatgcagcagcgcgattataaaccctctttcaacagcaggcaattccgagagactgcagccaggaatcgcacagcagtggattcagtcaaagcgggaggatatagttaaccaaatgaccgaggcctgtctcaaccaaagcctggatgcgctcctctctagagacctgattatgaaggaagactacgagctcgtctcaacaaagccaactcgtacctccaaggttcgacagctgctcgatacaaccgacatccagggagaggagtttgccaaggtgatcgtacagaaacttaaggacaataaacagatgggattgcagccctatccagaaattcttgtggtttcccgaagcccatcactgaacttgcttcagaataaaagcatgtag

SEQ ID NO: 270842 - DNA, 1212 bp, Artificial Sequence
  derived and/or modified sequence
atgaccccacccctgctgcaccacgacctgaagacccagaacatcctgctggacaatgagttccacgtgaagattgctgactttggcctgagcaagtggaggatgatgagcctgagccagagccgcagcagcaagagcgcccctgagggcggcaccatcatctacatgcccccagaaaattatgagcccggccagaagagccgggccagcatcaagcatgacatctacagctatgctgtgatcacctgggaggtgctgagcaggaagcagccctttgaagatgtgaccaaccccctgcagatcatgtacagcgtgtcccagggccacaggcctgtgatcaatgaggagagcctgccctatgacatcccccaccgggccaggatgatcagcctcatcgagagcggctgggcccagaacccagatgagcggcccagcttcctgaagtgcctgattgagctggagcctgtgctgcggacctttgaggagatcaccttcctggaggccgtcatccagctgaagaagaccaagctgcagagcgtgagcagcgccatccacctgtgtgacaagaagaagatggagctgagcctgaacatccctgtgaaccacggcccccaggaggagagctgtggcagcagccagctgcacgagaacagcggcagccctgagaccagccgcagcctgcctgccccccaggacaatgacttcctgagcaggaaggcccaggactgctacttcatgaagctgcaccactgccccggcaaccacagctgggacagcaccatcagcggcagccagagagctgccttctgtgaccacaagaccaccccctgcagcagcgccatcatcaaccccctgagcacagctggcaacagcgagcggctgcagcccggcatcgcccagcagtggatccagagcaagcgggaggacatcgtgaaccagatgacagaggcctgcctgaaccagagcctggatgccctgctgagccgggacctgatcatgaaggaggactatgagctggtgtccaccaagcccaccaggaccagcaaggtgcggcagctgctggacaccacagacatccagggcgaggagtttgccaaggtgattgtgcagaagctgaaggacaacaagcagatgggcctgcagccctacccagagatcctggtggtgagccgcagccccagcctgaacctgctgcagaacaagtccatgtag

SEQ ID NO: 270843 - DNA, 1212 bp, Artificial Sequence
  derived and/or modified sequence
atgaccccccccctgctgcaccacgacctgaagacccagaacatcctgttagataatgaattccacgtgaagatagccgacttcgggctgtccaagtggcgcatgatgtccctctcacagtctcgcagctccaaatccgctcctgaggggggcaccattatctatatgccgccagagaattatgagcccgggcagaaatcccgggcgtccatcaagcacgacatttactcttacgcagtgataacatgggaggtgctctctaggaagcagcccttcgaggacgttaccaatcccttgcagataatgtatagcgtcagtcagggccataggccagtgatcaatgaagagagcctcccctacgatatccctcatagagctaggatgatttcactgatcgaatccggctgggctcagaaccctgacgagcgtccttcgtttctgaaatgccttattgagttggagccagtactcagaacattcgaggagattacctttctcgaagctgtaatccagttgaagaagaccaaactgcagagtgttagctccgctatccacctgtgtgacaagaagaaaatggagctctccctgaatattcccgttaatcacggaccccaggaagagtcttgcggatccagtcagctgcatgaaaacagcggcagccctgaaacttctagaagtctcccagccccccaagataatgacttcctaagccgaaaggctcaagattgctattttatgaagctccaccattgcccgggcaaccactcttgggactcaacgatttccgggtcgcagcgggctgctttctgcgatcataagaccaccccttgcagctccgccatcatcaaccccctgtccaccgcaggaaacagtgaacgtctgcagcccggtatagcgcaacagtggatacagtccaagagggaagatatcgtgaaccagatgaccgaagcctgtttgaatcagtctctggatgccctgctttcaagagacctgataatgaaggaagactacgagttagtctctactaagcccaccagaacatctaaggtgcgccaactcctggataccacggatattcagggcgaggaattcgcaaaggtgatagtccagaaactcaaagacaacaagcagatgggtcttcagccttatccggaaatcctggtggtgtcccgcagtcccagtctgaacctgttgcaaaataagtctatgtag

SEQ ID NO: 270844 - DNA, 1212 bp, Artificial Sequence
  derived and/or modified sequence
atgactcctcctctgctgcatcatgatctgaaaacgcagaatattctcctcgacaacgaattccacgtcaaaatagcggactttggactctccaaatggaggatgatgagcctctctcaaagcagatcttcaaagtcagctcccgaaggcggtacgattatatatatgccaccagagaactacgaacccggacaaaaaagtagagcaagcatcaagcacgacatttactcttacgcggtgataacctgggaggtgctgtctcggaaacagccttttgaggatgtcactaatcctctccagatcatgtattctgtctcacagggccaccgacccgttattaatgaagaatctcttccctacgatatccctcatcgggcacgcatgatcagcctcatcgagtccggatgggcacagaatccagatgaacggccatcttttctaaaatgcttgattgaattagagccagtcttacgcacttttgaagagatcaccttcctggaggccgtcatacagctaaaaaaaactaaactgcaatccgtgtcgagtgcgattcacctctgcgacaagaaaaagatggagctctctctgaacattccagtaaatcacggcccacaggaagagtcatgtggtagttcccagttacacgagaatagcggaagcccagagacaagtagaagcctgcctgctccccaggataacgattttctctcaagaaaggcgcaggattgttattttatgaagttgcatcattgtcccggaaaccactcgtgggattctaccataagcggtagtcagagagccgcattttgtgatcataagacgacgccctgttcctctgcaatcataaatcctctgtccaccgcgggtaattctgagcggctgcaaccaggtattgcacagcagtggatacagtcaaagcgggaggatatcgtgaatcagatgacagaggcgtgcttgaaccagagtctcgacgcgctcctcagtagagacctgatcatgaaggaagactatgagttggtttctaccaagcctacacgcacgagcaaagtcagacagctgctcgataccaccgatattcagggcgaggaattcgccaaggtgattgtccaaaagctcaaggataataagcagatgggcctgcaaccctaccctgagattctcgttgtgtcaaggtcccccagcctcaatctattacaaaacaagtcaatgtag

SEQ ID NO: 270845 - protein, 1464 aa, Artificial Sequence
  derived and/or modified sequence
MSGMGENTSDPSRAETRKRKECPDQLGPSPKRNTEKRNREQENKYIEELAELIFANFNDIDNFNFKPDKCAILKETVKQIRQIKEQEKAAAANIDEVQKSDVSSTGQGVIDKDALGPMMLEALDGFFFVVNLEGNVVFVSENVTQYLRYNQEELMNKSVYSILHVGDHTEFVKNLLPKSIVNGGSWSGEPPRRNSHTFNCRMLVKPLPDSEEEGHDNQEAHQKYETMQCFAVSQPKSIKEEGEDLQSCLICVARRVPMKERPVLPSSESFTTRQDLQGKITSLDTSTMRAAMKPGWEDLVRRCIQKFHAQHEGESVSYAKRHHHEVLRQGLAFSQIYRFSLSDGTLVAAQTKSKLIRSQTTNEPQLVISLHMLHREQNVCVMNPDLTGQTMGKPLNPISSNSPAHQALCSGNPGQDMTLSSNINFPINGPKEQMGMPMGRFGGSGGMNHVSGMQATTPQGSNYALKMNSPSQSSPGMNPGQPTSMLSPRHRMSPGVAGSPRIPPSQFSPAGSLHSPVGVCSSTGNSHSYTNSSLNALQALSEGHGVSLGSSLASPDLKMGNLQNSPVNMNPPPLSKMGSLDSKDCFGLYGEPSEGTTGQAESSCHPGEQKETNDPNLPPAVSSERADGQSRLHDSKGQTKLLQLLTTKSDQMEPSPLASSLSDTNKDSTGSLPGSGSTHGTSLKEKHKILHRLLQDSSSPVDLAKLTAEATGKDLSQESSSTAPGSEVTIKQEPVSPKKKENALLRYLLDKDDTKDIGLPEITPKLERLDSKTDPASNTKLIAMKTEKEEMSFEPGDQPGSELDNLEEILDDLQNSQLPQLFPDTRPGAPAGSVDKQAIINDLMQLTAENSPVTPVGAQKTALRISQSTFNNPRPGQLGRLLPNQNLPLDITLQSPTGAGPFPPIRNSSPYSVIPQPGMMGNQGMIGNQGNLGNSSTGMIGNSASRPTMPSGEWAPQSSAVRVTCAATTSAMNRPVQGGMIRNPAASIPMRPSSQPGQRQTLQSQVMNIGPSELEMNMGGPQYSQQQAPPNQTAPWPESILPIDQASFASQNRQPFGSSPDDLLCPHPAAESPSDEGALLDQLYLALRNFDGLEEIDRALGIPELVSQSQAVDPEQFSSQDSNIMLEQKAPVFPQQYASQAQMAQGSYSPMQDPNFHTMGQRPSYATLRMQPRPGLRPTGLVQNQPNQLRLQLQHRLQAQQNRQPLMNQISNVSNVNLTLRPGVPTQAPINAQMLAQRQREILNQHLRQRQMHQQQQVQQRTLMMRGQGLNMTPSMVAPSGMPATMSNPRIPQANAQQFPFPPNYGISQQPDPGFTGATTPQSPLMSPRMAHTQSPMMQQSQANPAYQAPSDINGWAQGNMGGNSMFSQQSPPHFGQQANTSMYSNNMNINVSMATNTGGMSSMNQMTGQISMTSVTSVPTSGLSSMGPEQVNDPALRGGNLFPNQLPGMDMIKQEGDTTRKYC

SEQ ID NO: 270846 - DNA, 4395 bp, Artificial Sequence
  derived and/or modified sequence
atgagtggtatgggcgagaatacgagtgatccgtcaagggctgagacacgcaagagaaaggaatgtccagatcagcttggtccatctccaaagagaaatacagaaaagcgaaatcgcgaacaggagaacaaatacatcgaggagctcgcagagctcattttcgccaatttcaacgacatcgacaatttcaatttcaaaccagacaagtgcgcaattcttaaagagactgtgaagcagatccggcagatcaaagagcaggagaaagccgctgccgctaacatcgacgaggttcagaagtcagatgtgagcagcacgggccagggagtaatcgacaaggacgccctgggaccaatgatgctcgaagccctggatgggttcttcttcgtcgtgaacttggagggcaatgttgtctttgtctccgagaatgtgacacaatacctgcgatataatcaggaggaactcatgaataagtctgtgtactcaatcttgcacgtgggggaccatacggagttcgtgaagaatctgttaccaaagtctattgtgaacggggggtcctggtcaggcgagccaccaaggcggaacagccacacattcaactgtagaatgcttgtcaagcctctgcctgatagtgaagaggagggccacgataaccaggaagcccaccaaaaatatgaaacaatgcagtgctttgcagtttcccaacctaaaagtatcaaggaagagggtgaggaccttcaatcctgtctgatttgtgtggctcgacgagtgccaatgaaggagaggcctgtgcttccttcttccgaatctttcaccacccgccaggatctgcaggggaaaatcacatcactggatacatccacgatgagggccgccatgaaaccaggctgggaagacctagtgcgaaggtgcatacagaagtttcacgctcagcatgagggagaatcagtgtcatatgcgaagcgccatcaccacgaggtgctgagacagggactcgcattttcgcagatatatcggttcagcctaagcgacggcaccttggtggccgctcaaaccaagagcaagctcattcggtcacagaccacgaacgagcctcagttggtaatttctctccatatgctgcaccgggagcagaacgtgtgcgtcatgaaccccgatcttacaggtcagactatgggaaagccccttaatcctatatccagcaatagcccggctcaccaggctctctgctcaggtaacccagggcaggacatgacactgagctccaatatcaattttccaattaacggcccaaaagaacagatgggcatgcccatggggaggttcggcggaagcggaggaatgaatcatgtcagcggaatgcaggccactaccccccagggctcaaattatgctttaaagatgaacagtccctcccagtctagccctggaatgaatccaggacaacccacctctatgttatccccaaggcaccggatgtcgcctggagtcgctgggtccccacggattcctccctcccagttcagtccggccggaagcctccacagtccggtaggggtgtgttcaagcaccggaaacagtcacagctacactaacagcagcctgaatgccctgcaggccctgtccgagggtcatggcgtttccctgggatcaagcctggcctcaccagatctcaaaatgggaaatctgcagaatagcccagttaatatgaatccccctccattgtctaagatgggatctctggattcaaaagattgcttcggcctctatggtgagccatcagaaggtacgaccggacaagccgagagttcatgtcaccctggcgagcagaaagaaacaaacgatcctaacctgcctcccgcagtgagttcggaacgtgcagacggccaatcaaggctgcacgactccaaggggcagacaaaactgttgcaactcctgacaaccaagagcgaccaaatggagccttcacctctcgcttctagcttgagcgatacaaacaaagattcaactgggagtctaccaggatccggttccacccacggcacctctctcaaggaaaaacacaagattctccacaggctgctgcaggatagctcctcgcctgtggacctggccaagctgacagccgaggctacgggaaaggacctgagtcaggagtcttcgagcacagcacccgggtctgaggttacaataaagcaggaaccagtgagccctaaaaagaaagaaaacgctctgctccgctacctcttggacaaggacgatacgaaggacatcggcctgccagagattactccaaaacttgaaagactcgacagcaaaaccgaccctgccagtaatactaagctcattgctatgaagacagaaaaggaagaaatgagcttcgagcctggcgaccagccaggttccgaactggacaacctggaagagatactggacgacctacaaaactcacaactgcctcagttgttccccgacactcgccccggcgctcctgccggatcagtcgataagcaggccatcatcaacgaccttatgcagttaactgccgagaacagtccggtgactccagtaggggcccagaaaactgcactgcggataagccagagtaccttcaataaccccagacctggtcaactcggccggctgcttccgaaccagaacctacccctggatataactcttcagagtcccaccggcgcgggaccattccctccaatcaggaacagctccccctacagcgtcattccccagcccgggatgatgggtaaccagggcatgattgggaatcaaggcaatctgggaaactcctcaacaggcatgattggaaacagcgcgtccagacccacaatgccaagtggagaatgggccccgcagagtagcgccgtaagggtgacatgcgccgcaactacttccgccatgaacaggcccgttcagggggggatgattcggaatccggccgcgtctattcctatgcgtccctccagtcaacccggacagcgacagactctgcagtcccaggtgatgaacattggcccatcggagctagaaatgaatatgggagggccccagtactcacaacaacaggctccccccaatcagaccgccccctggcccgaaagcatcctccctatcgatcaggcgtcctttgctagccagaacagacagcctttcggctcctctccagatgacctcttgtgtccccatccagctgcggagagcccgagcgacgagggagcgctattggaccagttgtatttggccttgaggaattttgacggcctcgaggagattgaccgggctctgggcattcctgagttagtgtcccagtctcaggctgtcgacccagagcagtttagctcccaagattccaatattatgctagaacagaaggctcccgtctttcctcagcagtatgcctcacaggcccagatggcacaaggatcctacagtcctatgcaggatccaaacttccacacaatgggccaaaggccctcctatgccacattacgcatgcagcctcgacccgggttgcgaccgaccggactggttcagaaccagcccaaccaacttcgactgcagctacagcaccggttacaggcccagcagaacaggcagcctctgatgaaccagatctctaacgtgagcaatgtgaacttgacactgcggcccggagtaccaactcaggctcccattaatgctcagatgctggcgcagaggcagcgggagatcttgaatcagcacctccgtcagcggcagatgcatcagcagcaacaggtgcagcagcggaccttgatgatgcgtggccagggtctcaacatgaccccatccatggtagcgccctccggcatgcctgctaccatgtctaatccccgcattccacaggccaatgcccaacagttcccttttcctccaaactacggcatcagtcaacagcctgacccaggctttacgggggctacgaccccacagtcccccctcatgtcgccccgcatggcacatacccagagccccatgatgcaacaaagccaggcaaaccccgcgtaccaggccccatccgatattaacggctgggcccaggggaatatgggaggcaattctatgttcagccagcagagtccgccgcactttgggcagcaagcgaatacgagcatgtattccaataacatgaacatcaacgtctccatggccactaacaccgggggaatgtcatctatgaaccagatgactggacagatcagtatgacctccgtaacctccgtccccacttcgggcctgtccagcatgggacctgaacaggtgaatgatcccgcacttcggggaggcaatctgtttcccaatcagttgccaggaatggatatgataaagcaggaaggagataccactaggaagtattgctag

SEQ ID NO: 270847 - DNA, 51 bp, Artificial Sequence
  derived and/or modified sequence
atgtccggcatgggagagaacacgtctgatccttcacgtgctgagacatag

SEQ ID NO: 270848 - DNA, 4395 bp, Artificial Sequence
  derived and/or modified sequence
atgagcggcatgggagagaacaccagtgaccccagcagagctgagaccaggaagaggaaagaatgtcctgaccagctgggccccagccccaagaggaacacagagaagaggaaccgggagcaggagaacaagtacatcgaggagctggccgagctgatctttgccaacttcaatgacatcgacaacttcaacttcaagccagacaagtgtgccatcctgaaggagaccgtgaagcagatccggcagatcaaggagcaggagaaggctgctgctgccaacattgatgaggtgcagaagagtgatgtgagcagcacaggccagggcgtcatcgacaaggatgccctgggccccatgatgctggaggccctggatggcttcttctttgtggtgaacctggagggcaatgtggtgtttgtgtctgaaaatgtgacccagtacctgcgctacaaccaggaggagctgatgaacaagtctgtgtacagcatcctgcacgtgggggaccacacagaatttgtgaagaacctgctgcccaagagcatcgtgaatggaggctcctggagcggggagccccccaggaggaacagccacaccttcaactgcaggatgctggtgaagcccctgcctgacagcgaggaggagggccatgacaaccaggaggcccaccagaagtatgagaccatgcagtgctttgctgtgtcccagcccaagagcatcaaggaggagggggaggacctgcagagctgcctgatctgtgtggcccggcgggtgcccatgaaggagaggcctgtgctgcccagcagcgagagcttcaccacccggcaggacctgcagggcaagatcaccagcctggacaccagcaccatgagagctgccatgaagccaggctgggaggacctggtgcggcgctgcatccagaagttccacgcccagcatgaaggagagagcgtgtcctatgccaagaggcaccaccacgaggtgctgcggcagggcctggccttcagccagatctaccgcttcagcctgagtgatggcaccctggtggccgcccagaccaagagcaagctgatccgcagccagaccaccaatgagccccagctggtgatcagcctgcacatgctgcaccgggagcagaatgtgtgtgtgatgaacccagacctgaccggccagaccatgggcaagcccctgaaccccatcagcagcaacagccctgcccaccaggccctgtgcagcggcaaccctggccaggacatgaccctgagcagcaacatcaacttccccatcaatggccccaaggagcagatgggcatgcccatgggccgctttggaggcagcggcggcatgaaccacgtgtctggcatgcaggccaccaccccccagggcagcaactatgccctgaagatgaacagccccagccagagcagccctggcatgaaccctggccagcccacctccatgctgagccccaggcacaggatgagccctggggtggccggcagcccccgcatcccccccagccagttctccccagctggcagcctgcacagccctgtgggcgtgtgcagcagcactggaaacagccacagctacaccaacagcagcctgaatgccctgcaggccctgtctgagggccacggcgtgtccctgggcagcagcctggccagcccagacctgaagatgggcaacctgcagaacagccctgtgaacatgaaccccccacccctgagcaagatgggcagcctggacagcaaggactgcttcggcctgtatggagagcccagcgagggcaccaccggccaggccgagagcagctgccaccctggagagcagaaggagaccaatgaccccaacctgcccccagctgtgtcctctgagcgggcagatggccagagccggctgcatgacagcaagggccagaccaagctgctgcagctgctgaccaccaagagtgaccagatggagcccagccccctggccagcagcctgagtgacaccaacaaggacagcacaggcagcctgcccggcagcggcagcacccacggcaccagcctgaaggagaagcacaagatcctgcaccggctgctgcaggacagcagcagccctgtggacctggccaagctgacagctgaggccaccgggaaggacctgagccaggagagcagcagcacagcccctggcagcgaggtgaccatcaagcaggagcctgtgagccccaagaagaaggaaaatgccctgctgcgctacctgctggacaaggatgacaccaaggacatcggcctgcctgagatcacccccaagctggagcggctggacagcaagacagatcctgccagcaacaccaagctgattgccatgaagacagagaaggaggagatgagctttgagcccggggaccagcccggcagcgagctggacaacctggaggagatcctggatgacctgcagaacagccagctgccccagctgttcccagacaccaggcctggggccccagctggctctgtggacaagcaggccatcatcaatgacctgatgcagctgacagctgagaacagccctgtgacccctgtgggcgcccagaagacagccctgcgcatcagccagagcaccttcaacaaccccaggcctggccagctgggccgcctgctgcccaaccagaacctgcccctggacatcaccctgcagagccccactggagctggccccttcccccccatccggaacagcagcccctacagcgtcatcccccagcccggcatgatgggcaaccagggcatgattggcaaccagggcaacctgggcaacagcagcacaggcatgattggcaacagcgccagccggcccaccatgcccagcggggagtgggccccccagagcagcgctgtgcgggtgacctgtgccgccaccaccagcgccatgaacagacctgtgcagggcggcatgatccggaacccagctgccagcatccccatgaggcccagcagccagcccggccagaggcagaccctgcagagccaggtgatgaacatcggccccagcgagctggagatgaacatgggcggcccccagtacagccagcagcaggccccacccaaccagacagccccctggccagagagcatcctgcccatcgaccaggccagctttgccagccagaaccggcagcccttcggcagcagcccagatgacctgctgtgcccccaccctgctgctgagagccccagtgatgaaggagccctgctggaccagctgtacctggccctgaggaactttgatggcctggaggagattgaccgggccctgggcatccctgagctggtgtcccagagccaggccgtggaccctgagcagttcagcagccaggacagcaacatcatgctggagcagaaggcccctgtgttcccccagcagtatgccagccaggcccagatggcccagggcagctacagccccatgcaggaccccaacttccacaccatgggccagaggcccagctatgccaccctgaggatgcagccccggcccggcctgcggcccaccggcctggtgcagaaccagcccaaccagctgcggctgcagctgcagcaccggctgcaggcccagcagaaccggcagcccctgatgaaccagatcagcaatgtgtccaatgtgaacctgaccctgcggcctggggtgcccacccaggcccccatcaatgcccagatgctggcccagaggcagcgggagatcctgaaccagcacctgcggcagaggcagatgcaccagcagcagcaggtgcagcagaggaccctgatgatgaggggccagggcctgaacatgacccccagcatggtggcccccagcggcatgcctgccaccatgagcaacccccgcatcccccaggccaatgcccagcagttccccttcccccccaactacggcatcagccagcagcctgaccccggcttcaccggggccaccaccccccagagccccctgatgagccccaggatggcccacacccagagccccatgatgcagcagagccaggccaacccagcctaccaggcccccagcgacatcaatggctgggcccagggcaacatgggcggcaacagcatgttcagccagcagagccccccccacttcggccagcaggccaacacctccatgtacagcaacaacatgaacatcaacgtgtccatggccaccaacacaggaggcatgagctccatgaaccagatgacaggccagatctccatgacctctgtgacctctgtgcccaccagcggcctgagctccatgggccctgagcaggtgaatgaccctgccctgcggggcggcaacctcttccccaaccagctgcccggcatggacatgatcaagcaggagggggacaccaccaggaagtactgctag

SEQ ID NO: 270849 - DNA, 51 bp, Artificial Sequence
  derived and/or modified sequence
atgagcggcatgggagagaacaccagtgaccccagcagagctgagacctag

SEQ ID NO: 270850 - DNA, 4395 bp, Artificial Sequence
  derived and/or modified sequence
atgagcggcatgggcgagaacaccagcgaccccagccgggccgagacacgaaagcgtaaggaatgcccagatcagctgggcccttccccgaaaaggaacactgagaagcgaaaccgcgagcaggagaacaagtacattgaggagctggccgagttgattttcgccaactttaatgacatagacaatttcaacttcaagccagacaagtgcgctatccttaaggagaccgtgaagcagatcaggcagatcaaggaacaggagaaggccgcagccgcaaatattgacgaggtgcaaaaatcagacgtaagcagcaccggccagggagtaatcgacaaagacgctctggggccaatgatgttagaggccctggatggtttcttcttcgtagttaatctcgaaggtaacgtcgtgtttgtgagtgaaaatgtaacccagtatctgaggtacaatcaggaagaactgatgaataaaagcgtatattccatactccacgtcggcgaccacacggagttcgttaagaatcttctacccaaaagcatcgtgaacggaggaagttggagcggggaacctcctagacggaacagccacacttttaattgtcgtatgctggtgaagccattaccagacagcgaagaggaaggccatgacaatcaggaagcccaccaaaagtatgagaccatgcaatgtttcgcagtgtctcagcccaagtctataaaagaagagggagaggacctgcagtcttgcctgatatgcgttgcacggcgggtgccgatgaaggaaaggcccgttcttcctagttccgagtctttcactacaaggcaagacctccagggtaaaatcacctcacttgatacttccacaatgagggcagcgatgaagccaggatgggaggaccttgtgcggcgctgtatacagaagttccacgcccagcatgagggagaatcagttagctacgcaaagcggcaccatcacgaagttcttcgccagggtctggcattctcccagatttacaggttctccctgtctgatggcactctggtggccgcccaaacaaaaagtaaactgatccggtcccagacaactaatgagcctcaattggttatttctttgcacatgttgcatagagaacagaatgtttgcgtcatgaatcccgatcttacaggacagaccatgggaaaaccgctaaatccaatcagttcaaattccccagcccaccaagcgctgtgttctggcaatccaggacaggacatgacccttagctccaatatcaacttccctatcaatggaccaaaggaacaaatgggaatgccgatgggaagattcggcggctccggcggcatgaaccatgtatctggaatgcaggccactactccccagggctctaattatgcactcaagatgaacagcccgagccaatcttcccccggaatgaatccaggacagccaacatcaatgctatcgcccaggcatagaatgtctccaggcgtagccggcagtccaaggattccaccctcgcagtttagcccggcagggtcactgcactctccggtaggagtgtgctcatctaccggcaatagccacagttatacaaactccagtttgaacgccctgcaggcactttcagagggccacggagtgagcctgggaagctcattggcttctcccgacttaaaaatgggcaatctccaaaattcccccgtaaacatgaaccctccaccgctatcgaaaatgggcagtttggatagtaaggattgcttcggactgtatggagaaccatcagagggaacaacaggtcaggccgagtctagctgccatcccggtgagcaaaaagagacaaatgatcccaatttacctccagctgtgagtagcgagagggccgacggtcagtctagactgcacgactccaaggggcagactaagctcctgcagctgctgacgacaaagtcagatcagatggagcccagtcctttggcaagtagtctgagcgacacaaacaaggacagcaccggtagtctgcccggatctggctccacccacggtacaagcctgaaggagaagcacaagattctgcaccgcctacttcaggacagttcttctccagtggatctcgcaaaactgaccgccgaagctactgggaaggacctgtctcaggagagttcatccaccgcccctggctcagaagtcacaattaagcaagaacccgtgagtccaaaaaagaaggagaacgcactgctccgatatctattggataaagatgacacaaaggacattggccttcctgagatcactccgaagcttgagcgcctggactcgaagacagatcctgctagcaacaccaaactaatcgctatgaagacggaaaaagaagagatgtcgttcgaacctggggatcagcctggatccgaattggataatctcgaggaaattttagacgacctccaaaactcccagctcccccaactctttccagacactaggccaggggcaccagccggaagtgtggataagcaagccatcattaatgaccttatgcagttaaccgctgaaaacagtcccgtgacacccgtgggggctcagaagactgcactacggatctcacagagcactttcaacaatccgcggcccggtcaacttggtagactcctgccgaatcagaaccttccactcgacattactctacaaagccctactggcgcaggaccttttccccctatccgcaatagctctccgtattccgtaattcctcagcctggcatgatgggcaaccagggcatgatcggaaatcagggaaatcttgggaacagcagcactgggatgatcggtaactcagcaagtaggcctacaatgcctagcggtgaatgggccccccaaagctccgccgtgagggtgacatgcgcggctactacatccgctatgaatagacccgtacagggcgggatgattcgtaatcccgccgctagtatccctatgaggcctagctcacagcccggacaacgacagactctgcagagtcaggttatgaacattggcccatcagagctcgagatgaacatgggcggaccgcagtacagccaacagcaggcgcccccaaatcagaccgcgccctggcctgagtctattctgcccattgaccaagcatcatttgcgtctcaaaacagacagccctttggttcctcgccagacgaccttctgtgccctcatcccgccgctgagagtccatctgacgagggggcgctgctggaccagctgtatttggcactgaggaacttcgatggactcgaggaaatagaccgcgccctcggcattcctgaactggtttcgcagagccaggctgtcgatcccgagcaattttctagccaagattccaacattatgctggagcagaaggccccagtcttcccgcagcagtacgccagccaagcccagatggcacagggctcatactctcccatgcaggatccgaattttcatacaatgggccaaaggccgagctacgcaacattacgtatgcagccacgcccggggctgaggcctaccggcctcgttcaaaatcagcccaatcagttgcgcctccagctgcagcacagacttcaggctcagcagaatcggcagccactcatgaaccaaattagcaatgtttccaacgttaatctcaccctcagacctggagttcctacgcaagcgccaataaatgctcagatgctagctcaaaggcaaagagaaatcctcaaccagcacctgaggcagcggcagatgcatcagcagcagcaagtgcagcagcgaactttgatgatgcggggtcagggcctcaatatgactcctagcatggtagccccttccggtatgccagctacaatgagtaatcccagaatcccgcaagcaaatgctcagcaattcccttttcctcctaactatggaattagccagcagcctgaccctgggtttacgggggcaaccaccccacagtcaccactgatgagccctaggatggcccacactcaatcccctatgatgcagcaatcacaggccaaccccgcctatcaggcgccctcggatataaatggatgggctcagggtaatatgggcggtaattctatgttctctcagcagagtcctccccactttggacagcaggccaacactagtatgtactccaataacatgaacattaatgtgagcatggctacaaacacaggcgggatgtcttccatgaaccagatgaccggccagatctctatgacaagcgtcacgtccgtgcccacttccggactgtcaagtatggggcctgaacaggtcaatgacccagcactgcggggcggcaacttgttcccaaaccagttgcccggtatggatatgataaaacaggagggagacacaaccaggaagtattgttag

SEQ ID NO: 270851 - DNA, 51 bp, Artificial Sequence
  derived and/or modified sequence
atgagcggcatgggcgagaacaccagcgaccccagccgggccgagacctag

SEQ ID NO: 270852 - DNA, 8447 bp, Artificial Sequence
  derived and/or modified sequence
agttattaacacgggaacatggcggccgcagcctcggctacagcttcggcggcgaaggtcagcgccgacggcagccggcacctgacggcgtgaccgacccgagccgatttctcttggatttggctacacacttatagatcttctgcactgtttacaggcacagttgctgatatgtgttcaagatgagtgggatgggagaaaatacctctgacccctccagggcagagacaagaaagcgcaaggaatgtcctgaccaacttggacccagccccaaaaggaacactgaaaaacgtaatcgtgaacaggaaaataaatatatagaagaacttgcagagttgatttttgcaaattttaatgatatagacaactttaacttcaaacctgacaaatgtgcaatcttaaaagaaactgtgaagcaaattcgtcagatcaaagaacaagagaaagcagcagctgccaacatagatgaagtgcagaagtcagatgtatcctctacagggcagggtgtcatcgacaaggatgcgctggggcctatgatgcttgaggcccttgatgggttcttctttgtagtgaacctggaaggcaacgttgtgtttgtgtcagagaatgtgacacagtatctaaggtataaccaagaagagctgatgaacaaaagtgtatatagcatcttgcatgttggggaccacacggaatttgtcaaaaacctgctgccaaagtctatagtaaatgggggatcttggtctggcgaacctccgaggcggaacagccataccttcaattgtcggatgctggtaaaacctttacctgattcagaagaggagggtcatgataaccaggaagctcatcagaaatatgaaactatgcagtgcttcgctgtctctcaaccaaagtccatcaaagaagaaggagaagatttgcagtcctgcttgatttgcgtggcaagaagagttcccatgaaggaaagaccagttcttccctcatcagaaagttttactactcgccaggatctccaaggcaagatcacgtctctggataccagcaccatgagagcagccatgaaaccaggctgggaggacctggtaagaaggtgtattcagaagttccatgcgcagcatgaaggagaatctgtgtcctatgctaagaggcatcatcatgaagtactgagacaaggattggcattcagtcaaatctatcgtttttccttgtctgatggcactcttgttgctgcacaaacgaagagcaaactcatccgttctcagactactaatgaacctcaacttgtaatatctttacatatgcttcacagagagcagaatgtgtgtgtgatgaatccggatctgactggacaaacgatggggaagccactgaatccaattagctctaacagccctgcccatcaggccctgtgcagtgggaacccaggtcaggacatgaccctcagtagcaatataaattttcccataaatggcccaaaggaacaaatgggcatgcccatgggcaggtttggtggttctgggggaatgaaccatgtgtcaggcatgcaagcaaccactcctcagggtagtaactatgcactcaaaatgaacagcccctcacaaagcagccctggcatgaatccaggacagcccacctccatgctttcaccaaggcatcgcatgagccctggagtggctggcagccctcgaatcccacccagtcagttttcccctgcaggaagcttgcattcccctgtgggagtttgcagcagcacaggaaatagccatagttataccaacagctccctcaatgcacttcaggccctcagcgaggggcacggggtctcattagggtcatcgttggcttcaccagacctaaaaatgggcaatttgcaaaactccccagttaatatgaatcctcccccactcagcaagatgggaagcttggactcaaaagactgttttggactatatggggagccctctgaaggtacaactggacaagcagagagcagctgccatcctggagagcaaaaggaaacaaatgaccccaacctgcccccggccgtgagcagtgagagagctgacgggcagagcagactgcatgacagcaaagggcagaccaaactcctgcagctgctgaccaccaaatctgatcagatggagccctcgcccttagccagctctttgtcggatacaaacaaagactccacaggtagcttgcctggttctgggtctacacatggaacctcgctcaaggagaagcataaaattttgcacagactcttgcaggacagcagttcccctgtggacttggccaagttaacagcagaagccacaggcaaagacctgagccaggagtccagcagcacagctcctggatcagaagtgactattaaacaagagccggtgagccccaagaagaaagagaatgcactacttcgctatttgctagataaagatgatactaaagatattggtttaccagaaataacccccaaacttgagagactggacagtaagacagatcctgccagtaacacaaaattaatagcaatgaaaactgagaaggaggagatgagctttgagcctggtgaccagcctggcagtgagctggacaacttggaggagattttggatgatttgcagaatagtcaattaccacagcttttcccagacacgaggccaggcgcccctgctggatcagttgacaagcaagccatcatcaatgacctcatgcaactcacagctgaaaacagccctgtcacacctgttggagcccagaaaacagcactgcgaatttcacagagcacttttaataacccacgaccagggcaactgggcaggttattgccaaaccagaatttaccacttgacatcacattgcaaagcccaactggtgctggacctttcccaccaatcagaaacagtagtccctactcagtgatacctcagccaggaatgatgggtaatcaagggatgataggaaaccaaggaaatttagggaacagtagcacaggaatgattggtaacagtgcttctcggcctactatgccatctggagaatgggcaccgcagagttcggctgtgagagtcacctgtgctgctaccaccagtgccatgaaccggccagtccaaggaggtatgattcggaacccagcagccagcatccccatgaggcccagcagccagcctggccaaagacagacgcttcagtctcaggtcatgaatatagggccatctgaattagagatgaacatggggggacctcagtatagccaacaacaagctcctccaaatcagactgccccatggcctgaaagcatcctgcctatagaccaggcgtcttttgccagccaaaacaggcagccatttggcagttctccagatgacttgctatgtccacatcctgcagctgagtctccgagtgatgagggagctctcctggaccagctgtatctggccttgcggaattttgatggcctggaggagattgatagagccttaggaatacccgaactggtcagccagagccaagcagtagatccagaacagttctcaagtcaggattccaacatcatgctggagcagaaggcgcccgttttcccacagcagtatgcatctcaggcacaaatggcccagggtagctattctcccatgcaagatccaaactttcacaccatgggacagcggcctagttatgccacactccgtatgcagcccagaccgggcctcaggcccacgggcctagtgcagaaccagccaaatcaactaagacttcaacttcagcatcgcctccaagcacagcagaatcgccagccacttatgaatcaaatcagcaatgtttccaatgtgaacttgactctgaggcctggagtaccaacacaggcacctattaatgcacagatgctggcccagagacagagggaaatcctgaaccagcatcttcgacagagacaaatgcatcagcaacagcaagttcagcaacgaactttgatgatgagaggacaagggttgaatatgacaccaagcatggtggctcctagtggtatgccagcaactatgagcaaccctcggattccccaggcaaatgcacagcagtttccatttcctccaaactacggaataagtcagcaacctgatccaggctttactggggctacgactccccagagcccacttatgtcaccccgaatggcacatacacagagtcccatgatgcaacagtctcaggccaacccagcctatcaggccccctccgacataaatggatgggcgcaggggaacatgggcggaaacagcatgttttcccagcagtccccaccacactttgggcagcaagcaaacaccagcatgtacagtaacaacatgaacatcaatgtgtccatggcgaccaacacaggtggcatgagcagcatgaaccagatgacaggacagatcagcatgacctcagtgacctccgtgcctacgtcagggctgtcctccatgggtcccgagcaggttaatgatcctgctctgaggggaggcaacctgttcccaaaccagctgcctggaatggatatgattaagcaggagggagacacaacacggaaatattgctgacactgctgaagccagttgcttcttcagctgaccgggctcacttgctcaaaacacttccagtctggagagctgtgtctatttgtttcaacccaactgacctgccagccggttctgctagagcagacaggcctggccctggttcccagggtggcgtccactcggctgtggcaggaggagctgcctcttctcttgacagtctgaagctcgcatccagacagtcgctcagtctgttcactgcattcaccttagtgcaacttagatctctcctgcaaaagtaaatgttgacaggcaaatttcatacccatgtcagattgaatgtatttaaatgtatgtatttaaggagaaccatgctcttgttctgttcctgttcggttccagacactggtttcttgctttgttttccctggctaacagtctagtgcaaaagattaagattttatctgggggaaagaaaagaattttttaaaaaattaaactaaagatgttttaagctaaagcctgaatttgggatggaagcaggacagacaccgtggacagcgctgtatttacagacacacccagtgcgtgaagaccaacaaagtcacagtcgtatctctagaaagctctaaagaccatgttggaaagagtctccagttactgaacagatgaaaaggagcctgtgagagggctgttaacattagcaaatattttttccttgttttttctttgttaaaaccaaactggttcacctgaatcatgaattgagaagaaataattttcatttctaaattaagtcccttttagtttgatcagacagcttgaatcagcatctcttcttccctgtcagcctgactcttcccttcccctctctcattccccatactccctattttcattccttttttaaaaaataatataagctacagaaaccaggtaagccctttatttccttaaatgttttgccagccacttaccaattgctaagtattgaatttcagaaaaaaaaaatgcatttactggcaaggagaagagcaaagttaaggcttgataccaatcgagctaaggatacctgctttggaagcatgtttattctgttccccagcaactctggcctccaaaatgggagaaaacgccagtgtgtttaaattgatagcagatatcacgacagatttaacctctgccatgtgttttttattttgttttttagcagtgctgactaagccgaagttttgtaaggtacataaaatccaatttatatgtaaacaagcaataatttaagttgagaacttatgtgttttaattgtataatttttgtgaggtatacatattgtggaattgactcaaaaatgaggtacttcagtattaaattagatatcttcatagcaatgtctcctaaaggtgttttgtaaaggatatcaatgccttgattagacctaatttgtagacttaagactttttattttctaaaccttgtgattctgcttataagtcatttatctaatctatatgatatgcagccgctgtaggaaccaattcttgatttttatatgtttatattctttcttaatgaaccttagaaagactacatgttactaagcaggccacttttatggttgtttttcttgcccactctggtaggggaaaaatcttttattaataggtgtcagtttcagacaactccaataccaagaaactgatgaccttttttgagctatttctccttaacccctaatacctttcttacctaaatttcagaatgatatctttttgatgtctaaaaagcaaagcattttataatatctcattagccaggctttttaggaacagagaagtttttccttgaaatttgattgtttgtttatttgtggcagggtgaaaaatgtacaaactacccctatttatacttatatctctctctatatgtacgcattatggaaatataggaagagatatagcccaaagatagatggtaagtagacagtctgaaaatgttgctccatactaaagaacctttctggaaatttgcatttcgctacttttttccacttgagaggggtctcaatacagggaggtggccaaggaacaacacttctcagtggccaccagttcatatatcccctcaaaaggctctacttttctccaccaaaccattgggttgcccaactgtgatggaaaaaacaagcagatgttggcccagaactccaggacctccccgtgggctgaggctcatgtggcatacaattcagtgtgaccagttttaatgttcagaaatatgtgaattagaatgacttttaacttcacacagcacaaaagagaaatggagtttaaactggatttgttttgttttgagtttcaagtcccttttcactacaacaccgtccaaaactatctacctatctcttcttttttatccatctgcccgctgtattttaatgtcaatcctaattcagacaaatccgcaacttcatgatactggtaatttataataattcgtgatcattgctgttttgaaggaaaagagatgataaattctcttacggtttcaatcaggtaatggattttgttttacatctagttaggagaagaaaagtaagtgaaggaatcctctgatcatattgatcactatagaagcaaaagccaaatcagttcccttcattatcagtatttctcatgctgtacacaataaatttgttagactgagtacttggtttttgtttaatagaacaaataatcagtgtttcacttatattactaaatgtgaaaaacataatgtgaaaagtatacatacattaacttggttgtaaaactcattttaagtgttcatgtaatgtggtaagtttaaaaagtgaagtgagctgttttactacaatgaattcgtttgactcaaagattaaaatgcccctccccctatgtgtatctcttatggcctgtaataattgaaagcaatgtttttgcagtttatataatgcaatttttaatctgtgttcaaaaatggagttcatatgggcttaacacatgaaatgggtggcacagatccacttgcagaacccaaagatacacaatcagttttgaaatgcaacttaagccattaattgttggtgtgaatttaaaattttctagtgtttgtatggtggtatgctgcctaagagcaaagcatcctctgcacaaaagaaaattactgtagtggcttcgattttaattagaattttctccctggtgtttctttatagactaaagcaaaatcttttaagtttcttactacaggtaaaagctatgtgcaagaacctcaaaatgctaaaatctagcataatgccttagatctgtttttaagtcttgtatattcctacatagctgtccgatgtattatatttgtatagtgaattgtgtacaatttttgaataagtgcatcatcacttaacctttatgttgtttgaatagtgatgatgatacatttcttcagacatttaactgtcatttttttcctttgtcatttgtgagttttatttgtacagttcctcatgaagttgcatctgagatgtgtgtatatgaaaagattatacaagggtaaaattaagcaatatattaactatggttcttcaggagaaagcttacagtgtttcaggttgtgatttattttcaaaatggagttgactctgaacatcactttgttcacctgcattgatgtttgtatttctagtgtgagcagtttatgcaaaggtagatatattcagagaaattttaaatacatttatgcaagttaatattgctttgctgatgctatttgcttatttgatgttaaataatgctattgtaaataaagaattctgttgttattgcatcatttaataaattttaatgccttcgggttttacatggctttagagattttaa

SEQ ID NO: 270853 - DNA, 4395 bp, Artificial Sequence
  derived and/or modified sequence
atgtctggcatgggggaaaacacttcagatccgagtcgggcagaaacacgcaagcggaaggagtgtcccgaccagcttggtccatcccccaaaagaaacacagagaaacgcaatagagagcaggagaataaatacattgaggagctcgccgaactgatttttgcgaatttcaacgacatcgacaattttaatttcaaacccgacaagtgcgccatcctaaaggaaaccgtgaagcaaatccgtcaaattaaggaacaggagaaagcagccgctgcaaacatcgacgaagtacagaagtcagatgtctcctccaccggccagggtgtcatagacaaggatgcactggggccaatgatgcttgaggcgctcgacggttttttcttcgtggtcaacctggaaggtaacgtagtatttgtttctgaaaacgtcacccagtacctgaggtacaaccaagaagaactgatgaacaaatcagtgtactcaatccttcacgtgggggaccacaccgagtttgtgaagaatcttctgcctaaatcaattgtgaacggcggaagttggtctggagaaccacctcggaggaactcccacaccttcaactgccggatgctggtcaagcctctccctgattctgaagaggaaggtcacgacaatcaggaagctcatcaaaagtacgagacaatgcagtgcttcgcagtttcccagccgaaatcaattaaggaggagggagaggatctgcagagttgtctcatctgtgtagccaggcgagtgcccatgaaggaacggccagtactgcccagctccgagagtttcacaactcgccaggatctccagggcaagattacaagcctggacacctctactatgagagcagccatgaagcccggatgggaggatcttgtgaggaggtgtattcagaaatttcacgcacagcacgaaggcgagagcgtgagctatgcgaagagacatcaccatgaggtgctacggcaaggattagctttcagccagatttacaggttttccttgtcagacggcaccttagtggctgcccagacaaaaagcaagctgatcaggtctcaaaccaccaacgagcctcagctcgtgatctccctgcatatgctacaccgggaacagaatgtgtgtgtaatgaatccagatctgacaggccagactatgggaaagccattaaacccaatctcatcaaattctcctgcacatcaggctctgtgctcggggaatcccggtcaggatatgactctctcctctaatatcaacttccctatcaacggccctaaggaacagatgggaatgcccatgggcaggttcggcggttccggaggaatgaatcatgtcagcggaatgcaagccactactccccaagggagcaattatgctctgaagatgaattcaccatcccagtcctctcctgggatgaacccgggtcaaccaaccagtatgttatcgccgcgacatagaatgtcaccaggagtagccggatctcccagaattccaccgtctcagttcagccccgctgggtctctgcactcacctgtgggcgtgtgttcctcaaccgggaactctcactcatacacaaactctagtttgaacgctctacaagccctgtcggagggccatggagtgagtctcgggtcttccctcgcttctccagatctgaagatggggaatctccagaactcgcccgtgaacatgaatcccccaccactctcaaagatgggaagcttggatagcaaggactgtttcgggctctatggggaacctagcgagggcacaaccggacaggccgaatcatcctgccatcctggggagcagaaagagaccaacgaccccaacctgcccccagcagtttccagtgagcgggcagatgggcagtcaaggttgcatgattcaaagggacagaccaagctgcttcagctcctcactactaaatccgaccagatggagcctagtccactcgcctccagtctctcagacaccaataaagactccaccgggtcactgccaggaagtggatctacccacggaacctctcttaaggagaaacacaaaatcctacataggctccttcaggacagcagtagccctgtagacctggctaagcttaccgctgaggcgaccgggaaggacttaagccaagagtcctcaagtaccgcaccagggtccgaagttactattaaacaggagcctgttagcccgaagaagaaggaaaacgctctgttgaggtatctccttgacaaggacgacacaaaggatatcggcttacctgagatcacgccaaaactggaacggctcgatagcaagactgacccagcatctaataccaagctcatcgctatgaagacggagaaggaagaaatgagtttcgaacccggagatcagccaggctcagaattggacaatctcgaggagattctggacgatctgcagaacagccagctacctcagctcttcccagacacaaggcccggagcccctgccggttccgtggacaagcaggcgatcataaatgacttaatgcaactgaccgctgaaaattcccctgtaacccccgtgggagcgcagaagactgctttaagaatttcacagtcaacctttaacaaccccaggcccggacaactcggacgtctcctgccaaaccagaatctgcccttagacatcacccttcagtcacctactggcgctgggcctttccctccaattcgaaactcgtccccatacagcgtgatcccacagcctggcatgatgggaaatcaggggatgattggcaatcaggggaatcttgggaacagctcaactggcatgatcgggaactccgcatcgaggccaactatgccatccggtgagtgggcaccgcagtcaagcgcagtgagggtcacttgcgccgctaccactagcgcaatgaaccgcccagtgcagggtggaatgatccgcaacccggcagcatctatacctatgagaccttccagtcagccgggacagcggcagacgctgcagtcccaggtgatgaacatcggaccctccgaattggaaatgaacatggggggacctcagtactcgcagcagcaggcccctccaaatcaaactgcgccatggccagagagtatcttaccgattgatcaggcaagttttgcatctcagaaccgtcagccctttggatcctctcctgatgacctactgtgccctcacccagcagccgaaagcccctcggatgaaggggcactgctggaccagttgtacctggctctgcgaaacttcgacgggctggaagaaattgatcgtgccctggggataccggagttggtctcacagtcccaggctgtggatccagaacagttttccagccaggatagcaatattatgctcgaacagaaagctccagtgttcccacagcagtatgcctctcaggcacaaatggctcagggatcctattctccaatgcaggatcccaacttccatacaatggggcaacgcccatcatatgctacgcttaggatgcagccgcgtcccggacttcggcctaccgggctggttcagaaccagccaaatcagttacgacttcaactgcagcaccgattgcaggcccaacagaataggcagcctcttatgaatcaaatttccaacgtgagcaatgtaaacctgaccctgcgacctggagttccaacccaagctcctataaatgcgcaaatgctggcccagaggcaacgagaaatcctcaatcagcacctgcgtcagcgtcaaatgcatcagcagcagcaagtgcagcaacgcacgttaatgatgaggggccagggactcaacatgactcctagtatggtggccccaagcggcatgccagcaacaatgtcaaacccgagaatcccacaggctaacgcccagcaatttccttttcccccaaattacggcatcagtcagcagcctgaccccggatttaccggcgcaaccacgccacaatctcctctcatgtcaccgagaatggcacacactcaatcccccatgatgcagcagtcacaagcaaacccggcttaccaagcgcctagtgatatcaatggttgggcccagggaaacatggggggaaacagcatgtttagccaacaatcaccccctcactttggacagcaggcaaatactagtatgtattctaataatatgaacatcaatgtatccatggccaccaacactggcggaatgtctagcatgaaccaaatgacaggacaaatcagcatgactagcgtaaccagtgttcccaccagtgggcttagcagcatgggccctgaacaggtgaatgatcctgccctgaggggcggaaacctattcccaaatcagctgccaggtatggatatgataaagcaggaaggtgacactacaagaaagtactgttag

SEQ ID NO: 270854 - DNA, 51 bp, Artificial Sequence
  derived and/or modified sequence
atgagtggcatgggcgaaaatacatctgatccaagtagggcggagacatag

SEQ ID NO: 270855 - DNA, 4395 bp, Artificial Sequence
  derived and/or modified sequence
atgagcggcatgggcgagaacaccagcgaccccagcagagccgagaccagaaagagaaaggagtgccccgaccagctgggccccagccccaagagaaacaccgagaagagaaacagagagcaggagaacaagtacatcgaggagctggccgagctgatcttcgccaacttcaacgacatcgacaacttcaacttcaagcccgacaagtgcgccatcctgaaggagaccgtgaagcagatcagacagatcaaggagcaggagaaggccgccgccgccaacatcgacgaggtgcagaagagcgacgtgagcagcaccggccagggcgtgatcgacaaggacgccctgggccccatgatgctggaggccctggacggcttcttcttcgtggtgaacctggagggcaacgtggtgttcgtgagcgagaacgtgacccagtacctgagatacaaccaggaggagctgatgaacaagagcgtgtacagcatcctgcacgtgggcgaccacaccgagttcgtgaagaacctgctgcccaagagcatcgtgaacggcggcagctggagcggcgagccccccagaagaaacagccacaccttcaactgcagaatgctggtgaagcccctgcccgacagcgaggaggagggccacgacaaccaggaggcccaccagaagtacgagaccatgcagtgcttcgccgtgagccagcccaagagcatcaaggaggagggcgaggacctgcagagctgcctgatctgcgtggccagaagagtgcccatgaaggagagacccgtgctgcccagcagcgagagcttcaccaccagacaggacctgcagggcaagatcaccagcctggacaccagcaccatgagagccgccatgaagcccggctgggaggacctggtgagaagatgcatccagaagttccacgcccagcacgagggcgagagcgtgagctacgccaagagacaccaccacgaggtgctgagacagggcctggccttcagccagatctacagattcagcctgagcgacggcaccctggtggccgcccagaccaagagcaagctgatcagaagccagaccaccaacgagccccagctggtgatcagcctgcacatgctgcacagagagcagaacgtgtgcgtgatgaaccccgacctgaccggccagaccatgggcaagcccctgaaccccatcagcagcaacagccccgcccaccaggccctgtgcagcggcaaccccggccaggacatgaccctgagcagcaacatcaacttccccatcaacggccccaaggagcagatgggcatgcccatgggcagattcggcggcagcggcggcatgaaccacgtgagcggcatgcaggccaccaccccccagggcagcaactacgccctgaagatgaacagccccagccagagcagccccggcatgaaccccggccagcccaccagcatgctgagccccagacacagaatgagccccggcgtggccggcagccccagaatcccccccagccagttcagccccgccggcagcctgcacagccccgtgggcgtgtgcagcagcaccggcaacagccacagctacaccaacagcagcctgaacgccctgcaggccctgagcgagggccacggcgtgagcctgggcagcagcctggccagccccgacctgaagatgggcaacctgcagaacagccccgtgaacatgaaccccccccccctgagcaagatgggcagcctggacagcaaggactgcttcggcctgtacggcgagcccagcgagggcaccaccggccaggccgagagcagctgccaccccggcgagcagaaggagaccaacgaccccaacctgccccccgccgtgagcagcgagagagccgacggccagagcagactgcacgacagcaagggccagaccaagctgctgcagctgctgaccaccaagagcgaccagatggagcccagccccctggccagcagcctgagcgacaccaacaaggacagcaccggcagcctgcccggcagcggcagcacccacggcaccagcctgaaggagaagcacaagatcctgcacagactgctgcaggacagcagcagccccgtggacctggccaagctgaccgccgaggccaccggcaaggacctgagccaggagagcagcagcaccgcccccggcagcgaggtgaccatcaagcaggagcccgtgagccccaagaagaaggagaacgccctgctgagatacctgctggacaaggacgacaccaaggacatcggcctgcccgagatcacccccaagctggagagactggacagcaagaccgaccccgccagcaacaccaagctgatcgccatgaagaccgagaaggaggagatgagcttcgagcccggcgaccagcccggcagcgagctggacaacctggaggagatcctggacgacctgcagaacagccagctgccccagctgttccccgacaccagacccggcgcccccgccggcagcgtggacaagcaggccatcatcaacgacctgatgcagctgaccgccgagaacagccccgtgacccccgtgggcgcccagaagaccgccctgagaatcagccagagcaccttcaacaaccccagacccggccagctgggcagactgctgcccaaccagaacctgcccctggacatcaccctgcagagccccaccggcgccggccccttcccccccatcagaaacagcagcccctacagcgtgatcccccagcccggcatgatgggcaaccagggcatgatcggcaaccagggcaacctgggcaacagcagcaccggcatgatcggcaacagcgccagcagacccaccatgcccagcggcgagtgggccccccagagcagcgccgtgagagtgacctgcgccgccaccaccagcgccatgaacagacccgtgcagggcggcatgatcagaaaccccgccgccagcatccccatgagacccagcagccagcccggccagagacagaccctgcagagccaggtgatgaacatcggccccagcgagctggagatgaacatgggcggcccccagtacagccagcagcaggccccccccaaccagaccgccccctggcccgagagcatcctgcccatcgaccaggccagcttcgccagccagaacagacagcccttcggcagcagccccgacgacctgctgtgcccccaccccgccgccgagagccccagcgacgagggcgccctgctggaccagctgtacctggccctgagaaacttcgacggcctggaggagatcgacagagccctgggcatccccgagctggtgagccagagccaggccgtggaccccgagcagttcagcagccaggacagcaacatcatgctggagcagaaggcccccgtgttcccccagcagtacgccagccaggcccagatggcccagggcagctacagccccatgcaggaccccaacttccacaccatgggccagagacccagctacgccaccctgagaatgcagcccagacccggcctgagacccaccggcctggtgcagaaccagcccaaccagctgagactgcagctgcagcacagactgcaggcccagcagaacagacagcccctgatgaaccagatcagcaacgtgagcaacgtgaacctgaccctgagacccggcgtgcccacccaggcccccatcaacgcccagatgctggcccagagacagagagagatcctgaaccagcacctgagacagagacagatgcaccagcagcagcaggtgcagcagagaaccctgatgatgagaggccagggcctgaacatgacccccagcatggtggcccccagcggcatgcccgccaccatgagcaaccccagaatcccccaggccaacgcccagcagttccccttcccccccaactacggcatcagccagcagcccgaccccggcttcaccggcgccaccaccccccagagccccctgatgagccccagaatggcccacacccagagccccatgatgcagcagagccaggccaaccccgcctaccaggcccccagcgacatcaacggctgggcccagggcaacatgggcggcaacagcatgttcagccagcagagccccccccacttcggccagcaggccaacaccagcatgtacagcaacaacatgaacatcaacgtgagcatggccaccaacaccggcggcatgagcagcatgaaccagatgaccggccagatcagcatgaccagcgtgaccagcgtgcccaccagcggcctgagcagcatgggccccgagcaggtgaacgaccccgccctgagaggcggcaacctgttccccaaccagctgcccggcatggacatgatcaagcaggagggcgacaccaccagaaagtactgctag

SEQ ID NO: 270856 - DNA, 51 bp, Artificial Sequence
  derived and/or modified sequence
atgagcggcatgggcgagaacaccagcgaccccagcagagccgagacctag

SEQ ID NO: 270857 - protein, 552 aa, Artificial Sequence
  derived and/or modified sequence
MQLTAENSPVTPVGAQKTALRISQSRMIGNSASRPTMPSGEWAPQSSAVRVTCAATTSAMNRPVQGGMIRNPAASIPMRPSSQPGQRQTLQSQVMNIGPSELEMNMGGPQYSQQQAPPNQTAPWPESILPIDQASFASQNRQPFGSSPDDLLCPHPAAESPSDEGALLDQLYLALRNFDGLEEIDRALGIPELVSQSQAVDPEQFSSQDSNIMLEQKAPVFPQQYASQAQMAQGSYSPMQDPNFHTMGQRPSYATLRMQPRPGLRPTGLVQNQPNQLRLQLQHRLQAQQNRQPLMNQISNVSNVNLTLRPGVPTQAPINAQMLAQRQREILNQHLRQRQMHQQQQVQQRTLMMRGQGLNMTPSMVAPSGMPATMSNPRIPQANAQQFPFPPNYGISQQPDPGFTGATTPQSPLMSPRMAHTQSPMMQQSQANPAYQAPSDINGWAQGNMGGNSMFSQQSPPHFGQQANTSMYSNNMNINVSMATNTGGMSSMNQMTGQISMTSVTSVPTSGLSSMGPEQVNDPALRGGNLFPNQLPGMDMIKQEGDTTRKYC

SEQ ID NO: 270858 - protein, 16 aa, Artificial Sequence
  derived and/or modified sequence
MSGMGENTSDPSRAET

SEQ ID NO: 270859 - DNA, 1659 bp, Artificial Sequence
  derived and/or modified sequence
atgcagctgaccgcagaaaatagtccggtgacccctgtgggcgcgcagaagaccgctttgcgcatctctcagtcacgcatgatcggcaatagcgcatcacggccaaccatgcctagcggcgaatgggcgcctcagtcttcggcagtgcgcgtgacatgtgcagccaccacgtctgctatgaacagacccgtccaggggggcatgatcagaaatcctgccgccagtatccccatgcgccctagcagccagcctggtcagcgccagacactccagtcccaggtcatgaacatcggtccatccgaactagaaatgaatatggggggacctcagtactctcagcagcaggccccacctaatcagacagccccatggccggaatctatcctccccattgatcaggcctctttcgctagccagaaccggcaaccctttggtagctctccagacgacttactgtgtccgcaccctgccgccgaatccccgagtgatgaaggcgctttgctcgaccagctttatctggctctcagaaacttcgacggcttggaagaaatcgaccgggccctgggaattcctgaattggtgtctcagtcacaggcggtggatcccgaacagttctcctctcaggacagtaacatcatgctcgagcaaaaggcaccagtatttccccaacagtacgcttcacaagcccagatggcacaaggctcatacagcccaatgcaggaccccaattttcacacgatgggacagcggcccagctacgccaccctaagaatgcagcctagacctggcctgcgacctacaggcctggtacagaatcagcccaatcagctgcgcctgcaactccagcaccgactgcaagcgcaacagaatcggcaacctctcatgaaccagatttcaaatgtaagtaatgtgaacctgacacttagaccgggcgtgcctacccaagcccccattaatgctcaaatgctggcccagcggcagagagaaattcttaatcagcatctgagacaacgccaaatgcatcaacaacagcaagtgcagcagcgcacactaatgatgagaggtcaggggctgaacatgaccccatctatggtggccccctccggcatgcccgcaaccatgagcaatccaaggattccccaagcgaatgcacagcaatttccttttccccctaattatggtatctcccaacagccggaccccggatttaccggtgctaccaccccccagtccccactaatgagtccacggatggcccatacccagagcccaatgatgcagcagagtcaggccaacccagcctaccaagctcctagtgatatcaatggttgggcccagggcaacatggggggaaactccatgttcagccaacagagcccaccgcattttggacagcaggcaaatacctccatgtatagcaataatatgaatatcaatgtgagcatggccaccaatacaggcgggatgtcgtccatgaatcagatgactggacagatatcgatgacctccgtgacatcagttccaacatcaggactaagctcgatgggcccagagcaggttaatgaccccgctctgagaggcggcaacctgtttcctaaccagctgccaggcatggacatgatcaaacaggaaggggataccacacgcaaatattgctag

SEQ ID NO: 270860 - DNA, 1659 bp, Artificial Sequence
  derived and/or modified sequence
atgcagctgacagctgagaacagccctgtgacccctgtgggcgcccagaagacagccctgcgcatcagccagagcaggatgattggcaacagcgccagccggcccaccatgcccagcggggagtgggccccccagagcagcgctgtgcgggtgacctgtgccgccaccaccagcgccatgaacagacctgtgcagggcggcatgatccggaacccagctgccagcatccccatgaggcccagcagccagcccggccagaggcagaccctgcagagccaggtgatgaacatcggccccagcgagctggagatgaacatgggcggcccccagtacagccagcagcaggccccacccaaccagacagccccctggccagagagcatcctgcccatcgaccaggccagctttgccagccagaaccggcagcccttcggcagcagcccagatgacctgctgtgcccccaccctgctgctgagagccccagtgatgaaggagccctgctggaccagctgtacctggccctgaggaactttgatggcctggaggagattgaccgggccctgggcatccctgagctggtgtcccagagccaggccgtggaccctgagcagttcagcagccaggacagcaacatcatgctggagcagaaggcccctgtgttcccccagcagtatgccagccaggcccagatggcccagggcagctacagccccatgcaggaccccaacttccacaccatgggccagaggcccagctatgccaccctgaggatgcagccccggcccggcctgcggcccaccggcctggtgcagaaccagcccaaccagctgcggctgcagctgcagcaccggctgcaggcccagcagaaccggcagcccctgatgaaccagatcagcaatgtgtccaatgtgaacctgaccctgcggcctggggtgcccacccaggcccccatcaatgcccagatgctggcccagaggcagcgggagatcctgaaccagcacctgcggcagaggcagatgcaccagcagcagcaggtgcagcagaggaccctgatgatgaggggccagggcctgaacatgacccccagcatggtggcccccagcggcatgcctgccaccatgagcaacccccgcatcccccaggccaatgcccagcagttccccttcccccccaactacggcatcagccagcagcctgaccccggcttcaccggggccaccaccccccagagccccctgatgagccccaggatggcccacacccagagccccatgatgcagcagagccaggccaacccagcctaccaggcccccagcgacatcaatggctgggcccagggcaacatgggcggcaacagcatgttcagccagcagagccccccccacttcggccagcaggccaacacctccatgtacagcaacaacatgaacatcaacgtgtccatggccaccaacacaggaggcatgagctccatgaaccagatgacaggccagatctccatgacctctgtgacctctgtgcccaccagcggcctgagctccatgggccctgagcaggtgaatgaccctgccctgcggggcggcaacctcttccccaaccagctgcccggcatggacatgatcaagcaggagggggacaccaccaggaagtactgctag

SEQ ID NO: 270861 - DNA, 1659 bp, Artificial Sequence
  derived and/or modified sequence
atgcagctgaccgccgagaacagccccgtgacccccgtgggcgcccagaagacagcattacgcattagtcaaagccggatgattggaaattccgcaagtagacctactatgccgtctggggaatgggccccgcaaagttctgctgtccgcgtcacatgtgccgctaccacttctgccatgaatcgaccagtccaggggggcatgattcgaaaccctgccgcgagcattccaatgcgacccagttcccaaccaggtcaacgtcagacactgcagtctcaggtcatgaacatcgggccatccgagttagaaatgaatatgggcggtccccagtactctcagcagcaggccccccccaatcagactgccccttggcctgagagcatcctgcccatagaccaggcttcatttgcctcccagaacaggcagccatttgggtcttctcccgacgacctgctctgccctcacccggcggctgaatccccaagtgacgagggggcactcttggaccagctatatctggctctgcgcaatttcgacggcctcgaagaaattgatcgagctctgggcattccagaactggtgagtcagtctcaggccgtggatccagagcagttctcaagccaggatagtaatattatgctcgaacagaaggcccctgtcttcccccaacagtacgcgtcccaagcccagatggcacaagggtcatactcacctatgcaagacccaaatttccataccatggggcagagaccatcgtatgcaactctgaggatgcaacccaggccaggtctgcggccgacaggcctcgtgcagaatcagccaaaccagttgaggctccaactgcaacaccgtttgcaggcccaacagaataggcagccccttatgaaccaaataagtaatgtgtccaatgttaacctgacattgagaccaggcgtgccaacacaagccccaatcaatgcacagatgctcgcgcagcgccagcgcgaaattctcaaccagcatctcagacagcggcagatgcaccagcagcagcaggtgcagcagagaacgctgatgatgcgcggccaggggctcaatatgaccccgagcatggtggcaccctcaggaatgcccgctacaatgagtaacccacgaattcctcaagccaacgctcagcagtttccctttccaccaaattatggcatctcccagcagccggatcctggcttcactggcgccaccactccccaatccccccttatgtctccccggatggctcatactcaatcccctatgatgcagcagtcccaggccaatcctgcatatcaggccccctctgatattaatggctgggcccaagggaatatgggcgggaattctatgttctctcagcagtctccaccacactttggccagcaggcaaacacaagcatgtattccaataatatgaacattaatgtttctatggccacaaataccggaggaatgagctcaatgaaccagatgaccggccaaatctcgatgacgtccgtcacttccgtgccgacatcaggcctctcaagcatggggccggagcaagtgaatgatccagcactgcgcggcggcaatctcttcccaaatcagctcccagggatggatatgattaagcaggaaggcgacaccactcggaaatattgctag

SEQ ID NO: 270862 - DNA, 1760 bp, Artificial Sequence
  derived and/or modified sequence
ctggatcagttgacaagcaagccatcatcaatgacctcatgcaactcacagctgaaaacagccctgtcacacctgttggagcccagaaaacagcactgcgaatttcacagagcagaatgattggtaacagtgcttctcggcctactatgccatctggagaatgggcaccgcagagttcggctgtgagagtcacctgtgctgctaccaccagtgccatgaaccggccagtccaaggaggtatgattcggaacccagcagccagcatccccatgaggcccagcagccagcctggccaaagacagacgcttcagtctcaggtcatgaatatagggccatctgaattagagatgaacatggggggacctcagtatagccaacaacaagctcctccaaatcagactgccccatggcctgaaagcatcctgcctatagaccaggcgtcttttgccagccaaaacaggcagccatttggcagttctccagatgacttgctatgtccacatcctgcagctgagtctccgagtgatgagggagctctcctggaccagctgtatctggccttgcggaattttgatggcctggaggagattgatagagccttaggaatacccgaactggtcagccagagccaagcagtagatccagaacagttctcaagtcaggattccaacatcatgctggagcagaaggcgcccgttttcccacagcagtatgcatctcaggcacaaatggcccagggtagctattctcccatgcaagatccaaactttcacaccatgggacagcggcctagttatgccacactccgtatgcagcccagaccgggcctcaggcccacgggcctagtgcagaaccagccaaatcaactaagacttcaacttcagcatcgcctccaagcacagcagaatcgccagccacttatgaatcaaatcagcaatgtttccaatgtgaacttgactctgaggcctggagtaccaacacaggcacctattaatgcacagatgctggcccagagacagagggaaatcctgaaccagcatcttcgacagagacaaatgcatcagcaacagcaagttcagcaacgaactttgatgatgagaggacaagggttgaatatgacaccaagcatggtggctcctagtggtatgccagcaactatgagcaaccctcggattccccaggcaaatgcacagcagtttccatttcctccaaactacggaataagtcagcaacctgatccaggctttactggggctacgactccccagagcccacttatgtcaccccgaatggcacatacacagagtcccatgatgcaacagtctcaggccaacccagcctatcaggccccctccgacataaatggatgggcgcaggggaacatgggcggaaacagcatgttttcccagcagtccccaccacactttgggcagcaagcaaacaccagcatgtacagtaacaacatgaacatcaatgtgtccatggcgaccaacacaggtggcatgagcagcatgaaccagatgacaggacagatcagcatgacctcagtgacctccgtgcctacgtcagggctgtcctccatgggtcccgagcaggttaatgatcctgctctgaggggaggcaacctgttcccaaaccagctgcctggaatggatatgattaagcaggagggagacacaacacggaaatattgctgacactgctgaagccagttgcttcttcagctgaccgggctcacttgctcaaaacacttccagtct

SEQ ID NO: 270863 - DNA, 1659 bp, Artificial Sequence
  derived and/or modified sequence
atgcagctcacagctgagaacagccctgttacccctgtgggtgcccagaagaccgccttgaggatttcccagtcaaggatgatcggcaattctgcctcccgaccaacaatgcccagcggcgagtgggcccctcaaagctcagcggttagagtgacctgtgcagcaaccacttccgcaatgaaccgcccagtgcagggtggaatgattagaaatcccgcagcctcaatcccaatgcgaccttcaagccagcccggacagaggcaaaccctccaatcacaagtaatgaatattggtccttccgagttggaaatgaatatgggcggtccccaatatagtcagcagcaggcccctcccaatcaaacggcaccctggcccgagtctatcctcccaatcgaccaggcctccttcgcaagtcaaaaccggcagcccttcggaagctcgcctgacgaccttctttgtccccacccagccgctgaatcaccctcagacgaaggggcactcctggatcaactgtatctggccctgcgcaatttcgatgggttggaggagatcgatagagcccttgggattcccgaattggttagtcagagccaagctgtggatcctgaacagttttcttctcaggatagtaatattatgctggaacagaaggccccagtttttcctcagcaatatgcctcacaagcgcagatggcgcaagggtcctactcgcctatgcaagatccaaattttcataccatgggccagagaccaagctatgccactctgcggatgcaacctcggccaggactccgtcccaccggccttgttcagaaccaaccaaatcagctgaggctccagctgcaacacaggcttcaggcacagcagaaccggcagccccttatgaaccagattagtaacgtaagcaacgtgaacttgaccctgcgaccaggcgtccccacgcaggcacccatcaacgctcaaatgttggcccagcgccaacgtgaaatcctaaaccagcacttgaggcagcgccaaatgcaccagcagcagcaggttcagcagcgcacactgatgatgcggggtcaaggcctgaatatgacgccttccatggtcgcgcctagtggtatgccagcgactatgtctaaccccaggatccctcaggccaatgctcaacagttcccttttccccctaattacgggatttctcagcagccagaccccggatttactggggctacaacacctcagagcccactgatgtcccctcggatggcccatacccagagccctatgatgcagcagtcccaggcgaatcccgcttatcaagctccatccgacataaatgggtgggcacagggaaacatgggtggaaactcaatgttcagccagcagtctcctcctcactttggccagcaggccaatacttccatgtacagtaataacatgaatataaatgtaagtatggctactaatacaggaggtatgagttccatgaatcagatgacggggcagatctccatgactagtgtgacatccgttccaaccagcgggctgtcgtccatggggccagaacaggttaatgaccccgctcttagaggcggtaacctgtttccaaatcagctgcccggaatggacatgattaagcaggagggcgacaccacaaggaagtattgttag

SEQ ID NO: 270864 - DNA, 1659 bp, Artificial Sequence
  derived and/or modified sequence
atgcagctgaccgccgagaacagccccgtgacccccgtgggcgcccagaagaccgccctgagaatcagccagagcagaatgatcggcaacagcgccagcagacccaccatgcccagcggcgagtgggccccccagagcagcgccgtgagagtgacctgcgccgccaccaccagcgccatgaacagacccgtgcagggcggcatgatcagaaaccccgccgccagcatccccatgagacccagcagccagcccggccagagacagaccctgcagagccaggtgatgaacatcggccccagcgagctggagatgaacatgggcggcccccagtacagccagcagcaggccccccccaaccagaccgccccctggcccgagagcatcctgcccatcgaccaggccagcttcgccagccagaacagacagcccttcggcagcagccccgacgacctgctgtgcccccaccccgccgccgagagccccagcgacgagggcgccctgctggaccagctgtacctggccctgagaaacttcgacggcctggaggagatcgacagagccctgggcatccccgagctggtgagccagagccaggccgtggaccccgagcagttcagcagccaggacagcaacatcatgctggagcagaaggcccccgtgttcccccagcagtacgccagccaggcccagatggcccagggcagctacagccccatgcaggaccccaacttccacaccatgggccagagacccagctacgccaccctgagaatgcagcccagacccggcctgagacccaccggcctggtgcagaaccagcccaaccagctgagactgcagctgcagcacagactgcaggcccagcagaacagacagcccctgatgaaccagatcagcaacgtgagcaacgtgaacctgaccctgagacccggcgtgcccacccaggcccccatcaacgcccagatgctggcccagagacagagagagatcctgaaccagcacctgagacagagacagatgcaccagcagcagcaggtgcagcagagaaccctgatgatgagaggccagggcctgaacatgacccccagcatggtggcccccagcggcatgcccgccaccatgagcaaccccagaatcccccaggccaacgcccagcagttccccttcccccccaactacggcatcagccagcagcccgaccccggcttcaccggcgccaccaccccccagagccccctgatgagccccagaatggcccacacccagagccccatgatgcagcagagccaggccaaccccgcctaccaggcccccagcgacatcaacggctgggcccagggcaacatgggcggcaacagcatgttcagccagcagagccccccccacttcggccagcaggccaacaccagcatgtacagcaacaacatgaacatcaacgtgagcatggccaccaacaccggcggcatgagcagcatgaaccagatgaccggccagatcagcatgaccagcgtgaccagcgtgcccaccagcggcctgagcagcatgggccccgagcaggtgaacgaccccgccctgagaggcggcaacctgttccccaaccagctgcccggcatggacatgatcaagcaggagggcgacaccaccagaaagtactgctag

SEQ ID NO: 270865 - DNA, 2472 bp, Artificial Sequence
  derived and/or modified sequence
atgcccggccacctgcccctgagagacgtggaggccagaatccccccccccagaggcagctgcagcagatgccagcccagactggagtggacctgcagagccctgctgagaagaacctgctgcttccccgccctgcccaagtgcatcctgcagctgagcctgctgaccctgatgctggagggcacccccagaagcggcgtgagaggcacccccgtgagacagagacccgacctgggcagcgcccagaagggcctgcaggtggacctgcagagcgacggcgccgccgccgaggacatcgtggccagcgagcagagcctgggccagaagctggtgatctggggcaccgacgtgaacgtggccgcctgcaaggagaacttccagagattcctgcagagattcatcgaccccctggccaaggaggaggagaacgtgggcatcgacatcaccgagcccctgtacatgcagagactgggcgagatcaacgtgatcggcgagcccttcctgaacgtgaactgcgagcacatcaagagcttcgacaagaacctgtacagacagctgatcagctacccccaggaggtgatccccaccttcgacatggccgtgaacgagatcttcttcgacagataccccgacagcatcctggagcaccagatccaggtgagacccttcaacgccctgaagaccaagaacatgagaaacctgaaccccgaggacatcgaccagctgatcaccatcagcggcatggtgatcagaaccagccagctgatccccgagatgcaggaggccttcttccagtgccaggtgtgcgcccacaccaccagagtggagatggacagaggcagaatcgccgagcccagcgtgtgcggcagatgccacaccacccacagcatggccctgatccacaacagaagcctgttcagcgacaagcagatgatcaagctgcaggagagccccgaggacatgcccgccggccagaccccccacaccgtgatcctgttcgcccacaacgacctggtggacaaggtgcagcccggcgacagagtgaacgtgaccggcatctacagagccgtgcccatcagagtgaaccccagagtgagcaacgtgaagagcgtgtacaagacccacatcgacgtgatccactacagaaagaccgacgccaagagactgcacggcctggacgaggaggccgagcagaagctgttcagcgagaagagagtggagctgctgaaggagctgagcagaaagcccgacatctacgagagactggccagcgccctggcccccagcatctacgagcacgaggacatcaagaagggcatcctgctgcagctgttcggcggcaccagaaaggacttcagccacaccggcagaggcaagttcagagccgagatcaacatcctgctgtgcggcgaccccggcaccagcaagagccagctgctgcagtacgtgtacaacctggtgcccagaggccagtacaccagcggcaagggcagcagcgccgtgggcctgaccgcctacgtgatgaaggaccccgagaccagacagctggtgctgcagaccggcgccctggtgctgagcgacaacggcatctgctgcatcgacgagttcgacaagatgaacgagagcaccagaagcgtgctgcacgaggtgatggagcagcagaccctgagcatcgccaaggccggcatcatctgccagctgaacgccagaaccagcgtgctggccgccgccaaccccatcgagagccagtggaaccccaagaagaccaccatcgagaacatccagctgccccacaccctgctgagcagattcgacctgatcttcctgctgctggacccccaggacgaggcctacgacagaagactggcccaccacctggtggccctgtactaccagagcgaggagcaggccgaggaggagctgctggacatggccgtgctgaaggactacatcgcctacgcccacagcaccatcatgcccagactgagcgaggaggccagccaggccctgatcgaggcctacgtggacatgagaaagatcggcagcagcagaggcatggtgagcgcctaccccagacagctggagagcctgatcagactggccgaggcccacgccaaggtgagactgagcaacaaggtggaggccatcgacgtggaggaggccaagagactgcacagagaggccctgaagcagagcgccaccgaccccagaaccggcatcgtggacatcagcatcctgaccaccggcatgagcgccaccagcagaaagagaaaggaggagctggccgaggccctgaagaagctgatcctgagcaagggcaagacccccgccctgaagtaccagcagctgttcgaggacatcagaggccagagcgacatcgccatcaccaaggacatgttcgaggaggccctgagagccctggccgacgacgacttcctgaccgtgaccggcaagaccgtgagactgctgtag

SEQ ID NO: 270866 - DNA, 2472 bp, Artificial Sequence
  derived and/or modified sequence
atgcctggccacctgcctctgcgcgatgtcgaggcacgtattccccccccacgtgggagttgttcgaggtgccagcccagactggaatggacctgtagggccctgttaaggagaacatgttgcttccccgcactcccgaagtgcatactgcagttatctctcctgaccctcatgctagaaggtacgcctcgatctggcgtaagggggacccctgtaagacagcgtcctgacctgggcagcgcccagaagggtctgcaagtggacctccagtctgacggagccgcagcagaagacatcgtggcttcggaacagtctctgggacagaagttagtcatatggggtaccgatgtcaacgtcgcggcttgtaaagaaaactttcaacgcttcctccagcggtttatcgatcccctggctaaagaggaggaaaacgtgggcatcgatatcacagaaccactgtacatgcagaggctaggcgagattaacgttattggcgaacctttcctgaatgtgaactgtgagcacatcaagagtttcgacaagaacctttatcggcaattgatctcatacccccaggaggtgatccctactttcgatatggccgtcaacgaaatcttcttcgatcgctacccagacagtatcttggagcaccaaatccaggtgcgccctttcaatgcattgaaaacaaagaacatgagaaatctcaaccctgaagacattgaccagctgatcactatatccggcatggttatccgaacttcgcaacttatcccggagatgcaggaggcgttctttcagtgccaagtatgcgcgcacactaccagagtggaaatggatcgaggacggattgcagaaccatcagtttgcgggaggtgccacaccacccactcaatggccctgattcataaccgatcactattcagcgacaagcaaatgattaaattgcaagagtctcccgaagacatgccagctggccagactccacataccgtgatcttgttcgcccataacgacctagtggataaagttcagccaggcgaccgcgtcaacgtcactggcatttacagagctgtgcctattagggtgaacccgagagtatccaacgtgaagtctgtgtacaagacgcacattgacgttatacattatagaaagacagacgccaaacggctgcatggcctcgatgaggaagccgagcaaaagctgtttagtgaaaaacgtgttgagctcttaaaagagctcagtcgcaagccagacatctatgagagattagcgtccgcactggctccctccatttacgagcatgaggatattaaaaagggcatcctgttgcaactgttcggtgggacacgcaaggatttctcccacactgggcgaggtaaattcagagcagagattaacattctgctttgtggagacccaggaacgtccaagtcacagctgctgcagtatgtttacaacctcgtgccacgtggtcaatatacttccggtaaaggtagtagtgcagtgggcctaactgcctatgtcatgaaagaccccgagacgcgccagctcgtgctacagactggggcccttgtcctctcagacaatggcatatgttgcatagatgaattcgacaaaatgaacgaatctactcgatccgtgctccacgaagttatggagcagcaaacattaagcattgccaaagctggaattatttgtcagctcaatgctcggacatccgtcctggctgccgctaatccgatcgagtcgcagtggaaccccaagaaaacgaccattgaaaatatccagttgccacacacattgctgtcgagattcgacctgatcttcctgctccttgatccccaggatgaagcatatgacagaaggctggcccaccaccttgtggctctgtattaccagagcgaagagcaggcagaggaggaactcttggacatggctgtcctgaaggactacattgcctacgcacacagcactattatgcctaggctgagcgaggaggcctcccaggccctcattgaagcctacgtcgacatgcgtaagattgggtcctcacgcggcatggtttcagcgtatcctcgtcagctcgaatctctgattcggctggcagaggctcacgcgaaggtgagactctcgaacaaagttgaggcgattgatgtcgaggaggcgaagcgccttcacagggaagccctgaaacaatccgctaccgacccaagaactggcatagtggatatatccatcctaaccacaggcatgtctgcaacttccaggaagcggaaagaagagctggccgaggccctcaagaaactgatcttgtccaagggcaaaactcccgcactgaagtaccaacagttattcgaggatattcgtggccaatctgacatcgccattaccaaggatatgttcgaggaggcacttcgggctcttgcagatgacgacttcctgactgttaccgggaaaacagttcgtttactttag

SEQ ID NO: 270867 - DNA, 2472 bp, Artificial Sequence
  derived and/or modified sequence
atgcctggccacctgcccctgagagatgtggaggcccgcatccccccaccccggggcagctgcagccgctgccagccccggctggagtggacctgccgggccctgctgcggaggacctgctgcttccctgccctgcccaagtgcatcctgcagctgagcctgctgaccctgatgctggagggcacccccaggtctggagtgcggggcacccctgtgcggcagaggccagacctgggcagcgcccagaagggcctgcaggtggacctgcagagtgatggagctgctgctgaagatattgtggccagcgagcagagcctgggccagaagctggtgatctggggcacagatgtgaatgtggccgcctgcaaggagaacttccagcgcttcctgcagcgcttcatcgaccccctggccaaggaggaggagaatgtgggcatcgacatcacagagcccctgtacatgcagaggctgggggagatcaacgtgattggagagcccttcctgaatgtgaactgtgagcacatcaagagctttgacaagaacctgtaccggcagctgatctcctacccccaggaggtgatccccacctttgacatggctgtgaatgagatcttctttgaccgctacccagacagcatcctggagcaccagatccaggtgcggcccttcaatgccctgaagaccaagaacatgaggaacctgaacccagaagatattgaccagctgatcaccatcagcggcatggtgatccgcaccagccagctgatccctgagatgcaggaggccttcttccagtgccaggtgtgtgcccacaccaccagggtggagatggaccggggcagaattgctgagcccagcgtgtgtggccgctgccacaccacccacagcatggccctgatccacaacagaagcctcttcagtgacaagcagatgatcaagctgcaggagagccctgaggacatgcctgctggccagaccccccacacagtcatcctgtttgcccacaatgacctggtggacaaggtgcagcccggggacagagtgaatgtgacaggcatctacagagctgtgcccatccgggtgaacccccgggtgtccaatgtgaagtctgtgtacaagacccacattgatgtgatccactacaggaagacagatgccaagaggctgcacggcctggatgaggaggccgagcagaagctgttcagcgagaagagggtggagctgctgaaggagctgagcaggaagccagacatctatgagcggctggccagcgccctggcccccagcatctatgaacatgaggacatcaagaagggcatcctgctgcagctgtttggaggcaccaggaaggacttcagccacacaggccggggcaagttccgggcagagatcaacatcctgctgtgtggggaccccggcaccagcaagagccagctgctgcagtatgtgtacaacctggtgccccggggccagtacaccagcggcaagggcagcagcgctgtgggcctgacagcctacgtgatgaaggaccctgagacccggcagctggtgctgcagacaggagccctggtgctgagtgacaatggcatctgctgcattgatgaatttgacaagatgaatgaaagcaccaggtctgtgctgcacgaggtgatggagcagcagaccctgagcatcgccaaggccggcatcatctgccagctgaatgcccggacctctgtgctggccgccgccaaccccatcgagagccagtggaaccccaagaagaccaccatcgagaacatccagctgccccacaccctgctgagcagatttgacctgatcttcctgctgctggacccccaggatgaggcctatgaccggcggctggcccaccacctggtggccctgtactaccagagcgaggagcaggccgaggaggagctgctggacatggctgtgctgaaggactacatcgcctatgcccacagcaccatcatgccccggctgtctgaggaggccagccaggccctgattgaggcctacgtggacatgaggaagattggcagcagccggggcatggtgtctgcctacccccggcagctggagagcctcatccggctggccgaggcccacgccaaggtgcggctgagcaacaaggtggaggccattgatgtggaggaggccaagaggctgcaccgggaggccctgaagcagagcgccacagaccccaggacaggcatcgtggacatcagcatcctgaccaccggcatgtctgccaccagcaggaagaggaaggaggagctggccgaggccctgaagaagctgatcctgagcaagggcaagaccccagccctgaagtaccagcagctgtttgaggacatccggggccagagcgacatcgccatcaccaaggacatgtttgaggaggccctgcgggccctggctgatgatgacttcctgactgtgacaggcaagacagtgcggctgctgtag

SEQ ID NO: 270868 - DNA, 3111 bp, Artificial Sequence
  derived and/or modified sequence
actcgccaggtggactcggagtccgcgagcgtcgtcggcaagcggccgcctttccacggtactccgagcactatgtcgtccccggcgtcgaccccgagccgccgcggcagccggcgtggaagggccacccccgcccagacgcctcggagtgaggatgccaggtcatctccctctcagagacgtagaggcgaggattccacctccacgggggagttgcagccgatgccaacctcgcctggagtggacctgcagagccctgctgcgcaggacgtgctgttttccagccctccccaaatgcattcttcagctatccctcttgactttgatgttagagggaaccccaagaagtggtgttaggggcacacctgtgagacagaggcctgacctgggctctgcacagaagggcctgcaagtggatctgcagtctgacggggcagcagcagaagatatagtggcaagtgagcagtctctaggccaaaaacttgtgatctggggaacagatgtaaatgtggcagcatgcaaagaaaactttcagagatttcttcagcgttttattgaccctctggctaaagaagaagaaaatgttggcatagatattactgaacctctatacatgcaacgacttggggagattaatgttattggtgagccatttttaaatgtgaactgtgaacacatcaaatcatttgacaaaaatttgtacagacaactcatctcttacccacaggaagttattccaacttttgacatggctgtcaatgaaatcttctttgaccgttaccctgactcaatcttagaacatcagattcaagtaagaccattcaacgcattgaagactaagaatatgagaaacctgaatccagaagacattgaccagctcatcaccatcagcggcatggtgatcaggacatcccagctgattcccgagatgcaggaggccttcttccagtgccaagtgtgtgcccacacgacccgggtggagatggaccgcggccgcattgcagagcccagtgtgtgcgggcgctgccacaccacccacagcatggcactcatccacaaccgctccctcttctctgacaagcagatgatcaagcttcaggagtctccggaagacatgcctgcagggcagacaccacacacagttatcctgtttgctcacaatgatctcgttgacaaggtccagcctggggacagagtgaatgttacaggcatctatcgagctgtgcctattcgagtcaatccaagagtgagtaatgtgaagtctgtctacaaaacccacattgatgtcattcattatcggaaaacggatgcaaaacgtctgcatggccttgatgaagaagcagaacagaaacttttttcagagaaacgtgtggaattgcttaaggaactttccaggaaaccagacatttatgagaggcttgcttcagccttggctccaagcatttatgaacatgaagatataaagaagggaattttgcttcagctctttggcgggacaaggaaggattttagtcacactggaaggggcaaatttcgggctgagatcaacatcttgctgtgtggcgaccctggtaccagcaagtcccagctgctgcagtacgtgtacaacctcgtccccaggggccagtacacgtctgggaagggctccagtgcagttggcctcactgcgtacgtaatgaaagaccctgagacaaggcagctggtcctgcagacaggtgctcttgtcctgagtgacaacggcatctgctgtatcgatgagttcgacaagatgaatgaaagtacaagatcggtattgcatgaagtcatggaacagcagactctgtccattgcaaaggctgggatcatctgtcagctcaatgcgcgcacctctgtcctggcagcagcaaatcccattgagtctcagtggaatcctaaaaaaacaaccattgaaaacatccagctgcctcatactttattatcaaggtttgatttgatcttcctcttgctggaccctcaggacgaagcctatgacaggcgtctggctcaccacctggtcgcactgtactaccagagcgaggagcaggcagaggaggagctcctggacatggcggtgctaaaggactacattgcctacgcgcacagcaccatcatgccgcggctaagtgaggaagccagccaggctctcatcgaggcttatgtagacatgaggaagattggcagtagccggggaatggtttctgcataccctcgacagctagagtcattaatccgcttagcagaagcccatgctaaagtaagattgtctaacaaagttgaagccattgatgtggaagaggccaaacgcctccatcgggaagctctgaagcagtctgcaactgatccccggactggcatcgtggacatatctattcttactacggggatgagtgccacctctcgtaaacggaaagaagaattagctgaagcattgaaaaagcttattttatctaagggcaaaacaccagctctaaaataccagcaactttttgaagatattcggggacaatctgacatagcaattactaaagatatgtttgaagaagcactgcgtgccctggcagatgatgatttcctgacagtgactgggaagaccgtgcgcttgctctgaagccttgtgagcaaggaaggctccctgcatgtcctgcttgctgcacgccacatgggtgtggtctgcatctcagttggccgccatcagtgtaaatagagcttaaagtcatggtttggctgcataaaaattttctaacttgggttcaatatttgtagtgaagtatctgttttcatttttttcacgttataaataaaaatactatgctggccgggcgcggtggctcacacctgtaatcccagcactttgggaggccaatgtgggtggatcatgaggtcaggagttcaagaccagcctagccaagatggtgaaaccccgtctctagtaaagataacaaaaaattagctgggcttgatggcatgcgcctgtaatcccagctactcgggaggttgaggcaggagaatcgcttaaacccaggcggcagaggttgcagtgagccaagatcgcgccactgcactccagcctcagcaatagagtgagactgtctc

SEQ ID NO: 270869 - DNA, 2472 bp, Artificial Sequence
  derived and/or modified sequence
atgcccggccacctgcccctgcgggacgtggaggcccggatccccccacctaggggcagttgtagccgatgtcagccccgattggagtggacttgtcgagcgctacttagaagaacctgttgtttccccgccctacccaaatgcattttgcagctgtctttgcttacactgatgctcgagggcacccctcgcagcggcgtccgtggtacccctgtgaggcaaaggcccgatttgggctccgcacagaaaggcttacaggtggacttacaaagtgatggggccgccgcagaagacattgttgctagtgagcagagtctagggcagaagctcgtaatttgggggaccgatgtaaatgtggctgcctgcaaagaaaatttccagcgctttctgcagaggtttatcgacccactggccaaggaggaggaaaatgttggaattgacattacagagcctctttatatgcagagactcggcgaaatcaacgtgattggagaaccgttcctaaacgttaactgtgagcacatcaagtcctttgacaaaaacctgtataggcagctgataagttacccccaagaggtgattcctacgttcgacatggctgtgaacgagatcttctttgatcgctacccagactctattctggagcatcagatccaagtccggccctttaatgccctgaaaacgaagaatatgcggaacctgaatcctgaggatatcgaccagctgatcacgatctcaggaatggtcattcggaccagccaactgataccagagatgcaagaagccttttttcaatgccaagtgtgtgcacataccaccagagtggagatggaccggggtaggatcgcggaacccagcgtgtgtgggcggtgccacacgacacactctatggctctgatacacaatcgaagccttttctccgataaacagatgatcaagcttcaggagtctcctgaggatatgcccgctggccagaccccacacaccgtcatcttatttgctcataatgatctggtagataaagtccagcccggggatcgagtgaacgtgactggtatctatcgtgccgtgcctatccgcgttaatcccagagtgtcaaacgtgaagagcgtatacaagactcatatagatgtcatacactacagaaagaccgacgccaaacgcctgcatggtctcgacgaggaagcagagcagaaactgttcagcgaaaaaagggtcgaactgttgaaagagctgtctcgcaaaccagatatatatgagaggctcgcgtctgccttggccccatctatttacgagcacgaagacattaagaaaggaatcttgctacagctgtttgggggaactagaaaagatttcagccatacaggacgtggaaaattcagagcggagattaacatactgctgtgcggagatcctggtactagtaagagccagctcctccagtacgtctataacctggtgcccagggggcaatacacatcggggaaaggctcatccgccgtcggtttaacagcctacgtgatgaaggatccagagacccgacagcttgtactccagacaggggccttagtgctctctgacaatgggatctgttgcattgacgagttcgacaagatgaacgaaagtacaagatccgtcctgcatgaggtgatggaacaacagactctaagtattgccaaggccggcattatttgccagctcaacgctcgcacgagtgtcttggccgccgcaaaccctatagaatctcagtggaatccgaagaaaaccaccattgagaacattcagctcccccataccctgttgtctcgatttgacctcatattccttctcctggatcctcaagacgaagcgtacgatagaaggttggcccatcacttggtggccctgtattatcagagcgaggagcaggccgaagaagaattactcgatatggcggttttaaaagattacatcgcatacgcccacagtacaattatgcctagactgagcgaggaggcctcgcaggctttgatcgaagcttatgtggacatgaggaagatcggcagctcacgggggatggtctccgcctatccccggcaactcgagtcattgatacgtctggctgaagctcatgccaaggttagactgagcaacaaagttgaagccatcgatgttgaagaagccaaacgcctccatcgagaggccctcaagcaaagtgcaactgatccacgaacaggtatcgtggatatcagcatcctcacgaccggcatgtctgcaacctctcgcaaacgtaaagaggagctagctgaagcacttaagaagttaatcttgtcaaagggaaaaaccccagccctcaagtatcagcagctgtttgaagacatcaggggccagtccgatatcgcgattactaaggacatgttcgaagaagccctaagagccctagccgatgacgatttcctcaccgtgacaggcaaaactgtcaggcttctgtag

SEQ ID NO: 270870 - DNA, 2472 bp, Artificial Sequence
  derived and/or modified sequence
atgccaggacacttgcctttacgtgatgttgaggctaggatacctccacctaggggctcttgttctcgctgtcagcccaggttggaatggacatgtagggccctgctgcgtaggacgtgctgcttcccagcgctgcccaagtgcatattacaacttagcctgctcacgttgatgctagagggcacccccaggtctggcgtcaggggcaccccagtgagacagcgacccgacctagggtccgctcagaaggggttgcaggtggatttgcagagtgatggggcagccgcagaagatattgtggcatcagagcagagcctgggtcagaaacttgtgatctggggtaccgacgtcaacgtggctgcgtgtaaggaaaacttccaaagattcctacaacgctttatcgatccacttgctaaagaagaagaaaacgttgggattgatattactgaacccctgtatatgcagcggctcggggaaatcaacgtgatcggagagccctttctcaacgtaaattgcgaacacattaagtctttcgacaaaaacctgtacagacagctcatctcttaccctcaggaagtcattcctacattcgatatggcagtgaatgagattttttttgacagataccccgactccatcctggaacaccaaatccaggtacggccttttaatgctctgaagacaaaaaacatgagaaacttgaatccagaggacatcgatcagctgattacgatttcagggatggtaatacgaaccagccagctcattccggaaatgcaggaggctttctttcagtgtcaagtgtgcgcgcacacaacacgcgttgaaatggacagaggacgtatcgccgagcctagcgtgtgcgggagatgtcataccacccattccatggccctaattcataatcggagcctgttttcagacaaacagatgattaagttgcaggagagccccgaggacatgcctgcaggccaaacaccgcatacagtaattctttttgcccacaatgatctcgtcgataaagttcagcccggagacagagttaatgtaacaggcatctaccgtgccgtcccaattagggttaacccacgcgtcagcaacgtgaagtcagtgtacaagacgcatatcgacgtgatccattacagaaagacagatgccaaaaggcttcatggcctcgatgaagaggccgaacagaaattattcagtgaaaaacgcgtggagctcctgaaagagttgtccagaaaacccgatatctacgagcgactggcatccgccctcgcaccatccatctatgagcatgaagatattaagaagggcatcctgttgcagcttttcgggggtacgcgaaaagacttttcccatacaggaaggggcaaatttcgtgctgagataaatattctgctctgcggggatccaggaacaagcaagtcacaacttctgcagtatgtctataaccttgtacccaggggccaatacacttctggcaaaggctcttcagccgtgggcctgactgcatatgtcatgaaggatccagaaacccggcagctggtgctgcagactggcgctctggtgttatccgacaacggcatttgctgcattgacgagtttgacaagatgaatgagagcacccgtagtgttttgcatgaagtgatggagcagcagactctcagtatcgccaaagccggtataatatgccagctgaatgcgcgaaccagcgtactcgccgcagctaacccaatcgagtcccaatggaaccctaagaagaccactattgagaatatccagctgccacacacccttctgtcccgtttcgatcttatcttcctcctcttggatccccaggatgaggcctacgatagacggctcgcccaccatctggtggccctctattaccaatcggaagaacaggccgaggaggagctgctcgacatggctgtcctcaaagattacatagcttatgcccactccacaatcatgcctaggctttctgaggaggcttcacaggccctgattgaagcatacgttgacatgaggaagatcggttctagcagaggcatggtgagcgcctatccgagacagctcgagagcctcatcaggctcgcggaagctcatgccaaagtcagactgtcgaataaggtcgaggcaatcgatgttgaggaagccaagaggctacaccgcgaagcgcttaagcaaagcgcaactgaccctaggactggcatcgtcgacatatcaatcctgaccactgggatgagcgcaacatctcgaaaaaggaaagaggaacttgccgaagcattgaaaaagctcatcctctcgaaaggaaagactcccgcactcaagtatcagcagttgttcgaggacattagagggcagtcagacatcgccataaccaaagatatgttcgaggaggccctgcgggctctcgcagatgacgattttcttaccgtgaccgggaagaccgtgcggctgctgtag

SEQ ID NO: 270871 - protein, 299 aa, Artificial Sequence
  derived and/or modified sequence
MAEDKETKHGGHKNGRKGGLSGTSFFTWFMVIALLGVWTSVAVVWFDLVDYEEVLAKAKDFRYNLSEVLQGKLGIYDADGDGDFDVDDAKVLLGLKERSTSEPAVPPEEAEPHTEPEEQVPVEAEPQNIEDEAKEQIQSLLHEMVHAEHVEGEDLQQEDGPTGEPQQEDDEFLMATDVDDRFETLEPEVSHEETEHSYHVEETVSQDCNQDMEEMMSEQENPDSSEPVVEDERLHHDTDDVTYQVYEEQAVYEPLENEGIEITEVTAPPEDNPVEDSQVIVEEVSIFPVEEQQEVPPDT

SEQ ID NO: 270872 - protein, 298 aa, Artificial Sequence
  derived and/or modified sequence
MAEDKETKHGGHKNGRKGGLSGTSFFTWFMVIALLGVWTSVAVVWFDLVDYEEVLAKAKDFRYNLSEVLQGKLGIYDADGDGDFDVDDAKVLLGLKERSTSEPAVPPEEAEPHTEPEEQVPVEAEPQNIEDEAKEQIQSLLHEMVHAEHVEGEDLQQEDGPTGEPQQEDDEFLMATDVDDRFETLEPEVSHEETEHSYHVEETVSQDCNQDMEEMMSEQENPDSSEPVVEDERLHHDTDDVTYQVYEEQVYEPLENEGIEITEVTAPPEDNPVEDSQVIVEEVSIFPVEEQQEVPPDT

SEQ ID NO: 270873 - protein, 429 aa, Artificial Sequence
  derived and/or modified sequence
MAQRKNAKSSGNSSSSGSGSGSTSAGSSSPGARRETKHGGHKNGRKGGLSGTSFFTWFMVIALLGVWTSVAVVWFDLVDYEEVLGKLGIYDADGDGDFDVDDAKVLLGLKERSTSEPAVPPEEAEPHTEPEEQVPVEAEPQNIEDEAKEQIQSLLHEMVHAEHVEGEDLQQEDGPTGEPQQEDDEFLMATDVDDRFETLEPEVSHEETEHSYHVEETDSSEPVVEDERLHHDTDDVTYQVYEEQAVYEPLENEGIEITEVTAPPEDNPVEDSQVIVEEVSIFPVEEQQEVPPETNRKTDDPEQKAKVKKKKPKLLNKFDKTIKAELDAAEKLRKRGKIEEAVNAFKELVRKYPQSPRARYGKAQCEDDLAEKRRSNEVLRGAIETYQEVASLPDVPADLLKLSLKRRSDRQQFLGHMRGSLLTLQRLVQ

SEQ ID NO: 270874 - DNA, 1290 bp, Artificial Sequence
  derived and/or modified sequence
atggcccagcggaagaacgcaaagagtagtggcaactcatcgtccagcggatctgggtccggctccaccagtgccggatcctcctcccccggcgcgagaagagagaccaagcacggtggtcacaagaatgggcggaaaggtgggcttagcggaaccagtttctttacatggtttatggtgatcgcattgctcggagtctggacgagcgtagctgtagtgtggttcgacttggtcgattatgaagaggttttgggcaagctcggcatctatgatgccgatggcgacggggatttcgacgtggacgacgccaaggtgttgcttgggcttaaagagagatcgactagcgagcctgcagtgccgccagaagaggctgagccccatacagagcctgaggaacaggtgcctgttgaagccgagccccagaacattgaagacgaagctaaagaacagatccagagtctacttcatgagatggtccacgctgagcacgtagagggagaagacctccagcaggaagatggtcccacaggtgagccccagcaagaagacgacgagttcctcatggccaccgacgtcgacgaccggtttgagaccttagaacctgaagtgagccatgaagagactgaacattcatatcatgttgaagaaaccgactcctctgaacccgtggtagaagatgaacggcttcatcacgacacagacgacgtcacctaccaggtgtacgaagagcaagccgtatatgaacccctagaaaacgaaggtatcgaaatcactgaggtgacggctccccccgaggataaccccgttgaggactcacaggtaatagtggaggaggtgagcatcttcccagtggaagaacagcaagaagtgcctcctgagacaaatcgcaaaacggacgaccccgaacagaaggccaaagtgaaaaaaaagaagcctaagctgttgaacaagtttgacaagaccattaaggccgagttggatgccgctgagaaactccgcaaacgtggaaagattgaggaggccgtcaacgctttcaaagaactggtgcggaagtacccccaatccccacgagcccgctacggcaaagcccagtgcgaggatgacttggctgagaaaaggagatccaacgaagtgctgcgaggggccatcgaaacctaccaggaggtagcttcgcttcccgatgtgccagccgatttgctcaagttaagccttaagcgaagaagcgaccggcaacagttcctcgggcatatgagagggagcttgctgacactccagagactagtacaatag

SEQ ID NO: 270875 - DNA, 1290 bp, Artificial Sequence
  derived and/or modified sequence
atggcccagaggaagaatgccaagagcagcggcaacagcagcagcagcggcagcggcagcggcagcaccagcgctggcagcagcagccctggggcccggcgggagaccaagcacggcggccacaagaatggaaggaagggcggcctgagcggcaccagcttcttcacctggttcatggtgattgccctgctgggcgtgtggacctctgtggccgtggtgtggtttgacctggtggactatgaggaggtgctgggcaagctgggcatctatgatgctgatggagatggagactttgatgtggatgatgccaaggtgctgctgggcctgaaggagaggagcaccagcgagcctgctgtgcccccagaggaggccgagccccacacagagcctgaggagcaggtgcctgtggaggccgagccccagaacattgaagatgaggccaaggagcagatccagagcctgctgcacgagatggtgcatgctgagcacgtggagggggaggacctgcagcaggaggatggccccaccggggagccccagcaggaggatgatgagttcctgatggccacagatgtggatgacagatttgagaccctggagcctgaggtgtcccatgaggagacagagcacagctaccacgtggaggagacagacagcagcgagcctgtggtggaggatgagcggctgcaccacgacacagatgatgtgacctaccaggtgtatgaggagcaggccgtgtatgagcccctggagaatgaaggaattgagatcacagaggtgacagcccccccagaggacaaccctgtggaggacagccaggtgattgtggaggaggtgtccatcttccctgtggaggagcagcaggaggtgcccccagagaccaacaggaagacagatgatcctgagcagaaggccaaggtgaagaagaagaagcccaagctgctgaacaagtttgacaagaccatcaaggccgagctggatgctgctgagaagctgaggaagaggggcaagattgaggaggccgtgaatgccttcaaggagctggtgaggaagtacccccagagcccccgggcccgctatggcaaggcccagtgtgaagatgacctggccgagaagagaagaagcaatgaggtgctgcggggggccatcgagacctaccaggaggtggccagcctgcctgatgtgcctgctgacctgctgaagctgagcctgaagagaagaagtgaccggcagcagttcctgggccacatgaggggcagcctgctgaccctgcagaggctggtgcagtag

SEQ ID NO: 270876 - DNA, 1290 bp, Artificial Sequence
  derived and/or modified sequence
atggcccagcggaagaacgccaagagcagcggcaacagcagcagctccggctctgggtctgggtcaacatccgccggatccagcagtccaggtgctcggagggaaacgaaacacggaggtcacaaaaatggaaggaagggcgggttaagtggcaccagtttttttacatggttcatggtcattgctcttttaggcgtctggacgagcgtggcggtcgtctggttcgatcttgtcgactatgaggaagtgctggggaaactcggaatctatgacgcagatggggacggagactttgacgtggacgacgctaaagtccttctcggtctgaaggagaggtcaacaagcgagccagctgtgccccctgaggaggccgagccccacaccgaaccggaggagcaggtcccagtagaggcagaaccccagaatatcgaggacgaggcaaaggagcagatccagtccctgctgcacgagatggtgcatgccgagcacgttgagggagaggacctccagcaggaagacggccctacaggtgagccccagcaggaagatgatgaattcctgatggcgaccgatgtggatgatcgtttcgaaactctcgagcccgaagtttcacatgaggagacggagcattcttaccacgtagaagaaactgattccagcgaacccgtcgttgaagacgaaaggctgcaccatgataccgatgatgtcacgtaccaagtgtacgaagagcaagcagtctacgagcctttagaaaatgagggaatcgagataaccgaagtgaccgctccccccgaagacaacccagttgaggacagccaggtcatagttgaagaagtttcaatctttccagtcgaagagcagcaggaagtgccccccgaaacgaatcgaaagactgatgaccccgaacagaaagccaaagtgaagaaaaagaaaccaaaacttctgaataaatttgataagaccattaaggctgagttggacgcagccgagaagctccggaaacggggaaagatcgaggaagctgttaacgcattcaaggaattggtccgcaaatacccacagagtcctagggcccgctacggcaaggcacagtgtgaagatgacttagcagagaaacgacgcagtaatgaagtactgagaggagccatcgagacatatcaggaggtggccagcttgccagacgtgcccgcagacttgttaaaattgtccctgaaaaggcgaagtgatcgtcaacagtttctgggccatatgagagggtctcttctgacactgcagcgtctggttcagtag

SEQ ID NO: 270877 - DNA, 1290 bp, Artificial Sequence
  derived and/or modified sequence
atggctcagagaaagaatgcaaaaagctcaggaaacagttccagctccggttctgggagtggttcgacctctgctggttcatcttcccctggcgctaggcgagagaccaaacacggcggacacaagaatggcaggaaaggcggattgagtgggactagcttctttacctggttcatggtgattgccctccttggagtgtggacatcagtcgcagtggtgtggtttgacctcgttgactacgaagaggtgctaggaaagctgggcatctatgacgccgatggggacggagacttcgacgtagacgacgccaaggtgctgctggggcttaaagagcgcagtacaagcgagccagccgtgccgcctgaggaggccgagccacacaccgaaccagaagagcaggtcccagtggaggctgagcctcagaacattgaagacgaggccaaagagcaaatacagagtctcctccacgaaatggtccacgccgaacacgtggagggcgaggacttacagcaggaggatggtcccacaggggaaccccagcaggaagacgatgaatttctgatggccacagacgtggacgatcgatttgagaccctggaacccgaggtatctcatgaggagacagagcattcctaccacgttgaagagacggatagcagcgagccggtagtcgaagacgaacgcctccatcatgataccgacgatgtcacttaccaagtatacgaagagcaggcagtatatgaacccctggagaatgagggcattgagattaccgaggtgactgccccacccgaagataaccccgtcgaggatagtcaggtcatcgtcgaagaagttagcatttttcctgtcgaggagcaacaggaggtccctcccgaaacaaatcgcaagacagacgaccctgagcagaaggcaaaagtaaaaaaaaagaaaccaaagctgttgaataagttcgataaaaccattaaggcagagctcgacgctgctgaaaaactgcgaaagcggggtaaaattgaggaggcagtgaatgcatttaaagagctggtgaggaagtatccacagtctcctcgagccaggtatggaaaagcccagtgcgaagacgacctcgcggagaaacgcagatcgaatgaggtcctgcgcggagcgattgaaacataccaagaggtggcctcactcccagatgtccccgctgacttgctcaagctgtcgctgaagcgcagaagcgataggcaacagtttctgggacacatgagggggagcctgctgactctgcagagactagtgcagtag

SEQ ID NO: 270878 - DNA, 5292 bp, Artificial Sequence
  derived and/or modified sequence
ggggcgtggccgtcgggcggcgagccgcgcgctctcgccccgggagggagtcacaggttcgtacacgcgaggccgggcgcgcgcagccggcaggcgggtgaagtcttcccaggtgctgcaggcggtgctgaggcacagggtctgctgcaggagcagcggcccgaacccgctccagcggcccgccgccgccagcggttcccgcgtcgcgtgtgtacccccgcgcactgaaggaggtccgccagccctcaccagcccccgcggaccgtgcaatggcccagcgtaagaatgccaagagcagcggcaacagcagcagcagcggctccggcagcggtagcacgagtgcgggcagcagcagccccggggcccggagagagacaaagcatggaggacacaagaatgggaggaaaggcggactctcaggaacttcattcttcacgtggtttatggtgattgcattgctgggcgtctggacatctgtagctgtcgtttggtttgatcttgttgactatgaggaagttctaggaaaactaggaatctatgatgctgatggtgatggagattttgatgtggatgatgccaaagttttattaggacttaaagagagatctacttcagagccagcagtcccgccagaagaggctgagccacacactgagcccgaggagcaggttcctgtggaggcagaaccccagaatatcgaagatgaagcaaaagaacaaattcagtcccttctccatgaaatggtacacgcagaacatgttgagggagaagacttgcaacaagaagatggacccacaggagaaccacaacaagaggatgatgagtttcttatggcgactgatgtagatgatagatttgagaccctggaacctgaagtatctcatgaagaaaccgagcatagttaccacgtggaagagacagattccagtgaaccagtagtagaagatgaaagattgcaccatgatacagatgatgtaacataccaagtctatgaggaacaagcagtatatgaacctctagaaaatgaagggatagaaatcacagaagtaactgctccccctgaggataatcctgtagaagattcacaggtaattgtagaagaagtaagcatttttcctgtggaagaacagcaggaagtaccaccagaaacaaatagaaaaacagatgatccagaacaaaaagcaaaagttaagaaaaagaagcctaaacttttaaataaatttgataagactattaaagctgaacttgatgctgcagaaaaactccgtaaaaggggaaaaattgaggaagcagtgaatgcatttaaagaactagtacgcaaataccctcagagtccacgagcaagatatgggaaggcgcagtgtgaggatgatttggctgagaagaggagaagtaatgaggtgctacgtggagccatcgagacctaccaagaggtggccagcctacctgatgtccctgcagacctgctgaagctgagtttgaagcgtcgctcagacaggcaacaatttctaggtcatatgagaggttccctgcttaccctgcagagattagttcaactatttcccaatgatacttccttaaaaaatgaccttggcgtgggatacctcttgataggagataatgacaatgcaaagaaagtttatgaagaggtgctgagtgtgacacctaatgatggctttgctaaagtccattatggcttcatcctgaaggcacagaacaaaattgctgagagcatcccatatttaaaggaaggaatagaatccggagatcctggcactgatgatgggagattttatttccacctgggggatgccatgcagagggttgggaacaaagaggcatataagtggtatgagcttgggcacaagagaggacactttgcatctgtctggcaacgctcactctacaatgtgaatggactgaaagcacagccttggtggaccccaaaagaaacgggctacacagagttagtaaagtctttagaaagaaactggaagttaatccgagatgaaggccttgcagtgatggataaagccaaaggtctcttcctgcctgaggatgaaaacctgagggaaaaaggggactggagccagttcacgctgtggcagcaaggaagaagaaatgaaaatgcctgcaaaggagctcctaaaacctgtaccttactagaaaagttccccgagacaacaggatgcagaagaggacagatcaaatattccatcatgcaccccgggactcacgtgtggccgcacacagggcccacaaactgcaggctccgaatgcacctgggcttggtgattcccaaggaaggctgcaagattcgatgtgccaacgagaccaagacctgggaggaaggcaaggtgctcatctttgatgactcctttgagcacgaggtatggcaggatgcctcatctttccggctgatattcatcgtggatgtgtggcatccggaactgacaccacagcagagacgcagccttccagcaatttagcatgaattcatgcaagcttgggaaactctggagagaggctgcctttctggttccatctccttgggtgtgaggatagaatttcgaacaccaagagtcaattcccttgacttgcagcccgagtaattcaaagcctcctcctagggtcagaagacactaaagggaatatttgcctcgctgcaattcatttaggaaacaccctgctgtgtgtcatctcatgacagcactggtcttctgccagtatttaaggtgaacatttgatagcttctaccttaccagccaaagatattttttccacatagaataggtctaattcaatgtataatgagaacatatgtagaaactgtgaatggattgctttagtttgtaatttttctatgcagttatatttttctagtgtagctagactattttgtcatcatgtaccactacatttttgtttattttaatgacaagctgtataaatgctttacttctagctatttaatggtagcattactggggaactcagacttccctcttttaattcttcttagtaaaagatactcatgaaaaaagcagttttattttcctaacaaaaaagaaagagctcattatgtcagtgtctatgaactgtacccatcccaactctcaaatcgtttggttttttttatcttgattgagatcctcttctcactatgctagtggtggagatattgacaaaatcctatttctttcaaagaggaacttttcacaccgaaaaaagagcatggaattattttatattgttataaaaatcccagatgcaaatttttttaatgccaattattagagcttctggggaaaaagtatagttcacggaaataaaactatgttctttcagggttgggtggataggtggctgctagggtgtctggctcctggcggctttgccatccatgaggcaagggctgggaacacagtgtctttgcctatggtagatccatgtgaatgtcaggaagccagctcttcagtcttggagatgatttctgctacaattctgtagaaagattaaggatggcagagtaaaaggttaccaagaatgccaggatgtttttcttgggcgtaggaggtccagattactttcctttttgatgaaagagtttggaagactgtcccatctctctggcttgagaaatctctgccattttaaacatcactgtgaaatagcaattattatcatctgtatttagttttaacattacccacaacatagaaataataggtaaaaatcgtcttgcctactcattccaaagatgatcaagtcattaatctagcaaagtattcatgtatcagattttgtatattttgaatcaaagctaactaggaatgttagatataagaatgtaatgatattcatgcactgaattctaagccaatatgaacaaaaatgctgcatgaatggcacatataggtcaccaaagttcattcacaggtagaaaaaacttgtgctttcttttccatctaaaaacaaaaggagactttctttatctcatttaaagaacagctctttgaaattgaaattgaccctttttgcttgaccttaaggagattagcttccagtagatgagtttgcaaaatacttttcctgttcttttgttttgctggtattgaaaacatcccactaaatcagatgaagaggcatgggaggaaaaatatccaaattaattactaaaatcgagaagagaaggcaaactcttgaaaagtaaaaaggtgtttgtgaccttcagtatttattgaacagaggaaataactgacaagggcaatacaattcaatgttcatgtagtaacattcatgtcacttgttgaatttggttctcatatgtatattgcatacacataaattcaaactataagtcgtcatttttgagccatcatcttacattcatgtaatgaaattatggaagagagtaaaaactagctcttaacttagtaaatataatatggtatttaaaatcaggtcactacagtaaggttctaagtattgccaattgaaaagctagaaatggtattactgttgcaaagtgttgtcaataattgactccaatagcattgtaaatacttgtatcccacaactattttaaacccaagcaataaaatggattttctaattcacttcaattctttatttctcttacctatctatgtcttggtacataagaaaagtgtttccatcactgcattggtagaattatttcagtgttattatttttgtgatttcgtatgtctacacaaaaatgaattagtttaatttatattgtgatacagttgtttgagaaatatttttaattctgtttcaactttatttctccaagtgtataatataaaaattacttctgttattgttctctaccaataggggaaaaaattaaaacattagatccattgagaaagagatgatgtaataaataattaagattagtaataatattatcaggggtgattatgaccagttgaataatctctttcccttgaattatttagctaacaaattaactctcccaaatatttaaaataatgtaaaatcatattttactgcccattattaactaaaatatttttgtttgactttgagcaccaactggtaatactaataaatacccatgtcatgcagatggctgggcgaataagagatgtctaaaaatatgcactggtcttggaaaacatggcacaagtaaggatatcatatatgatgtctgtttattttatgtctgatttcttttgaatgagtagttggggactccatttctaaggagactaggtaaataaaatgacctttgacatttca

SEQ ID NO: 270879 - DNA, 1290 bp, Artificial Sequence
  derived and/or modified sequence
atggcccagagaaagaacgccaagagcagcggcaacagcagcagcagcggcagcggcagcggcagcaccagcgccggcagcagcagccccggcgccagaagagagaccaagcacggcggccacaagaacggcagaaagggcggcctgagcggcaccagcttcttcacctggttcatggtgatcgccctgctgggcgtgtggaccagcgtggccgtggtgtggttcgacctggtggactacgaggaggtgctgggcaagctgggcatctacgacgccgacggcgacggcgacttcgacgtggacgacgccaaggtgctgctgggcctgaaggagagaagcaccagcgagcccgccgtgccccccgaggaggccgagccccacaccgagcccgaggagcaggtgcccgtggaggccgagccccagaacatcgaggacgaggccaaggagcagatccagagcctgctgcacgagatggtgcacgccgagcacgtggagggcgaggacctgcagcaggaggacggccccaccggcgagccccagcaggaggacgacgagttcctgatggccaccgacgtggacgacagattcgagaccctggagcccgaggtgagccacgaggagaccgagcacagctaccacgtggaggagaccgacagcagcgagcccgtggtggaggacgagagactgcaccacgacaccgacgacgtgacctaccaggtgtacgaggagcaggccgtgtacgagcccctggagaacgagggcatcgagatcaccgaggtgaccgccccccccgaggacaaccccgtggaggacagccaggtgatcgtggaggaggtgagcatcttccccgtggaggagcagcaggaggtgccccccgagaccaacagaaagaccgacgaccccgagcagaaggccaaggtgaagaagaagaagcccaagctgctgaacaagttcgacaagaccatcaaggccgagctggacgccgccgagaagctgagaaagagaggcaagatcgaggaggccgtgaacgccttcaaggagctggtgagaaagtacccccagagccccagagccagatacggcaaggcccagtgcgaggacgacctggccgagaagagaagaagcaacgaggtgctgagaggcgccatcgagacctaccaggaggtggccagcctgcccgacgtgcccgccgacctgctgaagctgagcctgaagagaagaagcgacagacagcagttcctgggccacatgagaggcagcctgctgaccctgcagagactggtgcagtag

SEQ ID NO: 270880 - protein, 270 aa, Artificial Sequence
  derived and/or modified sequence
MAQRKNAKSSGNSSSSGSGSGSTSAGSSSPGARRETKHGGHKNGRKGGLSGTSFFTWFMVIALLGVWTSVAVVWFDLVDYEEVLGKLGIYDADGDGDFDVDDAKVLLGLKERSTSEPAVPPEEAEPHTEPEEQVPVEAEPQNIEDEAKEQIQSLLHEMVHAEHETEHSYHVEETVSQDCNQDMEEMMSEQENPDSSEPVVEDERLHHDTDDVTYQVYEEQAVYEPLENEGIEITEVTAPPEDNPVEDSQVIVEEVSIFPVEEQQEVPPDT

SEQ ID NO: 270881 - protein, 256 aa, Artificial Sequence
  derived and/or modified sequence
MAEDKETKHGGHKNGRKGGLSGTSFFTWFMVIALLGVWTSVAVVWFDLVDYEEVLAKAKDFRYNLSEVLQGKLGIYDADGDGDFDVDDAKVLLGLKERSTSEPAVPPEEAEPHTEPEEQVPVEAEPQNIEDEAKEQIQSLLHEMVHAEHETEHSYHVEETVSQDCNQDMEEMMSEQENPDSSEPVVEDERLHHDTDDVTYQVYEEQAVYEPLENEGIEITEVTAPPEDNPVEDSQVIVEEVSIFPVEEQQEVPPDT

SEQ ID NO: 270882 - protein, 412 aa, Artificial Sequence
  derived and/or modified sequence
MTFTFQSEDLKRDCGKKMSHQHVFSLAMEEDVKTADTKKASRILDHEKENTRSICLLEQKRKVVSSNIDVPPARKSSEELDMDKVTAAMVLTSLSTSPLVRSPPVRPNESLSGSWKEGGCVPSSTSSSGYWSWSAPSDQSNPSTPSPPLSADSFKPFRSPAQPDDGIDEAEASNLLFDEPIPRKRKNSMKVMFKCLWKNCGKVLSTAAGIQKHIRTIHLGRVGDSDYSDGEEDFYYTEIKLNTDSVADGLSSLAPVSPSQSLASPPTFPIPDSSRTETPCAKTETKLMTPLSRSAPTTLYLVHTDHAYQATPPVTIPGSAKFTPNGSSFSISWQSPPVTFTGIPVSPTHHPVGTGEQRQHAHTVLSSPPRGTVSLRKPRGEGKKCRKVYGMENRDMWCTACRWKKACQRFLD

SEQ ID NO: 270883 - DNA, 14386 bp, Artificial Sequence
  derived and/or modified sequence
acacaagctcaggagtagctgccatgcacatcagtgtccattaaaatgacttgtagcaaatctctacgttcaaagtctaactttgacagacaaccttacttccagcgaagtctactcccctccctccggagggaagaatgggctgcggttaagcgtttgccctggtgtcagggccaactgcttcgaagcgccagactttcggagactgtgggtggggagcattaagcgggaaatgaccttcacatttcagtcagaggacttaaaacgtgactgtggtaaaaaaatgtctcatcaacacgtgttttccttggccatggaggaagatgtgaaaacagcagacaccaaaaaagccagccggatccttgaccatgaaaaagaaaacactcgctccatctgtctccttgagcaaaaaagaaaagttgtttcctccaacattgatgttcctccagcaaggaaatcttcagaggaactagacatggacaaggtgacagcagcaatggtactaaccagcttgtcgactagccctttggttcgaagtcctcccgtgcggccgaacgagagcctcagcggatcctggaaggagggcggctgcgtgccttccagcaccagcagcagcggctactggagctggagcgcccccagcgaccagtccaacccgtccacgccgtcgccgccgctctcggctgacagcttcaagcccttccgcagccccgcgcagccagacgacggcatcgacgaggcggaggccagcaacctgctcttcgacgagcccattcccaggaaaagaaagaattccatgaaggtgatgttcaaatgcctctggaaaaactgtgggaaggtgctgagcactgcagcaggtatccagaaacacatccgaaccatccatctggggcgcgttggagactctgactacagtgatggagaagaggacttttactacactgagatcaagctcaacacagactcagtggcagacgggctgagcagcctggccccggtctcaccttcccagtccctggcttcacctcctactttccccatcccagattcaagccgaacagaaactccttgtgccaaaacggagactaagttgatgacgccgttgagccgctcagctcccaccaccctctacctcgtgcacactgaccatgcttaccaggccacaccccctgtgaccattccaggatcggccaagttcacccccaatggcagcagcttcagcatttcctggcaatctcctccggtcactttcacaggcatcccagtgtcacccacacatcatccggtgggcacaggagagcagagacagcatgcgcacacggtcctgtcctccccacccagaggcacagtcagcttaaggaagcccaggggagagggcaaaaagtgtcggaaggtgtacgggatggagaaccgagacatgtggtgtaccgcctgccgctggaagaaggcctgccagaggttcctcgactgagagacccccaggcagaggggctcagggccctgagccgctcctgccctggcctgccactgcaggtgttggaaagagcttttcctactgaataaaacacagttgaagccaggaaaagccctttcaggaaccttggaggaataacagcaaaaacacagaaaaattgtttaagtcaccacctatgacaaaagaaagttgctcttactgagaacccagcttggagcagctataactagttttttttccttcaaaagaaaagtcaactttttttgctgtatgtctagacttaaaactgtggacttctgtagcaattgaaccaacaaagcccattttacctagaaaggaggcatattttgataagctttctgaattatgccattttcaagatttttttgacacttaaaaaacaagctacaggttattcagtagcatttgtacaaagatcaatacttacttttgttgtgaataatcttttccgtatcttccatttgacttcttggagcagtatatgtcaggatgtgttgcaagacagcgcagcactctgggcatcttttctatggctttttgtttgtttttcttttaagaatggccccacactgaaccatggtagagctattagtttgtagggccccagatggcataaactcgagaagggattgtccacggaaatcaccagcagacttcagcccgaagctgagttcaggaagtccagctgtcactgttgggaaacatctaggagtcttccttggatccataagaagctcttcccctaaaggcagcacagctaactctactctctacctgccacaactcagtcaagaattggcacctgtagccatctgggtaagcctcgatgcttctttcagggatgtgacacaaatggcaactcggagctatttgttactgcttgtctgtcaagattgtagccaggttaatgggtcattttccttctctccagactccaccactgactgatttcagaagaggtagagaactccaaactgtcccagcaggtttgctttagacaacagagcacagcccacatggccctacctgttcagaaagtcatgttagatcaacaaaccacttccattctgagtgcacttttataggttttatgctttagcatgtccgggagatgagttaattaacaatataaacattatgtgagtaaatggaaggtccaaactttaagtttttcttataaaaatattggagctattcatttaagaatttgctcaaaagggaacataacgccaaaaggaaaatgcatgtaggtataggaatttctcagtttagtagggccagggcttgcactatgttccatttattgggcttcgtaacttacttgcttgtttgtttgggggatagtggtgtggggagaggggagtcgtcaagccctataaataagctcattctctatctacccgactctcaattgccctgctaaagagttatttctcctatacctatgcaaagtaggaagagcaccttataggaggcactgtatagggacaggggacatgggatcagccataggaatgttaaatgaaattgcacagaggaaagtttaatatatgtctagagattatacatacacttttttaagcgtaaaaagaagacatctagtaatgacagatattctttttatatacaagcaaaagaaagtataaggaggttctacagtgcaacatccacaatctgtgcattcacatattatgggacttttattttttaaactctcatataaattttttaaaattactccttggaagagatcctggtttttttcttcatttatttttttctttaaaaacatttattttaagagaagagaaaaagagcttcatctaattttgcatcttgattaccaatcagtactagtcacagcaccagcaatactgtatgttttagactgacaaggtcagccaggaaatggcatttttttaaacgcagaaatgtgtttgtttcctctactctaacacgtcctttctcctcctggtgtcctgtcaccccccatgcagcaccactgatgcgagatgatgctctggcctggtccaggaagccctgagccatgggcagattgcccagtggccttgggcggccagagcttgtcacctgtttaaacaagttcaccatgtgtttaaatgacagggtacagtcctggaccagaggtttttctcttcagcaaagctccctggcccttgatcgttggactgttactaatagaaaaagattcaagtcatgaagtataaaatccatcccccatcccagaactttgaaacacaaggagggagagatctttgctatggagcagtcctggagcaaagccccgtggcttccacccccagatatataccccataagtagtgctgagctccagcttagctgagccaagctcagtccttatctggtgttcagccagtgcacaggtataagcagaactacagagctgaatgtagcttccctgggatctcttctcctttctaaagcatttttcacacagttctgtacctcctacccaagttggggctgctttctgcctgctagcccacggctctgtgtactttcttttctggcttcaggtgcagacagaccctcagtaccttcctggacacagacacatattccctggaccaaggcgtggaataactagtagaccaccaagccacaggtggctggtcttgaagaaaagggattatactccttacaggccacccagaaagctatgaattccaatatacaccactgatcgtgcaagttagggttttttttttttaaacgtagcattattttgttatattttggaactaaatgaagtgccaaattaaccagacattcgtttgatgccatctctgtggaaccaagttctctgtgtgtgttcgtttggctgggaggagggggaggactgggcagactgctcccacagcaggctggcagtggaactggagccctggccaccgcagggagctcagaggccaatctacgcaaaaggcatgcaaaacaatggattctggtcccaaaatatttctaagtaaggcatgatgtagccttttgattttttttttatcctttgacaccccagccttcagaaaaggtttttcatctctctccaaagaagtcatttcatagtgactgacaggacattctccagagagcgacaaagcagagtggccagcaggcagtggtgttaagccttgggccttcccagcagatgtgtgctgcattggtgggtgggaggcagtgtgacagcctggagaaaacacacaggtagcaagggagtcaggggggaggtacaagagggctgtggacacctggctcttgctcatcttcttggtgctgatcagctggtggtcaccatccctaagtacctcccagggagctgccattttctcctctgggagcagctgcctgaagcaaggagagaatgacctgaagggaagtacctccggccaagagtgcagggctgctgtgcctagcctgagcgggccatctctagcagatatggacttctctccaccacactagctgaaaagttttctcccttggttggcaaaagccagtgtcaggaaaaaagctgtgggtttctgaccaagaatgtgtgcgcttagctgcaaagtgcctgtcagcagctccaggcaccaacaaggtgcccttttattagacaattcctgcccgaacataaccatattgcagatgaaaattttcaatagagaatgacacaattcttgacctttctaaaaacttttcaaagagatagtcacatgtgtatatgttgcaaaagatttttgaaactgaaatgtcctccattaaatctcaagagcactcgagttttaagtctgctgtttctggtgtcacactaagacacacttttgaaagcagccctgggttctgaattagttggcactgctgaatccatgttcccccttcatcagactccaaagtgcagcattcacttgcaaaggttgagagaaaagtggccagaattgtacatataacagagaataccttgagaatagtagcaaaatactgtaaataatattcatttcctcagggaaaaataaagggcatgcaaaaataggtctggagactcctgaaactaggaagaattttgttatcactaaagtcttttatagtcagaacaatttttttttcaaatgaacatggtatcatttcaagacaaatttatgtgaactgggcagtactgacatttgtgaggcataggggagtgccctgggaaaacggtttggagctgacctgtagcctaaggctaacatttgaaccacaggtgcaatgcctgggggtgggggagggggacggggtgggggtggtattcctagactcacgtaaggctttttctgaatgtaattgtgaatacaaagccttgctggtcctttttatcattacccaatggatgactgtttattagctatcagcagaattccgtaggcgaaagcaagccgtgaacgatgtacattttgctttaatagcatgttagcgaacaaacttccatggacttttgtggacaaggtgctgctttttctcatgaccctgtagaattgctatcgaccacatcttctgtagcactgacctgtgtgaactcagggaagaatttgtgcatacaaatgagtggaaacagagcaggattcatgaatatgaatgagaatgtgaatcattttggagaatgccctgggcacacgggtcaactggaaatttcatttctctaagaaagtagccctaccagcggcacggactgttcctgttcctcatacctgtggggattcctccatattggaactgtttcatgtatcttttttgcattgtaactagccaaacctgaagtcagtaaataaaatgagattagcactttttttaggtaccagttgtatcactgagtaatgcacaccaatagagcaagaaagtataaaatgtatttaagaccaactggtttgcttattatgactgactttgaaaaagcccatatccaatgatatacatgctttaaaaggtatatctatcgtaggaccaggaaccaaaatgggaattttacttctggtcctgttttgtaaatagttcctttttttgaagacaatctcatgttttataacttttgttgtgggtctgagaatcacaatggtaatatgtcttggcaaaacataacctttaaatacaaaaacaattataacttaattttccaaataaaacaagaaatacactgattaggcttctacagttctaagagacatgacactttggtaataagcgtcagtactctacttctcaagttaactggaaatattttacaagatgcagtgttttgtaatcacaaagaacgcagacattttgtgagaaatgaccttggttttatacattgtagcttattttttaaaatatagtattttaccaggcaggaagtattaatattataagtaattcttgctcaccaaacaaagggctatgtctcttttaagcaaatgttttgatgcatatctttttaattaaccctctgcagcaagggtagaaatacagatcagatggaatgggtattataggagaatcaagatagcaacagctactccttttaccattactagtgtgttttcaaagtatggaaaaagatgcctgaagagtcattttatatattttaaatctaaaaagtgttaacaggtatgcttataggccatgggagaaatattcttataaattttttagtgtaaaatgataaattctgtgtcacaaagacaagtttaccacttgacctaccagaatcacagatacttgcatttaactagcaagtatcatttggtggaaatttctaaaatcatagtagacaggcccaaagatagaattcttaggtgatcagtagtgtttaaaataattttgtcctcagcactaactatataactgtaatttctacataagaacaagtgcttccaaaatatagtggagggaaaaaataaaaaaggaaaataaaaaaacaaaacaaaaagaacaagtgcttgatttttcactgtgaagaactagcaggcacatgaggttgtgatcagaaagtgactgagttcccaagaaccaggaaacagaggggagttgtgaagagtttattaaaactgtacaaataattcagagctttgccaaaaccatttcataatgctgtacagttttttcaagcccactcactgttaaaacaagaaagcaccttttctttctaagattttagtaatccaaaagctagcctaattagccaagtatgcagataacatcaaaagcaaagctgagatagaacagccatacacccgttgggcagctcttatgaggtggtcagaaggtcactcagaccttggtttcaaataggctttagaatctgcacacttgaggactagaaatgcacagagttagggaaagccatgtacaggcttggctcctagtctttgagatgaggcgtcttgcaaatctctgttttcactccttggaatgtctccattgttagcattaaagtccccaagaagtttttattgctgtacggttttgaacccaatgagtctcatttccaaaagattcctaattctatataggagaggttgcaaatgtcagtgcctcagaaggaccaggcaagttctgtaaatgattgatgtggataaggcaaagaggaacacaagaatggtggagaccaggttgaactgcagaacacatgccctctttgaaggggtgcccacactcagctctagacaatcagaaccatgcagaaatcaggcccagggctgctagatcttctgacgtggaagtatgatattacctgacacgtaagtgttgacaactaactcaaactcttggccaacactgtgcagaccaaagagaagctgtacacagacaggtgcagcctgcagcccccagtttcaactattgggaaaagtggatttcacattccacagttgtcaggtcaggttcatccatcagccccacaaactcacatgtcggcactatctgggcaactaaaataaaagaggggaaagagatcatttctccccagatatcattctcatggcagacttgaatatagatacgctgagttatccagctctctcactctgcctccttttggcatgcccaggctgtgccccgtaaagtgttgaatcactgttatcctaattttcttagtgttttctaccgtggccactgtgatgaggggctggcaaagagcagcctcgtgccttccgagaaggctgccaggagcctctgaagcttgaagcgagcacacattgcctccttgtgccaaagcccttggccagcctccccacactccttccctctccatccggcctcatgagtcttcgttaccaagtaaaattaccactgcttcacctctgatacagcagaagccttgcttcagaactggtaggcatttaggctatttcagagtgtccactaacctcaaaaggaggtttttccacatacaaaaccctagcatctttgaggggaaagcaaaatgagaataaattatgtcatgaaaaaaattagaagttgcttccttcatttagatggactaagttattttaaactctatcttacatcagagtcctgatggtgttgggatagtcactgaccctttcacgtatgtaataagatacgtctcgttcacacactatttcatttgatctttgtaagaacccagtgtagaataggaatatttaaaatcaacattacccacctccaaggccaacccagagtagtcttgaacctgagtcagcctcagtattgcttgcaaggaagagggaaggggctcattaaaggcctggctcaaaccttagtcttccagactgactagggacgtaagaagacccagggacccaccatgttctcaaaccatctattcagtccaggcctttcagcatagacataaagagcccacccgttactcagtcatgttgccaagtgcaaactgatttatccccagatgaatccctttactgtagcagatccctaatccctaaatttcagccaatttggtagttaattataggagtttattagctaaatgtatgttctgagtaaaagttttgactctttggggaaaatttattttgctgctagcatacaacatttgctatgtatataaacttaagtcaatgccagaaattttaaaaccagctcaaatttataatctgtaatgatcaaatcaaaacatactgtaaactcagagttggaaacgcctggtaatatggttaagtcatgtttaaatatgaatgcaatttaaatgacattggcaatgcctgagatttctttcattgtgaatgattaaaaggcagtccaatatatgaatggatttcatcttacctttctcccgttaatttactaggtgtaacatcttgagtgtaaagtcattcacaggcagttgggttgtggagctagaaggagcctcaaaaaaaaactttttggccagactcctacatcatgaacagggtttttgatgaataatatttattattatgtttctaaagtaatacagtgttggagaatgaaacagtttagtcctttcctcttctgatggaaaagaatcatagcgccgttgccatgacaataacaggatgtagaaagacccatgaagaaagaaagaagaaagctatggttccgaaagcaggtaaccacagattttgaaaggaggcagagatggtgattaaactgtagtccttgttttttaaaatgttctttcatgttaggcaccaccacatagttaataactaccaacttctaaagagaagatccccttgatttatttatatcatgaaaatactaaaaatcaattctcaagtctaattaactattacattatcttgctaggtccttttccctaaatttttaattcagaaaattaaccagaattggccagatgcagtggttcacgcctataatcccagcactttgggagtccaaggcagatggatcacttgaggtcagtagttcaagaccagcctggccaacagaggaagaaagagtgaaaacaaaagaagaaagagggaaaccctgtctttactaaaaatacaaaaattagtcgggcgtggtggcgcacacctgtaattccagctacttgagaggctgaggcaggagaatcccttgaaactgcaggcagaggttgcagtgagccaagatttcactgctgcacctggggtgagactaccattaaggaaggaaatttcctttaaacagaaaaaaacaaaggtgctcatctatttcttctgaattctctctacatccttgacttaagaggaaaaccagcactcaagaaacagctttaaaagagaacagtccccattctagctaccagtcttgctttcccccatcttggcaagccccagtgaatttgccattgaaagattaccctcccctttgccctcatctgcctgagctagaggccaggctgttgttaatgttttttcagttccaaagcccctgatgggacattcttgtttctgtgctactgctttctctctcttaaattaaggtgcaaggggataaatattactataactgggatgtaaggctcagtcagtgtggctattccctcccttcgggggaaatattccatctgtctgaacggttttaggtgatcatgaggagagcggcttagtcacacagccagccacgctcatcacaaaagatttgttcagactcactgtaaagaatgacaaggcagatagctaatcctttcactgtgcctcaaagcccgccgtgcaagtcaccaaccctaccggtcctctccacgtgcgaggctaatagagtgatcagaaccaggaatgtgagctgggttccaccttaggaggggacaatgaggacagagcaagagggctccatgtttaattactccaggctctgacttctgcccacaattacagagcatgaaagcagaattggcctttagtaagtgaaaaggaagtggctcctgcagcatataattgttataatttcgtatttatggaaagagaaaaggacttcagtccactcatgttgttaagcacttgtccctcactccactggagcccccttcctatgttttgggcacagatggctgggaccgagaggaaagaggaagagcggctgccagagtgtgaatatacccctcagggatatacagcggagtttcatgataaactacccatactttcccaaaaaaggttgaggagcaatacataactttgcagattacaaacccttgttttactttttaaaccttttttccatactctgcttattggaaatcgatggctgtgatgtgaccaacacctgtgatgatagcaaagcccctcctttcacagtctcctgactgttcggggaacctccttggtcattggtagaaagctttagaaaagacttagctttttagggaagaactaaaaaatctccaaaacatactagtcccatgacttcgataactgaaaatgtcctgggtgtaaactaacccaggaatgtggatcatacatgttttttttaaaaaaaatccctgaatcaatattttcctacaacacaccctaaaattcctatttttgtaattaatggttggacagtgatcagccatttaaacataggctttctggaataaccagacactagaatagtttccaaagtgttttgcgtatcaaaatcctatatacttagaagaagaactcaggataagaaaaaatcgctaggtcccaaagggttcatgactatcatcagatgcaactgcgagtggcctacggtcattttttcaaatgagaagactggagagagagaacaacagtaatcacaaaacctctgttgcccttagtccatgacaatgtttaaggaaactttaaaaaattaagccatcttctgaattgttttctacaccaaatctaaaatattaaaatgaaattattaaatatttaaaatggggtatttagtggaaatgcaatcagtagaaaacattgctttttagtgcctgctaaacaagtaaaggagaaagaatgaagagaaaacagcagtccttcctgtgtgacactcgtgtggaaatgacaggcattcacatgtcattgagtgctaactcaaaagctaggtggcaatgctgtccaatgtttagagatcttttgaaatataattttaccaccattcagaggtaagtacttgcttaacagaagtctttaatgttagtgaatgaatgtataaaattataaactatgcattttcaaagagtagcatgtattttgtatcgaatccaagtaaatttttttcatagctacctaccacaactgcaaattattcaaaataaacttggatacatatccttatggggatatgggaagcccatctatattctcctacttgatgtttttaaagattgaaactttattctgaaacatcaggctctaaaaaattccatcattaagatgaataaatgggaaatggtttatttgttacttcgtaagcataaatgggaaatgttggctgttagaaaatgtgcccagttctttaaaggtggatgttctagtaacactggattaacaagcaaacaaaactgcatgaagtgaacgaatatttcattggataaagttagcataggttttatctgctgggtttaattctcaatcccagaaaaaaatattcttcaaggggtatcagttatagtttcaaagaacaaaatatgaaaatattgtccagcaaagcaaatcattgatcttttttcaaaattacttatattttggaaagtctatatagaatatccacaaatttcttcagccctcttgttgatttcatattttcatgaaactttttcccctaataatttgtcttcgctctttaatcagtgctttactacattactcagcctgaaaaaatatcttttccttcatctgacaatgtggaaataaagaactccatttctgtcattctggttctcttcagtgtccattgagaaagtttctcaactgtttgtaaaatacggggggaaaaaaacacgcatttctaaacctggtacttaaggttatactggattgtttgctacctaattagaagttattggggaaggggcattgtgtctttttatatgatttttagccaaatccagatgttctgatacacatttctgaatacctgtctgactgtaaatacagcctgtggaggttcaggttgataaacctttcacctgactgctccacagccatgctccttgccagcttctggcacattgtacatagatttgttgaatgtttaaatgatgttgtttttctaaatgctgttctctaaaacaattttttgaatttcttttgctttccattgttttggactttgtgtgttcgttttttaaaaaaaaaaatgtttcctaaatatttaacaccaggaaaaatatttttaaatacactggtgctaattgaaacagaaggaaattttcagatcgaagatgtacaatgttaaatgttcataccagttaaactgcactttcccaaggggacagctggcatctacttgaaatgggcatcaagagaccaccaaatgtttacagtttctgtggcccgtttaagtgtaaaatgcagaagtggctctgtccccccagagttaaggatttgctacactggtcctctggaagcatttaagtagaagaaaaggcttatagtcagaatcactttagtaatcgtcttctggtccttggacttttctgttctgtaatgcttgtaacaatgaatatggtgttgccaatctagtctgatatcattgttgacctgtacttactttgtggatggttctacctggggttgcactggcacaaacagagccagaacactggactttcaaaagaccattttgacttctacagtgtccacacacatgaatttaaatgcacttgtaactggttaattaccatgaagtaagtctaacttccacttaataaaagtttttgtgtatctgcttcta

SEQ ID NO: 270884 - DNA, 712 bp, Artificial Sequence
  derived and/or modified sequence
acgaggaggtggtcgtcgaggtggtggacggcgacgaagacgacgaggacggcgaggagcgtttcgtgcccctcggacccggccacgcagtccccaggggcccggcccggggcgcgttgaaggtggggagcattaagcgggaaatgaccttcacatttcagtcagaggacttaaaacgtgactgtggtaaaaaaatgtctcatcaacacgtgttttccttggccatggaggaagatgtgaaaacagcagacaccaaaaaagccagccggatccttgaccatgaaaaagaaaacactcgctccatctgtctccttgagcaaaaaagaaaagttgtttcctccaacattgatgttcctccagcaaggaaatcttcagaggaactagacatggacaaggtgacagcagcaatggtactaaccagcttgtcgactagccctttggttcgaagtcctcccgtgcggccgaacgagagcctcagcggatcctggaaggagggcggctgcgtgccttccagcaccagcagcagcggctactggagctggagcgcccccagcgaccagtccaacccgtccacgccgtcgccgccgctctcggctgacagcttcaagcccttccgcagccccgcgcagccagacgacggcatcgacgaggcggaggccagcaacctgctcttcgacgagcccattcccaggaaaagaaagaattccatgaa

SEQ ID NO: 270885 - protein, 36 aa, Artificial Sequence
  derived and/or modified sequence
MATPYVPVPMPIGNSASSFTTNRNQRSSSFGSVSTS

SEQ ID NO: 270886 - DNA, 255 bp, Artificial Sequence
  derived and/or modified sequence
atggccaccccctacgtgcccgtgcccatgcccatcggcaacagcgccagcagcttcaccaccaacagaaaccagagaagcagcagcttcggcagcgtgagcaccagcagcaacagcagcaagggccagctggaggacagcaacatgggcaacttcaagcagaccagcgtgcccgaccagatggacaacaccagcagcgtgtgcagcagccccctgatcagaaccaagttcaccggcaccgccagcagcatctag

SEQ ID NO: 270887 - DNA, 279 bp, Artificial Sequence
  derived and/or modified sequence
atggccaccccctacgtgcccgtgcccatgcccatcggcaacagcgccagcagcttcaccaccaacagaaaccagagaagcagcagcttcggcagcgtgagcaccagcagcaacagcagcaagggccagctggaggacagcaacatgggcaacttcaagcagaccagcgtgcccgaccagatggacaacaccagcagcgtgtgcagcagccccctgatcagaaccaagttcaccggcaccgccagcagcatcgagtacagcaccagacccagagactag

SEQ ID NO: 270888 - DNA, 111 bp, Artificial Sequence
  derived and/or modified sequence
atggccaccccctacgtgcccgtgcccatgcccatcggcaacagcgccagcagcttcaccaccaacagaaaccagagaagcagcagcttcggcagcgtgagcaccagctag

SEQ ID NO: 270889 - DNA, 612 bp, Artificial Sequence
  derived and/or modified sequence
atggccaccccctacgtgcccgtgcccatgcccatcggcaacagcgccagcagcttcaccaccaacagaaaccagagaagcagcagcttcggcagcgtgagcaccagcagcaacagcagcaagggccagctggaggacagcaacatgggcaacttcaagcagaccagcgtgcccgaccagatggacaacaccagcagcgtgtgcagcagccccctgatcagaaccaagttcaccggcaccgccagcagcatcgagtacagcaccagacccagagacaccgaggagcagaaccccgagaccgtgaactgggaggacagacccagcacccccaccatcctgggctacgaggtgatggaggagagagccaagttcaccgtgtacaagatcctggtgaagaagacccccgaggagagctgggtggtgttcagaagatacaccgacttcagcagactgaacgacaagctgaaggagatgttccccggcttcagactggccctgccccccaagagatggttcaaggacaactacaacgccgacttcctggaggacagacagctgggcctgcaggccttcctgcagaacctggtggcccacaaggacatcgccaactag

SEQ ID NO: 270890 - DNA, 255 bp, Artificial Sequence
  derived and/or modified sequence
atggcgaccccctacgtgcccgtgcccatgccaatcggaaatagcgccagcagctttactaccaacagaaaccaaagatcgtcaagcttcggctctgtatctacctcatccaatagctctaaggggcagctggaagacagtaacatgggcaacttcaaacagacaagcgtgcctgatcaaatggacaatactagctcagtttgttcgtcccctctcattcgcacaaagtttaccgggacagcaagtagcatttag

SEQ ID NO: 270891 - DNA, 279 bp, Artificial Sequence
  derived and/or modified sequence
atggccaccccctacgttcctgtcccgatgcctatcggtaatagcgcaagctcatttacaacaaatcggaatcagaggtcttcatcttttgggtccgtgtccacatcctcgaactccagcaagggccagctggaggacagcaacatgggcaactttaagcagaccagcgtgcccgaccagatggacaacaccagttctgtgtgtagctcaccattgattaggacgaagtttacagggacagcttcttctattgagtattctacaagaccaagagattag

SEQ ID NO: 270892 - DNA, 111 bp, Artificial Sequence
  derived and/or modified sequence
atggctactccttacgtcccagttcccatgcccatcgggaacagcgcaagttccttcaccaccaaccggaatcaacgatcgtcttcatttggatccgtttctactagttag

SEQ ID NO: 270893 - DNA, 612 bp, Artificial Sequence
  derived and/or modified sequence
atggcaacaccttacgttccagttccaatgccaattggcaactctgcttcatcattcactacgaatcgaaaccagcgttcctcctcgtttggctccgtgtctacctcttctaatagctctaaaggacaactcgaagatagtaatatgggaaatttcaaacagacgagcgtgcctgaccagatggacaatactagcagcgtttgctcctcaccactgatcaggaccaagtttacaggcacagccagctccattgagtattctaccagacctagagacactgaagaacagaatcctgagaccgttaattgggaagataggccgagcaccccaaccatcttagggtatgaggtgatggaggaacgggccaagttcaccgtgtacaaaattctggtaaagaagacccctgaagagagctgggtggtgtttcgtcgatacacagacttctcccggcttaatgacaagcttaaggagatgttcccgggcttccgactcgcgctcccacctaaaagatggttcaaggacaactataatgcggactttctcgaggaccggcagcttggcctgcaggcctttctgcagaatttagtggcccacaaagacattgcaaattag

SEQ ID NO: 270894 - DNA, 255 bp, Artificial Sequence
  derived and/or modified sequence
atggccaccccctacgtgcctgtgcccatgcccatcggcaacagcgccagcagcttcaccaccaacagaaaccagaggagcagcagctttggatctgtgtccaccagcagcaacagcagcaagggccagctggaggacagcaacatgggcaacttcaagcagacctctgtgcctgaccagatggacaacaccagctctgtgtgcagcagccccctcatccgcaccaagttcaccggcacagccagcagcatctag

SEQ ID NO: 270895 - DNA, 279 bp, Artificial Sequence
  derived and/or modified sequence
atggccaccccctacgtgcctgtgcccatgcccatcggcaacagcgccagcagcttcaccaccaacagaaaccagaggagcagcagctttggatctgtgtccaccagcagcaacagcagcaagggccagctggaggacagcaacatgggcaacttcaagcagacctctgtgcctgaccagatggacaacaccagctctgtgtgcagcagccccctcatccgcaccaagttcaccggcacagccagcagcattgagtacagcacccggccccgggactag

SEQ ID NO: 270896 - DNA, 111 bp, Artificial Sequence
  derived and/or modified sequence
atggccaccccctacgtgcctgtgcccatgcccatcggcaacagcgccagcagcttcaccaccaacagaaaccagaggagcagcagctttggatctgtgtccaccagctag

SEQ ID NO: 270897 - DNA, 612 bp, Artificial Sequence
  derived and/or modified sequence
atggccaccccctacgtgcctgtgcccatgcccatcggcaacagcgccagcagcttcaccaccaacagaaaccagaggagcagcagctttggatctgtgtccaccagcagcaacagcagcaagggccagctggaggacagcaacatgggcaacttcaagcagacctctgtgcctgaccagatggacaacaccagctctgtgtgcagcagccccctcatccgcaccaagttcaccggcacagccagcagcattgagtacagcacccggccccgggacacagaggagcagaaccctgagaccgtgaactgggaggaccggcccagcacccccaccatcctgggctatgaggtgatggaggagcgggccaagttcaccgtgtacaagatcctggtgaagaagaccccagaggagagctgggtggtgttccgccgctacacagacttcagccggctgaatgacaagctgaaggagatgtttcctggcttccggctggccctgccccccaagcgctggttcaaggacaactacaatgctgacttcctggaggaccggcagctgggcctgcaggccttcctgcagaacctggtggcccacaaggacatcgccaactag

SEQ ID NO: 270898 - DNA, 255 bp, Artificial Sequence
  derived and/or modified sequence
atggccaccccctacgtgcccgtgcccatgcccatcggcaacagcgctagtagctttacaacaaacagaaatcagagatcgagctcctttggatctgtaagcactagctccaactcaagtaaaggccagctggaagactctaacatgggcaacttcaagcagacctccgtgcctgatcagatggacaacacctcctctgtgtgctcgtcaccccttatcagaacaaagtttacggggacggcatcaagcatctag

SEQ ID NO: 270899 - DNA, 279 bp, Artificial Sequence
  derived and/or modified sequence
atggccaccccctacgtgcccgtgcccatgcccatcggcaacagcgccagctcctttaccacaaaccggaatcagcggtcatcgagctttggaagcgtcagtaccagctccaattcttctaaaggccaactggaggactcaaacatggggaactttaagcagacctccgtgccagaccagatggataatacaagctccgtgtgttccagcccattgattagaactaagttcaccggtaccgcaagtagcattgagtatagtacccggccccgcgactag

SEQ ID NO: 270900 - DNA, 111 bp, Artificial Sequence
  derived and/or modified sequence
atggccaccccctacgtgcccgtgcccatgcccatcggcaacagcgcttccagcttcactactaatcgaaatcagcggtcctcaagcttcggctccgtgagtacctcttag

SEQ ID NO: 270901 - DNA, 612 bp, Artificial Sequence
  derived and/or modified sequence
atggccaccccctacgtgcccgtgcccatgcccatcggcaacagcgcttcatcattcaccaccaacagaaaccagaggtcctctagtttcgggtccgtatcaacatctagcaacagctccaagggccaattagaggatagtaatatgggtaacttcaagcagacatccgtaccagaccagatggacaatacttcttcagtgtgtagttcgcccctgatccgcacaaagttcaccggaaccgcatctagcatcgaatacagcaccaggcctcgcgatacagaggaacaaaatcctgaaacagtgaactgggaagacagaccctctaccccaactattctgggctatgaagtgatggaagagcgggctaagttcaccgtctacaaaatcctggtgaaaaagactccagaagagtcatgggtggtcttccggcgctacaccgatttctcaagactgaatgacaaactgaaagaaatgtttccaggatttcgattagcacttccccctaaacggtggttcaaggataactacaacgcagacttcctcgaagataggcagctcggactgcaagccttcctgcagaacctggtggcgcacaaagacatcgccaattag

SEQ ID NO: 270902 - DNA, 255 bp, Artificial Sequence
  derived and/or modified sequence
atggctaccccatacgtgcctgttcctatgccaatcggaaattcggcgagcagctttaccacaaaccggaaccagcggagttcaagttttggatccgtatctaccagctctaattcgtcaaagggtcaactggaagacagtaacatgggcaacttcaagcagacctctgtccctgatcagatggacaatacatcttccgtgtgttcttcgcccctcatccgcacaaagttcactgggaccgccagcagcatttag

SEQ ID NO: 270903 - DNA, 279 bp, Artificial Sequence
  derived and/or modified sequence
atggccaccccctatgtacccgttcctatgcccattggcaacagtgcatccagtttcacaaccaatagaaatcaacgcagcagcagctttgggtcagtgtcgacaagtagcaacagctcaaagggccagctggaagattctaacatgggcaatttcaaacagacttcagttcctgaccagatggataataccagtagcgtctgttcctctcctcttattcgtacgaagtttaccggtacagccagcagcatcgaatattccacaagaccacgggattag

SEQ ID NO: 270904 - DNA, 111 bp, Artificial Sequence
  derived and/or modified sequence
atggcgacgccttatgtccccgtgcctatgcctattggcaacagcgcctctagcttcacaactaataggaaccagcgctctagttctttcggctctgtgagtacctcctag

SEQ ID NO: 270905 - DNA, 612 bp, Artificial Sequence
  derived and/or modified sequence
atggcgactccctatgttcctgtgcctatgcccataggtaatagcgcatcaagctttaccacaaaccgaaaccagaggagctcctccttcggctccgtgtccacgagtagtaacagctctaagggccagctggaagacagcaacatggggaacttcaagcagaccagtgtgccagatcagatggacaatactagtagcgtttgtagttcacccctaatcagaaccaagttcactggaacggcaagttctatagagtattcaacaagaccgagggatacagaggagcagaatcccgaaacagtgaattgggaggaccgcccatccacccccacaattctcggttacgaggtcatggaggagcgcgcaaagtttactgtctacaagattttagtaaaaaagacccccgaggaaagctgggtcgtgttccggcgttatactgacttttctcggcttaacgataagctcaaggagatgtttcccggttttcgcctggctctgcctcctaagcggtggtttaaggataattacaatgctgatttcttggaagatcgacaactaggtctccaggcatttttgcaaaacctcgtagcgcataaagatatcgccaactag

SEQ ID NO: 270906 - DNA, 691 bp, Artificial Sequence
  derived and/or modified sequence
gctgctgagggaggaggcgaaaagctgcggttaaggagagtccggtttaaccgtcaccgggaagcgcgctcgttcgggatcgccgagggggctgagtactgtcaagatgataagcatggaataaagcttcagaagggtctttaccaatctttctcctaccaacttttacatacatgaaatcaggttaaaatgaactttacagaaatacttcacaagggaataaagtagaggaaaaagggataacatgtaacatggagtcaaggaaaaagagtgtgaagtagttttgctctctctatcttgcaaataggagtccttaaagacaactgggagaaggggtttgagatagtgaattcctaagaagaaaataatggattgcatattagttgttctctaagtggactcaacagtgtgcaagcttgttggaaaagccaaaagaagatggcaactccttatgtcccagttcctatgcccataggaaactctgcttccagttttacaacaaacagaaatcaaagaagttcttcttttggcagtgtctcaacaagctcaaattcttctaagggccagttagaagactcaaatatgggtaattttaaacagacaagtgttcctgatcaaatggataatacttcatctgtctgtagcagtcccctcattaggactaaatttacaggtacagcttcttccattg

SEQ ID NO: 270907 - DNA, 880 bp, Artificial Sequence
  derived and/or modified sequence
gtgcgtctgggaggcgctgggcgcgcaccggtcagcggaggcgggagagtctgtgatcccagggagctgcgggtctcgccgcctgcagtgcggaagacccgtgaccggcgcagaccccggccttaccttccgagggtcgaactgtgcctggtatttgcctctttcctcccgcccacggggttgctcagagtcgggccacctcacctgaggttttccagagtgagaatgaactgagcgtcctgggagcaactccgcatcaggtactgtcaagatgataagcatggaataaagcttcagaagggtctttaccaatctttctcctaccaacttttacatacatgaaatcaggttaaaatgaactttacagaaatacttcacaagggaataaagtagaggaaaaagggataacatgtaacatggagtcaaggaaaaagagtgtgaagtagttttgctctctctatcttgcaaataggagtccttaaagacaactgggagaaggggtttgagatagtgaattcctaagaagaaaataatggattgcatattagttgttctctaagtggactcaacagtgtgcaagcttgttggaaaagccaaaagaagatggcaactccttatgtcccagttcctatgcccataggaaactctgcttccagttttacaacaaacagaaatcaaagaagttcttcttttggcagtgtctcaacaagctcaaattcttctaagggccagttagaagactcaaatatgggtaattttaaacagacaagtgttcctgatcaaatggataatacttcatctgtctgtagcagtcccctcattaggactaaatttacaggtacagcttcttccattgagtattctactagaccaagagaca

SEQ ID NO: 270908 - DNA, 577 bp, Artificial Sequence
  derived and/or modified sequence
caaccttgatgtctggcgggcggcaaggggctccgcgggagagtggagaggcgccgcaggaagcccagccaccttcaggccaccgccgaccccactgtgcgtctgggaggcgctgggcgcgcaccgtactgtcaagatgataagcatggaataaagcttcagaagggtctttaccaatctttctcctaccaacttttacatacatgaaatcaggttaaaatgaactttacagaaatacttcacaagggaataaagtagaggaaaaagggataacatgtaacatggagtcaaggaaaaagagtgtgaagtagttttgctctctctatcttgcaaataggagtccttaaagacaactgggagaaggggtttgagatagtgaattcctaagaagaaaataatggattgcatattagttgttctctaagtggactcaacagtgtgcaagcttgttggaaaagccaaaagaagatggcaactccttatgtcccagttcctatgcccataggaaactctgcttccagttttacaacaaacagaaatcaaagaagttcttcttttggcagtgtctcaacaagct

SEQ ID NO: 270909 - DNA, 804 bp, Artificial Sequence
  derived and/or modified sequence
gatgactacaagtcccatgatgcaaagtatgagcacggaccaatgttggtcgcagttccttctgggaattgtagtcttctcctgtttggcaaactagatagtgaattcctaagaagaaaataatggattgcatattagttgttctctaagtggactcaacagtgtgcaagcttgttggaaaagccaaaagaagatggcaactccttatgtcccagttcctatgcccataggaaactctgcttccagttttacaacaaacagaaatcaaagaagttcttcttttggcagtgtctcaacaagctcaaattcttctaagggccagttagaagactcaaatatgggtaattttaaacagacaagtgttcctgatcaaatggataatacttcatctgtctgtagcagtcccctcattaggactaaatttacaggtacagcttcttccattgagtattctactagaccaagagacactgaagaacaaaatccggaaacagtgaattgggaagatagaccatctacacctactatactgggttatgaagtgatggaagaaagagctaaatttactgtatataaaatactagtaaagaaaaccccagaagaaagctgggtagttttcagaagatacactgacttctctaggcttaatgacaaattaaaagagatgtttccaggttttcgactagcacttcctccaaaacgctggtttaaagataattacaatgctgactttttagaagacagacaattaggattacaagcgtttcttcaaaatttagtagctcacaaggacattgctaactg

SEQ ID NO: 270910 - protein, 159 aa, Artificial Sequence
  derived and/or modified sequence
MNRKKLQKLTDTLTKNCKHLFRGFDKDNDGCVNVLEWIHGLSLFLRGSLEEKMKYCFEVFDLNGDGFISKEEMFHMLKNSLLKQPSEEDPDEGIKDLVEITLKKMDHDHDGKLSFADYELAVREETLLLEAFGPCLPDPKSQMEFEAQVFKDPNEFNDM

SEQ ID NO: 270911 - DNA, 480 bp, Artificial Sequence
  derived and/or modified sequence
atgaacagaaagaagctgcagaagctgaccgacaccctgaccaagaactgcaagcacctgttcagaggcttcgacaaggacaacgacggctgcgtgaacgtgctggagtggatccacggcctgagcctgttcctgagaggcagcctggaggagaagatgaagtactgcttcgaggtgttcgacctgaacggcgacggcttcatcagcaaggaggagatgttccacatgctgaagaacagcctgctgaagcagcccagcgaggaggaccccgacgagggcatcaaggacctggtggagatcaccctgaagaagatggaccacgaccacgacggcaagctgagcttcgccgactacgagctggccgtgagagaggagaccctgctgctggaggccttcggcccctgcctgcccgaccccaagagccagatggagttcgaggcccaggtgttcaaggaccccaacgagttcaacgacatgtag

SEQ ID NO: 270912 - DNA, 480 bp, Artificial Sequence
  derived and/or modified sequence
atgaatagaaagaagctgcagaagcttaccgataccttgaccaaaaactgtaaacaccttttccgcggcttcgataaagataatgatgggtgcgtcaacgttctggagtggatccacgggttgagcctgtttctgaggggcagcctggaagaaaaaatgaagtattgcttcgaggtattcgacctgaatggggacggcttcatatctaaggaggagatgtttcacatgctgaagaatagcctactgaaacaaccatctgaagaggacccagatgaggggataaaagacttagtggagatcacactgaagaaaatggaccacgatcacgacgggaagctatctttcgccgattatgagctggctgtgagagaagaaacgctcctactggaagctttcggcccctgccttccggacccaaaatcccagatggagtttgaggcccaggtgtttaaggaccctaacgaatttaatgatatgtag

SEQ ID NO: 270913 - DNA, 480 bp, Artificial Sequence
  derived and/or modified sequence
atgaataggaagaagttgcagaaactgaccgacactctgaccaaaaattgtaagcacttgtttaggggcttcgataaggataacgatggctgtgtgaatgtcttggaatggatacacggcctaagcctgttccttcgtggatcactcgaagaaaaaatgaagtactgcttcgaggtttttgacctgaacggtgatggttttatttccaaggaggagatgttccatatgctgaaaaattcactgctgaagcagccttctgaggaggatccagacgaaggcattaaggacctggtagaaatcacgctcaagaagatggatcatgaccacgacgggaagctttctttcgctgactacgagcttgccgtccgagaagaaaccttgcttcttgaggcctttggcccatgccttcctgaccctaagtcccagatggagtttgaagcacaggtgttcaaagatccgaatgagtttaatgatatgtag

SEQ ID NO: 270914 - DNA, 2286 bp, Artificial Sequence
  derived and/or modified sequence
cgttgccttggctacaccgtctgttagggccgcgcacgagatcagtaactgagacctcaccgcgttgacccagcaccagggctcgcgggggtcccgcgagggtctcggtagccgcgcgcccagagacccccgccgcggcccgattctctgagcgccagacatgaaccgcaagaaactgcagaagctgacggacaccttaaccaaaaattgcaagcatttattccgaggttttgataaagataatgatggctgtgtaaatgtattggagtggattcatggattatcactgtttcttcgaggatctttggaagaaaaaatgaaatattgctttgaagtgtttgatttgaatggtgacggattcatttcaaaggaggaaatgtttcacatgttgaagaacagccttctcaaacagccatctgaggaagaccctgatgaaggaattaaagatttggttgaaataacactgaagaaaatggatcatgaccatgatgggaagctgtcttttgcagactatgaactggctgtgagagaagagactcttctactggaggcctttgggccatgtcttcctgatccaaagagccagatggaatttgaagctcaagtattcaaagatccaaatgaattcaatgatatgtgaataactaaatgtctatattgtctcaagtgacaatgtgctatcagccctcactcggtcccggcacctcctcggcctcgaagtccactctgtccgcgcttgaggagcccttcagcctgccactgcactgtgggatcccctctctgggcaggcctaggccagagccggctccctctgcttgtggggaggtgtggatggagaggcgcaggctggaaccggggctgcacgtggtgcttatgggccagcacgagttctgggtgggcgccggctcggcaggccccgcacttggagcggccggctggcctgcgggtgccgccggccccaggcagtgaggggcttagcacccgggccaacagctgcgtagggtgcgctgggtcccccagcactgccggcccgcccaagcagtgctagaattctcactgggcctcagctgcctccccacggggcagggctcgggacttgcatcccgccatgcccaagccccacccgacctgtctgggtgggctcccgctctgcccgaacctccccgacaggcctgccccctgctccacagtgcctggtcccatcaactgcccaagggctgaggagtgcaagtgtgcagcttacagcttactaagcttctctaaaccaatcattttgaattctttgtcaggaaattcaaggatttccatttctttggggttggttactggaaaatcagtcatgtttcattggttttatatgtttcttgtagctttgcatttatatctacacacgaaggagcagtcacctcttccacacttttatgggctgcctttggtggggaaagaccttcacctattggtgggtgtgaaggcaccagctggggtgtgacagctctggctccaggtggatacatcttggactctgggcagcttaatcagctggggtcagcatcagtgaagactgtgggcaccatcagtcataaaaactgtgggtgtccatgatggtgacaaaagctgctggggtcctcagtggcaaaggctactggacttctgctctcctttttccccacagagagaggtcacagccaaaacgatcccctttgttgccaagctgtgccagggtagaagatgaggtgatgcagataaaacgcttccaacacttttatatacagctgtccttggtttgggggtgctttaatgggttcctgcagcttcttcactgtactctggagtattctcagagctatttttgttggcaagtagctgttaaattcttgcttttgttggggagacaagagctgggatctcctagtgtatcatcttgttgatattacttgcctgcttttaatattttaactaatttttctgattacaaaggaattgaggttctctgaagaatatttcagatatttaggaaattttaaaataagatgaaaatattgattaatattctggtataaatccttccagacttttacaatgcatttgtaagtacatctacatttttgcaaagagaatactgtatttttcagatgatcatattgaaaatgcacttttgtcttggtgtactactattttgtgaacattttttgaggtcattatttgtctgtagcttgacttgtaatggctgcctggtattccatcatgactgactttattaaaccactttcatgccattgacatgtc

SEQ ID NO: 270915 - DNA, 648 bp, Artificial Sequence
  derived and/or modified sequence
agtaactgagacctcaccgcgttgacccagcaccagggctcgcgggggtcccgcgagggtctcggtagccgcgcgcccagagacccccgccgcggcccgattctctgagcgccagacatgaaccgcaagaaactgcagaagctgacggacaccttaaccaaaaattgcaagcatttattccgaggttttgataaagataatgatggctgtgtaaatgtattggagtggattcatggattatcactgtttcttcgaggatctttggaagaaaaaatgaaatattgctttgaagtgtttgatttgaatggtgacggattcatttcaaaggaggaaatgtttcacatgttgaagaacagccttctcaaacagccatctgaggaagaccctgatgaaggaattaaagatttggttgaaataacactgaagaaaatggatcatgaccatgatgggaagctgtcttttgcagactatgaactggctgtgagagaagagactcttctactggaggcctttgggccatgtcttcctgatccaaagagccagatggaatttgaagctcaagtattcaaagatccaaatgaattcaatgatatgtgaataactaaatgtctatattgtctcaagtgagtaaaaaaggaggcacacaca

SEQ ID NO: 270916 - DNA, 480 bp, Artificial Sequence
  derived and/or modified sequence
atgaacaggaagaagctgcagaagctgacagacaccctgaccaagaactgcaagcacctgttccggggctttgacaaggacaatgatggctgtgtgaatgtgctggagtggattcatggcctgagcctcttcctgcggggcagcctggaggagaagatgaagtactgctttgaggtgtttgacctgaatggagatggcttcatcagcaaggaggagatgttccacatgctgaagaacagcctgctgaagcagcccagcgaggaggaccctgatgagggcatcaaggacctggtggagatcaccctgaagaagatggaccatgaccatgatggcaagctgagctttgctgactatgagctggccgtgcgggaggagaccctgctgctggaggccttcggcccctgcctgcctgaccccaagagccagatggagtttgaggcccaggtgttcaaggaccccaatgagttcaatgacatgtag

SEQ ID NO: 270917 - DNA, 480 bp, Artificial Sequence
  derived and/or modified sequence
atgaaccggaagaagctgcagaagctgaccgacaccctgaccaagaattgcaaacacttgtttaggggattcgataaggacaatgacggatgcgtgaacgtgcttgagtggatacacgggctcagtttgttcttgagggggtcccttgaagaaaaaatgaagtactgttttgaagttttcgacctgaacggtgacggctttatcagcaaagaggaaatgttccacatgttaaagaatagcctcttaaaacagccatctgaggaggacccagatgaaggcatcaaagacctggtggaaataaccctgaagaaaatggatcatgaccacgatggaaaactgtccttcgcagattacgagctcgccgtgcgtgaggaaacgctccttctggaggccttcggcccctgtctcccggaccctaagtcgcagatggaatttgaggcccaggtctttaaagacccgaacgagtttaacgatatgtag

SEQ ID NO: 270918 - DNA, 480 bp, Artificial Sequence
  derived and/or modified sequence
atgaaccggaagaagctgcagaagctgaccgacaccctgaccaagaattgtaaacatctgtttcgtggattcgacaaagataacgatggctgcgtgaatgtgctcgagtggatccatggcctttcactgtttctgcgcggcagcttggaagaaaagatgaagtattgttttgaggtgttcgacctgaatggtgacggatttatttccaaggaggagatgttccacatgctgaagaattctctcctaaagcaaccatctgaagaggaccccgacgagggtatcaaagatctggttgagataaccttaaagaaaatggatcatgatcatgatggaaagctgtcctttgctgattacgagttggctgtgcgtgaagaaaccctccttctcgaagcatttgggccttgcttgcctgacccaaagtcccaaatggagtttgaggcccaagtgttcaaggatcccaatgagttcaacgacatgtag

SEQ ID NO: 270919 - DNA, 480 bp, Artificial Sequence
  derived and/or modified sequence
atgaaccgcaaaaaactacagaaattgaccgacactttgactaagaactgtaagcatcttttcagagggttcgataaggacaacgacggctgtgtcaacgttctggaatggatccacggactatctttatttttacggggttcccttgaggaaaagatgaagtactgttttgaagtttttgacttgaatggtgatggtttcattagcaaagaggagatgtttcacatgctgaagaattctttgctgaagcagccctctgaagaagaccccgatgaaggaattaaagacttagtggagataacattgaaaaaaatggatcacgaccacgacggaaagctgtcgtttgctgattacgagctcgccgtgcgcgaggaaacactgctgctggaggcatttggaccttgcctcccggatccaaaatcccaaatggagttcgaggcacaggtcttcaaagatccgaacgagttcaacgatatgtag

SEQ ID NO: 270920 - DNA, 480 bp, Artificial Sequence
  derived and/or modified sequence
atgaatcggaagaagctgcagaagttgaccgacacattaacgaagaactgcaaacacctgtttcggggtttcgataaggacaacgacggctgcgtcaacgtcctggaatggattcatgggctgtcactgttcctgagggggtctctggaagagaaaatgaagtattgtttcgaagtgtttgacctaaacggggacggtttcatctctaaagaagaaatgttccacatgttaaaaaattctctcctcaaacagccctccgaggaagatcctgacgaaggcataaaagacttggtagagatcacattgaagaagatggatcacgaccatgacggcaaactgagtttcgccgactatgaactggcagtccgggaagagactctacttctggaggccttcggtccgtgtcttcccgacccaaagagccagatggaattcgaagctcaggtgtttaaggaccccaacgagttcaatgacatgtag

SEQ ID NO: 270921 - protein, 1256 aa, Artificial Sequence
  derived and/or modified sequence
MLFPLQVAAVTSSVRDDPLEHCVSPRTRARSPEICKMADNLDEFIEEQKARLAEDKAELESDPPYMEMKGKLSAKLSENSKILISMAKENIPPNSQQTRGSLGIDYGLSLPLGEDYERKKHKLKEELRQDYRRYLTQKVFSGTSKKNFLSTSETDPSTLGVSLPIGERLSAKERLKLERNKEYNQFLRGKEESSEKFRQVEKSTEPKSQRNKKPIGQVKPDLTSQIQTSCENSEGPRKDVLTPSEAYEELLNQRRLEEDRYRQLDDEIELRNRRIIKKANEEVGISNLKHQRFASKAGIPDRRFHRFNEDRVFDRRYHRPDQDPEVSEEMDERFRYESDFDRRLSRVYTNDRMHRNKRGNMPPMEHDGDVIEQSNIRISSAENKSAPDNETSKSANQDTCSPFAGMLFGGEDRELIQRRKEKYRLELLEQMAEQQRNKRREKDLELRVAASGAQDPEKSPDRLKQFSVAPRHFEEMIPPERPRIAFQTPLPPLSAPSVPPIPSVHPVPSQNEDLRSGLSSALGEMVSPRIAPLPPPPLLPPLATNYRTPYDDAYYFYGSRNTFDPSLAYYGSGMMGVQPAAYVSAPVTHQLAQPVVNTVGQNELKITSDQVINSGLIFEDKPKPSKQSLQSYQEALQQQIREREERRKKEREEKEEYEAKLEAEMRTYNPWGKGGGGAPLRDAKGNLITDLNRMHRQNIDAYHNPDARTYEDKRAVVSLDPNLATSNAENLEDAANKSSGHMQTQSSPFARGNVFGEPPTELQIKQQELYKNFLRFQIEEKKQREEAERERLRIAEEKEERRLAEQRARIQQEYEEEQEKKREKEEEQRLKNEEHIRLAEERQKEAERKKKEEEEKYNLQLQHYCERDNLIGEETKHMRQPSPIVPALQNKIASKLQRPPSVDSIIRSFIHESSMSRAQSPPVPARKNQLRAEEEKKNVIMELSEMRKQLRSEERRLQERLLHMDSDDEIPIRKKERNPMDIFDMARHRLQAPVRRQSPKGLDAATFQNVHDFNELKDRDSETRVDLKFMYLDPPRDHHTLEIQQQALLREQQKRLNRIKMQEGAKVDLDAIPSAKVREQRMPRDDTSDFLKNSLLESDSAFIGAYGETYPAIEDDVLPPPSQLPSARERRRNKWKGLDIDSSRPNVAPDGLSLKSISSVNVDELRVRNEERMRRLNEFHNKPINTDDESSLVDPDDIMKHIGDDGSNSVATEPWLRPGTSETLKRFMAEQLNQEQQQIPGKPGTFTWQGLSTAHG

SEQ ID NO: 270922 - DNA, 3771 bp, Artificial Sequence
  derived and/or modified sequence
atgctgtttcccttgcaagtggccgcagtgaccagctcagttcgagacgatcctctggagcactgtgtatctcctaggacacgtgcgagatctcccgagatctgtaaaatggccgataacctcgatgagtttattgaagagcagaaagcgcgcctggctgaggacaaagccgagctggagagcgatcctccttatatggagatgaaggggaaactgtccgctaagctctctgagaactcaaaaatcctcatctccatggccaaagagaatattccgcctaatagtcagcagactagagggagcttgggcattgattatgggctctcactcccattaggcgaagattacgaacgcaagaagcacaaattaaaggaggagttacgacaggactataggcgctacctgactcaaaaagtgttttcaggtacatccaaaaaaaactttctaagcacctccgagaccgatccaagcaccttgggcgtttctcttccaattggtgagcgcctgtctgcaaaagagcgtttgaagttagagcggaataaggaatacaaccaatttttgcgagggaaggaggaatccagcgagaaatttagacaggtagagaagagtactgagcctaagagccagcgtaacaaaaagcctattggacaggtaaagcctgacctgaccagccagatccaaacctcttgcgaaaacagtgagggacccaggaaagacgtgctgacaccctcggaagcatacgaagagctgctcaatcagcgcaggcttgaagaggaccgctatagacagttggacgatgagatagaactgcgcaatcgccgaataattaagaaggccaacgaggaggtgggtatatccaacctgaagcaccagcgctttgcatctaaggctggcattcctgacagacgctttcatcgtttcaatgaggaccgcgtatttgacaggaggtaccaccgcccggatcaggatcctgaggtcagcgaagaaatggacgagagatttcgttacgaaagcgactttgacagacggctgtctcgagtctacactaacgacaggatgcacagaaataagcgcggcaacatgccacctatggagcacgacggtgatgtcatagagcagtctaacattaggatctccagcgcagaaaataaaagcgcccctgacaacgagactagcaagtccgcaaatcaggatacgtgttcgccattcgcgggcatgctcttcggtggggaggacagggagctgatccaacgccggaaggaaaaataccgactggagctgctggagcagatggctgaacagcaacggaacaaaagacgagagaaggacttggagctgcgcgtggcagcgagtggggcacaggatcccgagaagtctcccgacagacttaaacagtttagtgtggcacctcggcactttgaggagatgattcctccggagcgccctcgtatcgccttccagactccactgccccctctaagtgccccttccgtgccacctattccctctgtgcatcctgtgccttcacagaacgaggaccttcgttcaggtctgtcttctgctctaggagaaatggtgtctcctcgtatcgcccctctcccaccacctccactgttaccaccattggccacgaattacaggacgccttacgacgatgcttactatttctacgggtcaaggaacaccttcgacccctcccttgcctattacggctccgggatgatgggagtccaacccgccgcatatgtctctgctcctgttacacatcagctagcccaacccgtcgtgaatactgtgggccagaacgaactcaagatcacttcagaccaggtgattaattctggcttgatcttcgaagacaaaccgaaaccttcaaaacaaagcctgcagtcttaccaggaggccctccagcagcagattcgagagagggaggagcggagaaaaaaagagcgcgaagagaaagaagaatatgaggcgaaactggaggccgagatgaggacctataatccgtgggggaagggcggggggggggcacctctcagagatgccaaaggcaacttaattaccgatttgaatcggatgcaccgtcagaacatcgacgcttaccacaatcctgatgcacggacgtacgaggacaagcgtgccgtggtgtcgttagatccgaatctggcgacatctaacgcggaaaatctcgaggacgctgctaataaatcatcaggacatatgcaaacacagtcttcaccatttgcgcgagggaatgtgttcggcgagcctccaacagaactacagattaaacagcaggagctctataagaattttttgcgattccagatcgaggagaaaaaacagagagaggaggctgagcgtgagcggttgagaatcgctgaggaaaaggaagagcgacgcctagccgagcagcgcgctagaatccagcaggagtacgaagaagagcaagagaagaaaagggagaaggaggaggagcagagattgaagaatgaagaacacatcaggctagctgaggagaggcagaaggaggccgagcggaaaaaaaaagaagaagaagaaaagtacaacctgcagctccagcactattgtgagagggataacctgattggggaggaaaccaaacatatgcgacagccttccccaatcgtgcccgccctgcagaacaagatcgcatctaagctccagcgtccaccctcggtcgactccattattaggtcgttcatccatgagtccagtatgtcgagggctcagtccccgccagtgccagccagaaagaatcagctgagggctgaggaggaaaaaaaaaacgtgataatggaactctcagaaatgagaaagcaattgaggagcgaggagcggcgtctgcaggagaggctcttgcatatggacagcgatgatgaaatacctatccgcaagaaggagcggaatcctatggacatttttgacatggctcgacatcgtctgcaggcccctgtgcggcgacagagccccaaaggcctggatgccgccacattccaaaacgtacacgacttcaacgaattaaaagatagagacagcgaaacaagagtggatctcaagttcatgtatctggaccctccaagagatcaccatacactcgaaatccagcagcaggcactgcttcgcgaacagcagaagagacttaatagaatcaagatgcaagagggggctaaagttgatctcgatgcgatcccctccgcaaaggttcgagagcagaggatgcctcgggacgacacgtctgatttcctgaagaattccctactggaatcagattctgccttcatcggcgcttacggcgagacttatccggccattgaggatgacgtgctgccccccccttctcagctcccaagcgcgcgggagcgtagacgcaacaagtggaaagggctggacattgatagttctcgccctaacgtggcccccgatggcctgtctctgaagtccatatcttccgttaacgtcgatgagcttcgtgtcagaaacgaggagcgaatgaggcggctaaacgagtttcataataaaccaataaatacagatgacgagtcatccttggtggacccggacgatataatgaagcatatcggcgacgacggttccaactcagtcgccaccgaaccctggctaaggcctggcactagcgagacgctaaaaagattcatggccgagcagctcaatcaggagcaacagcagatccccggtaagccaggaaccttcacatggcagggcctttcgaccgcccatgggtag

SEQ ID NO: 270923 - DNA, 3771 bp, Artificial Sequence
  derived and/or modified sequence
atgctgttccccctgcaggtggccgctgtgaccagctctgtgagagatgaccccctggagcactgtgtgagccccaggacccgggcccggagccctgagatctgcaagatggctgacaacctggatgagttcatcgaggagcagaaggcccggctggccgaggacaaggccgagctggagagtgaccccccctacatggagatgaagggcaagctgagcgccaagctgtctgagaacagcaagatcctgatctccatggccaaggagaacatcccccccaacagccagcagacccggggcagcctgggcatcgactatggcctgagcctgcccctgggggaggactatgaaaggaagaagcacaagctgaaggaggagctgcggcaggactaccgccgctacctgacccagaaggtgttttctggcaccagcaagaagaacttcctgagcaccagcgagacagaccccagcaccctgggcgtgtccctgcccatcggggagcggctgagcgccaaggagcggctgaagctggagaggaacaaggagtacaaccagttcctgcggggcaaggaggagagcagcgagaagttccggcaggtggagaagagcacagagcccaagagccagaggaacaagaagcccatcggccaggtgaagccagacctgaccagccagatccagaccagctgtgaaaattctgagggccccaggaaggatgtgctgacccccagcgaggcctatgaggagctgctgaaccagaggcggctggaggaggaccgctaccggcagctggatgatgaaattgagctgaggaacagacgcatcatcaagaaggccaatgaggaggtgggcatcagcaacctgaagcaccagagatttgccagcaaggccggcatcccagaccggcgcttccaccgcttcaatgaagatagagtgtttgaccggcgctaccacaggccagaccaggaccctgaggtgtctgaggagatggatgagcgcttccgctatgaaagtgactttgaccggcggctgagccgggtgtacaccaatgacaggatgcacaggaacaagaggggcaacatgccacccatggagcatgatggagatgtgattgagcagagcaacatccgcatcagcagcgctgagaacaagagcgccccagacaatgagaccagcaagagcgccaaccaggacacctgcagcccctttgctggcatgctgtttggaggagaagatcgggagctgatccagaggaggaaggagaagtaccgcctggagctgctggagcagatggccgagcagcagaggaacaagagaagagagaaggacctggagctgcgggtggccgccagcggggcccaggaccctgagaagagcccagaccggctgaagcagttctctgtggcccccaggcactttgaggagatgatccccccagagcggccccgcatcgccttccagacccccctgccccccctgagcgcccccagcgtgccccccatccccagcgtgcaccctgtgcccagccagaatgaagacctgcggagcggcctgagcagcgccctgggggagatggtgagcccccgcatcgcccccctgcccccaccacccctgctgccccccctggccaccaactaccgcaccccctatgatgatgcctactacttctacggcagcaggaacacctttgaccccagcctggcctactacggcagcggcatgatgggcgtgcagcctgctgcctacgtgtctgcccctgtgacccaccagctggcccagcctgtggtgaacacagtgggccagaatgagctgaagatcaccagtgaccaggtgatcaacagcggcctcatctttgaggacaagcccaagcccagcaagcagagcctgcagagctaccaggaggccctgcagcagcagatccgggagcgggaggagaggaggaagaaggagcgggaggagaaggaggagtatgaggccaagctggaggccgagatgaggacctacaacccctggggcaaaggaggcggcggggcccccctgagagatgccaagggcaacctgatcacagacctgaacaggatgcaccggcagaacattgatgcctaccacaacccagatgcccggacctatgaggacaagagagctgtggtgtccctggaccccaacctggccaccagcaatgctgagaacctggaggatgctgccaacaagagcagcggccacatgcagacccagagcagcccctttgcccggggaaatgtgtttggagagcccccaacagagctgcagatcaagcagcaggagctgtacaagaacttcctgcgcttccagatcgaggagaagaagcagcgggaggaggccgagcgggagcggctgagaattgctgaggagaaggaggagcggcggctggccgagcagagggcccgcatccagcaggagtatgaggaggagcaggagaagaagcgggagaaggaggaggagcagaggctgaagaatgaggagcacatccggctggccgaggagcggcagaaggaggccgagaggaagaagaaggaggaggaggagaagtacaacctgcagctgcagcactactgtgagcgggacaacctgattggagaggagaccaagcacatgaggcagcccagccccatcgtgcctgccctgcagaacaagatcgccagcaagctgcagaggcctccttctgtggacagcatcatccgctccttcatccacgagagctccatgagccgggcccagagcccccctgtgcctgccaggaagaaccagctgcgggcagaggaggagaagaagaatgtcatcatggagctgtctgagatgaggaagcagctgcggtctgaggagcggcggctgcaggagcggctgctgcacatggacagtgatgatgagatccccatcaggaagaaggagaggaaccccatggacatctttgacatggcccggcaccggctgcaggcccctgtgcggcggcagagccccaagggcctggatgctgccaccttccagaatgtgcatgacttcaatgagctgaaggaccgggacagcgagaccagggtggacctgaagttcatgtacctggaccccccccgggaccaccacaccctggagatccagcagcaggccctgctgcgggagcagcagaagaggctgaaccgcatcaagatgcaggagggcgccaaggtggacctggatgccatccccagcgccaaggtgcgggagcagaggatgcccagagatgacaccagtgacttcctgaagaacagcctgctggagagtgacagcgccttcatcggggcctacggggagacctacccagccattgaagatgatgtgctgcccccacccagccagctgcccagcgcccgggagaggagaagaaacaagtggaagggcctggacatcgacagcagccggcccaacgtggccccagatggcctgagcctgaagagcatcagctctgtgaatgtggatgagctgcgggtgagaaatgaggagaggatgaggcggctgaatgagttccacaacaagcccatcaacacagatgatgagagcagcctggtggaccctgatgacatcatgaagcacatcggagatgatggcagcaacagcgtggccacagagccctggctgcggcccggcaccagcgagaccctgaagcgcttcatggccgagcagctgaaccaggagcagcagcagatccctgggaagccaggcaccttcacctggcagggcctgagcacagcccatggatag

SEQ ID NO: 270924 - DNA, 3771 bp, Artificial Sequence
  derived and/or modified sequence
atgctgttccccctgcaggtggccgccgtgaccagcagcgtgcgggatgaccctctcgagcattgcgtgagtcccaggacaagggcccgtagtcctgaaatttgcaagatggcagacaatcttgatgagttcattgaggagcagaaggctcgactggccgaggacaaagcagagctcgagtcagaccccccttacatggagatgaaggggaagttatccgctaagctcagcgagaattcaaaaatcttaatttcaatggcaaaagagaatatcccacccaatagtcagcagacgcgcggatctcttgggatcgattatggcctatctttgccactgggcgaagattatgagagaaagaaacacaagctgaaagaagagctgaggcaggactatcggcggtacctaactcagaaagttttctccggtacatccaagaagaactttcttagcacatcagaaacggaccctagcaccttgggtgtcagtttaccaattggcgagcggctgtccgcaaaggagcgccttaagcttgagcgcaacaaggaatataatcaatttctccgaggtaaggaagaaagcagcgagaagttccgccaggtggagaagagcactgaacctaaatcacaacggaacaagaagccaatcggccaggtcaagccagacctgacctctcaaattcagacatcctgtgagaatagcgaaggccccaggaaggatgtactgaccccaagtgaggcatacgaagaacttctaaaccagaggagattggaggaagaccggtatcgccagctagatgacgagatcgaactacgcaatagacgcataatcaagaaggccaacgaggaggtcgggatttccaacctgaaacaccaacgatttgcatcgaaagctggcatacctgataggcgattccaccggttcaatgaagatagagtctttgatcgaaggtaccatcggccggatcaggacccagaggtgtccgaagagatggatgagcgcttccggtatgagtcggactttgaccggcggctgagccgagtgtacacaaacgatcgcatgcatcggaacaaacgaggaaatatgccaccaatggaacacgatggtgacgtgatagaacagagtaacattcggatctctagtgctgaaaacaagtctgcgccggacaatgagacctctaagtccgccaaccaggatacatgctctccatttgcaggcatgcttttcggaggcgaggatcgcgagctaattcagcgccgcaaggagaagtacaggttggagctgctcgagcagatggccgagcagcagagaaacaaaaggcgcgagaaagacctggagctgagggtggccgccagtggagcccaggacccagaaaaaagtcccgaccgtctgaaacagttcagcgttgctccacggcatttcgaagaaatgattccaccggagaggccgcggatcgctttccagaccccgctgccccctctctcagcgccatccgtgccaccaataccttctgtgcatcccgtgcctagtcagaacgaggacctccggtccggtctgtctagtgctctgggggagatggtctctccacggatcgcacccttacccccccccccacttctacccccactcgcaactaattacagaacaccttacgatgacgcttattatttctatggtagccgcaacacattcgatccctccctggcttactacggaagcggaatgatgggagtccaaccggcagcttacgtatcagctcctgtgacacatcagcttgcccagcctgtggtcaacaccgtcggccagaatgagttaaagataacatccgaccaggtgatcaattctggcctgatattcgaagataagccaaagccgtctaagcaaagcctgcagtcctatcaagaggcactccaacagcaaattagagaacgcgaggaacggcggaaaaaagaaagggaggaaaaagaggagtacgaggccaagctcgaggcagagatgaggacatacaacccttggggcaaagggggggggggtgccccgctgcgtgacgcaaaggggaatttgattaccgacctgaaccgcatgcaccggcagaacatagacgcatatcataacccggatgcacggacgtatgaggacaagcgtgcagtggtcagcctcgatcccaaccttgccacctctaatgcggaaaaccttgaggacgccgctaacaagtcatcgggtcacatgcagacacagtctagcccttttgcacgaggcaatgttttcggcgagccgcctacagagctacaaatcaaacagcaggaactgtacaagaacttcttgcggttccagatagaggaaaagaagcagcgcgaggaggcagagagggagagattgcggattgcggaggagaaggaggaacggcgcttggcagaacagagggcccgtatccagcaggagtacgaagaggaacaagaaaaaaaacgcgagaaagaagaggaacagcggctcaaaaacgaagagcacatcagactggctgaggagaggcaaaaagaagctgagcgtaagaagaaagaagaagaggagaagtacaatcttcaactgcaacactattgtgaaagagacaatctcattggcgaagagacaaaacacatgaggcaacccagcccaatcgtgcccgccctgcagaacaagattgctagtaaactacagaggccaccatctgttgattctataatcaggtcctttatccacgagagcagcatgtcacgagcccagagcccccctgtccctgcgagaaagaatcagctcagagctgaggaggagaagaagaacgttattatggaattaagcgaaatgcgaaaacagctgaggtcggaggagagaaggttgcaagaacggctgctccatatggactcagatgatgagatcccaatacggaaaaaggagcggaatcctatggacatctttgacatggcccggcaccgattgcaggcccccgtgagaagacaaagtcctaaaggtcttgatgccgcaaccttccagaacgtccatgatttcaatgaactgaaagaccgggactctgaaactcgcgtcgatcttaagtttatgtacctcgacccccccagagatcaccacaccctggagatacaacagcaggccctcctgcgcgagcaacagaaaaggctgaacagaatcaaaatgcaggagggcgctaaggtagacctcgatgctattccatccgccaaagtgagagaacaacgcatgcctcgtgatgacacctccgactttcttaagaacagcctccttgagtctgattccgcattcataggcgcttatggagaaacgtaccctgcaatagaggatgacgtgctcccacctccgagccagcttccaagcgccagagaaaggcgccgtaacaaatggaaaggcctggatattgattcttcacgcccgaatgtggcccccgatggactctccttgaaaagcatctcgtccgtcaacgtggatgaactaagagtgagaaacgaagaaaggatgcgtaggctgaacgaattccataataagcccattaataccgacgatgagtcttcactagtcgatcctgacgacatcatgaaacacatcggggacgacggttccaattctgtcgccaccgagccgtggctgcgtcccgggacgagcgagacacttaaacgatttatggcagaacagttgaaccaagagcagcaacagatccccgggaagcctgggacttttacctggcagggactctcaaccgctcacggctag

SEQ ID NO: 270925 - DNA, 3771 bp, Artificial Sequence
  derived and/or modified sequence
atgctcttcccacttcaggtggccgcagttacctcttctgtgcgcgacgacccgctagaacactgtgtcagccccaggacccgcgctagaagccccgagatttgcaagatggccgataacctggatgaattcattgaagaacaaaaagctcggcttgccgaggataaagccgagctcgaatctgacccaccctatatggagatgaagggtaagctgtccgccaaactgagtgagaatagtaaaatccttatctccatggccaaagagaacatcccaccaaattcccaacaaaccagaggcagcctgggcattgattacggactgtccctgcccctaggggaggactatgaaaggaaaaaacacaaactgaaggaagagctgagacaggactacagaagatatctgacacaaaaagtatttagcggaacgtcgaaaaagaattttctaagcaccagtgagaccgatccgtccacgctcggcgttagcttacctattggagagcgcctgagcgcgaaggagcgcctcaaacttgagcgaaacaaggaatacaaccagtttctgcgcggtaaggaggagtcctctgagaagtttcgtcaagtcgaaaagtctaccgagcccaaatctcaacggaataagaagcccataggacaagtgaagccagatctcacatcacaaatacaaacctcctgcgagaatagtgaaggtccacggaaggacgtgctgacaccaagcgaagcttacgaggagctgctgaaccagcggagactggaggaagaccgctacagacaactggatgatgaaatagaactacgaaatagacgaattatcaaaaaagcaaacgaagaagtcggaattagtaaccttaaacatcagcgcttcgccagcaaggccggtattcccgatcgacgctttcacagattcaatgaagaccgtgtctttgaccggaggtaccacaggcccgatcaagaccctgaggtgtctgaggaaatggatgaaaggtttcgctatgagagtgatttcgacaggcggctctcacgtgtgtacacaaacgaccgcatgcatcgcaataagaggggaaacatgcctcctatggagcatgacggcgacgtcatagaacagtccaatatacgcatcagctcagcagaaaacaaatccgcaccagacaatgaaacctccaagtcagctaatcaggatacgtgtagcccgtttgctgggatgttgtttggcggagaggatcgtgaactcattcagcggagaaaggagaagtatcgcttggaattactcgaacagatggcagagcagcagcgcaataagcgcagagaaaaagatctagagttgcgcgtcgccgcaagtggggctcaggaccctgagaaaagcccagacaggttgaaacagttcagcgtggccccacgccacttcgaggaaatgattcctcccgagcggcctagaatcgcttttcagacaccactgccacccctgagcgccccttctgtgccccctattcccagtgtgcatcccgtcccttctcagaacgaggacctgcggagtggactttccagcgctctcggggaaatggtgtctccccgtatagctccccttccccctcctcccctgttaccaccactggccactaactaccgcaccccgtatgacgacgcttactacttttacggtagccgcaatacctttgacccctcactggcgtactatggctccggtatgatgggtgtgcagcctgccgcttacgtatccgctccagtaacacatcaactggctcaacctgtcgttaacaccgtgggacagaacgagctcaagattacgagcgatcaggtgatcaactctggcctgatctttgaagacaagccaaagccaagtaagcagagtctccagagttaccaggaggccctgcagcagcagattcgcgagcgcgaggagcgaaggaaaaaagagcgcgaggagaaggaggagtatgaagctaagttggaagccgaaatgcgaacatacaacccttggggcaaaggtgggggaggcgcacctctaagggatgcaaaagggaacctcatcactgacctgaatcgaatgcaccggcagaatattgacgcgtaccataatcctgatgcaagaacctacgaagataaaagggcagtcgtgagtttggacccaaatctggccacctccaatgccgagaacctggaggacgccgctaacaaaagcagtgggcacatgcaaacgcagtcctctccatttgcacgtgggaatgtcttcggcgaaccacccaccgagctgcagattaaacagcaagaactctacaagaactttctaaggttccagatcgaggaaaaaaaacaaagagaggaggccgaaagagagagactaaggatcgctgaagagaaggaggagcgtaggctggcagaacagcgggcacgaatacagcaagaatatgaagaggagcaggaaaaaaaacgcgagaaagaggaagagcagcgcttgaagaacgaagagcacattagactggccgaagagcggcagaaagaggcagagcggaaaaagaaagaagaagaggagaagtataatctgcaactgcaacattattgtgagagagacaacctgattggcgaagaaaccaaacacatgcgacaaccctctccaattgtgccagctctgcagaacaaaatcgcttctaaattacagcgtccaccctctgttgactccatcatccgttccttcattcatgagagctctatgagtagggcgcaatcacccccagtccctgctcgcaagaaccagctgcgggcagaggaggaaaagaaaaatgttatcatggaactgtctgagatgcgaaaacagcttcgctctgaagagcggagacttcaggaacgtctgttgcatatggatagtgacgatgagattccaatcaggaaaaaggaaagaaatccaatggatatctttgacatggcaaggcatcggctccaggctccagtccgaagacagagtccaaagggcctagatgccgcaaccttccagaatgttcacgattttaacgagctgaaagacagggacagcgaaacccgggtggacctaaagtttatgtaccttgacccgccacgagatcaccacacactcgagatacagcaacaggcgctgctgcgcgaacagcagaagcggttaaatcggatcaaaatgcaagaaggggcaaaagtggatctcgacgcaatcccttcagctaaggtgagagagcaaagaatgccgagggatgacacttccgactttctgaagaacagtctgctggaatccgactctgcattcatcggcgcttatggagagacttatccggctatcgaggacgatgtgctgccaccaccatcccagttgccctcagctcgcgaaagaaggcgaaacaagtggaaaggcctcgatatcgatagcagcaggcctaacgtcgccccagatgggttgagcctgaagagcattagttccgtgaacgtggacgaactgcgcgtgcgtaacgaagaaagaatgagaaggttgaatgagttccataataagcctattaacacggatgatgagtcctcccttgtggaccccgacgacatcatgaagcatattggcgatgatggttcaaacagcgtagctaccgaaccctggttgcggcctggcacctctgaaaccctgaagaggttcatggctgagcagttaaatcaggagcaacagcaaatccccggaaagccgggaacttttacttggcagggactctctaccgctcatggatag

SEQ ID NO: 270926 - DNA, 4468 bp, Artificial Sequence
  derived and/or modified sequence
gaggggcggagccccggcccggaggtctgtcatgctgttcccgctccaggtggccgctgtaacctcttcggtccgcgacgatcctctagagcactgtgtgtctccccggacgcgagcccgctcccctgaaatctgcaaaatggctgataatttggatgaatttattgaagagcaaaaagccagattggccgaagacaaagcagagttggaaagtgatccaccttacatggaaatgaagggaaagttgtcagcgaagctttctgaaaacagtaagatactgatctctatggctaaggaaaacataccaccaaatagtcaacagaccaggggttccttaggaattgattatggattaagtttaccacttggagaagactatgaacggaagaaacataaattaaaagaagaattgcggcaagattacagacgttatcttactcagaaggttttcagtggtactagcaaaaaaaattttctatctacgagtgaaacagatccatctactttgggagtttctcttcctattggtgagaggttatctgctaaggaaaggttgaaacttgaacgtaacaaagaatacaatcagtttctcaggggtaaggaagaatccagtgaaaagttcaggcaggtggaaaagagtactgagcccaagagtcagagaaataaaaaacctattggtcaagttaagcctgatctaacttcacaaatacagacatcttgtgaaaattcagagggtcctagaaaagatgtcttaactccttcagaggcatatgaagaacttctgaaccaaagacgactagaggaggacagataccgacaactagatgatgaaatcgaattaaggaatagaagaattattaaaaaagcaaatgaagaagtgggcatttccaacctaaaacatcaaaggtttgcaagcaaggctggcattccagatagaagatttcacagatttaatgaggatcgtgtttttgatagacggtatcatagaccagaccaagatcctgaagtaagtgaagaaatggatgagaggtttagatatgaaagtgattttgatagaagactttcgagagtgtatacaaatgacaggatgcacaggaacaaacgagggaatatgcctcctatggaacatgatggggatgttatagaacagtcaaacataagaatttcatctgctgaaaataaaagtgctccagacaatgaaacatccaaatctgctaatcaagatacctgtagtccttttgcagggatgctctttggaggtgaagatcgagaacttattcagagaaggaaagagaaatacagactagaactgttggaacaaatggctgagcaacagaggaacaagagacgagaaaaagatttagaactcagggttgcagcgtctggagcacaagaccctgagaaatcgcctgatagactaaagcagtttagtgtggcaccaagacactttgaagagatgataccacctgaaagacccagaatagctttccagacacctctccctcctttatctgccccatctgtcccacccatcccatcagttcatcctgttccttctcaaaatgaagatttgcgcagtggactcagcagcgcccttggtgaaatggtgtctcccaggattgcacctctgcctccacctcccctactaccacctttggctactaactatcgaactccttatgatgatgcatactatttttatgggtccaggaatactttcgatcccagtcttgcttattatggttcaggaatgatgggcgtacagcctgcagcttatgttagtgctcctgtcacccaccaactagcacaacctgttgtgaatacggttggacagaatgaactgaagattacaagtgatcaagtgataaattcaggattgatttttgaagataaaccgaaaccttccaaacagtcacttcagtcttaccaagaggctttgcagcagcagattcgggaaagagaagaaagaaggaagaaagaacgtgaagaaaaagaagaatatgaagctaaattagaagctgaaatgagaacatataatccctggggaaaaggtggaggtggtgctcctctcagggatgcaaaaggaaatctgataactgatttgaataggatgcacagacaaaatatagatgcctaccataacccagatgcaagaacatatgaagataaaagggctgttgtatctctagacccaaatttagccacttcaaatgctgagaacctagaagatgctgcaaataaaagctcaggtcatatgcaaacacagagctctccttttgctcggggaaatgtatttggtgagcctccaactgaacttcagattaaacagcaagaattatacaagaattttcttcgtttccagattgaggaaaagaaacaaagagaggaagcagagcgagagagactgagaattgcagaagaaaaagaagaaagacggcttgcagaacagagggcacgaattcagcaggagtatgaagaggaacaggaaaagaaaagagagaaagaggaggagcaaaggctaaaaaatgaagagcatattcggttagctgaagaaagacaaaaagaagcagaaagaaagaagaaagaagaagaagaaaaatataacctgcaacttcagcactactgtgaaagagacaatttgattggggaagaaacaaagcacatgagacagccttctcctatagttcctgctcttcagaacaaaattgcaagcaaactccaaagacctccttcagttgacagcatcatacgttcctttattcatgaaagttccatgtccagggcacagtcacccccggtacctgccaggaaaaatcagctccgtgcagaagaggagaaaaaaaatgtaattatggaattatcagaaatgagaaaacagcttcgtagtgaagagaggcgtctacaagagcgattgctacacatggacagtgatgatgaaattcctatcaggaaaaaggaaaggaatcccatggatatatttgatatggctagacatcggttgcaagctcctgtcagaagacagtcccctaagggcttagacgctgccacttttcagaatgttcatgattttaatgagctgaaagatagagattcagaaacacgagttgatctgaaatttatgtacctggatcctccaagagatcatcacaccttagagattcagcagcaagccctgctaagagagcagcagaagaggctgaacagaataaaaatgcaggaaggtgccaaagttgacttagatgccatcccaagtgctaaagtacgagagcaaagaatgcccagagatgacactagtgatttcttgaaaaactcattattggaatctgatagtgcttttattggggcttacggtgagacatatcctgccattgaagatgacgtcctccctccaccatcacagttgccctctgcacgggagcgcaggaggaacaaatggaaaggactagacattgatagcagtcgtcctaatgtagcaccagatggtctctctctaaaatctatatccagtgtaaatgttgatgagcttagagtgagaaatgaggaacgaatgcgaagactgaatgaatttcacaataaacctattaatacagatgatgagagttcactggttgaccctgatgacatcatgaaacacataggggatgacggatcaaactctgtagcaactgagccctggctccgccctggcacttcagaaacgctgaaacgtttcatggcagagcagctgaaccaggagcagcagcagattcctggaaaaccaggcactttcacttggcagggcctgtcgactgcacatggttaaaataaacctgtactggacccagtagtgccttttaaggtgaaaggaatggtaaatctgtacctttaatatgtcctacttttggcccctacctgaaagttactttttttccatcatctgtatataaaattatttttatcatgatgtatattatgtacataaataaaaggccatgattattgatttatataatagaattgtatagattatttttgcacagttttgtcataaattagggtggtaatgaactggattgaactactatatgtgcattatattgaattctgcttgtcattaagataaggtgaataagtgtcttaaacgtcctgtaaaaccggactcccctttgttacatgcacattttccattgttacctcgatgcaaaagaattcatttagtaggtacatctattgtagctgtgattattccagtttctgtgtgatgcaatcaaatgtcctattaattaattattatttcatgtcatttgtagctactgatacagcagaaatgaagggaactgtaattacttgtatttttgtaagccatacgttaaatgtttgttacatcatctttctgcttctatttttatgccaatgaaggcatttgtcttgttactaattacatgatgtaactacttcttgatataaataaatttttattttaattact

SEQ ID NO: 270927 - DNA, 3771 bp, Artificial Sequence
  derived and/or modified sequence
atgctgttccccctgcaggtggccgccgtgaccagcagcgtgagagacgaccccctggagcactgcgtgagccccagaaccagagccagaagccccgagatctgcaagatggccgacaacctggacgagttcatcgaggagcagaaggccagactggccgaggacaaggccgagctggagagcgaccccccctacatggagatgaagggcaagctgagcgccaagctgagcgagaacagcaagatcctgatcagcatggccaaggagaacatcccccccaacagccagcagaccagaggcagcctgggcatcgactacggcctgagcctgcccctgggcgaggactacgagagaaagaagcacaagctgaaggaggagctgagacaggactacagaagatacctgacccagaaggtgttcagcggcaccagcaagaagaacttcctgagcaccagcgagaccgaccccagcaccctgggcgtgagcctgcccatcggcgagagactgagcgccaaggagagactgaagctggagagaaacaaggagtacaaccagttcctgagaggcaaggaggagagcagcgagaagttcagacaggtggagaagagcaccgagcccaagagccagagaaacaagaagcccatcggccaggtgaagcccgacctgaccagccagatccagaccagctgcgagaacagcgagggccccagaaaggacgtgctgacccccagcgaggcctacgaggagctgctgaaccagagaagactggaggaggacagatacagacagctggacgacgagatcgagctgagaaacagaagaatcatcaagaaggccaacgaggaggtgggcatcagcaacctgaagcaccagagattcgccagcaaggccggcatccccgacagaagattccacagattcaacgaggacagagtgttcgacagaagataccacagacccgaccaggaccccgaggtgagcgaggagatggacgagagattcagatacgagagcgacttcgacagaagactgagcagagtgtacaccaacgacagaatgcacagaaacaagagaggcaacatgccccccatggagcacgacggcgacgtgatcgagcagagcaacatcagaatcagcagcgccgagaacaagagcgcccccgacaacgagaccagcaagagcgccaaccaggacacctgcagccccttcgccggcatgctgttcggcggcgaggacagagagctgatccagagaagaaaggagaagtacagactggagctgctggagcagatggccgagcagcagagaaacaagagaagagagaaggacctggagctgagagtggccgccagcggcgcccaggaccccgagaagagccccgacagactgaagcagttcagcgtggcccccagacacttcgaggagatgatcccccccgagagacccagaatcgccttccagacccccctgccccccctgagcgcccccagcgtgccccccatccccagcgtgcaccccgtgcccagccagaacgaggacctgagaagcggcctgagcagcgccctgggcgagatggtgagccccagaatcgcccccctgccccccccccccctgctgccccccctggccaccaactacagaaccccctacgacgacgcctactacttctacggcagcagaaacaccttcgaccccagcctggcctactacggcagcggcatgatgggcgtgcagcccgccgcctacgtgagcgcccccgtgacccaccagctggcccagcccgtggtgaacaccgtgggccagaacgagctgaagatcaccagcgaccaggtgatcaacagcggcctgatcttcgaggacaagcccaagcccagcaagcagagcctgcagagctaccaggaggccctgcagcagcagatcagagagagagaggagagaagaaagaaggagagagaggagaaggaggagtacgaggccaagctggaggccgagatgagaacctacaacccctggggcaagggcggcggcggcgcccccctgagagacgccaagggcaacctgatcaccgacctgaacagaatgcacagacagaacatcgacgcctaccacaaccccgacgccagaacctacgaggacaagagagccgtggtgagcctggaccccaacctggccaccagcaacgccgagaacctggaggacgccgccaacaagagcagcggccacatgcagacccagagcagccccttcgccagaggcaacgtgttcggcgagccccccaccgagctgcagatcaagcagcaggagctgtacaagaacttcctgagattccagatcgaggagaagaagcagagagaggaggccgagagagagagactgagaatcgccgaggagaaggaggagagaagactggccgagcagagagccagaatccagcaggagtacgaggaggagcaggagaagaagagagagaaggaggaggagcagagactgaagaacgaggagcacatcagactggccgaggagagacagaaggaggccgagagaaagaagaaggaggaggaggagaagtacaacctgcagctgcagcactactgcgagagagacaacctgatcggcgaggagaccaagcacatgagacagcccagccccatcgtgcccgccctgcagaacaagatcgccagcaagctgcagagaccccccagcgtggacagcatcatcagaagcttcatccacgagagcagcatgagcagagcccagagcccccccgtgcccgccagaaagaaccagctgagagccgaggaggagaagaagaacgtgatcatggagctgagcgagatgagaaagcagctgagaagcgaggagagaagactgcaggagagactgctgcacatggacagcgacgacgagatccccatcagaaagaaggagagaaaccccatggacatcttcgacatggccagacacagactgcaggcccccgtgagaagacagagccccaagggcctggacgccgccaccttccagaacgtgcacgacttcaacgagctgaaggacagagacagcgagaccagagtggacctgaagttcatgtacctggacccccccagagaccaccacaccctggagatccagcagcaggccctgctgagagagcagcagaagagactgaacagaatcaagatgcaggagggcgccaaggtggacctggacgccatccccagcgccaaggtgagagagcagagaatgcccagagacgacaccagcgacttcctgaagaacagcctgctggagagcgacagcgccttcatcggcgcctacggcgagacctaccccgccatcgaggacgacgtgctgcccccccccagccagctgcccagcgccagagagagaagaagaaacaagtggaagggcctggacatcgacagcagcagacccaacgtggcccccgacggcctgagcctgaagagcatcagcagcgtgaacgtggacgagctgagagtgagaaacgaggagagaatgagaagactgaacgagttccacaacaagcccatcaacaccgacgacgagagcagcctggtggaccccgacgacatcatgaagcacatcggcgacgacggcagcaacagcgtggccaccgagccctggctgagacccggcaccagcgagaccctgaagagattcatggccgagcagctgaaccaggagcagcagcagatccccggcaagcccggcaccttcacctggcagggcctgagcaccgcccacggctag

SEQ ID NO: 270928 - protein, 276 aa, Artificial Sequence
  derived and/or modified sequence
MYASWTKACRGLEELINLTRLNVSYNHIDDLSGLIPLHGIKHKLRYIDLHSNRIDSIHHLLQCMVGLHFLTNLILEKDGDDNPVCRLPGYRAVILQTLPQLRILDCKNIFGEPVNLTEINSSQLQCLEGLLDNLVSSDSPLNISEDEIIDRMPVITAPIDELVPLEQFASTPSDAVLTSFMSVCQSSEPEKNNHENDLQNEIKLQKLDDQILQLLNETSNSIDNVLEKDPRPKRDTDITSESDYGNSRKNGETKKAAAGSTDKTDPRGGTQSFSCR

SEQ ID NO: 270929 - DNA, 831 bp, Artificial Sequence
  derived and/or modified sequence
atgtacgccagctggaccaaggcctgcagaggcctggaggagctgatcaacctgaccagactgaacgtgagctacaaccacatcgacgacctgagcggcctgatccccctgcacggcatcaagcacaagctgagatacatcgacctgcacagcaacagaatcgacagcatccaccacctgctgcagtgcatggtgggcctgcacttcctgaccaacctgatcctggagaaggacggcgacgacaaccccgtgtgcagactgcccggctacagagccgtgatcctgcagaccctgccccagctgagaatcctggactgcaagaacatcttcggcgagcccgtgaacctgaccgagatcaacagcagccagctgcagtgcctggagggcctgctggacaacctggtgagcagcgacagccccctgaacatcagcgaggacgagatcatcgacagaatgcccgtgatcaccgcccccatcgacgagctggtgcccctggagcagttcgccagcacccccagcgacgccgtgctgaccagcttcatgagcgtgtgccagagcagcgagcccgagaagaacaaccacgagaacgacctgcagaacgagatcaagctgcagaagctggacgaccagatcctgcagctgctgaacgagaccagcaacagcatcgacaacgtgctggagaaggaccccagacccaagagagacaccgacatcaccagcgagagcgactacggcaacagcagaaagaacggcgagaccaagaaggccgccgccggcagcaccgacaagaccgaccccagaggcggcacccagagcttcagctgcagatag

SEQ ID NO: 270930 - DNA, 831 bp, Artificial Sequence
  derived and/or modified sequence
atgtatgcgagctggacgaaggcatgccggggcctcgaagaacttatcaatttaacccggctgaacgtgtcatacaaccacatagacgacctttccgggttaatccccttacacggtattaaacacaagctgagatatattgacttgcactctaaccggatagactcaatccaccacctcctacagtgcatggtgggtttgcacttcctcaccaacttgatcctggagaaggacggcgatgacaatccagtatgtaggctccctggttacagagctgttattctgcagaccctgcctcagctgaggatcctggattgcaaaaatattttcggcgagccagtgaatctgactgagataaattcgagtcaactgcagtgcttggagggcttattggacaatctcgtgagcagcgactctcctctcaacataagcgaagacgaaattattgaccgcatgcccgtcatcaccgctcccatcgacgaactggtccccttggaacagttcgcgagcacaccctctgacgccgtgctaacaagtttcatgagcgtctgccagagctcagagccagaaaagaataaccacgagaacgatctccagaatgagatcaaacttcagaagttggatgatcaaatcctgcagttgctcaacgagacaagcaactcgattgacaatgttctggaaaaagatccacggccaaagcgggacaccgatatcacatctgagtcggattatgggaactccaggaaaaatggagagaccaagaaggctgcagccggttccactgacaagacagatccacggggtggtactcaaagtttcagttgcaggtag

SEQ ID NO: 270931 - DNA, 831 bp, Artificial Sequence
  derived and/or modified sequence
atgtatgcctcctggaccaaggcctgccggggcctggaggagctgatcaacctgacccggctgaatgtgtcctacaaccacattgatgacctgagcggcctcatccccctgcacggcatcaagcacaagctgcgctacatcgacctgcacagcaacagaattgacagcatccaccacctgctgcagtgcatggtgggcctgcacttcctgaccaacctgatcctggagaaggatggagatgacaaccctgtgtgccgcctgcccggctaccgggccgtcatcctgcagaccctgccccagctgcgcatcctggactgcaagaacatctttggagagcctgtgaacctgacagagatcaacagcagccagctgcagtgcctggagggcctgctggacaacctggtgtccagtgacagccccctgaacatcagtgaagatgagatcatcgacaggatgcctgtgatcacagcccccattgatgagctggtgcccctggagcagtttgccagcacccccagtgatgctgtgctgaccagcttcatgtctgtgtgccagagcagcgagcctgagaagaacaaccatgaaaatgacctgcagaatgagatcaagctgcagaagctggatgaccagatcctgcagctgctgaatgagaccagcaacagcattgacaacgtgctggagaaggacccccggcccaagagggacacagacatcaccagcgagagtgactatggcaacagcaggaagaatggagagaccaagaaggctgctgctggcagcacagacaagacagacccccggggcggcacccagagcttcagctgcaggtag

SEQ ID NO: 270932 - DNA, 831 bp, Artificial Sequence
  derived and/or modified sequence
atgtacgccagctggaccaaggcctgccggggcctggaggagctgattaacctgacacgcttgaatgtcagctacaaccacattgatgacctcagcgggttaatcccattgcatggcattaaacacaagctgcggtacatagatctgcactccaataggattgatagcatccaccatttgcttcagtgcatggttggacttcacttcctcacgaacctgatcctcgaaaaggacggagatgacaatcctgtatgccgtctgccgggatatcgagctgtaattttacaaactttaccccaacttcggatccttgactgcaaaaacatctttggtgaacccgtgaacctcaccgagataaacagttcacaactccagtgtttagaaggcctactagataatctagtgtctagtgattccccgttaaatattagtgaagacgagatcattgaccgtatgccagtgatcactgcgcctatcgacgagcttgttccactcgagcagttcgcctcaacaccaagtgatgcggtcttgacaagcttcatgagtgtatgccagtcttctgagccagaaaaaaacaaccacgagaatgaccttcagaacgagatcaaactacagaagctggatgaccagatcctccagctcctgaatgagaccagcaacagcatagataacgtgctagaaaaggaccctcgacccaaaagagatacagacatcacttctgagtcagactatggtaactctcgcaaaaatggcgaaacgaaaaaggcagccgcggggtctacagataagaccgatccacgtggtggcactcagtctttctcttgcaggtag

SEQ ID NO: 270933 - DNA, 831 bp, Artificial Sequence
  derived and/or modified sequence
atgtacgcaagctggacgaaggcgtgccgaggtctggaggaactgattaacctaacacgcctgaatgtaagctacaaccatatcgacgatctcagtggacttatccctctgcacgggataaaacacaagttacgctatattgatttgcattcaaatcggattgactccatccaccatttgcttcagtgcatggtggggctgcactttctgaccaatctgattcttgaaaaagatggcgatgataatcccgtgtgtcgcttacccggatatagggccgtgattctgcaaacactgccgcagcttaggatcctggactgcaagaacatattcggcgagccagttaacctaactgagataaactcttctcagctccagtgtctggaaggattattggacaacctcgtctcttctgatagcccattgaacatctctgaggacgagatcattgatcggatgccggtgataaccgcacccatagacgaattggtcccattggagcagtttgcaagcaccccttcagatgcagtcttaacgtcttttatgtcggtgtgtcagtccagcgagcccgaaaagaataaccacgagaatgacctgcagaacgagatcaagctgcaaaagctggatgaccaaattttgcagctcctgaacgaaacatctaattccatcgataatgtgctcgaaaaggacccccgaccaaagcgagataccgatatcacatcggagtctgactatgggaactcacgtaagaacggggagactaaaaaagccgctgccggttctacagataagaccgatcccagaggaggcacacagtccttttcttgtcgttag

SEQ ID NO: 270934 - DNA, 3107 bp, Artificial Sequence
  derived and/or modified sequence
aaaaacgaaagaagcccacagttgggacgaggattccagttttgcgtcaccgtcaaggcgggaaagttcccggctgtcggttggagggtgggtcctcgccccgccccgccccctcgggccgcccttccgcgcttccgggaggcttgtcccaagctcacggacccctcgctgggtgccggttaagaccccgctccccgtcgccagtgctatggaggcggcggcggcggtggtggcggcagaggcggaagtggaaaacgaagacggcgacagcagctgcggggatgtatgcttcatggacaaaggcttgcagaggacttgaagaactaattaatctgactagactaaatgtatcttataaccacatagatgatcttagtggattgattccccttcatggaattaagcataaacttagatatattgatctacatagtaatcgtatagatagtatccatcacttacttcagtgtatggtaggattgcacttcctgaccaatcttattttggagaaagatggagacgataatcctgtctgtcgactgccagggtacagagcagttattctccagactttgccacagcttagaatcctagattgcaagaacatatttggtgaaccagtaaatttgacagaaataaattcatcacagctgcagtgcctagaaggtcttttggataatttagtttcttctgattctcccctaaatataagtgaagatgagatcattgatagaatgccagtgataacagcacctatcgatgagttagttcccttggaacagtttgcaagtacaccaagtgatgctgtgttgacgtcttttatgtctgtgtgtcaatcttctgagccagagaaaaataatcatgaaaacgatttgcagaatgagataaaacttcagaaattagatgaccaaattctacaacttctaaatgaaacttctaattcaatagataacgttcttgagaaagaccccagaccaaaaagagacacagatataacttctgaaagtgactatggaaacagtagaaaaaatggagagacaaaaaaggcagcagcaggcagcacagataagactgatccaagaggtggaactcaaagcttcagctgccgatagagaaatatacttacttagaacttcccttcatcgagaaagagaacaagcgcaacaacttcatcaacttcttgcattgaaagaacaggaacacaggaaggaacttgaaacaagggagttttttactgatgctgacttccaggatgccttagctaaagaaatagccaaagaagagaaaaagcatgagcaaatgataaaagaataccaagagaaaattgacgtgttaagccagcagtatatggatttagaaaatgaattccgtattgctttaactgttgaagccagaagatttcaagatgttaaagatggttttgaaaatgttgcaactgagttagcaaagagcaaacatgctcttatttgggctcaacgaaaagaaaatgagtcttcctctttaattaaagatctgacctgtatggtaaaggaacaaaaaacaaaactggcagaagtttctaaattgaaacaagaaacagcagcaaatttacagaatcaaatcaacacccttgaaattttaattgaagatgacaagcagaagagtattcaaatagaacttctcaagcacgaaaaagtccagcttatttctgagctagcagccaaggaatcactaatatttggtttaaggacagaaagaaaagtatggggacatgagctggcacaacaaggatcttctctagcccaaaatcgtggaaaattggaggctcaaattgagagtttatctagagagaatgaatgtctgcgaaagacaaatgaaagtgatagtgatgcattaagaataaagtgcaaaatcatagacgaccaaactgaaactattagaaaattaaaagattgtttacaagaaaaagatgaacacatcaaaagattacaagaaaagatcacagaaatagaaaaatgcactcaagaacaacttgatgaaaaatcttcacaactggatgaggtacttgagaagttggaaaggcacaatgaaagaaaagaaaaactaaaacaacagttgaaaggaaaggaagtagaacttgaagaaatcagaaaagcttacagtacactgaatcggaagtggcatgataaaggagaacttctatgtcatcttgaaacacaagtaaaagaagtgaaagaaaaatttgaaaacaaggaaaagaaacttaaagcggaaagagacaaaagtattgaactacaaaagaatgcaatggaaaaacttcatagtatggatgatgcctttaaaagacaagttgatgcaattgttgaagctcatcaagctgaaatagcacagctggccaatgaaaagcagaagtgtattgattctgcaaatttaaaggtccatcaaattgaaaaagaaatgcgtgaacttttggaagaaacatgcaagaacaaaaaaacaatggaagcaaaaattaagcaacttgcttttgctttaaatgaaattcagcaagatatgtgatggttctgagaatgaatttaattgaaatagaccagcagacctattgtaaaaatgattaaatattgtaatagtagtaactgctatgactttgaaatgtctctttctatacatttcattatgaatatatttttaaagacttttgatcaagtatttattaattgtataggttttttataataaattgttgacaattttgtctattagaaaaaactatcataactagacttacaatatttttcttgtttctgtactatacattgtttggtaattacacatttgcctacaaatttgtgaatgaaaagattagtattttcaccatatgaggtaaaacattttaatcattgttatcttattgtgatgatgaagaactaattatatttgttatttaattgatgtagctcaattcttttaaagtacttatgtagccaaaaagcatttgaaatctgtatgataaaagatgtggcattcttaagaaagtatatgtagccatctccacatcactcattatgaccccttcttttataatgcttatatcttttcattaaagattacatttaaggttttataaa

SEQ ID NO: 270935 - protein, 612 aa, Artificial Sequence
  derived and/or modified sequence
MIEQDDFDINTRLHTIVRGEDEAAMVESVGLALVKLPDVLNRLKPDIMIVHGDRFDALALATSAALMNIRILHIEGGEVSGTIDDSIRHAITKLAHYHVCCTRSAEQHLISMCEDHDRILLAGCPSYDKLLSAKNKDYMSIIRMWLGSKEMVRVMRKKGIEHHPNFRAVKHVPFDQFIQLVAHAGCMIGNSSCGVREVGAFGTPVINLGTRQIGRETGENVLHVRDADTQDKILQALHLQFGKQYPCSKIYGDGNAVPRILKFLKSIDLQEPLQKKFCFPPVKENISQDIDHILETLSALAVDLGGTNLRVAIVSMKGEIVKKYTQFNPKTYEERINLILQMCVEAAAEAVKLNCRILGVGISTGGRVNPREGIVLHSTKLIQEWNSVDLRTPLSDTLHLPVWVDNDGNCAALAERKFGQGKGLENFVTLITGTGIGGGIIHQHELIHGSSFCAAELGHLVVSLDGPDCSCGSHGCIEAYASGMALQREAKKLHDEDLLLVEGMSVPKDEAVGALHLIQAAKLGNAKAQSILRTAGTALGLGVVNILHTMNPSLVILSGVLASHYIHIVKDVIRQQALSSVQDVDVVVSDLVDPALLGAASMVLDYTTRRIY

SEQ ID NO: 270936 - DNA, 1839 bp, Artificial Sequence
  derived and/or modified sequence
atgatcgagcaagacgatttcgatattaacacaagactgcacaccattgtaaggggtgaagacgaggctgcaatggtggagtccgtgggtttggccctggtgaagctccccgatgttctgaacaggctgaagccagacatcatgatagtccatggggatcgttttgatgcacttgccttggccacgtctgccgctcttatgaatattaggatcctccacatagaaggcggcgaggtcagcggaaccatcgacgatagtatacggcatgcaattactaagctcgctcactaccatgtttgttgcacacgttctgcggagcagcacctcatttccatgtgtgaggaccacgaccgtatccttctcgcaggatgtccgagctacgataaattactgtctgccaagaacaaagattatatgtcaatcattcggatgtggctgggctccaaggagatggtcagggtgatgagaaaaaaagggattgaacatcaccccaattttagagctgtgaagcatgttccttttgaccagtttatacagttggtggctcacgccgggtgcatgattggaaactccagctgcggcgtccgagaggtaggagcctttggaacacctgtcataaacctgggaacacgccagatcgggcgagagaccggcgaaaatgtgctccatgtgcgagatgcagatacacaagataagatattgcaggccctacacctccagtttgggaagcaatatccatgttcaaagatttatggcgacgggaacgccgttccacgcattctgaaatttcttaagtccatagacttgcaagagccactgcagaagaagttttgcttccctcccgttaaagaaaacatttcccaggatatcgaccatatactggagactctgtccgctctcgccgtggatttgggaggaactaatttgagagttgcaatcgtgtccatgaagggtgagatcgtcaaaaaatatacccagttcaatccgaagacatacgaagaacgcatcaatctaatacttcagatgtgcgttgaggccgctgctgaggcggtgaagttaaattgtaggattctgggtgttgggattagcacgggagggagagtcaatccaagggagggcatcgtgttacattcgacaaagcttatacaggaatggaattctgtcgacctgcgcacaccattgtcggataccctccatctgccagtgtgggtggacaacgacggcaactgcgcagctctcgcagaacgaaagttcgggcagggaaagggcctcgaaaactttgtgacattgatcactggcacaggaatcggtggaggcatcatccatcaacacgaacttatccatggtagcagcttctgcgccgccgagctgggtcacctggtggtatctctggacggccctgactgttcctgcggcagtcacggctgtatcgaggcctatgcttctggcatggccctgcagagagaggccaaaaagttgcacgatgaggacttgctgctagttgaggggatgtccgttccgaaagatgaggccgtgggtgccctgcacctcatccaggccgctaaactgggcaacgccaaggctcagtccatcctgagaacagctgggaccgctctggggttgggcgtggtgaacatattgcatactatgaaccctagtttggttattctttccggggtcctcgcgagccactacatacacatcgtgaaagacgtgattaggcagcaagctctgagtagtgtacaagatgtagacgtggtggtgagcgatcttgtggacccagctcttctgggggcggcatcaatggttctggattataccacccgtaggatatattag

SEQ ID NO: 270937 - DNA, 2190 bp, Artificial Sequence
  derived and/or modified sequence
tacccgcgcgcccgagcgcggaaaccgaggggcaggctcgcgctctgcctgcttcgtggcgcttggttcgtccctcgcccgaggagcgcggtggcggcgtgggagggagcctctgacggcgtctgaaatacatatcgaatgattgaacaagatgactttgacattaacaccaggctacacacaattgtgaggggagaagatgaggcagccatggtggagtcagtaggcctggccctagtgaagctgccagatgtccttaatcgcctgaagcctgatatcatgattgttcatggagacaggtttgatgccctggctctggccacatctgctgccttgatgaacatccgaatccttcacattgaaggtggggaagtcagtgggaccattgatgactctatcagacatgccataacaaaactggctcattatcatgtgtgctgcacccgcagtgcagagcagcacctgatatccatgtgtgaggaccatgatcgcatccttttggcaggctgcccttcctatgacaaacttctctcagccaagaacaaagactacatgagcatcattcgcatgtggctagggagcaaagagatggttcgagtgatgcggaagaagggcattgagcatcatcccaactttcgtgcagttaaacacgtcccatttgaccagtttatacagttggttgcccatgctggctgtatgattgggaacagcagctgtggggttcgagaagttggagcttttggaacacctgtgatcaacctgggaacacgtcagattggaagagaaacaggggagaatgttcttcatgtccgggatgctgacacccaagacaaaatattgcaagcactgcaccttcagtttggtaaacagtacccttgttcaaagatatatggggatggaaatgctgttccaaggattttgaagtttctcaaatctatcgatcttcaagagccactgcaaaagaaattctgctttcctcctgtgaaggagaatatctctcaagatattgaccatattcttgaaactctaagtgccttggccgttgatcttggcgggacgaacctccgagttgcaatagtcagcatgaagggtgaaatagttaagaagtatactcagttcaatcctaaaacctatgaagagaggattaatttaatcctacagatgtgtgtggaagctgcagcagaagctgtaaaactgaactgcagaattttgggagtaggcatttccacaggtggccgtgtaaatcctcgggaaggaattgtgctgcattcaaccaaactgatccaagagtggaactctgtggaccttaggacccccctttctgacactttgcatctccctgtgtgggtagacaatgatggcaactgtgctgccctggcggaaaggaaatttggccaaggaaagggactggaaaactttgttacacttatcacaggcacaggaatcggtggtggaattatccatcagcatgaattgatccacggaagctccttctgtgctgcagaactgggccaccttgttgtgtctctggatgggcctgattgttcctgtggaagccatgggtgcattgaagcatacgcctctggaatggccttgcagagggaggcaaaaaagctccatgatgaggacctgctcttggtggaagggatgtcagtgccaaaagatgaggctgtgggtgcgctccatctcatccaagctgcgaaacttggcaatgcgaaggcccagagcatcctaagaacagctggaacagctttgggtcttggggttgtgaacatcctccataccatgaatccctcccttgtgatcctctccggagtcctggccagtcactatatccacattgtcaaagacgtcattcgccagcaggccttgtcctccgtgcaggacgtggatgtggtggtttcggatttggttgaccccgccctgctgggtgctgccagcatggttctggactacacaacacgcaggatctactagacctccaggaacagacatggaccttctctccagagctcctgagtggaatcaagttcttgtctttaggatgaccgtttcttaacaatcaaatctggtattgaactgcaggtgactttggcagagaaatgttttcacttttggtctcctcttccagagtcacctttccccactcctatttttgtagatgctattctttctgatgtcttcttacta

SEQ ID NO: 270938 - DNA, 1839 bp, Artificial Sequence
  derived and/or modified sequence
atgattgagcaggatgactttgacatcaacacccggctgcacaccatcgtgcggggggaggatgaagctgccatggtggagagcgtgggcctggccctggtgaagctgcctgatgtgctgaaccggctgaagccagacatcatgattgtgcatggagacagatttgatgccctggccctggccaccagcgctgccctgatgaacatccgcatcctgcacatcgagggcggggaggtgtctggcaccattgatgacagcatcagacatgccatcaccaagctggcccactaccacgtgtgctgcaccaggtctgctgagcagcacctgatctccatgtgtgaggaccatgaccgcatcctgctggccggctgccccagctatgacaagctgctgagcgccaagaacaaggactacatgagcatcatccgcatgtggctgggcagcaaggagatggtgcgggtgatgaggaagaagggcatcgagcaccaccccaacttccgggctgtgaagcacgtgccctttgaccagttcatccagctggtggcccacgccggctgcatgattggcaacagcagctgtggggtgcgggaggtgggcgccttcggcacccctgtgatcaacctgggcacccggcagatcggccgggagactggagaaaatgtgctgcacgtgagagatgctgacacccaggacaagatcctgcaggccctgcacctgcagtttgggaagcagtacccctgcagcaagatctatggagatggaaatgctgtgccccgcatcctgaagttcctgaagagcattgacctgcaggagcccctgcagaagaagttctgcttcccccctgtgaaggagaacatcagccaggacatcgaccacatcctggagaccctgagcgccctggccgtggacctgggcggcaccaacctgcgggtggccatcgtgtccatgaagggggagatcgtgaagaagtacacccagttcaaccccaagacctatgaggagcgcatcaacctgatcctgcagatgtgtgtggaggccgctgctgaggccgtgaagctgaactgccgcatcctgggcgtgggcatcagcactggaggccgggtgaacccccgggagggcatcgtgctgcacagcaccaagctgatccaggagtggaacagcgtggacctgcggacccccctgagtgacaccctgcacctgcctgtgtgggtggacaatgatggcaactgtgccgccctggccgagaggaagtttggccagggcaagggcctggagaactttgtgaccctcatcaccggcaccggcatcggcggcggcatcatccaccagcacgagctgatccacggcagcagcttctgtgccgctgagctgggccacctggtggtgtccctggatggccctgactgcagctgtggcagccacggctgcatcgaggcctatgccagcggcatggccctgcagcgggaggccaagaagctgcatgatgaggacctgctgctggtggagggcatgtctgtgcccaaggatgaagctgtgggcgccctgcacctgatccaggccgccaagctgggcaatgccaaggcccagagcatcctgaggacagctggaacagccctgggcctgggcgtggtgaacatcctgcacaccatgaaccccagcctggtgatcctgagcggcgtgctggccagccactacatccacatcgtgaaggatgtgatccggcagcaggccctgagctctgtgcaggatgtggatgtggtggtgtctgacctggtggaccctgccctgctgggcgccgcctccatggtgctggactacaccacccggcgcatctactag

SEQ ID NO: 270939 - DNA, 1839 bp, Artificial Sequence
  derived and/or modified sequence
atgatcgagcaggacgacttcgacatcaacacccggctgcacaccatcgtgcgcggcgaggatgaagctgccatggtggagtctgtggggctggccctggtcaaactcccggacgtcctcaatagattaaaacccgatattatgatcgtgcacggggatcgatttgacgcattggcattggcaacttccgccgccctgatgaatatccgaatcctccacatagaagggggcgaagtaagtgggactatagacgactccatccgacatgctatcacaaagctcgcacactaccacgtctgctgtacaagaagcgcggagcaacacctgatcagcatgtgtgaggatcacgacaggatcctgttagcgggttgtccctcgtacgataaactgttatccgcaaagaataaggactatatgagtattatcagaatgtggctcggaagtaaagaaatggtacgggtaatgcgaaagaagggcatcgagcatcacccaaattttcgcgccgttaaacacgtcccatttgaccaatttatccagctcgtggcgcatgccggttgcatgattggtaacagttcttgcggtgttcgggaggtgggtgcgttcggaacccccgtcattaacctcgggaccaggcagataggcagggagaccggcgaaaacgttctgcacgtacgagacgctgacacacaggataagatactgcaggccctacacctgcagtttggcaaacagtacccttgctctaaaatctatggagatggcaacgccgttccgcggatccttaagttccttaagagcatcgatctccaggaacctctccagaagaaattttgtttcccccctgtgaaggagaacatttctcaggacatcgatcatatcctggagacactgtctgccttggcggtagatctcggggggactaacctacgggttgccatcgtcagcatgaaaggggagatcgtgaaaaagtacacgcagtttaatccaaaaacatacgaggagcgaattaacctgatcctacagatgtgtgtggaggctgcagctgaggctgtgaagctgaattgccgaattttaggggtgggcatttctacgggtggtagggtgaatcctcgggaaggtatagtcctccacagtacaaaactgatacaggaatggaattccgtggacttgcgcacccccctctctgatacactacatctgcctgtgtgggtcgacaacgacggcaattgtgcagcgctggctgaacggaaatttggacagggcaaggggctggagaattttgttaccctgatcacaggcaccgggatcggcggcggcatcatccaccagcatgagttgatccatggctctagcttttgcgccgcagagttaggacacctggtggtgtcactggatggaccagattgtagctgcggcagccatggatgcattgaagcatacgcgagtgggatggcccttcagcgcgaggcaaagaagctgcatgacgaggaccttctcctggtggagggcatgagtgtgcctaaggacgaggcagtcggcgccctgcacctgatccaggcagctaagctggggaatgctaaagcccaatctatcctgcgaacagctgggacagccttgggattaggcgtcgtgaatatcctgcataccatgaacccctcattggttattttatcaggtgtgttggcttctcactacatccacattgtgaaggatgtcattaggcagcaagctttgtccagcgtgcaggacgtcgacgtggtggtcagcgatctcgtcgaccctgccttgctgggggccgcctccatggtcctcgattatacaacacgccggatttattag

SEQ ID NO: 270940 - DNA, 1839 bp, Artificial Sequence
  derived and/or modified sequence
atgattgagcaagacgactttgacatcaacacccgcctgcataccatcgtccgaggagaggacgaggctgccatggtagaatcagtggggctggccctggtgaaactcccggatgtcttgaataggctgaaacccgatatcatgatcgtgcatggggaccgcttcgacgccctggctctggcaacatcagctgcccttatgaatattagaattctgcacatcgagggaggcgaggtgtccggcactatcgatgacagcatcaggcacgccatcacaaaactagctcactaccacgtctgctgtaccagatctgccgaacaacatctgatctcaatgtgtgaggatcatgaccggattctactcgcgggatgccccagttacgacaaactgttaagtgcgaaaaataaggattacatgtcaattatcagaatgtggctgggttctaaggagatggtgagagtcatgcgcaagaagggcatcgaacatcatccgaatttccgggctgttaagcacgtccccttcgatcaatttatccagctcgtggcccatgccggatgcatgatagggaactctagctgtggcgtgagagaggtgggcgcatttggtacgcccgtaataaacctcggaacaaggcagatcgggagggagaccggcgaaaacgtgctccacgtcagggatgccgatacacaggacaaaatcctccaggcacttcacctacaatttggcaaacagtacccctgcagcaaaatttacggagatggtaatgccgttccgcgtatactaaagtttctgaaaagcatagatcttcaagaacctcttcagaaaaagttctgtttcccccctgtgaaggaaaacattagtcaggacatcgaccacatcctggaaacactgagcgccttagcagttgatcttggcggtactaacctaagggtggcaatcgtgagcatgaaaggtgagatcgttaaaaaatatactcaattcaaccctaaaacatatgaagagaggataaacctgatccttcagatgtgcgtggaggccgcagctgaggctgttaagctcaattgtcgcatactcggggtgggcatttccaccggcggaagagtgaatccgagggaaggtatagttctgcactccactaagctgatacaggagtggaatagtgtcgacttaagaacgccattgagcgacactctccacctaccggtgtgggtggacaatgacggaaactgcgccgcactggcggagcggaagttcggacaagggaaaggcctggaaaatttcgtcactctcatcacggggacgggcattgggggagggatcatacatcagcatgagttaatacacggaagctctttctgtgccgctgaactgggtcatctcgtggtatcactggacgggccagactgctcttgcgggagccatgggtgcatcgaagcttatgccagtggcatggccctgcagagggaggccaagaagttgcatgacgaggacctcctgctagtggaagggatgagcgtgcctaaagacgaagccgttggcgctctccatttaattcaagctgccaagctgggaaatgccaaggctcaatccatcctgcgcaccgctggcactgctctgggattgggtgtggtaaacattctgcacaccatgaacccttccctggtgatactctcaggtgtgctggccagccattacattcatattgtgaaagacgtgatacgccagcaagccctgtcctccgtgcaagatgtcgatgtcgtcgtctccgatcttgtggaccccgcattactgggggctgccagcatggtgcttgattacactactcgtaggatctactag

SEQ ID NO: 270941 - DNA, 1839 bp, Artificial Sequence
  derived and/or modified sequence
atgatcgagcaggacgacttcgacatcaacaccagactgcacaccatcgtgagaggcgaggacgaggccgccatggtggagagcgtgggcctggccctggtgaagctgcccgacgtgctgaacagactgaagcccgacatcatgatcgtgcacggcgacagattcgacgccctggccctggccaccagcgccgccctgatgaacatcagaatcctgcacatcgagggcggcgaggtgagcggcaccatcgacgacagcatcagacacgccatcaccaagctggcccactaccacgtgtgctgcaccagaagcgccgagcagcacctgatcagcatgtgcgaggaccacgacagaatcctgctggccggctgccccagctacgacaagctgctgagcgccaagaacaaggactacatgagcatcatcagaatgtggctgggcagcaaggagatggtgagagtgatgagaaagaagggcatcgagcaccaccccaacttcagagccgtgaagcacgtgcccttcgaccagttcatccagctggtggcccacgccggctgcatgatcggcaacagcagctgcggcgtgagagaggtgggcgccttcggcacccccgtgatcaacctgggcaccagacagatcggcagagagaccggcgagaacgtgctgcacgtgagagacgccgacacccaggacaagatcctgcaggccctgcacctgcagttcggcaagcagtacccctgcagcaagatctacggcgacggcaacgccgtgcccagaatcctgaagttcctgaagagcatcgacctgcaggagcccctgcagaagaagttctgcttcccccccgtgaaggagaacatcagccaggacatcgaccacatcctggagaccctgagcgccctggccgtggacctgggcggcaccaacctgagagtggccatcgtgagcatgaagggcgagatcgtgaagaagtacacccagttcaaccccaagacctacgaggagagaatcaacctgatcctgcagatgtgcgtggaggccgccgccgaggccgtgaagctgaactgcagaatcctgggcgtgggcatcagcaccggcggcagagtgaaccccagagagggcatcgtgctgcacagcaccaagctgatccaggagtggaacagcgtggacctgagaacccccctgagcgacaccctgcacctgcccgtgtgggtggacaacgacggcaactgcgccgccctggccgagagaaagttcggccagggcaagggcctggagaacttcgtgaccctgatcaccggcaccggcatcggcggcggcatcatccaccagcacgagctgatccacggcagcagcttctgcgccgccgagctgggccacctggtggtgagcctggacggccccgactgcagctgcggcagccacggctgcatcgaggcctacgccagcggcatggccctgcagagagaggccaagaagctgcacgacgaggacctgctgctggtggagggcatgagcgtgcccaaggacgaggccgtgggcgccctgcacctgatccaggccgccaagctgggcaacgccaaggcccagagcatcctgagaaccgccggcaccgccctgggcctgggcgtggtgaacatcctgcacaccatgaaccccagcctggtgatcctgagcggcgtgctggccagccactacatccacatcgtgaaggacgtgatcagacagcaggccctgagcagcgtgcaggacgtggacgtggtggtgagcgacctggtggaccccgccctgctgggcgccgccagcatggtgctggactacaccaccagaagaatctactag

SEQ ID NO: 270942 - protein, 661 aa, Artificial Sequence
  derived and/or modified sequence
MDLQQSTTITSLEKWCLDESLSGCRRHYSVKKKLKLIRVLGLFMGLVAISTVSFSISAFSETDTQSTGEASVVSGPRVAQGYHQRTLLDLNDKILDYTPQPPLSKEGESENSTDHAQGDYPKDIFSLEERRKGAIILHVIGMIYMFIALAIVCDEFFVPSLTVITEKLGISDDVAGATFMAAGGSAPELFTSLIGVFIAHSNVGIGTIVGSAVFNILFVIGMCALFSREILNLTWWPLFRDVSFYIVDLIMLIIFFLDNVIMWWESLLLLTAYFCYVVFMKFNVQVEKWVKQMINRNKVVKVTAPEAQAKPSAARDKDEPTLPAKPRLQRGGSSASLHNSLMRNSIFQLMIHTLDPLAEELGSYGKLKYYDTMTEEGRFREKASILHKIAKKKCHVDENERQNGAANHVEKIELPNSTSTDVEMTPSSDASEPVQNGNLSHNIEGAEAQTADEEEDQPLSLAWPSETRKQVTFLIVFPIVFPLWITLPDVRKPSSRKFFPITFFGSITWIAVFSYLMVWWAHQVGETIGISEEIMGLTILAAGTSIPDLITSVIVARKGLGDMAVSSSVGSNIFDITVGLPLPWLLYTVIHRFQPVAVSSNGLFCAIVLLFIMLLFVILSIALCKWRMNKILGFIMFGLYFVFLVVSVLLEDRILTCPVSI

SEQ ID NO: 270943 - DNA, 1986 bp, Artificial Sequence
  derived and/or modified sequence
atggacctccaacagagcacaacaattacttcccttgagaaatggtgcctggatgagagcctgtccgggtgtagaaggcactactcagtgaagaagaaacttaaattgattcgcgtgctcggactgtttatgggcctggtggccatctcaaccgttagctttagtatcagcgcgttctccgaaactgatacccagagcaccggcgaagctagtgttgtaagcggcccccgggttgctcaaggatatcatcagcgtacacttctggaccttaacgacaagatactggactataccccccagcctccactaagcaaggagggtgaaagtgagaattctacagatcatgcccagggggactatccgaaagatattttttccctggaagaacgaaggaaaggcgcaatcatcctgcatgttatcggcatgatttatatgtttatagcactggctattgtttgcgatgagttcttcgtgccatctcttacagtgatcacagaaaaactggggatatcagatgacgttgccggcgccacgttcatggccgccggaggctccgcccccgagctcttcacttctctgatcggcgtgttcatcgctcactctaacgtgggcatcggaacaatagtggggtcagcagtgtttaatatcctcttcgttattggaatgtgcgccctatttagccgcgagattctcaatctgacatggtggcctttatttagggatgtgtcattttacatcgtggatctcattatgctgatcatctttttcttggacaacgtgatcatgtggtgggagtctcttctactcctcacagcatacttttgctatgtggtcttcatgaaatttaacgtgcaggtagaaaagtgggttaagcagatgatcaaccggaataaggttgtaaaggtcacagcgcctgaggcccaggcgaagccttccgctgcacgggacaaggacgagcctactttgccggccaagcctcgcttgcagcggggggggtcctccgcgagcctgcataacagcctaatgcggaattccatcttccaacttatgattcacaccctggatcccctggctgaagaattgggttcttatggcaagctgaagtattatgatactatgaccgaggagggtcgttttcgggagaaggcaagtatattgcataagatagccaaaaaaaaatgccacgtcgacgaaaacgaaagacagaacggtgctgctaaccacgtggagaagattgagctgcccaatagcacatcaaccgacgtcgagatgacaccttcttctgatgcctccgagcccgtgcagaatgggaatctgagtcataacatcgagggggccgaagcacagactgccgacgaggaagaggatcagccattatccctggcatggccatccgagacgcgtaagcaggttacctttctgatagtgtttcccatagtatttcccctctggattaccctcccagatgtccgtaagccctcctcgaggaagttcttcccaattacattcttcggcagcataacatggatagctgtattctcctatctcatggtgtggtgggcccaccaagtgggggagaccatcggaataagtgaggaaatcatggggttaacaatattagccgcggggacatccatcccagacctgattacatccgtgattgtggcccggaaagggcttggggatatggcagtctcaagcagtgtgggcagtaatatcttcgacattactgtcggtcttccgctgccctggctgctctatacagtcattcaccggtttcagcctgtggcagtgtcttctaacggcttgttctgcgccattgtgctgttgtttattatgctgttgtttgttatcctatccattgcactctgtaagtggaggatgaacaagatactgggctttattatgtttggcctttactttgtgtttttggtcgtgtccgttttattggaagacaggatcctcacatgccctgtgagtatctag

SEQ ID NO: 270944 - DNA, 1986 bp, Artificial Sequence
  derived and/or modified sequence
atggacctgcagcagagcaccaccatcaccagcctggagaagtggtgcctggatgagagcctgagcggctgcagaagacactacagcgtgaagaagaagctgaagctgatccgggtgctgggcctcttcatgggcctggtggccatcagcacagtgtccttcagcatcagcgccttcagcgagacagacacccagagcactggagaggcctctgtggtgtctggcccccgggtggcccagggctaccaccagaggaccctgctggacctgaatgacaagatcctggactacaccccccagccccccctgagcaaggagggggagagcgagaacagcacagaccacgcccagggcgactaccccaaggacatcttcagcctggaggagaggaggaagggggccatcatcctgcacgtgattggcatgatctacatgtttattgccctggccatcgtgtgtgatgagttctttgtgcccagcctgaccgtcatcacagagaagctgggcatcagtgatgatgtggccggggccaccttcatggccgccggcggcagcgcccctgagctgttcaccagcctcatcggggtcttcatcgcccacagcaatgtgggcatcggcaccatcgtgggcagcgctgtgttcaacatcctcttcgtcatcggcatgtgtgccctcttcagccgggagatcctgaacctgacctggtggcccctcttcagagatgtgtccttctacatcgtggacctgatcatgctgatcatcttcttcctggacaacgtcatcatgtggtgggagagcctgctgctgctgacagcctacttctgctacgtggtgttcatgaagttcaacgtgcaggtggagaagtgggtgaagcagatgatcaacagaaacaaggtggtgaaggtgacagcccctgaggcccaggccaagcccagcgctgcccgggacaaggatgagcccaccctgcctgccaagccccggctgcagagaggaggcagcagcgccagcctgcacaacagcctgatgagaaattccatcttccagctgatgatccacaccctggaccccctggccgaggagctgggcagctatggcaagctgaagtactatgacaccatgacagaggagggccgcttccgggagaaggccagcatcctgcacaagatcgccaagaagaagtgccacgtggatgaaaatgaaaggcagaatggagctgccaaccacgtggagaagattgagctgcccaacagcaccagcacagatgtggagatgacccccagcagtgatgccagcgagcctgtgcagaatggaaacctgagccacaacattgaaggagctgaggcccagacagcagatgaggaggaggaccagcccctgagcctggcctggcccagcgagaccaggaagcaggtgaccttcctgattgtgttccccatcgtgttccccctgtggatcaccctgcctgatgtgaggaagcccagcagcaggaagttcttccccatcaccttcttcggcagcatcacctggattgctgtgttctcctacctgatggtgtggtgggcccaccaggtgggggagaccatcggcatcagcgaggagatcatgggcctgaccatcctggccgccggcaccagcatcccagacctgatcaccagcgtcatcgtggccaggaagggcctgggggacatggctgtgagcagctctgtgggcagcaacatctttgacatcaccgtgggcctgcccctgccctggctgctgtacaccgtcatccaccgcttccagcctgtggccgtgagcagcaatggcctcttctgtgccatcgtgctgctcttcatcatgctgctcttcgtcatcctgagcatcgccctgtgcaagtggaggatgaacaagatcctgggcttcatcatgtttggcctgtactttgtgttcctggtggtgtctgtgctgctggaggaccgcatcctgacctgccctgtgtccatctag

SEQ ID NO: 270945 - DNA, 1986 bp, Artificial Sequence
  derived and/or modified sequence
atggacctgcagcagagcaccaccatcaccagcctggagaagtggtgcctagatgagagtttgagcggatgccggaggcactatagtgtcaagaaaaagctgaagctgatcagggtcctgggcctattcatgggcctagtggctatcagcactgtttcctttagcatctctgccttcagtgagaccgatactcagtcaaccggggaggccagcgttgtatctggaccccgagtggcccagggctaccatcaaagaacgttgttggatttaaatgataagatcctagactacaccccccagcctccactgtctaaggagggggaatccgaaaattctaccgaccatgcccagggcgattatccaaaggacatttttagcctagaagagagacgcaaaggagccattatcctccatgtgattggcatgatttatatgtttatcgccctggccattgtgtgcgacgagttctttgttcctagtctgacagtgatcaccgagaagctaggcatctctgatgatgtcgccggagcaaccttcatggctgcaggcgggagtgctccagaacttttcactagcctgattggtgtgtttattgcacatagcaatgtcggcatcggcaccatcgtaggatccgctgtctttaacatcctattcgtgataggtatgtgcgctttgttttcaagggagatcctgaatctgacctggtggcccctcttccgagacgtgagtttttatatcgttgacctcatcatgttaattatcttctttcttgacaacgtcatcatgtggtgggagagcctcttactgttgacagcatacttctgctatgtggtgttcatgaagttcaacgtgcaagtcgagaagtgggtgaagcaaatgattaacaggaataaggtagttaaggttaccgcaccagaagcacaggccaagcctagcgcggcaagagataaagacgagcccactcttcctgcaaagcctaggctgcagcgaggcgggtctagtgctagcctgcataactcgctcatgaggaacagtatttttcagctgatgatccatacacttgacccgctggctgaagaattaggttcctacggcaagctgaaatattatgataccatgacagaagaaggcaggtttagggaaaaggccagcattctgcacaagattgcaaaaaagaagtgtcacgtcgacgaaaacgaaagacagaatggcgccgcaaatcatgtcgagaaaatagaacttcctaattcgacaagcaccgacgtcgaaatgaccccatcctcagacgcctctgagccagttcagaatggaaatctgagtcataatatcgagggtgcagaagcccagaccgcagacgaagaagaggaccagcctctcagcctggcttggccatctgagacaaggaagcaggtgacatttctgattgtttttcccatagtctttcccttgtggattacattacctgatgtcaggaaacccagctcccggaagttttttcccatcacttttttcggatccataacttggattgctgtcttttcatacctgatggtgtggtgggcccaccaagtaggggagacaatagggatctccgaggaaatcatgggcctgacaatcctggctgctggaacgagcatcccagatctgattacatcagtgattgtggcaagaaagggcctgggggacatggcagtgtcgagctctgtgggttctaatatttttgatatcaccgttgggctccccctgccttggctactgtatacggttatacaccggtttcagccagtggctgtgtctagcaatggcctcttttgtgccatagtcctgctctttatcatgctgttgtttgtcatactgagcattgccctgtgcaagtggaggatgaataagatcctgggttttatcatgtttgggctctattttgtgtttctcgtcgtgtccgtgctgttagaggatcgaattcttacttgtcctgtgagtatctag

SEQ ID NO: 270946 - DNA, 1986 bp, Artificial Sequence
  derived and/or modified sequence
atggacttgcagcagtccacaactataacaagcctcgagaagtggtgcctggatgagagcctgagcggctgtagacgacactatagcgtgaagaagaagcttaagctaattagagtgttggggctgtttatgggacttgtcgcaataagcacagtgagctttagcatatcagctttcagcgagaccgacactcagagtaccggcgaagccagtgtggtgagtggtccgagggtcgcgcaaggctatcatcagagaacactcctggacctgaacgataaaatcctagactacaccccacagcctcccctgagtaaagaaggggagtcagagaacagcactgaccatgcccagggggactacccaaaggatatttttagtcttgaggaaaggcgaaagggtgcaattatcttacacgtaatcggtatgatttacatgtttatcgcccttgcaattgtttgtgacgagttcttcgtacccagcctgacagtgatcaccgaaaaactgggcatatctgatgatgtggcaggtgccacattcatggccgctggcggatcagcccctgaactgtttacaagtctgattggagtttttatcgcccactctaatgtaggcattgggacgatcgttggatcagccgtgttcaatatcctgttcgtcatcggcatgtgtgcgctgttctctcgcgagattcttaacctgacatggtggccactgtttcgagatgtgagcttctacattgttgacctcatcatgcttatcattttcttcctagataatgtcattatgtggtgggagagcctccttcttttaaccgcctatttctgttatgtggtatttatgaagtttaatgttcaggtcgagaaatgggttaagcagatgataaatagaaataaggtggtgaaggtaacagcgccagaggcccaggcaaaacctagcgccgcaagggacaaggacgagccaacacttcccgcaaagccaaggctgcagcgaggtggttctagcgcttcccttcataactcacttatgaggaacagcatatttcaactgatgattcataccctcgaccccttagccgaggagctgggatcttacggcaaacttaagtactacgacacgatgaccgaggagggcagattccgagaaaaagccagcatcttgcacaagatcgctaaaaagaaatgtcacgtggacgaaaatgagcggcagaatggcgcagccaaccacgtcgagaagattgagttaccgaactctactagcaccgacgttgagatgactccaagctcagatgcctcagaacctgtgcaaaacggtaacttgtcccataatatcgagggtgcggaggcgcagaccgccgacgaagaggaggatcagccactttcattggcctggcccagtgaaaccaggaagcaggttactttccttatcgtcttccccatcgtgttcccattgtggatcacacttcctgatgtcaggaagccatcttcacgcaaattctttcccatcactttcttcggatctatcacttggatcgctgtgttctcttatttgatggtgtggtgggctcatcaagttggagaaacgataggtatcagtgaagagattatgggtctcacaattctcgccgcaggcacatccatccctgacctcattacatccgtgattgtcgcgcgtaaaggccttggcgatatggctgtgagctctagcgttggctctaacatatttgatatcaccgttggcctccctctgccttggctgttatacaccgttattcaccgattccagccggtagccgtcagttctaatgggttgttttgtgccatcgttttgctcttcataatgctgctatttgtcatattatccattgcactctgtaaatggcgcatgaacaagatcttaggcttcatcatgtttggactctattttgtcttcctggtagtgtcagtactgctcgaggatagaattctgacatgcccagtaagtatctag

SEQ ID NO: 270947 - DNA, 2221 bp, Artificial Sequence
  derived and/or modified sequence
tgaaagaaccatctggttgagtctaaagttggaagatcaccatatccaccagaagacccaggatggatctgcaacaaagcaccaccatcacttccctagagaaatggtgtttggatgagtcactgtctggctgcagaagacattatagtgtcaagaaaaaactgaagttaattcgagtcttaggccttttcatgggtctggtagccattagcactgtctcattttcaatcagtgccttttctgagacagatacacagagcacaggagaggccagtgttgtaagtggccctagggtagcacagggttaccatcagagaactctcttagatttaaatgacaagattctggattatactccacagccacctctttctaaggaaggcgagtctgagaatagtacagatcacgcccaaggagactacccgaaagacatcttttcccttgaggagagaagaaaaggtgcgatcattctgcatgtcattggaatgatctacatgttcatagccttagccattgtctgtgatgagttctttgttccttctttgactgtcatcactgaaaaactgggcatctctgatgatgtggctggagccaccttcatggctgcaggagggtcagccccagaacttttcacatctctcataggggtatttatcgctcacagcaacgttggcataggcacaattgtaggttcagcagtattcaacatcctctttgttattggcatgtgtgctctgttttctagagaaatcttaaacctgacatggtggccgctctttcgagatgtgtctttctacattgttgacttgatcatgctgatcatatttttcctggataatgtcatcatgtggtgggaaagcttgcttctcttaacagcttatttttgctatgtggttttcatgaaattcaacgtccaagtagaaaaatgggtgaagcaaatgataaaccgcaataaggtcgtcaaggtgacagcaccagaagcccaagcaaagccatctgcagccagggacaaggatgaaccaactctaccggctaagccgcgtctccagcgaggtggaagctctgcctccctccacaacagtctcatgaggaatagcatcttccaactcatgatacacacccttgacccactcgccgaagaacttggatcatatggaaaactaaaatattatgacacaatgactgaagaagggaggttcagagaaaaggcttcaattctccacaagatcgccaagaagaaatgtcatgtggatgagaacgagaggcagaatggggctgccaaccacgtggaaaaaattgagcttccaaacagcaccagcacagatgttgaaatgacaccatccagtgatgcttcagaacctgtacaaaatggaaatctctcccacaacattgaaggtgcagaagcccagaccgctgatgaggaggaggaccagcctctcagccttgcctggccttctgaaacccgcaagcaagtcacgtttctgattgttttccccatagtgtttcctctctggattacgttacctgacgttcgcaaaccttcatcgaggaagttttttcccatcacgttctttggctccattacctggattgcagtattctcttacttgatggtctggtgggcgcaccaggttggagagacaattggcatcagtgaagagattatgggcctgaccatcttggctgctgggacctccatccctgatcttatcaccagtgtcatagtggcccggaaggggttaggggacatggctgtgtccagctctgttggaagcaacatttttgacatcactgtagggctcccactgccctggctcctgtacaccgtcattcacagattccagccagtggctgtcagcagcaatggccttttctgtgccatcgtccttctcttcatcatgctgctcttcgtcatcctctctatcgccctctgcaagtggcgaatgaacaaaatcctgggcttcatcatgtttggcctctactttgtgttcctggtggtgagcgttctcctagaagacagaattcttacatgccccgtctccatctagcaggaaaagccatatcttgcaccagcagcatgaatggtccctccacactctgggctctgggctccttgacctcttgagaagaggcagctggcacacagccctgggtgccaagtgtccctccttggtgaatttgaggagagatggattcacactgggcccattcacttcacagg

SEQ ID NO: 270948 - DNA, 1986 bp, Artificial Sequence
  derived and/or modified sequence
atggacctgcagcagagcaccaccatcaccagcctggagaagtggtgcctggacgagagcctgagcggctgcagaagacactacagcgtgaagaagaagctgaagctgatcagagtgctgggcctgttcatgggcctggtggccatcagcaccgtgagcttcagcatcagcgccttcagcgagaccgacacccagagcaccggcgaggccagcgtggtgagcggccccagagtggcccagggctaccaccagagaaccctgctggacctgaacgacaagatcctggactacaccccccagccccccctgagcaaggagggcgagagcgagaacagcaccgaccacgcccagggcgactaccccaaggacatcttcagcctggaggagagaagaaagggcgccatcatcctgcacgtgatcggcatgatctacatgttcatcgccctggccatcgtgtgcgacgagttcttcgtgcccagcctgaccgtgatcaccgagaagctgggcatcagcgacgacgtggccggcgccaccttcatggccgccggcggcagcgcccccgagctgttcaccagcctgatcggcgtgttcatcgcccacagcaacgtgggcatcggcaccatcgtgggcagcgccgtgttcaacatcctgttcgtgatcggcatgtgcgccctgttcagcagagagatcctgaacctgacctggtggcccctgttcagagacgtgagcttctacatcgtggacctgatcatgctgatcatcttcttcctggacaacgtgatcatgtggtgggagagcctgctgctgctgaccgcctacttctgctacgtggtgttcatgaagttcaacgtgcaggtggagaagtgggtgaagcagatgatcaacagaaacaaggtggtgaaggtgaccgcccccgaggcccaggccaagcccagcgccgccagagacaaggacgagcccaccctgcccgccaagcccagactgcagagaggcggcagcagcgccagcctgcacaacagcctgatgagaaacagcatcttccagctgatgatccacaccctggaccccctggccgaggagctgggcagctacggcaagctgaagtactacgacaccatgaccgaggagggcagattcagagagaaggccagcatcctgcacaagatcgccaagaagaagtgccacgtggacgagaacgagagacagaacggcgccgccaaccacgtggagaagatcgagctgcccaacagcaccagcaccgacgtggagatgacccccagcagcgacgccagcgagcccgtgcagaacggcaacctgagccacaacatcgagggcgccgaggcccagaccgccgacgaggaggaggaccagcccctgagcctggcctggcccagcgagaccagaaagcaggtgaccttcctgatcgtgttccccatcgtgttccccctgtggatcaccctgcccgacgtgagaaagcccagcagcagaaagttcttccccatcaccttcttcggcagcatcacctggatcgccgtgttcagctacctgatggtgtggtgggcccaccaggtgggcgagaccatcggcatcagcgaggagatcatgggcctgaccatcctggccgccggcaccagcatccccgacctgatcaccagcgtgatcgtggccagaaagggcctgggcgacatggccgtgagcagcagcgtgggcagcaacatcttcgacatcaccgtgggcctgcccctgccctggctgctgtacaccgtgatccacagattccagcccgtggccgtgagcagcaacggcctgttctgcgccatcgtgctgctgttcatcatgctgctgttcgtgatcctgagcatcgccctgtgcaagtggagaatgaacaagatcctgggcttcatcatgttcggcctgtacttcgtgttcctggtggtgagcgtgctgctggaggacagaatcctgacctgccccgtgagcatctag

SEQ ID NO: 270949 - DNA, 1458 bp, Artificial Sequence
  derived and/or modified sequence
atggagaccaacgagagcaccgagggcagcagaagcagaagcagaagcctggacatccagcccagcagcgagggcctgggccccaccagcgagcccttccccagcagcgacgacagccccagaagcgccctggccgccgccaccgccgccgccgccgccgccgccagcgccgccgccgccaccgccgccttcaccaccgccaaggccgccgccctgagcaccaagacccccgccccctgcagcgagttcatggagcccagcagcgaccccagcctgctgggcgagccctgcgccggccccggcttcacccacaacatcgcccacggcagcctgggcttcgagcccgtgtacgtgagctgcatcgcccaggacacctgcaccaccaccgaccacagcagcaaccccggccccgtgcccggcagcagcagcggccccgtgctgggcagcagcagcggcgccggccacggcagcggcagcggcagcggccccggctgcggcagcgtgcccggcagcggcagcggccccggccccggcagcggccccggcagcggccccggccacggcagcggcagccaccccggccccgccagcggccccggccccgacaccggccccgacagcgagctgagcccctgcatcccccccggcttcagaaacctggtggccgacagagtgcccaactacaccagctggagccagcactgcccctgggagccccagaagcagcccccctgggagttcctgcaggtgctggagcccggcgccagaggcctgtggaagccccccgacatcaagggcaagctgatggtgtgctacgagaccctgcccagaggccagtgcctgctgtacaactgggaggaggagagagccaccaaccacctggaccaggtgcccagcatgcaggacggcagcgagagcttcttcttcagacacggccacagaggcctgctgaccatgcagctgaagagccccatgcccagcagcaccacccagaaggacagctaccagccccccggcaacgtgtactggcccctgagaggcaagagagaggccatgctggagatgctgctgcagcaccagatctgcaaggaggtgcaggccgagcaggagcccaccagaaagctgttcgaggtggagagcgtgacccaccacgactacagaatggagctggcccaggccggcacccccgcccccaccaagccccacgactacagacaggagcagcccgagaccttctggatccagagagccccccagctgcccggcgtgagcaacatcagaaccctggacacccccttcagaaagaactgcagcttcagcacccccgtgcccctgagcctgggcaagctgctgccctacgagcccgagaactacccctaccagctgggcgagatcagcagcctgccctgccccggcggcagactgggcggcggcggcggcagaatgacccccttctag

SEQ ID NO: 270950 - DNA, 1281 bp, Artificial Sequence
  derived and/or modified sequence
atggagaccaacgagagcaccgagggcagcagaagcagaagcagaagcctggacatccagcccagcagcgagggcctgggccccaccagcgagcccttccccagcagcgacgacagccccagaagcgccctggccgccgccaccgccgccgccgccgccgccgccagcgccgccgccgccaccgccgccttcaccaccgccaaggccgccgccctgagcaccaagacccccgccccctgcagcgagttcatggagcccagcagcgaccccagcctgctgggcgagccctgcgccggccccggcttcacccacaacatcgcccacggcagcctgggcttcgagcccgtgtacgtgagctgcatcgcccaggacacctgcaccaccaccgaccacagcagcaaccccggccccgtgcccggcagcagcagcggccccgtgctgggcagcagcagcggcgccggccacggcagcggcagcggcagcggccccggctgcggcagcgtgcccggcagcggcagcggccccggccccggcagcggccccggcagcggccccggccacggcagcggcagccaccccggccccgccagcggccccggccccgacaccggccccgacagcgagctgagcccctgcatcccccccggcttcagaaacctggtggccgacagagtgcccaactacaccagctggagccagcactgcccctgggagccccagaagcagcccccctgggagttcctgcaggtgctggagcccggcgccagaggcctgtggaagccccccgacatcaagggcaagctgatggtgtgctacgagaccctgcccagaggccagtgcctgctgtacaactgggaggaggagagagccaccaaccacctggaccaggtgcccagcatgcaggacggcagcgagagcttcttcttcagacacggccacagaggcctgctgaccatgcagctgaagagccccatgcccagcagcaccacccagaaggacagctaccagccccccggcaacgtgtactggcccctgagaggcaagagagaggccatgctggagatgctgctgcagcaccagatctgcaaggaggtgcaggccgagcaggagcccaccagaaagctgttcgaggtggagagcgtgacccaccacgactacagaatggagctggcccaggccggcacccccgcccccaccaagccccacgactacagacaggagcagcccgagaccttctggatccagagagccccccagctgcccgtgtgcgagggcgactag

SEQ ID NO: 270951 - DNA, 1458 bp, Artificial Sequence
  derived and/or modified sequence
atggaaaccaatgagtcaacggagggcagccggtcaagaagccgttcacttgacattcagccctcaagcgagggactgggacccacttctgagcccttcccaagctcggacgattcaccccgcagtgcgctggccgctgctactgccgctgccgccgccgccgcctctgccgccgccgccactgccgccttcacaacagctaaggctgctgcccttagtaccaagaccccagcaccatgcagcgagttcatggaaccgtcatcggacccatctttgcttggtgagccatgcgctgggcctggcttcacccacaacattgcacacggatcacttgggttcgagcccgtgtatgtgtcctgtatcgcccaggatacgtgtacaaccacagaccactcttcaaacccgggaccagtgcctggcagttcatcaggacctgtcctgggaagctcctcaggagctggccacggatcgggctcgggctcaggccccggctgcggttcagtgcccggctctggatctggacctggacctgggagcggtcctggctcaggaccaggccatggcagcggtagccatccaggaccggcttccggcccagggcctgataccgggcctgactcagaattgtccccatgcatccccccagggtttcggaacctagttgccgatcgagtgcctaattataccagttggtcacaacactgtccatgggagcctcaaaagcagccgccttgggagttccttcaagtcctggaacccggcgcccgaggcctttggaagccccctgacatcaaggggaaacttatggtgtgctacgagaccctaccacggggccaatgcctcctctataactgggaggaggagcgcgctaccaatcaccttgatcaggtgcctagcatgcaggacggctctgagtcttttttctttagacatggccatagaggactcctgaccatgcagttgaaatctccaatgcccagtagcacgacccagaaagactcataccagcctcccggcaatgtgtattggccacttcgcggtaagcgggaagccatgctcgaaatgttgctgcagcatcagatttgcaaagaagtgcaggccgaacaggagccgacaaggaagctgttcgaggtggaaagtgtgacccatcacgattacagaatggagctggcccaggctggaacccctgccccaaccaagccccacgactaccggcaggagcagcctgaaacgttctggatccagcgcgctcctcagcttcctggcgtgtcgaatatcaggactctcgacaccccatttagaaagaattgctcgttctcaacccctgtgcctctctccctggggaagctgctgccatacgagcctgaaaattatccctatcagctgggagagattagctccctgccatgtcccggaggccggctggggggtggaggtggcagaatgacccccttttag

SEQ ID NO: 270952 - DNA, 1281 bp, Artificial Sequence
  derived and/or modified sequence
atggaaacaaatgagtccactgagggatccaggtcacgcagtcgaagccttgacatccagccaagctcagagggcctcggtcctacgtccgaaccctttccgtctagcgacgactcccctcgtagcgcgctggccgcagctaccgcagccgcagcagccgccgccagtgcagcagctgccactgccgcatttaccacggcaaaagcagccgccctgtctaccaagacccccgctccttgttcggaatttatggaacctagtagcgatcctagcctgctgggtgaaccgtgtgccggtcccggtttcacacacaatattgcccacggttctcttggatttgaaccggtgtatgtgagttgcatagctcaggatacatgcaccacaacagaccattcttcaaatcctggccctgtgcctgggagctcctcaggccccgtgttgggctcttcgagcggcgctgggcacggtagcggatctggttccggccctggatgcggatctgtgcccggttccgggtcgggacctggacccgggagtgggccgggctccggacctggacacgggtcaggcagccaccctggccccgcatccggccctgggcccgacaccggtcccgattccgaactgtcaccttgcatacctccaggattcagaaatttggtcgcagaccgggtgcccaattacacctcctggtcccagcattgcccttgggagcctcagaagcagccgccttgggagttcctccaagtgcttgaacctggtgcaagagggttgtggaaaccgccagatattaaggggaagctcatggtctgctacgagaccttgcctagaggtcagtgtctgctctataactgggaagaggaacgggcaaccaatcacctggaccaggtcccctccatgcaggacggttccgaatcattctttttcaggcacggccaccggggcctgttgaccatgcagttgaaatctcccatgccctcttcaacgacccaaaaggatagctaccaacctcccggaaacgtttattggcctcttaggggtaaacgtgaggcgatgctagaaatgcttctgcagcatcagatctgtaaggaggttcaggccgagcaggagccgaccagaaagcttttcgaggtcgagtccgtgacacaccacgactaccgcatggaactcgcccaggctgggacgcctgcgccgaccaaaccccatgactataggcaggagcaaccagagaccttctggattcagcgggctccgcagcttcctgtatgtgagggggattag

SEQ ID NO: 270953 - DNA, 1458 bp, Artificial Sequence
  derived and/or modified sequence
atggagaccaatgaaagcacagagggcagccgcagccgcagccgcagcctggacatccagcccagcagcgagggcctgggccccaccagcgagcccttccccagcagtgatgacagccccaggtctgccctggccgccgccacagctgctgctgctgctgctgccagcgctgctgctgccacagctgccttcaccacagccaaggccgccgccctgagcaccaagaccccagccccctgcagcgagttcatggagcccagcagtgaccccagcctgctgggggagccctgtgccggccctggcttcacccacaacatcgcccacggcagcctgggctttgagcctgtgtatgtgtcctgcatcgcccaggacacctgcaccaccacagaccacagcagcaaccctggccctgtgcccggcagcagcagcggccctgtgctgggcagcagcagtggagctggccacggcagcggcagcggcagcggccctggctgcggctctgtgcccggcagcggcagcggccctggccctggcagcggccctggcagcggccctggccacggcagcggcagccaccctggccctgccagcggccctggccctgacaccggcccagattctgagctgagcccctgcatccccccaggcttcaggaacctggtggccgacagagtgcccaactacacctcctggagccagcactgcccctgggagccccagaagcagcccccctgggagttcctgcaggtgctggagcccggggcccggggcctgtggaagcccccagacatcaagggcaagctgatggtgtgctatgagaccctgccccggggccagtgcctgctgtacaactgggaggaggagcgggccaccaaccacctggaccaggtgcccagcatgcaggacggcagcgagagcttcttcttcagacatggccaccggggcctgctgaccatgcagctgaagagccccatgcccagcagcaccacccagaaggacagctaccagcccccaggaaatgtgtactggcccctgcggggcaagcgggaggccatgctggagatgctgctgcagcaccagatctgcaaggaggtgcaggccgagcaggagcccaccaggaagctgtttgaggtggagagcgtgacccaccacgactacaggatggagctggcccaggccggcaccccagcccccaccaagccccatgactaccggcaggagcagcctgagaccttctggatccagagggccccccagctgcccggggtgagcaacatccgcaccctggacacccccttcaggaagaactgcagcttcagcacccctgtgcccctgagcctgggcaagctgctgccctatgagcctgagaactacccctaccagctgggggagatcagcagcctgccctgccctgggggccgcctgggcggcggcggcggccgcatgacccccttctag

SEQ ID NO: 270954 - DNA, 1281 bp, Artificial Sequence
  derived and/or modified sequence
atggagaccaatgaaagcacagagggcagccgcagccgcagccgcagcctggacatccagcccagcagcgagggcctgggccccaccagcgagcccttccccagcagtgatgacagccccaggtctgccctggccgccgccacagctgctgctgctgctgctgccagcgctgctgctgccacagctgccttcaccacagccaaggccgccgccctgagcaccaagaccccagccccctgcagcgagttcatggagcccagcagtgaccccagcctgctgggggagccctgtgccggccctggcttcacccacaacatcgcccacggcagcctgggctttgagcctgtgtatgtgtcctgcatcgcccaggacacctgcaccaccacagaccacagcagcaaccctggccctgtgcccggcagcagcagcggccctgtgctgggcagcagcagtggagctggccacggcagcggcagcggcagcggccctggctgcggctctgtgcccggcagcggcagcggccctggccctggcagcggccctggcagcggccctggccacggcagcggcagccaccctggccctgccagcggccctggccctgacaccggcccagattctgagctgagcccctgcatccccccaggcttcaggaacctggtggccgacagagtgcccaactacacctcctggagccagcactgcccctgggagccccagaagcagcccccctgggagttcctgcaggtgctggagcccggggcccggggcctgtggaagcccccagacatcaagggcaagctgatggtgtgctatgagaccctgccccggggccagtgcctgctgtacaactgggaggaggagcgggccaccaaccacctggaccaggtgcccagcatgcaggacggcagcgagagcttcttcttcagacatggccaccggggcctgctgaccatgcagctgaagagccccatgcccagcagcaccacccagaaggacagctaccagcccccaggaaatgtgtactggcccctgcggggcaagcgggaggccatgctggagatgctgctgcagcaccagatctgcaaggaggtgcaggccgagcaggagcccaccaggaagctgtttgaggtggagagcgtgacccaccacgactacaggatggagctggcccaggccggcaccccagcccccaccaagccccatgactaccggcaggagcagcctgagaccttctggatccagagggccccccagctgcctgtgtgtgagggggactag

SEQ ID NO: 270955 - DNA, 1458 bp, Artificial Sequence
  derived and/or modified sequence
atggagaccaacgagagcaccgagggcagccggagccggagccggtccctggatatccagccttcttcagaagggctgggccctactagtgaacctttcccatcatctgacgatagtcctcgcagcgctctggctgccgccaccgcggcagccgctgccgctgcctctgctgcggcagcgacagctgctttcactaccgccaaagcagccgctctgtccacaaaaactcccgccccctgctcagaattcatggaaccttcatccgatccttctctgcttggtgagccctgcgctggccccggcttcacgcacaatatcgctcacggctctctcggattcgaacctgtttatgtaagctgcatcgcacaggatacatgcacaactacagaccatagcagcaatcctggacccgtgcccgggtcctctagcggtcccgtgctggggtccagttcaggagcggggcatggcagtggatctgggtccggacctggatgcggtagtgtgccgggctcaggtagcggtcccgggcccggctcgggaccaggatccggccccggacacgggtccggcagccatccaggccctgccagtggtccagggcccgataccggccccgattcggagttgtccccttgcattccccccggctttaggaacctggtcgccgacagggtccccaattacacttcttggtcccagcattgcccttgggaaccgcagaagcagcccccatgggagtttctgcaggttctggagcccggagcccgaggcttgtggaagcctcctgacattaaggggaagctgatggtctgttatgagactctcccccggggccaatgcttgctgtataactgggaagaagagcgcgctacgaatcaccttgaccaggttcccagtatgcaggacggatcagagagcttttttttccgacatgggcacagagggctgcttacaatgcagctgaaatcacccatgccctcttctacaacgcagaaagattcctaccagcctccgggcaacgtgtactggcctttgagaggcaagagagaagctatgctggagatgctgttacagcaccagatctgcaaagaggtgcaagccgagcaagagcctaccagaaagctgtttgaggtcgaatccgtgactcatcacgactacagaatggagctggcgcaggctggaactccagcccccactaagccacacgattaccgacaagagcaaccggagacattctggatccaaagggcaccacagctgccaggcgtgagtaacatcaggacactggacacaccgtttcgcaaaaattgttcctttagcactcccgttcctctatctctgggaaaactgctcccttacgagcctgagaactacccctatcagctgggggagatctcctcattaccttgccccggaggccggctgggaggtggtgggggacgcatgacacccttttag

SEQ ID NO: 270956 - DNA, 1281 bp, Artificial Sequence
  derived and/or modified sequence
atggagaccaacgagagcaccgagggcagccggagccggagccggagccttgacatccagccgtcctcagagggccttggccccaccagcgaaccgttcccttcatcagatgacagtccaaggtccgccctagccgcagctactgcagccgcggccgcagccgccagtgcagcggccgcgacagccgcatttaccacagctaaggccgccgccctctcgacgaaaacgcccgccccatgctcagagttcatggagccatcctcggatccatccctgttgggcgagccttgcgcggggcctgggttcacacataatatagctcacggcagtcttgggtttgaaccagtgtacgtgagctgtatcgcccaggatacatgcacaacaacagatcattcatccaacccggggcccgtacctggatcctcctctggcccggtcctgggcagcagctccggcgccggccacggatccgggagtgggagcggacctggatgcgggagcgtgccagggagcggctccgggccagggccggggtcaggccctggcagtggaccaggacacggttccggatcccacccaggacctgcttcaggaccaggacccgacacagggcctgatagcgaactgtctccttgtatccctcctggctttaggaacctggttgccgaccgtgttccaaactatacctcttggagtcagcattgcccatgggagccacaaaagcagccaccatgggaatttctccaagttttggagccaggggccaggggtctgtggaaacctccagacatcaagggcaagctgatggtgtgctatgaaacgcttcctaggggccagtgcctgctgtacaactgggaggaagagagagctactaatcacctggaccaggtgccatccatgcaggacgggagtgaatctttcttcttccgccatgggcacagagggctcttgacgatgcagttgaagtcacccatgcctagttccactacgcagaaggacagttaccaaccgcctggcaatgtgtactggcctttgcggggaaaacgagaggctatgttggagatgcttctgcagcaccaaatctgcaaagaagtacaggccgaacaggagccaacgcggaagcttttcgaagttgaatctgtgactcaccacgattaccggatggagctagcccaggcagggaccccagcccctactaaaccacacgactacagacaagagcaaccggagactttttggatccagagggccccacagctgcctgtatgtgagggggactag

SEQ ID NO: 270957 - DNA, 1458 bp, Artificial Sequence
  derived and/or modified sequence
atggagactaatgaaagcactgagggaagccgttcgcgcagccggagccttgacatccagcccagttctgagggcctcggcccaaccagtgagccctttccctcctctgacgacagtcctcggtccgctctggcagccgctactgctgcagcggcagctgctgccagcgcagccgcagccaccgctgccttcactactgccaaggccgcagccctttcgaccaagacaccagccccatgctctgaattcatggaaccttcgagcgacccgtctctgctgggagagccctgcgcgggaccaggcttcacacacaatattgctcacggcagtctcggctttgaacccgtgtacgtgagctgtattgcccaggatacctgtactactaccgaccacagctccaaccctggtcctgtgccaggatctagctctggcccagtattaggaagcagttctggagctggccatgggtcgggtagtggaagtgggccagggtgcggttccgtgcctggttcaggctcggggcctgggcctgggagtggacccggatccggtcctggccacggttctggctctcacccgggacccgcttccggacctggcccagatacaggaccagatagcgaattaagcccctgcatcccaccaggcttcagaaacctggtcgccgatagggtgcctaattacacttcatggtctcaacattgtccctgggagcctcaaaagcaacccccatgggaattcctacaagttctggagcccggagctagaggactgtggaagcctccagatataaaggggaaactcatggtctgctatgaaacacttcccagaggccagtgcctcctgtataattgggaagaggaacgcgcaactaatcacctggaccaggtacccagcatgcaagatggttctgagagttttttttttcgacatggtcatcggggactgctgactatgcagttgaaaagccctatgcctagcagcaccacacagaaggactcataccagcctcctggcaatgtgtactggcccctgcgtgggaagagggaggccatgctagagatgctcctgcagcaccagatatgtaaggaagtccaagcggaacaagaaccaacacgtaaactgttcgaagtagagtccgttacacatcacgattacaggatggagttggctcaggcaggcaccccggctcccaccaagccccatgactatcgccaggaacagccagagactttctggatccagcgggctccacagctgcccggagtctcgaacattagaacactcgacaccccctttcgcaaaaattgctccttcagtactccagtgcctctcagcctcgggaagctcctaccctatgaacccgagaactacccctaccaactgggggagatctcttccttaccatgtcccggagggaggctcggaggcggaggaggcagaatgacccccttctag

SEQ ID NO: 270958 - DNA, 1281 bp, Artificial Sequence
  derived and/or modified sequence
atggaaactaatgaatccacagagggcagtagatcccggagtcggagcctggacattcagccaagctctgaaggactgggacctacatccgagcctttcccctccagcgacgattcccctaggtctgcccttgccgctgccactgccgctgctgcagcagccgcatctgctgcggctgccactgctgcctttacaaccgccaaggctgccgcactaagcacaaagacgcccgctccctgtagcgaattcatggagccaagcagcgacccgagtttactgggggagccatgcgcgggtcccggatttacacacaacattgcccatgggtctctgggttttgaacctgtgtacgtaagctgcatcgctcaggacacgtgcacaactacagatcacagttcaaatcccggtcctgtgcccggaagctcctccgggccagttttgggatcaagctccggagcgggtcatggctctggttccgggtcaggacccggatgcggatctgtgcctggctccggtagcggccctgggccaggcagcggacctgggtccgggcctggccacggctccggctcacatccaggcccagcctctgggccagggccagataccggtcccgattctgagctgtccccttgcattcctcctggattccggaacctggttgctgatcgcgtccccaactacacaagctggtcgcagcactgcccttgggaaccacaaaaacagcctccctgggagtttctgcaagtgctggaacccggagcaaggggcctgtggaagcctcctgatatcaaagggaaactcatggtgtgctacgagacactgcctcgtgggcaatgcctattatacaactgggaggaagaacgggcaaccaaccacctagatcaggtgccctcgatgcaagacggcagcgaaagtttcttctttcgccatggccatcgaggcctgctcacaatgcagcttaagagtcctatgccaagttcgactacccaaaaggactcctaccagccgcctgggaacgtgtattggccacttcgtggcaagagagaagccatgttagaaatgttgttgcaacaccagatttgcaaggaggtgcaggcagagcaggagcccacaagaaagctttttgaggtcgagtcagtaactcaccacgactatcgcatggaattagcacaggctggcacccccgcacctacgaaaccacacgactacagacaggaacaacctgagaccttctggattcagcgtgctccccaacttcccgtatgtgagggtgattag

SEQ ID NO: 270959 - DNA, 1600 bp, Artificial Sequence
  derived and/or modified sequence
aacccagtagctggagtctgaagatggagaccaacgagtctacggagggatcgcggtcgcggtcgcgatctttagacatacagcccagctccgaaggactggggcccacttcggaaccgtttccttcttcagatgacagtcccaggtcggccctggcagctgcaaccgcagcagctgcagcggctgcatcagctgctgcagctactgcagccttcaccactgccaaagcagctgcattatctacaaagaccccagcgccctgttctgagttcatggagccgtcctctgaccccagccttcttggggagccctgtgcgggacccggctttacccacaatatagcccatgggagtcttggctttgagcccgtctatgtttcctgtattgctcaggacacttgcactacaactgaccatagttctaatcctggccctgttccaggctctagctctgggcctgttcttggttccagctcaggtgctggccatggctctggctctggctctggtcctggctgtggctctgtccctggctctggctctggtcctggtcctggctctggtcctggctctggtcctggtcatggctctggctctcatcctggtcctgcctctgggcctggtccagacactggccctgactctgagctcagcccctgtattcctccagggttcagaaacctggtggcagatcgggtccctaactatacctcctggagtcagcactgcccctgggagccccagaaacaaccaccttgggaatttttgcaagtcttagaaccgggtgcccgaggactatggaaacccccagacattaaagggaagcttatggtttgctatgaaactttgccgcggggccagtgcctcctctacaactgggaggaagagagagccaccaaccacctggatcaagtcccaagcatgcaggatggctctgagagttttttcttccgacacggacaccggggactgctgactatgcaactaaagtcacccatgccctccagcaccacccagaaagactcgtaccagccaccaggaaacgtctattggccacttcgagggaagcgtgaagccatgctggagatgctcctgcagcatcagatctgtaaagaggtgcaggcagaacaggaacccacaaggaagctcttcgaggttgagtctgtgacacaccatgactaccgaatggagctggcacaagcagggactcctgccccaacaaagcctcacgactaccgccaggagcaacctgagaccttctggatacagagggcaccacagctgccgggtgtcagtaacatcaggacattggacacaccattccggaagaactgcagcttctcaacaccagtacccttgtctctggggaaacttttgccctatgaacctgagaattacccctaccaattgggagaaatatcttcccttccctgtcccggaggaaggctgggtggtggaggggggagaatgactcctttctgaggggtgaggagggaagtggggtatggaatatggaatctatttctgtctgcactagagaggtcgggaggaagttaattctcactgtacttgaagaggctttacataaagggttctctctc

SEQ ID NO: 270960 - DNA, 2481 bp, Artificial Sequence
  derived and/or modified sequence
gccccgcagaggacttgcctccaccgccacctgcaagtccgcccagctgtacttctgcgcaggctccaggagttgtttgctgtctctatggcaacccagtagctggagtctgaagatggagaccaacgagtctacggagggatcgcggtcgcggtcgcgatctttagacatacagcccagctccgaaggactggggcccacttcggaaccgtttccttcttcagatgacagtcccaggtcggccctggcagctgcaaccgcagcagctgcagcggctgcatcagctgctgcagctactgcagccttcaccactgccaaagcagctgcattatctacaaagaccccagcgccctgttctgagttcatggagccgtcctctgaccccagccttcttggggagccctgtgcgggacccggctttacccacaatatagcccatgggagtcttggctttgagcccgtctatgtttcctgtattgctcaggacacttgcactacaactgaccatagttctaatcctggccctgttccaggctctagctctgggcctgttcttggttccagctcaggtgctggccatggctctggctctggctctggtcctggctgtggctctgtccctggctctggctctggtcctggtcctggctctggtcctggctctggtcctggtcatggctctggctctcatcctggtcctgcctctgggcctggtccagacactggccctgactctgagctcagcccctgtattcctccagggttcagaaacctggtggcagatcgggtccctaactatacctcctggagtcagcactgcccctgggagccccagaaacaaccaccttgggaatttttgcaagtcttagaaccgggtgcccgaggactatggaaacccccagacattaaagggaagcttatggtttgctatgaaactttgccgcggggccagtgcctcctctacaactgggaggaagagagagccaccaaccacctggatcaagtcccaagcatgcaggatggctctgagagttttttcttccgacacggacaccggggactgctgactatgcaactaaagtcacccatgccctccagcaccacccagaaagactcgtaccagccaccaggaaacgtctattggccacttcgagggaagcgtgaagccatgctggagatgctcctgcagcatcagatctgtaaagaggtgcaggcagaacaggaacccacaaggaagctcttcgaggttgagtctgtgacacaccatgactaccgaatggagctggcacaagcagggactcctgccccaacaaagcctcacgactaccgccaggagcaacctgagaccttctggatacagagggcaccacagctgccggtgtgtgagggtgactaggtgttgggggcagagcggggcaggaaaggtagggcagagttgttttgttctggcttggggagagtgggatccatcctcatcctggcactcctccagggtgtcagtaacatcaggacattggacacaccattccggaagaactgcagcttctcaacaccagtacccttgtctctggggaaacttttgccctatgaacctgagaattacccctaccaattgggagaaatatcttcccttccctgtcccggaggaaggctgggtggtggaggggggagaatgactcctttctgaggggtgaggagggaagtggggtatggaatatggaatctatttctgtctgcactagagaggtcgggaggaagttaattctcactgtacttgaagaggctttacataaagggttctctctcatcccaagactgctaatttagtgattctgtgagtcactgtgtgcataccccataacctttccttgggattgcccctatcccacactatgacatcagaactttttttattattgttttatatttgaccaaaatattctggtttagatacagatatttacagaaagtagggaggaaggggaccaagccagagagggacaggtatatgtacagggctgagctgcagagggctacaacttccatataaggtaggtttttttgtggctgttttccattgcatatgaaaatgtccatttctggtgtgtgcagacatggtggccattgcccacccaggtaccagcagcagaagactatctgacttggaaagaatgggggtttacaggagtccaggaggtcctttccgctctcctaagagccacacctggtgaatactcagtaaacatttgcggaatgaatgaacaccctgtctgcagcaggacatggacaaataggctctgccatcaggaaatgggaagcaagaaaacggtaactcaagaggacagaggctggtgaggaggtaaagcaggcccagtgaaatggacctgacagcccaaactgtcagagaggaggaaagcaggcatttgattttggtaattgtgccaaagctatgtaagagaataaatgccattgttttaagga

SEQ ID NO: 270961 - DNA, 498 bp, Artificial Sequence
  derived and/or modified sequence
ggcagctgtccgcccccgggcggggctggccgcacgccgcaatcctaccggctgctgcggctccagcgggggcggcgggtggcttccagggcaccggcggccgcggcccggactccgcggtgggcgagcgccctgtgaggactacagtgaagaacagaggggaaagtcatttgaggagccagaactctggagtcagttagctctggttcagatcacagttctgccacttactggctttgtgaccttcagccagattgattcctcatctgtgaaaaggaggtgaccatggaggctggtggcctccccttggagctgtggcgcatgatcttagcctacttgcaccttcccgacctgggccgctgcagcctggtatgcagggcctggtatgaactgatcctcagtctcgacagcacccgctggcggcagctgtgtctgggttgcaccgagtgccgccatcccaattggcccaaccagccagatgtggagcctgagtcttgg

SEQ ID NO: 270962 - DNA, 216 bp, Artificial Sequence
  derived and/or modified sequence
atggaggctggtggtctgcctctcgagctctggcggatgatcttggcctaccttcacttgccggatcttgggcgttgtagcctcgtgtgtcgggcttggtacgaactcattctgagcctagacagcactagatggagacagctatgtttaggttgcaccgagtgtcggcacccaaactggcctaaccaacctgatgtggaacccgagtcctggtag

SEQ ID NO: 270963 - DNA, 216 bp, Artificial Sequence
  derived and/or modified sequence
atggaggccggcggcctgcccctggagctgtggaggatgatcctggcctacctgcacctgcctgacctgggccgctgcagcctggtgtgccgggcctggtatgagctgatcctgagcctggacagcacccgctggaggcagctgtgcctgggctgcacagagtgccgccaccccaactggcccaaccagccagatgtggagcctgagagctggtag

SEQ ID NO: 270964 - DNA, 216 bp, Artificial Sequence
  derived and/or modified sequence
atggaggccggcggcctgcccctggagctgtggcggatgatcctggcctacctgcacctgcccgaccttggtaggtgttctctagtgtgccgtgcctggtatgaattgatactgtctctagacagcaccagatggcggcaactctgtctcggctgtacggagtgccgccacccaaattggccaaaccagcctgatgtggaacccgagtcctggtag

SEQ ID NO: 270965 - DNA, 216 bp, Artificial Sequence
  derived and/or modified sequence
atggaagccggtgggctgcccctggagctctggcgcatgattcttgcctacctacacctacccgacctgggtcgctgctccctggtctgtagggcatggtacgaacttattctcagccttgattctaccagatggagacagctatgcctggggtgcacagaatgtcgccaccccaactggcctaaccagcccgatgtcgaacccgaaagttggtag

SEQ ID NO: 270966 - DNA, 216 bp, Artificial Sequence
  derived and/or modified sequence
atggaggccggcggcctgcccctggagctgtggagaatgatcctggcctacctgcacctgcccgacctgggcagatgcagcctggtgtgcagagcctggtacgagctgatcctgagcctggacagcaccagatggagacagctgtgcctgggctgcaccgagtgcagacaccccaactggcccaaccagcccgacgtggagcccgagagctggtag

SEQ ID NO: 270967 - protein, 225 aa, Artificial Sequence
  derived and/or modified sequence
MRLREPLLSGSAAMPGASLQRACRLLVAVCALHLGVTLVYYLAGRDLSRLPQLVGVSTPLQGGSNSAAAIGQSSGELRTGGARPPPPLGASSQPRPGGDSSPVVDSGPGPASNLTSVPVPHTTALSLPACPEESPLLVGPMLIEFNMPVDLELVAKQNPNVKMGGRYAPRDCVSPHKVAIIIPFRNRQEHLKYWLYYLHPVLQRQQLDYGIYVINQYEKIRRLLW

SEQ ID NO: 270968 - DNA, 678 bp, Artificial Sequence
  derived and/or modified sequence
atgagactgagagagcccctgctgagcggcagcgccgccatgcccggcgccagcctgcagagagcctgcagactgctggtggccgtgtgcgccctgcacctgggcgtgaccctggtgtactacctggccggcagagacctgagcagactgccccagctggtgggcgtgagcacccccctgcagggcggcagcaacagcgccgccgccatcggccagagcagcggcgagctgagaaccggcggcgccagaccccccccccccctgggcgccagcagccagcccagacccggcggcgacagcagccccgtggtggacagcggccccggccccgccagcaacctgaccagcgtgcccgtgccccacaccaccgccctgagcctgcccgcctgccccgaggagagccccctgctggtgggccccatgctgatcgagttcaacatgcccgtggacctggagctggtggccaagcagaaccccaacgtgaagatgggcggcagatacgcccccagagactgcgtgagcccccacaaggtggccatcatcatccccttcagaaacagacaggagcacctgaagtactggctgtactacctgcaccccgtgctgcagagacagcagctggactacggcatctacgtgatcaaccagtacgagaagatcagaagactgctgtggtag

SEQ ID NO: 270969 - DNA, 678 bp, Artificial Sequence
  derived and/or modified sequence
atgcgcctgcgcgaaccactgctaagcggctccgctgcaatgcccggagcgagtctgcagagggcctgccgacttctagtggccgtgtgtgcacttcacctcggcgtaacgttggtgtattatcttgcaggtcgcgatctatcccggttgccccaactggtgggtgtaagcactcctttacagggtgggtctaacagtgccgctgctattgggcagtcctccggcgagctccggaccggaggggcgcgccctccccctccgctgggtgcatcttcccaaccacgacccggcggagactcaagtccggtggtggattcaggacctggaccggcctcaaatctgacctcagtaccagttccccacaccacggcactgtcactgccagcatgtccagaggagtctcctttgctcgtggggcccatgctcatcgaatttaacatgccagtcgacctggagcttgtagccaagcagaatcctaacgtgaagatgggagggcggtatgcgccacgcgactgcgtctcaccccataaggtggcaataataattccctttcgtaatagacaggagcatctgaagtactggctgtactatctccacccagtcctgcaaaggcagcaactggactacggaatatacgtgattaatcagtacgaaaagatccggagacttctctggtag

SEQ ID NO: 270970 - DNA, 678 bp, Artificial Sequence
  derived and/or modified sequence
atgaggctgcgggagcccctgctgagcggcagcgctgccatgcctggggccagcctgcagagggcctgccgcctgctggtggccgtgtgtgccctgcacctgggcgtgaccctggtgtactacctggccggccgggacctgagccggctgccccagctggtgggcgtgtccacccccctgcagggcggcagcaacagcgctgctgccatcggccagagcagcggggagctgaggactggaggagcccggcccccaccacccctgggcgccagcagccagcccaggcctggaggagacagcagccctgtggtggacagcggccctggccctgccagcaacctgacctctgtgcctgtgccccacaccacagccctgagcctgcctgcctgcccagaggagagccccctgctggtgggccccatgctgattgagttcaacatgcctgtggacctggagctggtggccaagcagaaccccaacgtgaagatgggcggccgctatgccccccgggactgtgtgagcccccacaaggtggccatcatcatccccttcaggaaccggcaggagcacctgaagtactggctgtactacctgcaccctgtgctgcagaggcagcagctggactatggcatctacgtgatcaaccagtatgagaagatccggcggctgctgtggtag

SEQ ID NO: 270971 - DNA, 678 bp, Artificial Sequence
  derived and/or modified sequence
atgcggctgcgggagcccctgctgagcggcagcgccgccatgcccggcgccagcttacaaagggcctgccgcctgctcgtggctgtatgcgccttgcatttgggcgtcactctcgtgtattatctagctggacgagatctctcaagattgccccagcttgtgggcgttagcaccccattgcagggcggtagtaactcggccgctgccatagggcaatcgtctggggagctacggaccggcggcgctaggcctcccccacccttgggtgccagctcacagcccaggccaggcggggattctagccccgttgtcgattctggaccaggacctgcttcgaacttaacttccgttccagtgcctcacacaaccgctctatccctgcccgcttgtccagaggagagtcccctgctggtaggccccatgcttattgagtttaacatgccggtagacttagagttagtagccaagcagaatcctaatgtgaagatgggtggccgctatgctccccgagactgcgtgtctcctcacaaagtggcaatcattataccatttcgtaataggcaggagcacttaaagtattggctttactatctgcaccccgttctacagagacagcagctggattacggcatttacgtgatcaaccaatatgaaaagatccgaagactcctgtggtag

SEQ ID NO: 270972 - DNA, 678 bp, Artificial Sequence
  derived and/or modified sequence
atgagactgcgcgaacccctgctttcaggatcagccgcaatgcctggagcctcactgcagcgtgcttgcagactgttggtagccgtttgtgcgcttcacctgggagtcacgctggtgtactatcttgccggacgggatttatccagactcccgcaacttgtgggagtctccacaccgcttcaggggggttcaaacagtgctgcggctattggacaatcatccggtgaattaagaaccgggggagctaggcctccgcctcctctaggtgctagctctcagccccgaccgggaggtgactcatccccagtcgttgactccggccctgggccagcctccaatttaacctcagtccctgtgcctcacactaccgctctaagcctgcccgcttgccccgaggaatcaccactgctcgttggtcctatgctgattgagtttaacatgcctgtcgatctagagttggtcgcaaagcagaatcctaatgtcaagatggggggacggtatgcgcctagggactgtgtctccccccacaaagtggctatcataataccgttccgaaacaggcaggaacacctcaagtactggctgtactatttgcaccctgtgcttcagcgccagcagctggactatgggatctatgtgatcaatcagtatgaaaagatccgccgattactttggtag

SEQ ID NO: 270973 - DNA, 1535 bp, Artificial Sequence
  derived and/or modified sequence
gcctcgggcggcttctcgccgctcccaggtctggctggctggaggagtctcagctctcagccgctcgcccgcccccgctccgggccctcccctagtcgccgctgtggggcagcgcctggcgggcggcccgcgggcgggtcgcctcccctcctgtagcccacacccttcttaaagcggcggcgggaagatgaggcttcgggagccgctcctgagcggcagcgccgcgatgccaggcgcgtccctacagcgggcctgccgcctgctcgtggccgtctgcgctctgcaccttggcgtcaccctcgtttactacctggctggccgcgacctgagccgcctgccccaactggtcggagtctccacaccgctgcagggcggctcgaacagtgccgccgccatcgggcagtcctccggggagctccggaccggaggggcccggccgccgcctcctctaggcgcctcctcccagccgcgcccgggtggcgactccagcccagtcgtggattctggccctggccccgctagcaacttgacctcggtcccagtgccccacaccaccgcactgtcgctgcccgcctgccctgaggagtccccgctgcttgtgggccccatgctgattgagtttaacatgcctgtggacctggagctcgtggcaaagcagaacccaaatgtgaagatgggcggccgctatgcccccagggactgcgtctctcctcacaaggtggccatcatcattccattccgcaaccggcaggagcacctcaagtactggctatattatttgcacccagtcctgcagcgccagcagctggactatggcatctatgttatcaaccagtatgaaaaaataagaagactcctgtggtgaaggcttcgcctggtctgttctgctctggaggtggcagcgcatggtggttagtcccagcatcttcctggagatttgagcgtgagacgtgctggctgtgtgggctgtgccacctgaggaggattggccagtcataaggactcagcctggttgctgaatccagctggggaccttgaccccagtgactggcttttcagcggctacctgttctcgagacaaatgctgtcctcccctaaggagtctgggctgtggcaaagctatgacataggtacaaccgtccttttgccaggtggggcttaggtggagaagttgaagcctggactcagtcaagatctcaggactgggagcaaggagcctcttactcccagggtgcccacttggttcccactgactgttggtggaaactaggggctgagctggaggctttttagaggaagaaatgacaagctgggggctggattatccctgggggtgaaaatggagtcagctagataggttatgtcttgaaggagaggagggtcccctggtgtcaggaagcagagcctgaactccatgttagaccctggattggagagtgggcaggacacttgggagagacaggacttggtactggcgagggtactaccacacccattctgggagtggactatagagaaataaatcctaaaagtgg

SEQ ID NO: 270974 - protein, 1234 aa, Artificial Sequence
  derived and/or modified sequence
MASWLYECLCEAELAQYYSHFTALGLQKIDELAKITMKDYSKLGVHDMNDRKRLFQLIKIIKIMQEEDKAVSIPERHLQTSSLRIKSQELRSGPRRQLNFDSPADNKDRNASNDGFEMCSLSDFSANEQKSTYLKVLEHMLPDDSQYHTKTGILNATAGDSYVQTEISTSLFSPNYLSAILGDCDIPIIQRISHVSGYNYGIPHSCIRQNTSEKQNPWTEMEKIRVCVRKRPLGMREVRRGEINIITVEDKETLLVHEKKEAVDLTQYILQVILKGSKERSTGATGVNADSSRSHAVIQIQIKDSAKRTFGRISFIDLAGSERAADARDSDRQTKMEGAEINQSLLALKECIRALDQEHTHTPFRQSKLTQVLKDSFIGNAKTCMIANISPSHVATEHTLNTLRYADRVKELKKGIKCCTSVTSRNRTSGNSSPKRIQSSPGALSEDKCSPKKVKLGFQQSLTVAAPGSTRGKVHPLTSHPPNIPFTSAPKVSGKRGGSRGSPSQEWVIHASPVKGTVRSGHVAKKKPEESAPLCSEKNRMGNKTVLGWESRASGPGEGLVRGKLSTKCKKVQTVQPVQKQLVSRVELSFGNAHHRAEYSQDSQRGTPARPASEAWTNIPPHQKEREEHLRFYHQQFQQPPLLQQKLKYQPLKRSLRQYRPPEGQLTNETPPLFHSYSENHDGAQVEELDDSDFSEDSFSHISSQRATKQRNTLENSEDSFFLHQTWGQGPEKQVAERQQSLFSSPRTGDKKDLTKSWVDSRDPINHRRAALDHSCSPSKGPVDWSRENSTSSGPSPRDSLAEKPYCSQVDFIYRQERGGGSSFDLRKDASQSEVSGENEGNLPSPEEDGFTISLSHVAVPGSPDQRDTVTTPLREVSADGPIQVTSTVKNGHAVPGEDPRGQLGTHAEYASGLMSPLTMSLLENPDNEGSPPSEQLVQDGATHSLVAESTGGPVVSHTVPSGDQEAALPVSSATRHLWLSSSPPDNKPGGDLPALSPSPIRQHPADKLPSREADLGEACQSRETVLFSHEHMGSEQYDADAEETGLDGSWGFPGKPFTTIHMGVPHSGPTLTPRTGSSDVADQLWAQERKHPTRLGWQEFGLSTDPIKLPCNSENVTWLKPRPISRCLARPSSPLVPSCSPKTAGTLRQPTLEQAQQVVIRAHQEQLDEMAELGFKEETLMSQLASNDFEDFVTQLDEIMVLKSKCIQSLRSQLQLYLTCHGPTAAPEGTVPS

SEQ ID NO: 270975 - protein, 570 aa, Artificial Sequence
  derived and/or modified sequence
MMYSPICLTQDEFHPFIEALLPHVRAIAYTWFNLQARKRKYFKKHEKRMSKDEERAVKDELLSEKPEIKQKWASRLLAKLRKDIRQEYREDFVLTVTGKKHPCCVLSNPDQKGKIRRIDCLRQADKVWRLDLVMVILFKGIPLESTDGERLMKSPHCTNPALCVQPHHITVSVKELDLFLAYYVQEQDSGQSGSPSHNDPAKNPPGYLEDSFVKSGVFNVSELVRVSRTPITQGTGVNFPIGEIPSQPYYHDMNSGVNLQRSLSSPPSSKRPKTISIDENMEPSPTGDFYPSPSSPAAGSRTWHERDQDMSSPTTMKKPEKPLFSSASPQDSSPRLSTFPQHHHPGIPGVAHSVISTRTPPPPSPLPFPTQAILPPAPSSYFSHPTIRYPPHLNPQDTLKNYVPSYDPSSPQTSQPNGSGQVVGKVPGHFTPVLAPSPHPSAVRPVTLSMTDTKPITTSTEGEAASPTATTYTASGTSQANRYVGLSPRDPSFLHQQQLRICDWTMNQNGRHLYPSTSEDTLGITWQSPGTWASLVPFQVSNRTPILPANVQNYGLNIIGEPFLQAETSN

SEQ ID NO: 270976 - DNA, 1713 bp, Artificial Sequence
  derived and/or modified sequence
atgatgtactcaccaatctgcctgacgcaggatgagttccacccattcatagaggccctgctgccacatgtgcgggccatcgcatatacatggttcaatctgcaggcccgaaagagaaaatattttaagaaacacgagaagagaatgagtaaagatgaagaacgagctgtcaaggacgagctgctcagcgaaaaaccagagatcaagcagaagtgggcttcacgcctgctggcgaagctgaggaaagacattcgccaagagtatagagaagattttgtccttacagttaccggcaagaaacacccttgctgcgtgctgtccaatcctgaccagaagggcaagatcaggcgcatcgactgcctgagacaggccgataaggtgtggaggttagacctggtgatggtgatactctttaaaggtatccccttggagtctacggacggagaaaggctgatgaaatccccccactgtacaaaccccgcactgtgcgtccaacctcatcacataaccgtcagcgtcaaggaacttgacctgttccttgcctactatgtccaggagcaggattctggccagagtggctccccttcacacaacgacccggccaaaaatcccccgggttatctagaggatagctttgttaagtccggggtgtttaacgtgtcagagctggtacgagtgtccagaacccccatcacgcaagggactggagtgaactttcccatcggggaaattccttcccaaccatattaccacgacatgaactccggggtgaacctgcagagatctctgagttctcccccatccagcaagcgccccaaaactatcagcattgatgaaaacatggagccatcacctaccggggacttttatccaagtccttcgtcacccgctgctggttctaggacctggcatgagcgcgaccaggatatgagcagccctaccactatgaaaaagccagaaaagcccctcttctctagcgcttctccacaggactccagtcccagactgtcaacattccctcagcaccaccaccctggtatcccaggcgtggcacacagcgtgatctccacacgcactcctccacccccttcaccgctcccctttccaactcaggcaatcctgccccctgcccccagtagctatttttcacacccaactatcaggtacccccctcacctcaacccacaagacacccttaagaattatgtcccgagttatgatccatcaagcccacaaaccagtcagccaaacggttctggacaggtggttggcaaggtgccagggcattttactccagtcctagcaccttctcctcatcctagcgcagttagacctgtgacgctcagtatgaccgatactaagccaattaccacctccacagaaggcgaggctgccagccccaccgccactacgtacacggcttccggtacctctcaggctaatagatacgttggcctctccccaagggatcccagtttccttcatcagcagcaactcagaatttgtgattggacaatgaaccaaaacggaagacacttatacccttctacatccgaggatacgctgggcattacgtggcagagcccagggacctgggcatctctggtccccttccaagtatcaaaccgaacccccatactccccgctaatgtacagaattatggccttaacattattggtgagccctttctgcaggccgaaactagcaattag

SEQ ID NO: 270977 - DNA, 1713 bp, Artificial Sequence
  derived and/or modified sequence
atgatgtacagccccatctgcctgacccaggatgagttccaccccttcatcgaggccctgctgccccacgtgcgggccatcgcctacacctggttcaacctgcaggccaggaagaggaagtacttcaagaagcatgagaagaggatgagcaaggatgaggagagagctgtgaaggatgagctgctgtctgagaagccagagatcaagcagaagtgggccagccggctgctggccaagctgaggaaggacatccggcaggagtaccgggaggactttgtgctgactgtgacaggcaagaagcacccctgctgcgtgctgagcaacccagaccagaagggcaagatcagaagaattgactgcctgcggcaggccgacaaggtgtggaggctggacctggtgatggtgatcctcttcaagggcatccccctggagagcacagatggagagcggctgatgaagagcccccactgcaccaacccagccctgtgtgtgcagccccaccacatcaccgtgtctgtgaaggagctggacctcttcctggcctactacgtgcaggagcaggacagcggccagagcggcagccccagccacaatgaccctgccaagaaccccccaggctacctggaggacagctttgtgaagtctggagtcttcaacgtgtctgagctggtgcgggtgtccaggacccccatcacccagggcactggagtgaacttccccatcggggagatccccagccagccctactaccatgacatgaacagcggcgtgaacctgcagaggagcctgagcagcccccccagcagcaagaggcccaagaccatcagcattgatgagaacatggagcccagccccaccggggacttctaccccagccccagcagccctgctgctggcagcaggacctggcatgagcgggaccaggacatgagcagccccaccaccatgaagaagccagagaagcccctcttcagcagcgccagcccccaggacagcagcccccggctgagcaccttcccccagcaccaccaccctggcatccctggggtggcccacagcgtcatcagcaccaggaccccacctccacccagccccctgcccttccccacccaggccatcctgcccccagcccccagcagctacttcagccaccccaccatccgctacccaccccacctgaacccccaggacaccctgaagaactacgtgcccagctatgaccccagcagcccccagaccagccagcccaatggaagtggccaggtggtgggcaaggtgcccggccacttcacccctgtgctggcccccagcccccaccccagcgctgtgcggcctgtgaccctgtccatgacagacaccaagcccatcaccaccagcacagaaggagaggccgccagccccacagccaccacctacacagccagcggcaccagccaggccaacagatatgtgggcctgagcccccgggaccccagcttcctgcaccagcagcagctgcgcatctgtgactggaccatgaaccagaatggccgccacctgtaccccagcaccagcgaggacaccctgggcatcacctggcagagccctggcacctgggccagcctggtgcccttccaggtgagcaacagaacacccatcctgcctgccaacgtgcagaactacggcctgaacatcattggagagcccttcctgcaggccgagaccagcaactag

SEQ ID NO: 270978 - DNA, 1713 bp, Artificial Sequence
  derived and/or modified sequence
atgatgtacagccccatctgcctgacccaggacgagttccacccctttatagaggccttgctccctcatgttagagctatagcatacacttggtttaaccttcaggcaagaaaacggaaatacttcaagaagcacgaaaagcgcatgagcaaggacgaggagagggccgtcaaggatgaactcctgtcagaaaaacccgaaataaagcaaaagtgggccagccgactcctcgccaagttaaggaaagatatccggcaagagtatcgcgaagatttcgtgctgactgtgacgggcaaaaaacatccttgttgtgttctctccaatccagaccagaagggcaaaatccgccggattgactgtctgcgccaggccgataaagtttggcgcctggatctcgttatggtgatactttttaaaggcatacccctggagagtaccgatggagaacgccttatgaagtccccccattgcactaaccccgcactttgcgtccagccgcaccacatcactgttagcgtgaaggaactcgacttgtttttagcctattacgttcaggagcaggattcaggacaatcagggtcccctagccataatgatccagcaaaaaacccccccgggtacttagaagattccttcgtgaaaagcggagtgtttaacgtaagcgagctggtccgtgtaagcagaactcccatcacccaagggacgggggttaatttccccatcggagaaatcccaagtcaaccgtactatcatgatatgaattcaggagtgaacttacaacgcagtctctcctccccccccagcagtaagcgccccaagactatcagtatcgatgaaaatatggaaccttcacctaccggcgacttctatccgtctccctccagccccgccgccgggtccaggacctggcatgaacgggatcaggacatgagctcacctaccaccatgaagaagcctgagaagcccctgttttcttcagccagcccccaggactcctctcccaggctgagcactttcccccaacaccatcaccccgggatccctggagtggcccattccgtcatatcaacaagaacgcctccgccacctagtccgcttcccttccccactcaagccatcttgccaccagccccatctagctacttttcacatccaaccatcaggtacccacctcaccttaatccacaggatacacttaaaaactacgtaccttcatatgacccgtcctccccgcagactagccagcccaacggatcaggccaggtggtggggaaagtgcctggccatttcacaccagtactggctccgagtccacaccctagcgccgtgaggccagtgactctgagcatgaccgacacaaagcctatcaccactagtacagaaggtgaggccgctagccctacagccacaacctacactgcatctggaacgagtcaggcaaacagatatgtgggcctttcaccgcgggacccaagttttctgcatcagcagcagctgcggatttgtgattggactatgaaccagaacggacgacacctctacccaagcacatccgaggacacactcggcataacatggcagtccccgggtacttgggctagcctggtgccgtttcaagtatccaacagaaccccgattttgcccgcgaacgtccaaaattatggacttaatatcatcggagaacctttcctccaggccgagacttctaattag

SEQ ID NO: 270979 - DNA, 3318 bp, Artificial Sequence
  derived and/or modified sequence
aagcaagagagggagggaaaaaaaagagcctagagcagaaaagagaggagtttggagccgagcgggagagcgggatttatcgtttggaatttttcaggagatcgttttgatacccctgggctctgggcagcggcggcaacagcagcctccacgctcggccgggtcagacgcggggcgaggcgggcgggcgggcggccgggcgccgaagacccggcgcgggcggcggcggctgctgctgccggggaccacgcgccgcgagcctcttccgccccagagatcagcgctcgcgccccctccctcaccccggcctctcccttctcccccatcccaccccgcccccaccccggccctctcccgcgcgcgccccgccacccgcgcgcactcgctcacgctgcccctcgcgcacacacatggtcggctcgcggcaaagtttcgcctgcgatcaccactccgggatcctgccgcagtgcttggggctgtaaccttgaactttcccagcgcggtgacacattctccccgctctccctcccgcccgcccgctcgccctcctgcgccctcccgcgcccccctccccgccttttttgaaaaagcattttaccaccaaccaccaccccaatccaacccacaccgaaccttcgcgcaccccctacaccccaacaacaacaacaactgcaaaatagaaaacaaatccccaaacccaggcgaaaagcagccaacaccggcggcggcggcggcctcggcaagcacggccagcgcgctcggactgcaagagggttaaaagtgtagattggatttcacccctggaaatctagcacgccgagtgaacttgaatctttggctatttaaggaggactgggtttgttgtgaagttgcggtgatccagcgcagagccccgtcctgattgatcgcatcgcggggctcagatgactgtaaaatgaatagatgaaattcttgcttctcgaagattttcttgggcatctcccggaaagtgcgttttaaggcgaagtcatgatgtattctcccatctgtctcactcaggatgaatttcacccattcatcgaggcacttcttccacatgtccgtgcaattgcctatacttggttcaacctgcaggctcgaaaacgcaagtactttaaaaagcatgagaagcgaatgtcaaaggatgaagaaagagcagtcaaagatgagcttctcagtgaaaagcctgaaatcaaacagaagtgggcatccaggctccttgccaaactgcgcaaagatattcgccaggagtatcgagaggactttgtgctcaccgtgactggcaagaagcacccgtgctgtgtcttatccaatcccgaccagaagggtaagattaggagaatcgactgcctgcgacaggcagacaaagtctggcgtctggatctagtcatggtgatcctgttcaaaggcatccccttggaaagtaccgatggagagcggctcatgaaatccccacattgcacaaacccagcactttgtgtccagccacatcatatcacagtatcagttaaggagcttgatttgtttttggcatactacgtgcaggagcaagattctggacaatcaggaagtccaagccacaatgatcctgccaagaatcctccaggttaccttgaggatagttttgtaaaatctggagtcttcaatgtatcagaacttgtaagagtatccagaacgcccataacccagggaactggagtcaacttcccaattggagaaatcccaagccaaccatactatcatgacatgaactcgggggtcaatcttcagaggtctctgtcttctccaccaagcagcaaaagacccaaaactatatccatagatgaaaatatggaaccaagtcctacaggagacttttacccctctccaagttcaccagctgctggaagtcgaacatggcacgaaagagatcaagatatgtcttctccgactactatgaagaagcctgaaaagccattgttcagctctgcatctccacaggattcttccccaagactgagcactttcccccagcaccaccatcccggaatacctggagttgcacacagtgtcatctcaactcgaactccacctccaccttcaccgttgccatttccaacacaagctatccttcctccagccccatcgagctacttttctcatccaacaatcagatatcctccccacctgaatcctcaggatactctgaagaactatgtaccttcttatgacccatccagtccacaaaccagccagcctaacggcagtggtcaagtagtagggaaagtgcctggccatttcactcctgtcttggcaccctctccccatcccagtgcagtgcgacctgtgaccctgagcatgacagatactaaacccatcactacatccactgaaggtgaggcagcttcacctacagcaaccacctacacagcctcaggcacatctcaagccaatcgatatgtgggactaagcccaagagacccatccttcctacatcagcaacagctgaggatttgtgactggaccatgaatcaaaacggcaggcatttataccccagtaccagtgaggatacattgggaattacttggcaaagtcctggtacctgggctagcttggttcctttccaagtgtcaaataggacacccatcttaccggccaatgtccaaaattacggtttgaacataattggagaacctttccttcaagcagaaacaagcaactgagggaaaaagaaacacaacaatagtttaagaaattttttttttaaataaaaaaaaaggaaaagaggaagactggacaaaacaacacaaaggcagaaaggaaagaaactgaagaaagaagataatagaccagcaattgcagcacttacaatcactaattcccttaaggttgaaactgtaatgacataaaaagggtcgatgatatttcactgatggtagatcgcagcccctgcaacgtagcctttgttacatgaagtccgctgggaaatagatgttctgtctctatgacaatatattttaactgactttctagatgccttaatatttgcatgataagctagttttattggtttagtattcttgttgtttacgcatggaatcactattcctggttatctcaccaacgaaggctaggaggcggcgtcagaggtgctgggtgacagagccatgagccagccattttataagcactctgatttctaaaagttaaaaaaaatatatgaaatctctgtagcctttagttatcagtacagatttattaaatttcggcccttaacccagccttttccagtgtgtaacccagtttgaaatcttaaaaaa

SEQ ID NO: 270980 - DNA, 1713 bp, Artificial Sequence
  derived and/or modified sequence
atgatgtactcccccatatgcctgacccaggatgagtttcatcctttcatcgaggcgcttctcccccacgtgagagctattgcctatacttggttcaacctccaggctagaaaacgtaaatatttcaagaagcatgagaaacgcatgagtaaggacgaagagagagcagtgaaggatgaactcctgtccgagaagcccgaaatcaagcagaaatgggcctcaaggcttttagcaaagttgagaaaggatattcggcaggagtatagagaggacttcgtgcttacggttactggtaagaaacacccctgctgtgtgctgtccaatccagaccaaaagggaaagatccgacggattgactgcctacgccaggctgataaggtctggcgtctagacttagtaatggtaatcctattcaagggcatacccctggaatcaacagacggcgagaggctaatgaagagccctcactgtacaaaccccgctttgtgtgtgcagccccaccatattacagtatctgtcaaagagctagatctgttcctggcctattatgttcaggaacaggactctggacaatccggctccccttcccacaatgacccagcgaagaatcctcctggataccttgaggactcttttgtgaagtccggggtttttaatgttagtgaactcgtgcgcgtgagcagaacccctatcacccagggtaccggggtcaatttccctatcggcgagattccctcacaaccttattaccacgatatgaacagcggcgtcaatctccagcggtccttgagctctccaccgagctccaaacgcccaaaaaccattagtatcgacgagaacatggagccgtctcctaccggggatttttatccatccccatcaagtcccgctgccggttcaagaacttggcacgaaagagatcaggatatgagctcacctactaccatgaagaaaccagagaaaccgctctttagcagtgccagcccgcaggattcatctccaaggctcagcactttccctcagcatcaccatccaggcatcccaggagtggctcactctgttataagcaccaggacgcctcctcccccttcacctctgccttttccaacgcaggccatcctgccccctgctccgtccagctacttctcacaccctaccatcaggtacccccctcacctgaatcctcaggacaccttaaagaactacgtcccttcatacgacccttcgtcccctcagaccagccagccaaatggaagtggacaggttgtcggtaaggtaccagggcactttaccccagtactggcccctagtcctcatccgtctgctgtgcgccctgtcaccttgagtatgactgataccaaacccatcacaaccagcaccgagggcgaggccgcatcaccaaccgcaacgacatacactgcttcaggcacctctcaggctaaccgctacgtggggctttcccccagggatccatcatttcttcaccagcagcagctgaggatttgcgattggacgatgaaccaaaacggccgacacctgtacccttctacaagcgaggatacactcggtattacttggcagtcaccaggcacgtgggcttcgttagtcccctttcaggtgtcaaaccgcacccccattttacctgccaatgtccagaattacggcctgaatataatcggcgagccatttctccaggctgagacaagtaattag

SEQ ID NO: 270981 - DNA, 1713 bp, Artificial Sequence
  derived and/or modified sequence
atgatgtacagccccatctgcctgacccaggacgagttccaccccttcatcgaggccctgctgccccacgtgagagccatcgcctacacctggttcaacctgcaggccagaaagagaaagtacttcaagaagcacgagaagagaatgagcaaggacgaggagagagccgtgaaggacgagctgctgagcgagaagcccgagatcaagcagaagtgggccagcagactgctggccaagctgagaaaggacatcagacaggagtacagagaggacttcgtgctgaccgtgaccggcaagaagcacccctgctgcgtgctgagcaaccccgaccagaagggcaagatcagaagaatcgactgcctgagacaggccgacaaggtgtggagactggacctggtgatggtgatcctgttcaagggcatccccctggagagcaccgacggcgagagactgatgaagagcccccactgcaccaaccccgccctgtgcgtgcagccccaccacatcaccgtgagcgtgaaggagctggacctgttcctggcctactacgtgcaggagcaggacagcggccagagcggcagccccagccacaacgaccccgccaagaacccccccggctacctggaggacagcttcgtgaagagcggcgtgttcaacgtgagcgagctggtgagagtgagcagaacccccatcacccagggcaccggcgtgaacttccccatcggcgagatccccagccagccctactaccacgacatgaacagcggcgtgaacctgcagagaagcctgagcagcccccccagcagcaagagacccaagaccatcagcatcgacgagaacatggagcccagccccaccggcgacttctaccccagccccagcagccccgccgccggcagcagaacctggcacgagagagaccaggacatgagcagccccaccaccatgaagaagcccgagaagcccctgttcagcagcgccagcccccaggacagcagccccagactgagcaccttcccccagcaccaccaccccggcatccccggcgtggcccacagcgtgatcagcaccagaaccccccccccccccagccccctgcccttccccacccaggccatcctgccccccgcccccagcagctacttcagccaccccaccatcagataccccccccacctgaacccccaggacaccctgaagaactacgtgcccagctacgaccccagcagcccccagaccagccagcccaacggcagcggccaggtggtgggcaaggtgcccggccacttcacccccgtgctggcccccagcccccaccccagcgccgtgagacccgtgaccctgagcatgaccgacaccaagcccatcaccaccagcaccgagggcgaggccgccagccccaccgccaccacctacaccgccagcggcaccagccaggccaacagatacgtgggcctgagccccagagaccccagcttcctgcaccagcagcagctgagaatctgcgactggaccatgaaccagaacggcagacacctgtaccccagcaccagcgaggacaccctgggcatcacctggcagagccccggcacctgggccagcctggtgcccttccaggtgagcaacagaacccccatcctgcccgccaacgtgcagaactacggcctgaacatcatcggcgagcccttcctgcaggccgagaccagcaactag

SEQ ID NO: 270982 - protein, 561 aa, Artificial Sequence
  derived and/or modified sequence
MMYSPICLTQDEFHPFIEALLPHVRAIAYTWFNLQARKRKYFKKHEKRMSKDEERAVKDELLSEKPEIKQKWASRLLAKLRKDIRQEYREDFVLTVTGKKHPCCVLSNPDQKGKIRRIDCLRQADKVWRLDLVMVILFKGIPLESTDGERLMKSPHCTNPALCVQPHHITVSVKELDLFLAYYVQEQDSGQSGSPSHNDPAKNPPGYLEDSFVKSGVFNVSELVRVSRTPITQGTGVNFPIGEIPSQPYYHDMNSGVNLQRSLSSPPSSKRPKTISIDENMEPSPTGDFYPSPSSPAAGSRTWHERDQDMSSPTTMKKPEKPLFSSASPQDSSPRLSTFPQHHHPGIPGVAHSVISTRTPPPPSPLPFPTQAILPPAPSSYFSHPTIRYPPHLNPQDTLKNYVPSYDPSSPQTSQPNGSGQVVGKVPGHFTPVLAPSPHPSAVRPVTLSMTDTKPITTSTEAYTASGTSQANRYVGLSPRDPSFLHQQQLRICDWTMNQNGRHLYPSTSEDTLGITWQSPGTWASLVPFQVSNRTPILPANVQNYGLNIIGEPFLQAETSN

SEQ ID NO: 270983 - protein, 309 aa, Artificial Sequence
  derived and/or modified sequence
MNSGVNLQRSLSSPPSSKRPKTISIDENMEPSPTGDFYPSPSSPAAGSRTWHERDQDMSSPTTMKKPEKPLFSSASPQDSSPRLSTFPQHHHPGIPGVAHSVISTRTPPPPSPLPFPTQAILPPAPSSYFSHPTIRYPPHLNPQDTLKNYVPSYDPSSPQTSQPNGSGQVVGKVPGHFTPVLAPSPHPSAVRPVTLSMTDTKPITTSTEAYTASGTSQANRYVGLSPRDPSFLHQQQLRICDWTMNQNGRHLYPSTSEDTLGITWQSPGTWASLVPFQVSNRTPILPANVQNYGLNIIGEPFLQAETSN

SEQ ID NO: 270984 - DNA, 1686 bp, Artificial Sequence
  derived and/or modified sequence
atgatgtactccccaatctgtctaacacaggacgaattccaccctttcatcgaggccctgcttccgcacgtcagggccatcgcttatacctggtttaatttacaggctcggaagcgaaagtattttaaaaagcacgagaaacgcatgtctaaggatgaggagcgcgcggtgaaggatgagcttttgtctgaaaaaccagagatcaagcaaaagtgggctagcagactgttggccaaattgcggaaagacataagacaggagtatcgtgaagattttgtcctcactgtaaccggtaagaagcatccctgttgcgtcctctcaaaccctgaccagaagggcaaaattcgtcgcattgactgcctgaggcaggcagataaggtgtggagacttgatctggtgatggtaatattgttcaagggaatccccttagagagcaccgatggtgaaagactcatgaaaagtccccactgtacaaatccagccctgtgcgttcagccccaccacataaccgtgtccgtaaaggaactagacctgttcctcgcctactatgtgcaagaacaagacagcggccaatcggggtctccaagtcataacgatcctgctaaaaatccaccaggatatcttgaggactctttcgtcaagagcggcgtgtttaacgtctcagaactggtaagggtgtctaggacacctattactcagggaacaggggtgaacttccccattggggaaattccctcacagccatactaccacgatatgaatagtggagttaatctgcagagaagcctgagctcacccccatccagcaaaaggcctaagacaatttctattgacgagaatatggagcccagccctacgggcgacttctatccatcgcctagttcaccagcagcgggatcacgcacctggcacgagcgcgaccaagacatgtcaagtcctacaacaatgaaaaagccagaaaagccactatttagctcagcttcgcctcaggactcatcacctagactttctacctttccacagcaccatcaccccggtattcccggtgtcgcccattcagtgatcagtacaaggactccaccgcctccatctcccctcccctttccaacccaggccatactcccgcccgccccctcgtcatacttctctcatcccaccataagatatcctcctcacttaaaccctcaggacactctgaagaattatgtgccctcctatgatccaagttctccccagacttcgcaaccaaacggttccggacaagtcgtaggaaaagtacccggtcattttactccggtcctcgcgccttctccacacccctccgccgttaggccggtgactctgtctatgaccgacacaaagcctattaccactagtaccgaagcctacaccgcaagcggaacgtctcaggctaacagatatgtcggactcagcccaagagatccctctttcctacatcagcagcagttaagaatctgcgactggacaatgaatcagaacggccggcacttgtacccttctacatcggaggacactctgggcatcacctggcagtctcccgggacctgggcttctctggtgccattccaagtttccaaccggacccccatcctacccgcaaacgtgcagaattacggcctcaatatcattggggaacctttcctacaagccgagacatctaattag

SEQ ID NO: 270985 - DNA, 1686 bp, Artificial Sequence
  derived and/or modified sequence
atgatgtacagccccatctgcctgacccaggatgagttccaccccttcatcgaggccctgctgccccacgtgcgggccatcgcctacacctggttcaacctgcaggccaggaagaggaagtacttcaagaagcatgagaagaggatgagcaaggatgaggagagagctgtgaaggatgagctgctgtctgagaagccagagatcaagcagaagtgggccagccggctgctggccaagctgaggaaggacatccggcaggagtaccgggaggactttgtgctgactgtgacaggcaagaagcacccctgctgcgtgctgagcaacccagaccagaagggcaagatcagaagaattgactgcctgcggcaggccgacaaggtgtggaggctggacctggtgatggtgatcctcttcaagggcatccccctggagagcacagatggagagcggctgatgaagagcccccactgcaccaacccagccctgtgtgtgcagccccaccacatcaccgtgtctgtgaaggagctggacctcttcctggcctactacgtgcaggagcaggacagcggccagagcggcagccccagccacaatgaccctgccaagaaccccccaggctacctggaggacagctttgtgaagtctggagtcttcaacgtgtctgagctggtgcgggtgtccaggacccccatcacccagggcactggagtgaacttccccatcggggagatccccagccagccctactaccatgacatgaacagcggcgtgaacctgcagaggagcctgagcagcccccccagcagcaagaggcccaagaccatcagcattgatgagaacatggagcccagccccaccggggacttctaccccagccccagcagccctgctgctggcagcaggacctggcatgagcgggaccaggacatgagcagccccaccaccatgaagaagccagagaagcccctcttcagcagcgccagcccccaggacagcagcccccggctgagcaccttcccccagcaccaccaccctggcatccctggggtggcccacagcgtcatcagcaccaggaccccacctccacccagccccctgcccttccccacccaggccatcctgcccccagcccccagcagctacttcagccaccccaccatccgctacccaccccacctgaacccccaggacaccctgaagaactacgtgcccagctatgaccccagcagcccccagaccagccagcccaatggaagtggccaggtggtgggcaaggtgcccggccacttcacccctgtgctggcccccagcccccaccccagcgctgtgcggcctgtgaccctgtccatgacagacaccaagcccatcaccaccagcacagaggcctacacagccagcggcaccagccaggccaaccgctacgtgggcctgagcccccgggaccccagcttcctgcaccagcagcagctgcgcatctgtgactggaccatgaaccagaatggccgccacctgtaccccagcaccagcgaggacaccctgggcatcacctggcagagccctggcacctgggccagcctggtgcccttccaggtgagcaacagaacacccatcctgcctgccaacgtgcagaactacggcctgaacatcatcggggagcccttcctgcaggccgagaccagcaactag

SEQ ID NO: 270986 - DNA, 1686 bp, Artificial Sequence
  derived and/or modified sequence
atgatgtacagccccatctgcctgacccaggacgagttccaccccttcattgaggccctacttcctcatgtgagggccatcgcttacacgtggttcaatcttcaggcacgtaagcgcaaatatttcaaaaagcacgaaaaaagaatgagtaaggacgaggaacgggcagtgaaggacgaattactttctgagaagccagagatcaagcagaaatgggcctcacggctactcgcgaagctcaggaaggatattcgtcaggaatatcgggaagatttcgtgcttacagtgacaggtaagaaacatccttgctgcgtcctttccaaccccgatcagaagggcaaaatcagacggatcgattgcctgagacaggccgacaaagtgtggagacttgatctcgtgatggtgatcttgttcaaaggaatccccttagagtcgaccgatggggagagattgatgaagagcccccactgcaccaaccctgctctgtgtgtccagcctcatcatatcaccgtgagcgtgaaggaactcgaccttttcttagcctattacgtgcaggagcaggactctggtcagtccgggtccccgagtcataacgatccagctaagaacccgcctggttacctggaagactcctttgtaaagagtggtgtttttaacgttagtgaattggtccgcgtgtcacggacccccattacgcagggtacaggcgtcaacttccccatcggagaaatcccgtcccagccatattatcacgacatgaactctggagtcaacctgcaacggtctttatctagtccaccttcctctaagcggcctaaaacaatcagtatcgatgagaacatggaaccctccccaactggagacttctacccctcaccctcctcccccgccgccggatcccgcacttggcacgagcgtgatcaggacatgagctcaccaactacaatgaagaaacctgagaaacctctgttctctagtgcctccccgcaggacagttcgcccaggttaagcactttccctcagcatcatcaccccggtatccctggcgtagcccattccgtcatttctacgagaactcccccgccaccatcccccctgcctttccctacacaagctatactccctcctgcgccatcttcatatttttctcacccaaccatccgatacccacctcacctgaatccacaggatacactgaaaaactatgttccttcttacgacccatccagtccccagacctcccagccgaacgggtctggacaggtggttggtaaggtgcctggacacttcacccctgtgctcgcaccatctccccacccttctgcggtgagacccgtgaccctgtctatgaccgataccaaaccaataaccactagtacagaagcctacaccgcctccggcactagtcaagcgaacagatatgttggtttgtcaccacgcgatccatcttttctccatcaacaacaactgcgcatatgtgactggactatgaatcagaatggtaggcatttataccccagcaccagtgaggacactctggggatcacatggcaatctcccggcacatgggctagtcttgtgcctttccaggtatccaatagaacccctattctgcccgctaacgtacagaattacggcctcaacattataggcgagccctttctgcaggcagagacctctaactag

SEQ ID NO: 270987 - DNA, 2869 bp, Artificial Sequence
  derived and/or modified sequence
ccgggatcctgccgcagtgcttggggctgtaaccttgaactttcccagcgcggtgacacattctccccgctctccctcccgcccgcccgctcgccctcctgcgccctcccgcgcccccctccccgccttttttgaaaaagcattttaccaccaaccaccaccccaatccaacccacaccgaaccttcgcgcaccccctacaccccaacaacaacaacaactgcaaaatagaaaacaaatccccaaacccaggcgaaaagcagccaacaccggcggcggcggcggcctcggcaagcacggccagcgcgctcggactgcaagagggttaaaagtgtagattggatttcacccctggaaatctagcacgccgagtgaacttgaatctttggctatttaaggaggactgggtttgttgtgaagttgcggtgatccagcgcagagccccgtcctgattgatcgcatcgcggggctcagatgactgtaaaatgaatagatgaaattcttgcttctcgaagattttcttgggcatctcccggaaagtgcgttttaaggcgaagtcatgatgtattctcccatctgtctcactcaggatgaatttcacccattcatcgaggcacttcttccacatgtccgtgcaattgcctatacttggttcaacctgcaggctcgaaaacgcaagtactttaaaaagcatgagaagcgaatgtcaaaggatgaagaaagagcagtcaaagatgagcttctcagtgaaaagcctgaaatcaaacagaagtgggcatccaggctccttgccaaactgcgcaaagatattcgccaggagtatcgagaggactttgtgctcaccgtgactggcaagaagcacccgtgctgtgtcttatccaatcccgaccagaagggtaagattaggagaatcgactgcctgcgacaggcagacaaagtctggcgtctggatctagtcatggtgatcctgttcaaaggcatccccttggaaagtaccgatggagagcggctcatgaaatccccacattgcacaaacccagcactttgtgtccagccacatcatatcacagtatcagttaaggagcttgatttgtttttggcatactacgtgcaggagcaagattctggacaatcaggaagtccaagccacaatgatcctgccaagaatcctccaggttaccttgaggatagttttgtaaaatctggagtcttcaatgtatcagaacttgtaagagtatccagaacgcccataacccagggaactggagtcaacttcccaattggagaaatcccaagccaaccatactatcatgacatgaactcgggggtcaatcttcagaggtctctgtcttctccaccaagcagcaaaagacccaaaactatatccatagatgaaaatatggaaccaagtcctacaggagacttttacccctctccaagttcaccagctgctggaagtcgaacatggcacgaaagagatcaagatatgtcttctccgactactatgaagaagcctgaaaagccattgttcagctctgcatctccacaggattcttccccaagactgagcactttcccccagcaccaccatcccggaatacctggagttgcacacagtgtcatctcaactcgaactccacctccaccttcaccgttgccatttccaacacaagctatccttcctccagccccatcgagctacttttctcatccaacaatcagatatcctccccacctgaatcctcaggatactctgaagaactatgtaccttcttatgacccatccagtccacaaaccagccagcctaacggcagtggtcaagtagtagggaaagtgcctggccatttcactcctgtcttggcaccctctccccatcccagtgcagtgcgacctgtgaccctgagcatgacagatactaaacccatcactacatccactgaagcctacacagcctcaggcacatctcaagccaatcgatatgtgggactaagcccaagagacccatccttcctacatcagcaacagctgaggatttgtgactggaccatgaatcaaaacggcaggcatttataccccagtaccagtgaggatacattgggaattacttggcaaagtcctggtacctgggctagcttggttcctttccaagtgtcaaataggacacccatcttaccggccaatgtccaaaattacggtttgaacataattggagaacctttccttcaagcagaaacaagcaactgagggaaaaagaaacacaacaatagtttaagaaattttttttttaaataaaaaaaaaggaaaagaggaagactggacaaaacaacacaaaggcagaaaggaaagaaactgaagaaagaagataatagaccagcaattgcagcacttacaatcactaattcccttaaggttgaaactgtaatgacataaaaagggtcgatgatatttcactgatggtagatcgcagcccctgcaacgtagcctttgttacatgaagtccgctgggaaatagatgttctgtctctatgacaatatattttaactgactttctagatgccttaatatttgcatgataagctagttttattggtttagtattcttgttgtttacgcatggaatcactattcctggttatctcaccaacgaaggctaggaggcggcgtcagaggtgctgggtgacagagccatgagccagccattttataagcactctgatttctaaaagttaaaaaaaatatatgaaatctctgtagcctttagttatcagtacagatttattaaatttcggcccttaacccagccttttccagtgtgtaacccagtttgaaatcttaaaaaaagaaaaaatgaaaaaaaaaggaaaaaaa

SEQ ID NO: 270988 - DNA, 1855 bp, Artificial Sequence
  derived and/or modified sequence
acagccatgaacagcacactgaggaggacacaaaagaagtagacagaatctctgcctctgcttaggagtatgcaatttagttggggcgacaaaacttaaatgctagaaccaataaaagaagattacaaagcaactcgcaaattctggacaatcaggaagtccaagccacaatgatcctgccaagaatcctccaggttaccttgaggatagttttgtaaaatctggagtcttcaatgtatcagaacttgtaagagtatccagaacgcccataacccagggaactggagtcaacttcccaattggagaaatcccaagccaaccatactatcatgacatgaactcgggggtcaatcttcagaggtctctgtcttctccaccaagcagcaaaagacccaaaactatatccatagatgaaaatatggaaccaagtcctacaggagacttttacccctctccaagttcaccagctgctggaagtcgaacatggcacgaaagagatcaagatatgtcttctccgactactatgaagaagcctgaaaagccattgttcagctctgcatctccacaggattcttccccaagactgagcactttcccccagcaccaccatcccggaatacctggagttgcacacagtgtcatctcaactcgaactccacctccaccttcaccgttgccatttccaacacaagctatccttcctccagccccatcgagctacttttctcatccaacaatcagatatcctccccacctgaatcctcaggatactctgaagaactatgtaccttcttatgacccatccagtccacaaaccagccagcctaacggcagtggtcaagtagtagggaaagtgcctggccatttcactcctgtcttggcaccctctccccatcccagtgcagtgcgacctgtgaccctgagcatgacagatactaaacccatcactacatccactgaagcctacacagcctcaggcacatctcaagccaatcgatatgtgggactaagcccaagagacccatccttcctacatcagcaacagctgaggatttgtgactggaccatgaatcaaaacggcaggcatttataccccagtaccagtgaggatacattgggaattacttggcaaagtcctggtacctgggctagcttggttcctttccaagtgtcaaataggacacccatcttaccggccaatgtccaaaattacggtttgaacataattggagaacctttccttcaagcagaaacaagcaactgagggaaaaagaaacacaacaatagtttaagaaattttttttttaaataaaaaaaaaggaaaagaggaagactggacaaaacaacacaaaggcagaaaggaaagaaactgaagaaagaagataatagaccagcaattgcagcacttacaatcactaattcccttaaggttgaaactgtaatgacataaaaagggtcgatgatatttcactgatggtagatcgcagcccctgcaacgtagcctttgttacatgaagtccgctgggaaatagatgttctgtctctatgacaatatattttaactgactttctagatgccttaatatttgcatgataagctagttttattggtttagtattcttgttgtttacgcatggaatcactattcctggttatctcaccaacgaaggctaggaggcggcgtcagaggtgctgggtgacagagccatgagccagccattttataagcactctgatttctaaaagttaaaaaaaatatatgaaatctctgtagcctttagttatcagtacagatttattaaatttcggcccttaacccagccttttccagtgtgtaacccagtttgaaatctt

SEQ ID NO: 270989 - DNA, 1686 bp, Artificial Sequence
  derived and/or modified sequence
atgatgtattcccctatctgccttacgcaggacgagtttcacccttttatagaggccctgctgccccacgtacgcgctatcgcttatacctggtttaaccttcaggctaggaagagaaaatattttaagaaacacgaaaaaagaatgtcgaaggacgaggaaagagccgttaaagatgaattactctctgagaagccagaaattaaacagaagtgggcctccagacttttggctaagctgcgcaaggatattcgccaggaatacagagaggactttgtactgactgtgaccggaaaaaagcacccatgttgcgtgctctcaaacccagatcaaaagggtaaaattcggaggatcgactgcttgcggcaggcagacaaagtgtggagattggacctagttatggtcatcttgttcaaaggcatccccctggagtctacggacggcgagagacttatgaaaagtccccactgtacaaacccagctttatgtgtgcagcctcaccacattactgtgagtgtgaaagagctggacctgttcctggcatactacgtacaggagcaggactcggggcagtccggaagtccgtcgcataatgaccctgcaaagaatccccctggttacctagaggatagctttgtgaagtcaggagtcttcaatgtgagcgagcttgtgagagttagccggacgcctattacgcagggaaccggcgtgaattttccaataggcgagatccccagtcagccctattaccacgacatgaatagtggcgttaacctccaacgatcactatccagtcccccaagttccaaacggccaaagacaattagcattgatgaaaacatggagccgtcacctactggcgacttttatccctctccttcttctccagctgccggaagccggacctggcacgaaagggaccaagacatgtcatccccgaccacaatgaaaaaacccgaaaaacccttgtttagctctgcctccccccaagattcctcgccccgactgtccaccttccctcagcaccaccatccaggtattcccggagtggctcattctgttatttcaacacgcaccccccctcctcctagccccctccctttccctacacaggcaattcttccgcctgccccaagctcgtacttctcccaccccactattagataccctcctcatttgaatccccaggacaccctgaagaattatgtgccgagttatgatcccagtagtccccagacatctcaacctaacggctcgggccaggtcgtcggcaaggtgccaggccactttactcctgtccttgccccttctccacacccatccgctgtccgcccagttactctgagcatgactgatacaaaacctataactacctctactgaggcatatactgcttccggaacctctcaggccaaccggtatgtgggtctaagcccccgtgatcctagtttcctacatcaacagcaattgagaatctgtgattggaccatgaaccagaacggcaggcatctgtacccctctacctctgaggacacattaggaatcacctggcaatccccagggacttgggcttcactggtgcctttccaggtgtctaatcgcacccccatattgccagctaatgtccagaattacggccttaatatcatcggtgaaccctttcttcaggccgaaacttctaactag

SEQ ID NO: 270990 - DNA, 1686 bp, Artificial Sequence
  derived and/or modified sequence
atgatgtacagccccatctgcctgacccaggacgagttccaccccttcatcgaggccctgctgccccacgtgagagccatcgcctacacctggttcaacctgcaggccagaaagagaaagtacttcaagaagcacgagaagagaatgagcaaggacgaggagagagccgtgaaggacgagctgctgagcgagaagcccgagatcaagcagaagtgggccagcagactgctggccaagctgagaaaggacatcagacaggagtacagagaggacttcgtgctgaccgtgaccggcaagaagcacccctgctgcgtgctgagcaaccccgaccagaagggcaagatcagaagaatcgactgcctgagacaggccgacaaggtgtggagactggacctggtgatggtgatcctgttcaagggcatccccctggagagcaccgacggcgagagactgatgaagagcccccactgcaccaaccccgccctgtgcgtgcagccccaccacatcaccgtgagcgtgaaggagctggacctgttcctggcctactacgtgcaggagcaggacagcggccagagcggcagccccagccacaacgaccccgccaagaacccccccggctacctggaggacagcttcgtgaagagcggcgtgttcaacgtgagcgagctggtgagagtgagcagaacccccatcacccagggcaccggcgtgaacttccccatcggcgagatccccagccagccctactaccacgacatgaacagcggcgtgaacctgcagagaagcctgagcagcccccccagcagcaagagacccaagaccatcagcatcgacgagaacatggagcccagccccaccggcgacttctaccccagccccagcagccccgccgccggcagcagaacctggcacgagagagaccaggacatgagcagccccaccaccatgaagaagcccgagaagcccctgttcagcagcgccagcccccaggacagcagccccagactgagcaccttcccccagcaccaccaccccggcatccccggcgtggcccacagcgtgatcagcaccagaaccccccccccccccagccccctgcccttccccacccaggccatcctgccccccgcccccagcagctacttcagccaccccaccatcagataccccccccacctgaacccccaggacaccctgaagaactacgtgcccagctacgaccccagcagcccccagaccagccagcccaacggcagcggccaggtggtgggcaaggtgcccggccacttcacccccgtgctggcccccagcccccaccccagcgccgtgagacccgtgaccctgagcatgaccgacaccaagcccatcaccaccagcaccgaggcctacaccgccagcggcaccagccaggccaacagatacgtgggcctgagccccagagaccccagcttcctgcaccagcagcagctgagaatctgcgactggaccatgaaccagaacggcagacacctgtaccccagcaccagcgaggacaccctgggcatcacctggcagagccccggcacctgggccagcctggtgcccttccaggtgagcaacagaacccccatcctgcccgccaacgtgcagaactacggcctgaacatcatcggcgagcccttcctgcaggccgagaccagcaactag

SEQ ID NO: 270991 - protein, 487 aa, Artificial Sequence
  derived and/or modified sequence
MMYSPICLTQDEFHPFIEALLPHVRAIAYTWFNLQARKRKYFKKHEKRMSKDEERAVKDELLSEKPEIKQKWASRLLAKLRKDIRQEYREDFVLTVTGKKHPCCVLSNPDQKGKIRRIDCLRQADKVWRLDLVMVILFKGIPLESTDGERLMKSPHCTNPALCVQPHHITVSVKELDLFLAYYVQEQDSGQSGSPSHNDPAKNPPGYLEDSFVKSGVFNVSELVRVSRTPITQGTGVNFPIGEIPSQPYYHDMNSGVNLQRSLSSPPSSKRPKTISIDENMEPSPTGDFYPSPSSPAAGSRTWHERDQDMSSPTTMKKPEKPLFSSASPQDSSPRLSTFPQHHHPGIPGVAHSVISTRTPPPPSPLPFPTQAILPPAPSSYFSHPTIRYPPHLNPQDTLKNYVPSYDPSSPQTSQLRICDWTMNQNGRHLYPSTSEDTLGITWQSPGTWASLVPFQVSNRTPILPANVQNYGLNIIGEPFLQAETSN

SEQ ID NO: 270992 - DNA, 1464 bp, Artificial Sequence
  derived and/or modified sequence
atgatgtactcacccatttgtctaactcaggacgagtttcacccctttattgaggcgctcctccctcacgtgcgcgcaatcgcctatacgtggttcaatctgcaggcaagaaaacgtaagtatttcaagaaacatgaaaaacggatgtccaaggatgaggagagggctgtgaaggacgaactgctgagtgagaagccagagatcaagcagaaatgggcaagcagacttcttgctaaactcagaaaagacatacgccaggagtatagggaggactttgtgcttaccgttaccggaaaaaagcacccctgttgcgtgttgagcaaccctgatcagaaaggcaaaatccgtcgaattgattgtctgaggcaggcggacaaagtgtggcgattggacctggttatggtcattctgttcaagggtatcccactggaaagcactgatggagagcgtctaatgaagagccctcactgcaccaatccagccctttgcgtgcaaccccatcacatcacagtgtcagttaaggagttggacttattcctggcatactatgttcaagagcaagactcagggcaatctgggagtccctcccacaatgaccccgccaagaacccacccggctatctggaggactcctttgtgaagtcaggggtttttaatgtgagcgaactggtgcgggtgagcaggacacccattactcaggggaccggagtaaacttccccattggagagatcccatcacagccctactaccatgacatgaactccggagttaacctccagcgctccctgtctagccccccttcatcaaaaagaccaaagacaatatcaatagatgagaacatggaaccttcccctaccggagacttctatcctagtccttcatcacccgctgctggaagtcgtacgtggcacgagagggaccaggatatgagttccccgacaacgatgaaaaagcccgaaaaacctctgttttccagtgctagtccccaggactctagcccacggcttagcacattccctcaacatcaccatcccggcattcccggggtagctcattctgtgatttcaacgcggactccgccaccgcccagccctctgccgttcccgacccaggcaatcctgcctcccgcaccgtctagctactttagccatcccaccatccggtatcctccgcacctcaacccccaggacactctgaaaaactatgttccatcctatgacccctcgtccccgcagacctcccagctccggatatgcgattggacaatgaatcaaaacggtaggcatctgtatccatctacatcagaagatactctgggtatcacatggcagtcccccgggacgtgggcctccttggtgccgttccaggtttccaatcggacccctatattaccagcgaacgttcaaaactacgggctcaacatcatcggcgagccattcctgcaggctgaaacgtccaattag

SEQ ID NO: 270993 - DNA, 1464 bp, Artificial Sequence
  derived and/or modified sequence
atgatgtacagccccatctgcctgacccaggatgagttccaccccttcatcgaggccctgctgccccacgtgcgggccatcgcctacacctggttcaacctgcaggccaggaagaggaagtacttcaagaagcatgagaagaggatgagcaaggatgaggagagagctgtgaaggatgagctgctgtctgagaagccagagatcaagcagaagtgggccagccggctgctggccaagctgaggaaggacatccggcaggagtaccgggaggactttgtgctgactgtgacaggcaagaagcacccctgctgcgtgctgagcaacccagaccagaagggcaagatcagaagaattgactgcctgcggcaggccgacaaggtgtggaggctggacctggtgatggtgatcctcttcaagggcatccccctggagagcacagatggagagcggctgatgaagagcccccactgcaccaacccagccctgtgtgtgcagccccaccacatcaccgtgtctgtgaaggagctggacctcttcctggcctactacgtgcaggagcaggacagcggccagagcggcagccccagccacaatgaccctgccaagaaccccccaggctacctggaggacagctttgtgaagtctggagtcttcaacgtgtctgagctggtgcgggtgtccaggacccccatcacccagggcactggagtgaacttccccatcggggagatccccagccagccctactaccatgacatgaacagcggcgtgaacctgcagaggagcctgagcagcccccccagcagcaagaggcccaagaccatcagcattgatgagaacatggagcccagccccaccggggacttctaccccagccccagcagccctgctgctggcagcaggacctggcatgagcgggaccaggacatgagcagccccaccaccatgaagaagccagagaagcccctcttcagcagcgccagcccccaggacagcagcccccggctgagcaccttcccccagcaccaccaccctggcatccctggggtggcccacagcgtcatcagcaccaggaccccacctccacccagccccctgcccttccccacccaggccatcctgcccccagcccccagcagctacttcagccaccccaccatccgctacccaccccacctgaacccccaggacaccctgaagaactacgtgcccagctatgaccccagcagcccccagaccagccagctgcgcatctgtgactggaccatgaaccagaatggccgccacctgtaccccagcaccagcgaggacaccctgggcatcacctggcagagccctggcacctgggccagcctggtgcccttccaggtgagcaacagaacacccatcctgcctgccaacgtgcagaactacggcctgaacatcatcggggagcccttcctgcaggccgagaccagcaactag

SEQ ID NO: 270994 - DNA, 1464 bp, Artificial Sequence
  derived and/or modified sequence
atgatgtacagccccatctgcctgacccaggacgagttccaccccttcattgaggccctgttgccccacgtgcgcgccatcgcctatacatggtttaacttgcaggcccgcaaaaggaagtacttcaagaaacatgagaagcgaatgagtaaggatgaggagcgcgccgtgaaggatgaactgctgtctgagaaaccggagattaagcagaagtgggcttcaagattgctcgccaagctcaggaaggacatccgccaggagtacagggaagatttcgtcctgaccgtgacaggcaagaaacacccatgttgtgtcttgtcgaatcccgaccagaagggcaaaattagacgaattgactgccttagacaggccgataaggtgtggcgcctggatctggtgatggtgattctcttcaaggggattcccctggaatccaccgatggagagcggctcatgaaatcgccccactgcaccaatccagctttgtgcgtacagccccatcacattacagtgagtgtgaaggagctggacctgttcttggcatactacgtccaggaacaagacagtgggcagtctggatcaccttcgcacaacgaccctgctaagaatccgcctggatatctcgaagatagtttcgtgaaatccggagttttcaatgtgtccgaattggttcgggtctcacggacccctatcacacaaggcactggtgtaaactttcccattggggagataccttcacagccctactaccacgatatgaactcaggggtgaatttacaaaggtcactgtcttcacctccctctagcaaacgtccaaaaaccatatcaatcgacgagaatatggaacccagtcccaccggggatttctatcccagccccagcagccccgcagccggtagccgcacctggcatgagcgagaccaggacatgagctcgcctaccacaatgaagaagcccgagaaacctctatttagcagtgccagcccccaagatagttccccaaggctcagtacgttcccccagcaccaccaccccggcattcctggggtcgcccactctgttatcagtactaggacccctccaccgccaagtcccctgccgtttcccacgcaggccatcctcccgcccgcaccatcctcatacttttcacacccaacaatcaggtatccaccgcacttgaatcctcaggataccttgaagaactatgtgccaagctacgatccttcatcccctcagacatcacaactgaggatatgtgattggactatgaatcagaacggacgacacctctacccctcaacgtctgaagataccctgggcatcacatggcagtcccctggcacgtgggccagcctcgtgcctttccaggtctcaaacagaaccccaatcctgcccgcgaacgtgcagaactatggcttgaacattataggagagccttttcttcaggccgagacctccaattag

SEQ ID NO: 270995 - DNA, 3129 bp, Artificial Sequence
  derived and/or modified sequence
tcgagcggggtccagagggtggaaccggtgaatttttcaacttccaagttttgcaacgaaagaaagcaagagagggagggaaaaaaaagagcctagagcagaaaagagaggagtttggagccgagcgggagagcgggatttatcgtttggaatttttcaggagatcgttttgatacccctgggctctgggcagcggcggcaacagcagcctccacgctcggccgggtcagacgcggggcgaggcgggcgggcgggcggccgggcgccgaagacccggcgcgggcggcggcggctgctgctgccggggaccacgcgccgcgagcctcttccgccccagagatcagcgctcgcgccccctccctcaccccggcctctcccttctcccccatcccaccccgcccccaccccggccctctcccgcgcgcgccccgccacccgcgcgcactcgctcacgctgcccctcgcgcacacacatggtcggctcgcggcaaagtttcgcctgcgatcaccactccgggatcctgccgcagtgcttggggctgtaaccttgaactttcccagcgcggtgacacattctccccgctctccctcccgcccgcccgctcgccctcctgcgccctcccgcgcccccctccccgccttttttgaaaaagcattttaccaccaaccaccaccccaatccaacccacaccgaaccttcgcgcaccccctacaccccaacaacaacaacaactgcaaaatagaaaacaaatccccaaacccaggcgaaaagcagccaacaccggcggcggcggcggcctcggcaagcacggccagcgcgctcggactgcaagagggttaaaagtgtagattggatttcacccctggaaatctagcacgccgagtgaacttgaatctttggctatttaaggaggactgggtttgttgtgaagttgcggtgatccagcgcagagccccgtcctgattgatcgcatcgcggggctcagatgactgtaaaatgaatagatgaaattcttgcttctcgaagattttcttgggcatctcccggaaagtgcgttttaaggcgaagtcatgatgtattctcccatctgtctcactcaggatgaatttcacccattcatcgaggcacttcttccacatgtccgtgcaattgcctatacttggttcaacctgcaggctcgaaaacgcaagtactttaaaaagcatgagaagcgaatgtcaaaggatgaagaaagagcagtcaaagatgagcttctcagtgaaaagcctgaaatcaaacagaagtgggcatccaggctccttgccaaactgcgcaaagatattcgccaggagtatcgagaggactttgtgctcaccgtgactggcaagaagcacccgtgctgtgtcttatccaatcccgaccagaagggtaagattaggagaatcgactgcctgcgacaggcagacaaagtctggcgtctggatctagtcatggtgatcctgttcaaaggcatccccttggaaagtaccgatggagagcggctcatgaaatccccacattgcacaaacccagcactttgtgtccagccacatcatatcacagtatcagttaaggagcttgatttgtttttggcatactacgtgcaggagcaagattctggacaatcaggaagtccaagccacaatgatcctgccaagaatcctccaggttaccttgaggatagttttgtaaaatctggagtcttcaatgtatcagaacttgtaagagtatccagaacgcccataacccagggaactggagtcaacttcccaattggagaaatcccaagccaaccatactatcatgacatgaactcgggggtcaatcttcagaggtctctgtcttctccaccaagcagcaaaagacccaaaactatatccatagatgaaaatatggaaccaagtcctacaggagacttttacccctctccaagttcaccagctgctggaagtcgaacatggcacgaaagagatcaagatatgtcttctccgactactatgaagaagcctgaaaagccattgttcagctctgcatctccacaggattcttccccaagactgagcactttcccccagcaccaccatcccggaatacctggagttgcacacagtgtcatctcaactcgaactccacctccaccttcaccgttgccatttccaacacaagctatccttcctccagccccatcgagctacttttctcatccaacaatcagatatcctccccacctgaatcctcaggatactctgaagaactatgtaccttcttatgacccatccagtccacaaaccagccagctgaggatttgtgactggaccatgaatcaaaacggcaggcatttataccccagtaccagtgaggatacattgggaattacttggcaaagtcctggtacctgggctagcttggttcctttccaagtgtcaaataggacacccatcttaccggccaatgtccaaaattacggtttgaacataattggagaacctttccttcaagcagaaacaagcaactgagggaaaaagaaacacaacaatagtttaagaaattttttttttaaataaaaaaaaaggaaaagaggaagactggacaaaacaacacaaaggcagaaaggaaagaaactgaagaaagaagataatagaccagcaattgcagcacttacaatcactaattcccttaaggttgaaactgtaatgacataaaaagggtcgatgatatttcactgatggtagatcgcagcccctgcaacgtagcctttgttacatgaagtccgctgggaaatagatgttctgtctctatgacaatatattttaactgactttctagatgccttaatatttgcatgataagctagttttattggtttagtattcttgttgtttacgcatggaatcactattcctggttatctcaccaacgaaggctaggaggcggcgtcagaggtgctgggtgacagagccatgagccagccattttataagcactctgatttctaaaagttaaaaaaaatatatgaaatctctgtagcctttagttatcagtacagatttattaaatttcggcccttaacccagccttttccagtgtgtaacccagtttgaaatcttaaa

SEQ ID NO: 270996 - DNA, 1464 bp, Artificial Sequence
  derived and/or modified sequence
atgatgtactctcctatttgcctgacacaggacgagttccaccctttcatcgaggctctgttgccgcacgtgcgcgcaattgcttacacatggttcaacctgcaggccagaaaacggaagtactttaaaaaacatgaaaagcgcatgagtaaagacgaagagagggccgttaaagatgagctcctctcagagaaaccagagattaaacaaaaatgggcgagcaggctgctggccaagttaaggaaggacattagacaggagtatcgggaagattttgtactgactgtaacaggtaagaagcatccatgctgtgttctgagcaaccccgaccaaaaagggaagatccgcaggatcgactgtctgagacaggctgataaagtctggcgactggacttggtgatggtgatactctttaagggaatcccactagaaagcacggacggcgagcgcttaatgaagtctccgcactgcactaatccagcactgtgcgtgcagccccaccatatcacagtatcagttaaggagctggacctctttttggcttattacgtgcaagaacaggacagtgggcagtccggttcaccatctcataacgatcccgctaaaaacccaccaggttacttagaggactccttcgtgaagtctggcgtgttcaacgtatcagaactggttagagtgtctcgcacccctattacgcagggcactggtgtaaatttccctattggcgagattcctagccagccttactaccacgatatgaattctggtgtgaatcttcagcggagtctgtcatcacctccctcctctaaaaggcccaaaactattagcatagatgagaacatggagccttcacccaccggagatttttacccatccccatcctcacctgccgctggtagccgcacttggcacgaacgggaccaggatatgtccagtccgaccaccatgaagaagcctgagaaacccctgttctcctctgccagcccacaggattcttctcctagattatcaacttttccacaacatcaccacccaggtatcccgggagtcgcacactctgtgatcagcacccggactcctccccctcccagtccactaccatttccaacccaggccattttgccccctgcaccgtcgagctatttcagccacccaacaattagatatcccccacacttgaaccctcaggacaccctcaaaaactatgtgccgtcatacgatcccagcagcccccagacctcacagcttagaatctgcgattggaccatgaatcagaatggtcgccacctgtacccgagcacctctgaggatactttgggcatcacttggcagtctccaggaacttgggccagcctcgttccattccaggtgtccaaccggacacctatcctgcccgctaatgtccagaactacggcctgaatattattggggagcctttcctgcaggcagaaacatcaaactag

SEQ ID NO: 270997 - DNA, 1464 bp, Artificial Sequence
  derived and/or modified sequence
atgatgtacagccccatctgcctgacccaggacgagttccaccccttcatcgaggccctgctgccccacgtgagagccatcgcctacacctggttcaacctgcaggccagaaagagaaagtacttcaagaagcacgagaagagaatgagcaaggacgaggagagagccgtgaaggacgagctgctgagcgagaagcccgagatcaagcagaagtgggccagcagactgctggccaagctgagaaaggacatcagacaggagtacagagaggacttcgtgctgaccgtgaccggcaagaagcacccctgctgcgtgctgagcaaccccgaccagaagggcaagatcagaagaatcgactgcctgagacaggccgacaaggtgtggagactggacctggtgatggtgatcctgttcaagggcatccccctggagagcaccgacggcgagagactgatgaagagcccccactgcaccaaccccgccctgtgcgtgcagccccaccacatcaccgtgagcgtgaaggagctggacctgttcctggcctactacgtgcaggagcaggacagcggccagagcggcagccccagccacaacgaccccgccaagaacccccccggctacctggaggacagcttcgtgaagagcggcgtgttcaacgtgagcgagctggtgagagtgagcagaacccccatcacccagggcaccggcgtgaacttccccatcggcgagatccccagccagccctactaccacgacatgaacagcggcgtgaacctgcagagaagcctgagcagcccccccagcagcaagagacccaagaccatcagcatcgacgagaacatggagcccagccccaccggcgacttctaccccagccccagcagccccgccgccggcagcagaacctggcacgagagagaccaggacatgagcagccccaccaccatgaagaagcccgagaagcccctgttcagcagcgccagcccccaggacagcagccccagactgagcaccttcccccagcaccaccaccccggcatccccggcgtggcccacagcgtgatcagcaccagaaccccccccccccccagccccctgcccttccccacccaggccatcctgccccccgcccccagcagctacttcagccaccccaccatcagataccccccccacctgaacccccaggacaccctgaagaactacgtgcccagctacgaccccagcagcccccagaccagccagctgagaatctgcgactggaccatgaaccagaacggcagacacctgtaccccagcaccagcgaggacaccctgggcatcacctggcagagccccggcacctgggccagcctggtgcccttccaggtgagcaacagaacccccatcctgcccgccaacgtgcagaactacggcctgaacatcatcggcgagcccttcctgcaggccgagaccagcaactag

SEQ ID NO: 270998 - DNA, 1019 bp, Artificial Sequence
  derived and/or modified sequence
atggatttagagaaaaattatccgactcctcggaccagcaggacaggtattatgagacaggaagcatcaagcctggggtaattggaggatccaaaccaaaggtcgccacacccaaagtggtggaaaaaatcgctgaatataaacgccaaaatcccaccatgtttgcctgggagatcagggaccggctgctggcagagcgggtgtgtgacaatgacaccgtgcctagcgtcagttccatcaacaggatcatccggacaaaagtacagcagccacccaaccaaccagtcccagcttccagtcacagcatagtgtccactggctccgtgacgcaggtgtcctcggtgagcacggattcggccggctcgtcgtactccatcagcggcatcctgggcatcacgtcccccagcgccgacaccaacaagcgcaagagagacgaaggtattcaggagtctccggtgccgaacggccactcgcttccgggcagagacttcctccggaagcagatgcggggagacttgttcacacagcagcagctggaggtgctggaccgcgtgtttgagaggcagcactactcagacatcttcaccaccacagagcccatcaagcccgagcagaccacagagtattcagccatggcctcgctggctggtgggctggacgacatgaaggccaatctggccagccccacccctgctgacatcgggagcagtgtgccaggcccgcagtcctaccccattgtgacaggccgtgacttggcgagcacgaccctccccgggtaccctccacacgtcccccccgctggacagggcagctactcagcaccgacgctgacagggatggtgcctgggagtgagttttccgggagtccctacagccaccctcagtattcctcgtacaacgactcctggaggttccccaacccggggctgcttggctccccctactattatagcgctgccgcccgaggagccgccccacctgcagccgccactgcctatgaccgtcactgacccttggag

SEQ ID NO: 270999 - DNA, 1059 bp, Artificial Sequence
  derived and/or modified sequence
atggccctgctgggccaggccctgaagtggcagcagcaccagggcctgctgccccccggcatgaccatcgacctgttcagaggcaaggccgccgtgaaggacgtggaggaggagaagttccccacccagctgagcagacacatcaagttcggccagaagagccacgtggagtgcgccagattcagccccgacggccagtacctggtgaccggcagcgtggacggcttcatcgaggtgtggaacttcaccaccggcaagatcagaaaggacctgaagtaccaggcccaggacaacttcatgatgatggacgacgccgtgctgtgcatgtgcttcagcagagacaccgagatgctggccaccggcgcccaggacggcaagatcaaggtgtggaagatccagagcggccagtgcctgagaagattcgagagagcccacagcaagggcgtgacctgcctgagcttcagcaaggacagcagccagatcctgagcgccagcttcgaccagaccatcagaatccacggcctgaagagcggcaagaccctgaaggagttcagaggccacagcagcttcgtgaacgaggccaccttcacccaggacggccactacatcatcagcgccagcagcgacggcaccgtgaagatctggaacatgaagaccaccgagtgcagcaacaccttcaagagcctgggcagcaccgccggcaccgacatcaccgtgaacagcgtgatcctgctgcccaagaaccccgagcacttcgtggtgtgcaacagaagcaacaccgtggtgatcatgaacatgcagggccagatcgtgagaagcttcagcagcggcaagagagagggcggcgacttcgtgtgctgcgccctgagccccagaggcgagtggatctactgcgtgggcgaggacttcgtgctgtactgcttcagcaccgtgaccggcaagctggagagaaccctgaccgtgcacgagaaggacgtgatcggcatcgcccaccacccccaccagaacctgatcgccacctacagcgaggacggcctgctgaagctgtggaagccctag

SEQ ID NO: 271000 - DNA, 1059 bp, Artificial Sequence
  derived and/or modified sequence
atggctctcctgggacaagctttaaagtggcagcagcatcagggtctcctgccaccaggaatgacgatcgacctgttccggggcaaggcagcagtcaaggacgtggaagaggagaagtttcctacacaactctcccgccatatcaagttcggacaaaagagtcacgttgaatgcgctaggtttagtccggatggccaatacctggtgacggggtccgtggacggtttcatagaagtgtggaatttcactaccgggaaaatccgcaaggacctgaaatatcaagcacaggataacttcatgatgatggacgacgcggtactgtgtatgtgtttcagtcgggacaccgagatgctggccaccggggcccaagatgggaaaatcaaagtctggaaaattcagagcggccagtgtctcaggcgatttgaacgcgctcacagtaagggggtcacctgtctgtcattctctaaagactcttcccagattctgtctgccagctttgaccagaccattcggatccacggtcttaagagcggcaaaactttaaaagagttccgggggcactcctcatttgtaaatgaagcaacctttacccaggacggccactacatcatctcagctagctctgacggcaccgtgaagatctggaatatgaaaacaaccgagtgttcaaatacattcaagtcacttggcagtactgccggaacagacatcacagtgaattcagtgattctactccctaagaatcctgagcactttgtggtctgcaaccgtagtaacactgtggtgatcatgaacatgcagggccagatcgtccggagttttagcagcggcaagagagagggtggagactttgtgtgttgtgcgctctcaccccgtggagaatggatttattgtgttggtgaggattttgtcctctactgtttctccacagtaaccggcaaactagagcggacactgactgttcacgagaaggacgtgattggtatcgcccaccacccgcaccaaaacctgattgcgacttacagcgaggatggcctgctcaagctgtggaaaccatag

SEQ ID NO: 271001 - DNA, 1059 bp, Artificial Sequence
  derived and/or modified sequence
atggccctgctgggccaggccctgaagtggcagcagcaccagggcctgctgcccccaggcatgaccatcgacctcttccggggcaaggctgctgtgaaggatgtggaggaggagaagttccccacccagctgagccgccacatcaagtttggccagaagagccacgtggagtgtgcccgcttctccccagatggccagtacctggtgacaggctctgtggatggcttcatcgaggtgtggaacttcaccaccgggaagatcaggaaggacctgaagtaccaggcccaggacaacttcatgatgatggatgatgctgtgctgtgcatgtgcttcagccgggacacagagatgctggccaccggggcccaggacggcaagatcaaggtgtggaagatccagagcggccagtgcctgcggagatttgagcgggcccacagcaaaggagtgacctgcctgtccttcagcaaggacagcagccagatcctgagcgccagctttgaccagaccatccgcatccacggcctgaagagcggcaagaccctgaaggagttccggggccacagcagctttgtgaatgaggccaccttcacccaggacggccactacatcatcagcgccagcagtgatggcaccgtgaagatctggaacatgaagaccacagaatgtagcaacaccttcaagagcctgggcagcacagctggaacagacatcaccgtgaacagcgtcatcctgctgcccaagaaccctgagcactttgtggtgtgcaacagaagcaacacagtggtgatcatgaacatgcagggccagatcgtgcgctccttcagcagcggcaagcgggagggcggggactttgtgtgctgtgccctgagccccagaggagagtggatctactgtgtgggagaagattttgtgctgtactgcttcagcacagtgacaggcaagctggagaggaccctgactgtgcatgagaaggatgtgattggaattgcccaccacccccaccagaacctgattgccacctacagtgaagatggcctgctgaagctgtggaagccctag

SEQ ID NO: 271002 - DNA, 1059 bp, Artificial Sequence
  derived and/or modified sequence
atggccctgctgggccaggccctgaagtggcagcagcaccagggcttactgcccccggggatgactatagatttatttaggggaaaagccgccgtgaaagacgtggaagaggagaaattccctactcagctgtcaagacatatcaagttcggtcagaaaagccatgtggagtgcgcccgattctcgcctgacgggcagtacctcgtgactggatccgtggacggtttcatcgaggtatggaattttaccacagggaagattcgaaaggaccttaagtatcaggcgcaggacaactttatgatgatggacgatgccgtactgtgcatgtgtttctccagggacaccgagatgctggctaccggagcacaggatgggaaaattaaggtctggaaaatccaatcagggcagtgcttgagacgattcgagcgcgcccattctaaaggggtgacctgtctgtccttttcaaaggactcatcccagatcttgagtgcttccttcgatcagacgattcgcatccacggactaaagtccggcaaaaccctcaaggagtttagggggcattcgtcctttgttaacgaagccaccttcacacaggatggacactacataataagcgcgagctctgatggaacggtgaaaatctggaatatgaaaaccaccgagtgttcaaacaccttcaaatcactgggatccaccgccggaacagatatcacagtaaactctgtgatccttctgccaaagaacccagagcattttgtggtttgcaaccggagtaacacagtggtgattatgaacatgcagggccaaatcgtacgatcctttagctcaggaaagcgcgaggggggcgattttgtttgttgcgcgctatcccccaggggggaatggatttactgcgtgggcgaagactttgttctgtattgcttcagtacggtgactggtaaacttgaacgcaccctgacggttcacgagaaagacgttatagggattgctcaccatcctcaccaaaaccttattgccacgtatagcgaagatggactgcttaagttgtggaaaccttag

SEQ ID NO: 271003 - DNA, 1059 bp, Artificial Sequence
  derived and/or modified sequence
atggcactgctcgggcaggcacttaagtggcagcagcaccagggactgctccctcctggcatgacaatcgatttatttagggggaaagctgccgttaaagacgttgaggaagaaaagtttccaacacaactcagccggcacatcaagtttggtcagaaaagtcatgtcgaatgtgccagattcagcccagatgggcagtatttggtgactggttcagtcgatgggttcatcgaagtgtggaacttcactacgggaaagattcgcaaggatctgaagtatcaggctcaggacaatttcatgatgatggacgacgcagtgctatgtatgtgcttttccagagacactgagatgctagccaccggagcacaggacggaaagattaaagtgtggaagatccagtccggccaatgcctgcgcagatttgaacgtgctcactctaagggagtcacgtgcctgtctttttctaaggactcttcccagatcctgagcgccagtttcgatcagaccatacgcatccacgggctgaaatccgggaaaacacttaaggaatttcgagggcactcgtccttcgtgaatgaggcaacctttacccaggacggccactacatcataagtgctagcagcgacgggaccgtgaaaatctggaacatgaaaaccacagagtgttctaatacctttaagtctcttggatccacagctggtaccgatataactgtgaacagtgtgatcctgctgcccaagaatccggagcattttgttgtgtgcaacaggtctaataccgtggtcatcatgaatatgcagggacagatcgtgagatccttttcttccgggaagcgagaagggggtgacttcgtgtgttgcgcactttcccccaggggcgaatggatatactgcgtaggggaagactttgtactgtactgcttttcaaccgtgacgggaaaattagaacgcactttaactgtccacgaaaaggatgtcatcggcattgctcatcatcctcatcagaatctgattgccacctattccgaagatggccttctgaagttgtggaagccttag

SEQ ID NO: 271004 - DNA, 1296 bp, Artificial Sequence
  derived and/or modified sequence
gtgtgttgcgcgactggccttgagggagagctggggcctgctcccggagagatacggctatgtcgatcgaaatcgaatcttcggagcatacccagatggaagtagcaaagaaaagagaagagcagcaattgcccaggccttagctggcgaagtcagtgtggtgcctccatctcgtctcatggcattgctgggacaggcactgaagtggcagcagcatcagggattgcttcctcctggtatgaccatagatttgtttcgaggcaaggcagctgtcaaagatgtggaagaagaaaagtttcctacacaactgagcaggcatattaagtttggtcagaaatcacatgtggagtgtgctcgattttctccagatggtcagtatttggtcactgggtctgttgatggattcattgaagtatggaactttactactggaaaaatcagaaaggatcttaagtaccaggcccaagataactttatgatgatggatgatgctgtcctctgcatgtgtttcagcagagatacagaaatgttagcaactggggcccaagatggaaaaatcaaggtgtggaagattcagagtggacaatgtttaaggagatttgagagggcacacagtaagggtgtcacctgtctaagcttttctaaggatagcagtcagatccttagtgcttcttttgaccagacaattagaattcatggtttaaaatctgggaaaaccctgaaggaatttcgtggccattcctcctttgttaacgaagcaacatttacacaagatggacattacattattagtgcatcctctgatggcactgtaaagatctggaatatgaagaccacagaatgttcaaatacctttaaatccctgggcagcaccgcagggacagatattaccgtcaacagtgtgattctacttcctaaaaaccctgagcactttgtggtgtgcaacagatcaaacacggtggtcatcatgaacatgcaggggcagattgtcagaagcttcagttctggtaaaagagaaggtggggactttgtttgctgtgccctctctccccgtggtgaatggatctactgtgtaggggaggactttgtgctctactgtttcagtacagtcactggcaaactggagagaactttgacagtgcacgagaaggatgtgattggtattgcacatcaccctcatcagaacctgattgctacctacagtgaagatggactcctaaagctctggaaaccataattcaacttttctttttaaatcagctcgaaagcatgtacttaaatgaagcatattcatgt

SEQ ID NO: 271005 - DNA, 918 bp, Artificial Sequence
  derived and/or modified sequence
atggagatcatgacgaagactattgagtatttacagcccaaccccgcatctcgtgccaaattatctatgattaacacaatgagcaagattcgcgggcaggagaagggtcccggctacccacaggcagaggccttactggccgaagccatgcttaaattcggccgcgaactgggggacgattgcaacttcgggcctgctctgggcgaagtcggagaggctatgcgtgagctgagcgaggtgaaagacagccttgacattgaggttaaacagaatttcatcgatcccctccaaaacctccatgacaaagatcttcgggaaattcagcaccacctgaagaaattggaaggccggcggcttgatttcgactataagaagaaaagacagggtaagattcccgacgaagagctccggcaggctctggaaaagttcgacgaaagcaaagagatcgctgaatcaagcatgttcaatctgttagagatggacattgagcaggtctctcaacttagtgccctggttcaggcgcagctggaataccacaaacaagccgtgcagattctgcagcaggttacagttcgtctcgaagaacgtatccgacaggcttcctcacagcctagacgggaatatcagcccaaaccacgcatgtctctagagtttcctacgggcgatagtacacagcccaatggaggactgagccatacgggcacaccgaagccctcaggagtgcagatggaccagccatgttgtagagccttgtatgacttcgagcccgaaaacgagggagagctggggttcaaggaaggcgacattatcacgctgactaaccagatagacgagaattggtatgagggaatgctacatggacacagcggtttctttcccatcaactatgtggaaatcctcgtggcactgcctcactag

SEQ ID NO: 271006 - DNA, 546 bp, Artificial Sequence
  derived and/or modified sequence
atgagcgtggcgggcctgaagaaacagtttcacaaagccacccaaaaagtttcagaaaaggttggcggtgcagagggaaccaagctagatgatgacttcaaggaaatggagatcgagcaggtgagccagctctcagctctggtacaagctcagttggaatatcacaagcaggccgtgcagatccttcaacaggttaccgtacggcttgaagaacgaattcgtcaggcctcctcacagcctcgtcgtgagtatcagcccaagccccgcatgtctctggaatttcctactggagattctacacagcctaacgggggcttaagccacacaggcaccccgaagcccagcggtgtgcagatggaccaaccttgctgtagagcactttatgatttcgagcctgagaacgagggagagctcgggtttaaggagggagatatcataacacttaccaaccaaatcgacgagaactggtatgagggtatgttacacggccatagtggcttctttccaattaactatgtggagatactggtcgctttgccacactag

SEQ ID NO: 271007 - DNA, 918 bp, Artificial Sequence
  derived and/or modified sequence
atggagatcatgaccaagaccatcgagtacctgcagcccaacccagccagccgggccaagctgtccatgatcaacaccatgagcaagatccggggccaggagaagggccctggctacccccaggccgaggccctgctggccgaggccatgctgaagtttggccgggagctgggagatgactgcaactttggacctgccctgggggaggtgggggaggccatgagggagctgtctgaggtgaaggacagcctggacatcgaggtgaagcagaacttcatcgaccccctgcagaacctgcatgacaaggacctgcgggagatccagcaccacctgaagaagctggagggccgccgcctggactttgactacaagaagaagaggcagggcaagatcccagatgaggagctgcggcaggccctggagaagtttgatgagagcaaggagattgctgagagctccatgttcaacctgctggagatggacatcgagcaggtgtcccagctgagcgccctggtgcaggcccagctggagtaccacaagcaggccgtgcagatcctgcagcaggtgacagtgcggctggaggagcgcatccggcaggccagcagccagccccggcgggagtaccagcccaagcccaggatgagcctggagttccccaccggggacagcacccagcccaatggaggcctgagccacacaggcacccccaagcccagcggcgtgcagatggaccagccctgctgccgggccctgtatgactttgagccagaaaatgaaggagagctgggcttcaaggagggggacatcatcaccctgaccaaccagattgatgagaactggtatgagggcatgctgcacggccacagcggcttcttccccatcaactacgtggagatcctggtggccctgccccactag

SEQ ID NO: 271008 - DNA, 546 bp, Artificial Sequence
  derived and/or modified sequence
atgtctgtggccggcctgaagaagcagttccacaaggccacccagaaggtgtctgagaaggtgggcggcgctgagggcaccaagctggatgatgacttcaaggagatggagattgagcaggtgtcccagctgagcgccctggtgcaggcccagctggagtaccacaagcaggccgtgcagatcctgcagcaggtgacagtgcggctggaggagcgcatccggcaggccagcagccagccccggcgggagtaccagcccaagcccaggatgagcctggagttccccaccggggacagcacccagcccaatggaggcctgagccacacaggcacccccaagcccagcggcgtgcagatggaccagccctgctgccgggccctgtatgactttgagccagaaaatgaaggagagctgggcttcaaggagggggacatcatcaccctgaccaaccagattgatgagaactggtatgagggcatgctgcacggccacagcggcttcttccccatcaactacgtggagatcctggtggccctgccccactag

SEQ ID NO: 271009 - DNA, 918 bp, Artificial Sequence
  derived and/or modified sequence
atggagatcatgaccaagaccatcgagtacctgcagcccaaccccgcgtcccgggccaaattgtcaatgatcaatacgatgtcaaagatccgcggacaggagaaggggccgggttatccacaggcagaagctttattggctgaggctatgctgaaattcggcagagaacttggagatgattgcaactttggccccgctctgggcgaggttggcgaggcgatgagagaactgagcgaagttaaggattcactagatatcgaggtcaagcagaacttcattgaccctctgcagaacctccacgacaaggatctgagagagattcagcatcatctgaagaaactggaggggcggcgcctggactttgactacaagaaaaaacgccagggtaaaatccccgacgaggagctcaggcaggcgctggagaaattcgacgaatccaaagagatcgcggagtcttccatgtttaatctattggaaatggatattgaacaagtaagccagctttcagcattggtccaagcacagctagaatatcacaagcaagcggttcaaattctgcagcaggtgaccgtgagactggaagaacgcatacgtcaagcgtcatcccagccgagaagagagtaccagccaaagccaaggatgtctttagaattccccaccggcgacagcacccaacccaatgggggccttagtcacactggaacccccaagccgtcgggggtccagatggaccagccgtgctgtcgggctctgtatgacttcgagcctgagaatgagggagagctgggtttcaaggagggcgatatcataaccctcacaaatcagatcgacgaaaactggtatgagggcatgcttcatggccactccgggttctttccaattaattatgtagaaatcctcgttgccctgccacattag

SEQ ID NO: 271010 - DNA, 546 bp, Artificial Sequence
  derived and/or modified sequence
atgagcgtggccggcctgaagaagcagttccacaaggccacccagaaggtttctgagaaagtcgggggcgcggaggggacaaaactggatgacgacttcaaagaaatggagatcgagcaagttagccagttgagcgccttggtccaagcccagctggagtatcataagcaggctgtgcagatcctccaacaagtgactgtccgcctcgaagaaaggattcgtcaggcctctagccaaccaagaagagagtatcagcccaagccacgtatgtcgcttgagtttcctacaggggattcaacacaacctaatggcggtttaagtcacaccggaacaccaaagccctctggcgtacaaatggaccagccttgttgtcgggcattgtatgactttgagcctgagaacgaaggcgaactcgggttcaaggaaggggacatcataacccttaccaatcaaatcgacgagaactggtatgaggggatgttacatggtcactcagggtttttcccaatcaattacgtagagatcttagtggctctgccccattag

SEQ ID NO: 271011 - DNA, 918 bp, Artificial Sequence
  derived and/or modified sequence
atggagatcatgacgaagacgattgagtatctgcagcctaatcccgcttcccgggctaagctgtccatgatcaataccatgtcaaagatcagaggacaagagaagggccctggttatccccaagcagaggccctgctggccgaggctatgttaaagtttggacgagaacttggcgacgattgtaatttcgggccagcactcggagaggtcggtgaagctatgcgcgaactgagcgaggtaaaggactcgctagatatcgaggtgaagcagaatttcatcgatcccctccaaaatctgcatgataaagacttgcgagagattcagcaccacctaaaaaaattggaaggaaggaggttggatttcgattataagaaaaagagacagggcaagatccccgacgaggagctccgccaggccctcgaaaagttcgacgagagtaaagagatagcagagtccagtatgttcaatctcctggaaatggacatagagcaggtgtcgcaattgagcgctctcgtgcaggcccagctggagtatcacaaacaggctgtccagattctccagcaggtgactgttagactagaagaacgcatccggcaggcgtcaagtcagccaaggagggagtaccaacccaagccacgtatgagcttggagtttccgactggggatagtacccaacctaacgggggactgtcacacaccggcaccccaaaaccatccggtgtccaaatggaccagccttgctgccgggcattgtacgacttcgaacccgagaatgagggcgaactaggatttaaggaaggggacatcatcaccctgaccaatcagatcgacgagaattggtacgaaggaatgctgcatggacatagtggcttttttcctattaattatgtggaaattttggttgccctcccacactag

SEQ ID NO: 271012 - DNA, 546 bp, Artificial Sequence
  derived and/or modified sequence
atgagcgtggctgggctgaaaaagcaattccacaaagccactcaaaaagtgtccgaaaaggtaggaggcgcagaggggacgaaactggatgatgatttcaaggaaatggagatcgaacaggtgtcacaactgagtgcactggtccaagcacagctagagtatcacaagcaagctgttcagattctgcagcaggtcaccgttagacttgaggaaaggatcaggcaggcctcgagtcaaccacgccgagaataccagccaaaacctcgcatgtccttggaatttccaacaggcgacagtactcagcccaatgggggtttgagccacacaggaacccccaagcctagtggggttcagatggatcagccttgttgccgggctctgtacgactttgagcccgaaaacgagggcgagctagggtttaaggaaggcgatataattacccttaccaaccagattgatgagaactggtatgagggcatgctgcacggacattctggattctttccaatcaactacgtcgagatactcgtggcactccctcactag

SEQ ID NO: 271013 - DNA, 1025 bp, Artificial Sequence
  derived and/or modified sequence
gttggcgccagcatccaggtaccgcgcgccacagcacctgcctgggcgttcccgcgcttggggcggggcttcccgcgtcccctttaagaggccgcatcacccgcccttgacgtcagagtgtttctccgcaagagcccgtgtcccgctaggctccgcgccctcgcgcccatagccccggcggcggcacgaccagaggcggccaggggagcgcgccgccccgctcggccctccagtccccctccgcctcctccctcccgcacagcagccgccagcgcggcctcctgcaccatgtcggtggccggcctcaagaagcagttccataaagccactcagaaagtgagtgagaaggttggaggagctgaaggaaccaagctagatgatgacttcaaagagatggaaattgaacaagtgagccagctctctgcacttgtgcaagctcagctggagtaccacaagcaggcagtccagatcctgcagcaagtcacggtcagactggaagaaagaataagacaggcttcatctcagcctagaagggaatatcaacctaaaccacgaatgagcctggagtttccaactggagacagtactcagcccaatgggggtctctcccacacaggcactcccaaaccttcaggtgtccaaatggatcagccctgctgccgagctctgtacgactttgaacctgaaaatgaaggggagttgggatttaaagagggcgatatcatcacactcactaaccaaattgatgagaactggtatgaggggatgctgcatggccattcaggcttcttccccatcaattatgtggaaattctggttgccctgccccattaggatgttatgctggctggctcgcctcctcttgacccagatagttacggttaaccactgctttggcaatgctgcttataacacatcccaagtgcaggccgcagtggtccacgtcatccagccccaccaagtgactttggttgacttgtgggctcccacaggagtcatggtgatggatgatatcctcttagcct

SEQ ID NO: 271014 - DNA, 918 bp, Artificial Sequence
  derived and/or modified sequence
atggagatcatgaccaagaccatcgagtacctgcagcccaaccccgccagcagagccaagctgagcatgatcaacaccatgagcaagatcagaggccaggagaagggccccggctacccccaggccgaggccctgctggccgaggccatgctgaagttcggcagagagctgggcgacgactgcaacttcggccccgccctgggcgaggtgggcgaggccatgagagagctgagcgaggtgaaggacagcctggacatcgaggtgaagcagaacttcatcgaccccctgcagaacctgcacgacaaggacctgagagagatccagcaccacctgaagaagctggagggcagaagactggacttcgactacaagaagaagagacagggcaagatccccgacgaggagctgagacaggccctggagaagttcgacgagagcaaggagatcgccgagagcagcatgttcaacctgctggagatggacatcgagcaggtgagccagctgagcgccctggtgcaggcccagctggagtaccacaagcaggccgtgcagatcctgcagcaggtgaccgtgagactggaggagagaatcagacaggccagcagccagcccagaagagagtaccagcccaagcccagaatgagcctggagttccccaccggcgacagcacccagcccaacggcggcctgagccacaccggcacccccaagcccagcggcgtgcagatggaccagccctgctgcagagccctgtacgacttcgagcccgagaacgagggcgagctgggcttcaaggagggcgacatcatcaccctgaccaaccagatcgacgagaactggtacgagggcatgctgcacggccacagcggcttcttccccatcaactacgtggagatcctggtggccctgccccactag

SEQ ID NO: 271015 - DNA, 546 bp, Artificial Sequence
  derived and/or modified sequence
atgagcgtggccggcctgaagaagcagttccacaaggccacccagaaggtgagcgagaaggtgggcggcgccgagggcaccaagctggacgacgacttcaaggagatggagatcgagcaggtgagccagctgagcgccctggtgcaggcccagctggagtaccacaagcaggccgtgcagatcctgcagcaggtgaccgtgagactggaggagagaatcagacaggccagcagccagcccagaagagagtaccagcccaagcccagaatgagcctggagttccccaccggcgacagcacccagcccaacggcggcctgagccacaccggcacccccaagcccagcggcgtgcagatggaccagccctgctgcagagccctgtacgacttcgagcccgagaacgagggcgagctgggcttcaaggagggcgacatcatcaccctgaccaaccagatcgacgagaactggtacgagggcatgctgcacggccacagcggcttcttccccatcaactacgtggagatcctggtggccctgccccactag

SEQ ID NO: 271016 - protein, 468 aa, Artificial Sequence
  derived and/or modified sequence
MDSLASLVLCGVSLLLSGTVEGAMDLILINSLPLVSDAETSLTCIASGWRPHEPITIGRDFEALMNQHQDPLEVTQDVTREWAKKVVWKREKASKINGAYFCEGRVRGEAIRIRTMKMRQQASFLPATLTMTVDKGDNVNISFKKVLIKEEDAVIYKNGSFIHSVPRHEVPDILEVHLPHAQPQDAGVYSARYIGGNLFTSAFTRLIVRRCEAQKWGPECNHLCTACMNNGVCHEDTGECICPPGFMGRTCEKACELHTFGRTCKERCSGQEGCKSYVFCLPDPYGCSCATGWKGLQCNEGIQRMTPKIVDLPDHIEVNSGKFNPICKASGWPLPTNEEMTLVKPDGTVLHPKDFNHTDHFSVAIFTIHRILPPDSGVWVCSVNTVAGMVEKPFNISVKVLPKPLNAPNVIDTGHNFAVINISSEPYFGDGPIKSKKLLYKPVNHYEAWQHIQVSMEKQRLTKANSDI

SEQ ID NO: 271017 - DNA, 1407 bp, Artificial Sequence
  derived and/or modified sequence
atggacagcctggccagcctggtgctgtgcggcgtgagcctgctgctgagcggcaccgtggagggcgccatggacctgatcctgatcaacagcctgcccctggtgagcgacgccgagaccagcctgacctgcatcgccagcggctggagaccccacgagcccatcaccatcggcagagacttcgaggccctgatgaaccagcaccaggaccccctggaggtgacccaggacgtgaccagagagtgggccaagaaggtggtgtggaagagagagaaggccagcaagatcaacggcgcctacttctgcgagggcagagtgagaggcgaggccatcagaatcagaaccatgaagatgagacagcaggccagcttcctgcccgccaccctgaccatgaccgtggacaagggcgacaacgtgaacatcagcttcaagaaggtgctgatcaaggaggaggacgccgtgatctacaagaacggcagcttcatccacagcgtgcccagacacgaggtgcccgacatcctggaggtgcacctgccccacgcccagccccaggacgccggcgtgtacagcgccagatacatcggcggcaacctgttcaccagcgccttcaccagactgatcgtgagaagatgcgaggcccagaagtggggccccgagtgcaaccacctgtgcaccgcctgcatgaacaacggcgtgtgccacgaggacaccggcgagtgcatctgcccccccggcttcatgggcagaacctgcgagaaggcctgcgagctgcacaccttcggcagaacctgcaaggagagatgcagcggccaggagggctgcaagagctacgtgttctgcctgcccgacccctacggctgcagctgcgccaccggctggaagggcctgcagtgcaacgagggcatccagagaatgacccccaagatcgtggacctgcccgaccacatcgaggtgaacagcggcaagttcaaccccatctgcaaggccagcggctggcccctgcccaccaacgaggagatgaccctggtgaagcccgacggcaccgtgctgcaccccaaggacttcaaccacaccgaccacttcagcgtggccatcttcaccatccacagaatcctgccccccgacagcggcgtgtgggtgtgcagcgtgaacaccgtggccggcatggtggagaagcccttcaacatcagcgtgaaggtgctgcccaagcccctgaacgcccccaacgtgatcgacaccggccacaacttcgccgtgatcaacatcagcagcgagccctacttcggcgacggccccatcaagagcaagaagctgctgtacaagcccgtgaaccactacgaggcctggcagcacatccaggtgagcatggagaagcagagactgaccaaggccaacagcgacatctag

SEQ ID NO: 271018 - DNA, 2931 bp, Artificial Sequence
  derived and/or modified sequence
atggacagcctggccagcctggtgctgtgcggcgtgagcctgctgctgagcgccagcttcctgcccgccaccctgaccatgaccgtggacaagggcgacaacgtgaacatcagcttcaagaaggtgctgatcaaggaggaggacgccgtgatctacaagaacggcagcttcatccacagcgtgcccagacacgaggtgcccgacatcctggaggtgcacctgccccacgcccagccccaggacgccggcgtgtacagcgccagatacatcggcggcaacctgttcaccagcgccttcaccagactgatcgtgagaagatgcgaggcccagaagtggggccccgagtgcaaccacctgtgcaccgcctgcatgaacaacggcgtgtgccacgaggacaccggcgagtgcatctgcccccccggcttcatgggcagaacctgcgagaaggcctgcgagctgcacaccttcggcagaacctgcaaggagagatgcagcggccaggagggctgcaagagctacgtgttctgcctgcccgacccctacggctgcagctgcgccaccggctggaagggcctgcagtgcaacgagggcatccagagaatgacccccaagatcgtggacctgcccgaccacatcgaggtgaacagcggcaagttcaaccccatctgcaaggccagcggctggcccctgcccaccaacgaggagatgaccctggtgaagcccgacggcaccgtgctgcaccccaaggacttcaaccacaccgaccacttcagcgtggccatcttcaccatccacagaatcctgccccccgacagcggcgtgtgggtgtgcagcgtgaacaccgtggccggcatggtggagaagcccttcaacatcagcgtgaaggtgctgcccaagcccctgaacgcccccaacgtgatcgacaccggccacaacttcgccgtgatcaacatcagcagcgagccctacttcggcgacggccccatcaagagcaagaagctgctgtacaagcccgtgaaccactacgaggcctggcagcacatccaggtgaccaacgagatcgtgaccctgaactacctggagcccagaaccgagtacgagctgtgcgtgcagctggtgagaagaggcgagggcggcgagggccaccccggccccgtgagaagattcaccaccgccagcatcggcctgcccccccccagaggcctgaacctgctgcccaagagccagaccaccctgaacctgacctggcagcccatcttccccagcagcgaggacgacttctacgtggaggtggagagaagaagcgtgcagaagagcgaccagcagaacatcaaggtgcccggcaacctgaccagcgtgctgctgaacaacctgcaccccagagagcagtacgtggtgagagccagagtgaacaccaaggcccagggcgagtggagcgaggacctgaccgcctggaccctgagcgacatcctgcccccccagcccgagaacatcaagatcagcaacatcacccacagcagcgccgtgatcagctggaccatcctggacggctacagcatcagcagcatcaccatcagatacaaggtgcagggcaagaacgaggaccagcacgtggacgtgaagatcaagaacgccaccatcacccagtaccagctgaagggcctggagcccgagaccgcctaccaggtggacatcttcgccgagaacaacatcggcagcagcaaccccgccttcagccacgagctggtgaccctgcccgagagccaggcccccgccgacctgggcggcggcaagatgctgctgatcgccatcctgggcagcgccggcatgacctgcctgaccgtgctgctggccttcctgatcatcctgcagctgaagagagccaacgtgcagagaagaatggcccaggccttccagaacagagaggagcccgccgtgcagttcaacagcggcaccctggccctgaacagaaaggtgaagaacaaccccgaccccaccatctaccccgtgctggactggaacgacatcaagttccaggacgtgatcggcgagggcaacttcggccaggtgctgaaggccagaatcaagaaggacggcctgagaatggacgccgccatcaagagaatgaaggagtacgccagcaaggacgaccacagagacttcgccggcgagctggaggtgctgtgcaagctgggccaccaccccaacatcatcaacctgctgggcgcctgcgagcacagaggctacctgtacctggccatcgagtacgccccccacggcaacctgctggacttcctgagaaagagcagagtgctggagaccgaccccgccttcgccatcgccaacagcaccgccagcaccctgagcagccagcagctgctgcacttcgccgccgacgtggccagaggcatggactacctgagccagaagcagttcatccacagagacctggccgccagaaacatcctggtgggcgagaactacgtggccaagatcgccgacttcggcctgagcagaggccaggaggtgtacgtgaagaagaccatgggcagactgcccgtgagatggatggccatcgagagcctgaactacagcgtgtacaccaccaacagcgacgtgtggagctacggcgtgctgctgtgggagatcgtgagcctgggcggcaccccctactgcggcatgacctgcgccgagctgtacgagaagctgccccagggctacagactggagaagcccctgaactgcgacgacgaggtgtacgacctgatgagacagtgctggagagagaagccctacgagagacccagcttcgcccagatcctggtgagcctgaacagaatgctggaggagagaaagacctacgtgaacaccaccctgtacgagaagttcacctacgccggcatcgactgcagcgccgaggaggccgcctag

SEQ ID NO: 271019 - DNA, 1407 bp, Artificial Sequence
  derived and/or modified sequence
atggattctctggcgagtttggtgctatgtggcgtgagtcttctgctgagtgggacggttgagggcgcaatggacctcatcctcataaatagcttgcctttggtctccgatgcagagacatccctgacttgcatcgcgagcgggtggcgtccacatgaaccaataacaattggcagagactttgaggccctgatgaaccagcaccaggaccctctcgaggtgacacaggacgtcactcgcgaatgggctaaaaaggtggtctggaagcgagaaaaagcttccaagataaatggcgcatatttttgcgaggggagagtccgaggagaggcaattaggattagaaccatgaagatgaggcagcaagcttcgttcctgcctgcaaccctgacaatgactgtggataaaggagataacgtgaatatatcattcaagaaggtgctgataaaggaggaagacgccgtgatttacaagaatggctcctttatccatagcgtcccccggcacgaagtgcccgacatcctagaggtgcacctgcctcatgctcagcctcaggacgctggcgtgtactccgctcgatatatcggaggaaacctgtttacgtcagcgttcacacgtcttatagtgcgcaggtgcgaagcacagaaatgggggccagaatgcaatcacctctgcactgcctgcatgaataacggagtctgccacgaggataccggcgagtgtatctgtcccccaggcttcatggggcgcacctgtgagaaagcttgcgagctccatactttcgggcggacttgcaaagagcgttgtagcggccaggagggctgtaaatcctatgtcttctgcctaccggacccctatgggtgttcttgtgctacaggttggaaaggtctgcagtgcaacgagggaattcagagaatgactccgaagattgtagacctgcctgaccatatcgaagttaacagcggtaaatttaaccctatatgcaaggcatctgggtggcccttgcccacgaacgaagagatgacactggttaaaccagacgggaccgtattacatcccaaggattttaaccacacggaccactttagtgtcgcaatttttacgattcacaggatcctgcctcccgatagtggagtctgggtttgctccgtgaatactgtggctggaatggtcgagaagccctttaatattagcgtgaaagtgctgcctaaaccacttaacgctcctaacgtgatcgatacgggccataactttgccgtgattaatatttccagtgagccctactttggggacgggccgataaaatccaaaaaactgctgtacaaacctgttaaccactacgaagcatggcagcatatccaggtgtccatggaaaaacagcgtctgactaaagcaaactccgatatttag

SEQ ID NO: 271020 - DNA, 2931 bp, Artificial Sequence
  derived and/or modified sequence
atggattccttagcctccctggtcctatgcggagtgtccctgttgctttctgcatcttttctaccagccacactgactatgactgttgacaagggtgacaacgtcaatataagcttcaaaaaggtgcttatcaaggaagaggatgcagttatctataaaaacggtagcttcattcacagcgtacctaggcacgaagtgcccgacattttagaggtccatctgccccatgcccagcctcaggacgccggggtttactctgctcgatacattggtggcaatctgtttacaagcgcttttaccagactgatcgtgcggcgctgtgaggctcagaagtgggggccagaatgcaaccatctctgcaccgcatgtatgaataacggcgtatgccacgaggatacgggagagtgtatttgcccgcccggctttatgggccggacctgcgaaaaggcctgcgaactgcacacattcggccggacctgcaaggagaggtgcagcggccaggaagggtgtaaatcctatgtcttttgtttgccagacccttatggatgcagttgcgcaacgggctggaaggggctacagtgcaacgagggcatccagaggatgactcccaagatagttgatctgccagaccacatcgaggtaaattctggcaaattcaatcccatttgtaaggcatccgggtggccactgcccactaacgaggagatgaccttggtgaaacccgatggcacggttttacacccaaaggacttcaatcacaccgaccacttcagcgtagctatttttacgatacatcgcatccttcccccggacagcggcgtctgggtgtgctctgtcaatacagtggccggaatggtggaaaaaccctttaacatttctgtcaaagtcttgcccaaacccctgaacgcaccaaacgtgatcgacacaggtcacaatttcgctgtgattaacatctcaagcgaaccatacttcggcgacggacccattaagtccaaaaagcttctgtataagcctgtgaatcactacgaggcatggcagcacattcaggtgacaaatgagattgtgaccctcaattatctggagccccgcacggagtacgagctttgcgtccaactggtccggcgcggcgaaggaggcgagggacatcctggacccgtgaggcgtttcactaccgccagcatcggacttccacctccgcgcggcctgaatttgctgccaaagtcccaaactacccttaatttaacttggcagcccatttttccaagtagtgaagatgatttctacgtggaagtagaacgtcgcagcgttcaaaagtcagaccagcaaaacatcaaagtgcctggaaatttgactagcgtcctgcttaacaacttgcaccctagagagcagtacgtagtgagagctcgggtgaacaccaaggcacagggtgagtggtcggaggatttaacagcgtggactctcagtgatattctgcctccacaaccagaaaatatcaagatttcaaatatcactcactcgtctgcagtgatctcttggaccatccttgacggctattccataagttcaatcactatccgctacaaagtccaggggaaaaatgaagaccagcatgtagatgtgaagattaagaacgccacaatcacccagtaccagctgaagggcctggagccagagaccgcttatcaggtagacatctttgccgagaacaatatcggtagctcaaatccagccttcagtcatgaattggtgacattaccagagagccaagccccagcggatctgggcggcggtaagatgctgctgatcgcaattttgggaagcgccgggatgacctgcttaaccgtgctcttggcctttctgatcatactgcagctcaaaagagcaaatgtccagcggaggatggcacaggctttccagaatcgggaagagcctgcagttcagtttaactcaggcactcttgcgctgaacaggaaggtcaagaacaatcccgacccaaccatttacccagtcttagattggaatgatattaaattccaggacgtcatcggtgaggggaattttggtcaagtcttgaaagccagaatcaaaaaagacgggctcagaatggatgctgctattaaaaggatgaaggaatacgcttccaaggatgatcaccgtgattttgccggcgagttagaagttctctgcaagctggggcatcaccctaatatcattaacctgttgggcgcctgcgagcatcgagggtacttgtacctggccatagagtacgcaccccacggcaatcttctagatttcttgcggaagtcccgcgtgctagagaccgaccctgcattcgccattgccaacagcaccgcctccactttatcctcccagcagctcctacacttcgccgcagatgtcgcacgaggaatggactacctcagccaaaagcaattcattcaccgggatctggccgcccggaatattctggtgggtgaaaactacgtagccaagattgccgacttcggcttgtcacgggggcaggaggtgtatgtaaaaaagactatgggccggctcccagtccgctggatggcaattgagtccctgaattactctgtatacactactaactcagacgtgtggagctacggggtgttactgtgggagatcgtgagcctcggaggtacgccttattgcggcatgacctgcgcagagctttatgagaagttgccgcaagggtaccggcttgaaaagcctctgaactgcgacgacgaggtgtacgatcttatgcgtcagtgttggcgcgagaaaccctacgagcggcccagtttcgcacaaatcttagtatcactgaataggatgctggaggagcggaaaacctatgtgaacaccaccctgtacgagaaattcacctatgctgggatagattgctctgccgaggaagccgcatag

SEQ ID NO: 271021 - DNA, 1407 bp, Artificial Sequence
  derived and/or modified sequence
atggacagcctggccagcctggtgctgtgtggggtgtccctgctgctgtctggaacagtggagggcgccatggacctgatcctgatcaacagcctgcccctggtgtctgatgctgagaccagcctgacctgcatcgccagcggctggaggcctcatgagcccatcaccatcggccgggactttgaggccctgatgaaccagcaccaggaccccctggaggtgacccaggatgtgacccgggagtgggccaagaaggtggtgtggaagcgggagaaggccagcaagatcaatggagcctacttctgtgagggccgggtgcggggggaggccatccgcatccgcaccatgaagatgaggcagcaggccagcttcctgcctgccaccctgaccatgacagtggacaagggggacaacgtgaacatctccttcaagaaggtgctgatcaaggaggaggatgctgtgatctacaagaatggcagcttcatccacagcgtgcccaggcatgaggtgcctgacatcctggaggtgcacctgccccacgcccagccccaggatgctggggtgtacagcgcccgctacatcggcggcaacctcttcaccagcgccttcacccggctgattgtgagaagatgtgaggcccagaagtggggccctgagtgcaaccacctgtgcacagcctgcatgaacaacggggtgtgccatgaagatactggagagtgcatctgccccccaggcttcatgggccgcacctgtgagaaggcctgtgagctgcacaccttcggccgcacctgcaaggagcgctgcagcggccaggagggctgcaagagctatgtgttctgcctgcctgacccctacggctgcagctgtgccaccggctggaagggcctgcagtgcaatgaaggcatccagaggatgacccccaagatcgtggacctgcctgaccacatcgaggtgaacagcggcaagttcaaccccatctgcaaggccagcggctggcccctgcccaccaatgaggagatgaccctggtgaagccagatggcaccgtgctgcaccccaaggacttcaaccacacagaccacttctctgtggccatcttcaccatccaccgcatcctgcccccagacagcggcgtgtgggtgtgcagcgtgaacacagtggccggcatggtggagaagcccttcaacatctctgtgaaggtgctgcccaagcccctgaatgccccaaatgtgattgacaccggccacaactttgctgtgatcaacatcagcagcgagccctactttggagatggccccatcaagagcaagaagctgctgtacaagcctgtgaaccactatgaggcctggcagcacatccaggtgtccatggagaagcagaggctgaccaaggccaacagcgacatctag

SEQ ID NO: 271022 - DNA, 2931 bp, Artificial Sequence
  derived and/or modified sequence
atggacagcctggccagcctggtgctgtgtggggtgtccctgctgctgagcgccagcttcctgcctgccaccctgaccatgacagtggacaagggggacaacgtgaacatctccttcaagaaggtgctgatcaaggaggaggatgctgtgatctacaagaatggcagcttcatccacagcgtgcccaggcatgaggtgcctgacatcctggaggtgcacctgccccacgcccagccccaggatgctggggtgtacagcgcccgctacatcggcggcaacctcttcaccagcgccttcacccggctgattgtgagaagatgtgaggcccagaagtggggccctgagtgcaaccacctgtgcacagcctgcatgaacaacggggtgtgccatgaagatactggagagtgcatctgccccccaggcttcatgggccgcacctgtgagaaggcctgtgagctgcacaccttcggccgcacctgcaaggagcgctgcagcggccaggagggctgcaagagctatgtgttctgcctgcctgacccctacggctgcagctgtgccaccggctggaagggcctgcagtgcaatgaaggcatccagaggatgacccccaagatcgtggacctgcctgaccacatcgaggtgaacagcggcaagttcaaccccatctgcaaggccagcggctggcccctgcccaccaatgaggagatgaccctggtgaagccagatggcaccgtgctgcaccccaaggacttcaaccacacagaccacttctctgtggccatcttcaccatccaccgcatcctgcccccagacagcggcgtgtgggtgtgcagcgtgaacacagtggccggcatggtggagaagcccttcaacatctctgtgaaggtgctgcccaagcccctgaatgccccaaatgtgattgacaccggccacaactttgctgtgatcaacatcagcagcgagccctactttggagatggccccatcaagagcaagaagctgctgtacaagcctgtgaaccactatgaggcctggcagcacatccaggtgaccaatgagatcgtgaccctgaactacctggagcccaggacagaatatgagctgtgtgtgcagctggtgcggcggggggagggcggggagggccaccctggccctgtgcggcgcttcaccacagccagcatcggcctgcccccaccccggggcctgaacctgctgcccaagagccagaccaccctgaacctgacctggcagcccatcttccccagcagtgaagatgacttctacgtggaggtggagaggagatctgtgcagaagagtgaccagcagaacatcaaggtgcccggcaacctgacctctgtgctgctgaacaacctgcacccccgggagcagtatgtggtgcgggcccgggtgaacaccaaggcccagggcgagtggagcgaggacctgacagcctggaccctgagtgacatcctgcccccccagcctgagaacatcaagatcagcaacatcacccacagcagcgctgtgatctcctggaccatcctggatggctacagcatcagcagcatcaccatccgctacaaggtgcagggcaagaatgaagaccagcacgtggatgtgaagatcaagaatgccaccatcacccagtaccagctgaagggcctggagcctgagacagcctaccaggtggacatctttgctgagaacaacatcggcagcagcaacccagccttcagccatgagctggtgaccctgcctgagagccaggccccagctgacctgggcggcggcaagatgctgctgattgccatcctgggcagcgctggcatgacctgcctgactgtgctgctggccttcctgatcatcctgcagctgaagagggccaacgtgcagaggaggatggcccaggccttccagaaccgggaggagcctgctgtgcagttcaacagcggcaccctggccctgaacaggaaggtgaagaacaacccagaccccaccatctaccctgtgctggactggaatgacatcaagttccaggacgtcatcggggagggcaactttggccaggtgctgaaggcccgcatcaagaaggatggcctgaggatggatgctgccatcaagaggatgaaggagtatgccagcaaggatgaccaccgggactttgctggggagctggaggtgctgtgcaagctgggccaccaccccaacatcatcaacctgctgggcgcctgtgagcaccggggctacctgtacctggccatcgagtatgcccctcatggcaacctgctggacttcctgaggaagagccgggtgctggagacagatcctgcctttgccatcgccaacagcacagccagcaccctgagcagccagcagctgctgcactttgctgctgatgtggcccggggcatggactacctgagccagaagcagttcatccaccgggacctggccgccaggaacatcctggtgggggagaactacgtggccaagattgctgactttggcctgagccggggccaggaggtgtatgtgaagaagaccatgggccgcctgcctgtgcgctggatggccatcgagagcctgaactacagcgtgtacaccaccaacagtgatgtgtggagctatggagtgctgctgtgggagatcgtgtccctgggcggcaccccctactgcggcatgacctgtgccgagctgtatgagaagctgccccagggctaccgcctggagaagcccctgaactgtgatgatgaggtgtatgacctgatgaggcagtgctggagggagaagccctatgaaagacccagctttgcccagatcctggtgtccctgaacaggatgctggaggagaggaagacctacgtgaacaccaccctgtatgagaagttcacctacgccggcatcgactgcagcgctgaggaggccgcctag

SEQ ID NO: 271023 - DNA, 1407 bp, Artificial Sequence
  derived and/or modified sequence
atggacagcctggccagcctggtgctgtgcggcgtgagcctgctgctgtctggaaccgttgagggagctatggacttgattctcatcaatagtctccccctcgtctcagatgctgagacctccttgacctgcatagccagtgggtggaggccccacgaacctatcaccattggccgtgactttgaagctctgatgaatcagcatcaggaccccttggaggttacccaagacgtaacgcgtgagtgggccaagaaggttgtctggaaacgtgagaaggcgtcaaagattaacggggcctatttttgcgaaggcagggttaggggtgaggctattcggatacgaacaatgaaaatgcggcagcaggccagcttcctccccgccacactgacaatgacggtagacaagggagataatgtaaacatctctttcaaaaaggtgctgataaaggaagaggatgcagtgatctacaaaaatgggagcttcattcattctgtcccgcggcacgaagtgcctgatattttggaggtgcacctgccccatgctcaaccccaggatgccggtgtctactctgcccggtatatcggtggcaacctgtttacctcagccttcactagattgatcgtgcgtcggtgtgaagcacagaaatggggcccagaatgcaatcacctgtgcactgcatgtatgaataacggcgtctgtcatgaagacaccggtgaatgcatctgccccccagggtttatgggaagaacgtgcgagaaggcgtgcgaattgcataccttcggccgaacctgtaaggaacgatgttccggccaggaagggtgcaagagctacgttttttgtctccccgacccctacggatgcagctgtgccactggctggaagggcttacagtgtaatgaggggatccagcgcatgacaccaaagattgtggacttgcccgatcacatcgaagtgaattctggcaagtttaatcccatatgcaaagcctccggctggcctctgccaaccaacgaagagatgaccctggtcaagcctgatggaactgttcttcatccgaaggattttaatcacacagatcacttctctgttgcaattttcactatccaccggattctgcctcctgattccggggtctgggtgtgttccgtcaataccgtggctgggatggtggagaagccattcaacatctcagtgaaagtacttccgaagccgcttaacgccccgaatgtgatcgataccgggcacaatttcgccgtgataaatatttcttctgagccttactttggggacggtccaataaaatcgaagaagctgctgtataagcccgtcaaccattacgaagcctggcagcacatccaagtgtccatggagaaacagcgactgactaaggcaaactcagacatctag

SEQ ID NO: 271024 - DNA, 2931 bp, Artificial Sequence
  derived and/or modified sequence
atggacagcctggccagcctggtgctgtgcggcgtgagcctgctgctgtccgcctccttcttaccagccacattgaccatgaccgtcgataaaggtgacaatgtcaatatctccttcaaaaaagtgctgattaaggaggaagatgccgtcatctataagaacggttcgtttatccatagcgtgccaagacacgaagtgcctgatattctggaggttcacttgccccacgcacagccccaggacgcaggcgtttactccgcaagatatatcggtgggaatctgtttacaagcgccttcactcgtcttattgtgaggcgctgtgaggcacagaagtggggtccagaatgtaaccatttgtgcacagcctgtatgaataacggcgtgtgtcacgaggatactggggaatgcatctgcccccccggatttatgggccgaacatgtgagaaggcctgtgagctccatacttttggtaggacatgtaaggagcgttgcagtgggcaagagggctgtaagtcatatgttttttgcctgccagatccttacggctgctcctgcgctacagggtggaaaggactacagtgtaacgaaggcattcagcgcatgactccaaaaatagtggatctgccagatcacatcgaagtaaattccgggaagttcaatccaatctgcaaggcatccggctggccgttgcccacaaatgaggagatgactctggttaagcctgacggtactgtcttgcatcctaaggattttaaccacaccgatcacttttccgtggcgatctttactatccaccggatactccctcccgacagtggcgtgtgggtgtgctccgtcaacacagtagcgggcatggtagaaaagccctttaacatctctgtgaaggttctccctaagccgttgaacgccccgaacgtgattgataccggacacaattttgccgtcattaatatctcttcggagccctattttggtgacggcccaattaagtctaaaaaactgctatacaagcccgtgaatcattacgaagcttggcaacacatccaggttacaaacgagattgtgactttgaactacctggaaccacgcaccgaatacgaactttgtgtccagctagtgcgcagaggcgagggcggtgaggggcaccccggacctgtccggaggtttaccacagcctccatcggtctgccaccaccgcgcggtctgaacctgctgcctaagagtcaaacaaccctgaacttaacttggcagccgatcttcccgagttcagaggatgatttttatgtcgaagtggaacgccgcagcgtccagaagtctgatcagcagaatatcaaggtacctgggaatctgacgagcgtgctgctcaataacctccacccccgggagcagtatgtcgtccgggcgcgcgttaatacaaaggctcagggggaatggagcgaagatcttactgcatggactctgtccgatattctccctcctcagccggagaacatcaaaatatcaaacattacgcacagctcggcagtgatcagctggacaattctggacggatactcaatctctagtatcaccattcgctacaaggtccaggggaaaaacgaagatcagcacgtggacgttaaaattaagaacgccacgattactcagtatcagcttaaggggctggagcctgaaaccgcataccaagtggacatattcgctgagaacaacatcgggagttccaaccccgccttcagtcacgagctggtgaccttgcctgagtcacaagccccggccgacttgggaggaggaaagatgctgctgatcgcgatccttggcagcgccggtatgacatgtctgacagtgttactggccttcttgatcatcctccagctcaagcgcgccaacgtccagaggcgaatggcgcaggccttccagaaccgggaggaacctgctgtccagtttaattccggcaccttagcgctgaataggaaagtgaaaaacaaccctgatcctacgatctaccccgttctggattggaatgatataaagttccaggacgttatcggagaaggtaacttcggccaggtgctgaaagcaaggatcaagaaggacgggcttcggatggacgccgctatcaaacgcatgaaagagtatgcatcgaaggatgaccacagggacttcgcaggcgagttagaagtgctatgcaaactgggccaccaccctaacataataaacctgctgggtgcatgtgaacacagagggtatttgtatctcgccatcgaatacgcgccgcacggcaacttgttggacttcctcagaaagagcagggtactcgaaaccgaccctgctttcgcaatcgctaatagcaccgccagcacccttagttctcagcagctgctgcacttcgccgccgatgtggcaagaggcatggactaccttagtcaaaagcagtttattcacagggacctcgccgctagaaacattctggtgggcgagaattatgtggccaaaattgcagatttcggtctgagccggggccaagaggtctacgtgaaaaaaaccatgggtcgtctccctgtcagatggatggccatagaatccctcaattatagcgtctataccactaattctgatgtttggtcttatggtgtcctcctatgggaaatcgtctctctaggtgggaccccctattgtggaatgacgtgcgccgagttgtacgaaaaactgccacagggttaccgcctcgagaaaccccttaattgcgacgatgaagtctacgatctcatgcgacagtgttggcgggagaaaccctacgagagacccagcttcgcccagattctggtaagcttgaatagaatgctcgaggagagaaaaacttatgttaacactaccttgtacgagaagttcacatacgcaggcatcgattgtagtgctgaggaggctgcctag

SEQ ID NO: 271025 - DNA, 1407 bp, Artificial Sequence
  derived and/or modified sequence
atggatagcttagcctcgttggtgctatgcggcgtgtctctactgttgagcgggacagtggaaggcgctatggatctcatcctcattaactcacttccgttagtgagtgacgccgaaacctccctgacatgcattgctagcgggtggcgaccccacgagcctattactattggtagggatttcgaagccttaatgaaccagcatcaggatcccctcgaagtcacccaggatgtgactcgtgagtgggcaaaaaaggtggtctggaagagggaaaaggctagcaagataaacggagcttacttctgtgagggccgtgtgaggggcgaggctattaggatcagaaccatgaagatgcggcagcaggcctcattcctgcccgcaacattgactatgacagtggataagggtgacaacgtgaatatatcgtttaaaaaagttcttatcaaggaggaggatgccgtaatttataagaacggatccttcatacactccgtgccacgccatgaagtccctgatattctggaagttcatctgcctcacgctcagcctcaagatgcaggcgtttatagtgcccgatatatcggagggaatctgtttacgagcgccttcactagactgatcgtgcgcagatgtgaagctcagaagtggggccctgaatgtaaccatctgtgcaccgcttgcatgaataatggtgtgtgccacgaggacactggcgagtgcatctgcccacccggattcatgggtaggacctgcgagaaggcttgcgagcttcacacttttggcagaacctgtaaggagagatgctctggccaggaaggctgcaaatcgtatgtattttgcttacctgacccctacggctgttcgtgcgccactgggtggaaaggactgcaatgcaatgaggggatccagaggatgacccccaagattgtggacctgcccgaccatatagaggttaactccgggaagttcaacccaatctgcaaggcgtccgggtggcctttgccgacgaacgaggagatgacattggtgaagcccgacggcactgtgctgcatccaaaagattttaatcataccgaccacttcagcgtggcaatcttcactatccatcgtatcctaccacctgactcaggggtgtgggtttgctctgtgaacactgtggccggaatggtcgagaagccctttaacattagtgtgaaggtattacctaaacccctgaacgccccaaacgtgatcgacaccggccataattttgcagtcatcaatatttcctccgagccatactttggcgatggccctataaagagcaagaagttgctgtacaagccagtcaaccattatgaggcctggcaacatattcaggtgtcaatggaaaagcaaagactgaccaaagccaattccgacatctag

SEQ ID NO: 271026 - DNA, 2931 bp, Artificial Sequence
  derived and/or modified sequence
atggacagtctggcctcactcgtcttgtgcggcgtttctttgctactctccgcgagctttcttcctgcgacgctcacaatgaccgttgataagggtgataacgtaaacatatccttcaagaaagttctgatcaaggaagaggatgcagtcatctataagaatgggtcattcatacactctgtgccccgacacgaagtgcctgatatccttgaagttcaccttccacacgctcagcctcaagacgcaggggtgtactccgctcgctacataggagggaatctctttacgtcagcttttacaaggctgatcgtccgtaggtgcgaagctcagaaatggggcccagaatgcaaccacctctgcaccgcctgtatgaacaacggcgtctgccatgaagacacaggagagtgcatttgccccccagggtttatggggagaacgtgcgaaaaggcttgcgagcttcacacgtttggcagaacctgtaaggagcgatgctcggggcaggaggggtgcaagtcttacgtgttctgcctgccagatccatatgggtgctcttgcgccacaggttggaagggactgcagtgcaatgagggaatccagcgcatgacaccaaaaatcgtggacctacccgaccatatcgaagttaactcaggcaaattcaatccaatctgtaaagcctcaggctggcccctccccaccaatgaagagatgaccctcgttaagcctgatggaacagtactccaccccaaggatttcaatcacacagaccacttctcagttgccatcttcaccatccaccggattctgccgccagattccggcgtgtgggtgtgctccgtcaatacagtcgccggaatggtcgagaagccattcaatatcagtgtgaaagtcctgcccaagcctttaaatgccccaaatgttatcgacacaggtcacaactttgcggtcataaacatctcctcagagccatacttcggagatggacctattaaaagtaagaaacttctctataagccagttaaccattatgaggcatggcagcacattcaggtcacaaatgaaatcgtaacgttaaactatctagaaccaaggaccgagtacgaactgtgcgtccagcttgtcaggaggggagagggaggagagggccatcctgggccagtgagacgattcaccaccgcgagtattgggctgccacccccaagggggttgaatctgctgcccaagtcccagacgacactcaacctaacctggcagccaatcttcccaagctcagaggacgatttctacgtagaagtggagcgcaggtcagtgcaaaagtctgatcagcagaacattaaagttcccggaaatttgacgtctgtccttcttaacaacctgcatcccagggagcagtacgttgtgcgagcacgggtcaacactaaagcccaaggggaatggtccgaggatctgaccgcgtggacattgagtgacattctgccccctcaacctgagaatattaagatttcaaacatcacgcatagcagcgcagtgattagttggaccatcctggatgggtactcaataagttccatcacaattagatataaagtccagggcaaaaatgaagatcagcatgttgacgttaagattaaaaatgcaacgataactcaatatcagctcaagggattagagccagagactgcctaccaagttgatatctttgctgagaacaacatcgggtcatcaaaccccgctttttcccacgagcttgttactctcccagagtcacaggcccctgccgacttggggggtggtaagatgctgctaattgccatcctgggctcagctggaatgacatgcttgaccgttcttttggctttcctgatcattctgcagctgaagcgcgcaaatgtccaacggcgaatggctcaggcgtttcaaaatcgagaggaacccgctgtgcagtttaactcaggtacattggccctgaataggaaagtcaagaataatccggacccaaccatctatccagttctcgactggaatgatattaagttccaagatgtgatcggtgaaggaaacttcggtcaggtgctgaaggctagaataaaaaaagatggcctgaggatggatgccgcaattaaaagaatgaaggagtacgcctcaaaagacgatcacagagactttgccggagagcttgaggtgctgtgcaagctcgggcatcacccaaacatcattaatttactcggtgcctgcgaacatcggggatatttgtaccttgccattgagtacgctccgcatggtaatctacttgactttttacggaagtccagggtgctggagacagacccagcctttgctattgctaattcaaccgcatccacactgtccagtcagcaattgctgcactttgccgcagatgtcgcaaggggcatggattatctgagtcagaaacaattcatccaccgtgatcttgccgctcgcaatattctagtgggggaaaattatgttgctaagatcgccgacttcggactgagtcggggtcaggaggtgtacgtcaagaaaaccatggggaggctccccgtaagatggatggcgattgagagcctgaactattccgtttatacaacaaactccgatgtgtggtcctatggagtgttgttgtgggagattgtgagcctgggagggacgccttattgcggaatgacttgcgctgagctgtacgaaaagctgccgcagggctatagactcgagaagccactaaactgtgacgacgaagtttatgatttaatgagacaatgctggagagaaaaaccctatgagagaccctcatttgcccagattctggtaagcctgaatcggatgttggaagaacgtaagacatatgttaacaccacgctgtatgaaaagttcacatacgctgggatcgattgctccgccgaggaggcggcatag

SEQ ID NO: 271027 - DNA, 1846 bp, Artificial Sequence
  derived and/or modified sequence
agtttcccgcctatgagaggatacccctattgtttctgaaaatgctgaccgggacccacacttccaacaaaaattcctctgcccctacagcagcagcaaaagcagcagcagaagcaacagcaacagataagtgttttgatgaattgcgagatggatagggcttgagtgcccccagccctgctgataccaaatgcctttaagatacagcctttcccatcctaatctacaaaggaaacaggaaaaaggaacttaaaactccctgtgctcagacagaaatgagactgttacagcctgcttctgtgctgttccttcttgcctctaacttgtaaacaagacgtagtaggacgatgctaatggaaagtcacaaaccgctgggtttttgaaaggatccttgggacctcatgcacatttgtggaaactggatggagagatttggggaagcatggactctttagccagcttagttctctgtggagtcagcttgctcctttctggaactgtggaaggtgccatggacttgatcttgatcaattccctacctcttgtatctgatgctgaaacatctctcacctgcattgcctctgggtggcgcccccatgagcccatcaccataggaagggactttgaagccttaatgaaccagcaccaggatccgctggaagttactcaagatgtgaccagagaatgggctaaaaaagttgtttggaagagagaaaaggctagtaagatcaatggtgcttatttctgtgaagggcgagttcgaggagaggcaatcaggatacgaaccatgaagatgcgtcaacaagcttccttcctaccagctactttaactatgactgtggacaagggagataacgtgaacatatctttcaaaaaggtattgattaaagaagaagatgcagtgatttacaaaaatggttccttcatccattcagtgccccggcatgaagtacctgatattctagaagtacacctgcctcatgctcagccccaggatgctggagtgtactcggccaggtatataggaggaaacctcttcacctcggccttcaccaggctgatagtccggagatgtgaagcccagaagtggggacctgaatgcaaccatctctgtactgcttgtatgaacaatggtgtctgccatgaagatactggagaatgcatttgccctcctgggtttatgggaaggacgtgtgagaaggcttgtgaactgcacacgtttggcagaacttgtaaagaaaggtgcagtggacaagagggatgcaagtcttatgtgttctgtctccctgacccctatgggtgttcctgtgccacaggctggaagggtctgcagtgcaatgaaggcatacagaggatgaccccaaagatagtggatttgccagatcatatagaagtaaacagtggtaaatttaatcccatttgcaaagcttctggctggccgctacctactaatgaagaaatgaccctggtgaagccggatgggacagtgctccatccaaaagactttaaccatacggatcatttctcagtagccatattcaccatccaccggatcctcccccctgactcaggagtttgggtctgcagtgtgaacacagtggctgggatggtggaaaagcccttcaacatttctgttaaagttcttccaaagcccctgaatgccccaaacgtgattgacactggacataactttgctgtcatcaacatcagctctgagccttactttggggatggaccaatcaaatccaagaagcttctatacaaacccgttaatcactatgaggcttggcaacatattcaagtatccatggagaaacagaggctgactaaagcaaatagtgacata

SEQ ID NO: 271028 - DNA, 3836 bp, Artificial Sequence
  derived and/or modified sequence
ttattctcagtttcccgcctatgagaggatacccctattgtttctgaaaatgctgaccgggacccacacttccaacaaaaattcctctgcccctacagcagcagcaaaagcagcagcagaagcaacagcaacagataagtgttttgatgaattgcgagatggatagggcttgagtgcccccagccctgctgataccaaatgcctttaagatacagcctttcccatcctaatctacaaaggaaacaggaaaaaggaacttaaaactccctgtgctcagacagaaatgagactgttacagcctgcttctgtgctgttccttcttgcctctaacttgtaaacaagacgtagtaggacgatgctaatggaaagtcacaaaccgctgggtttttgaaaggatccttgggacctcatgcacatttgtggaaactggatggagagatttggggaagcatggactctttagccagcttagttctctgtggagtcagcttgctcctttctgcttccttcctaccagctactttaactatgactgtggacaagggagataacgtgaacatatctttcaaaaaggtattgattaaagaagaagatgcagtgatttacaaaaatggttccttcatccattcagtgccccggcatgaagtacctgatattctagaagtacacctgcctcatgctcagccccaggatgctggagtgtactcggccaggtatataggaggaaacctcttcacctcggccttcaccaggctgatagtccggagatgtgaagcccagaagtggggacctgaatgcaaccatctctgtactgcttgtatgaacaatggtgtctgccatgaagatactggagaatgcatttgccctcctgggtttatgggaaggacgtgtgagaaggcttgtgaactgcacacgtttggcagaacttgtaaagaaaggtgcagtggacaagagggatgcaagtcttatgtgttctgtctccctgacccctatgggtgttcctgtgccacaggctggaagggtctgcagtgcaatgaaggcatacagaggatgaccccaaagatagtggatttgccagatcatatagaagtaaacagtggtaaatttaatcccatttgcaaagcttctggctggccgctacctactaatgaagaaatgaccctggtgaagccggatgggacagtgctccatccaaaagactttaaccatacggatcatttctcagtagccatattcaccatccaccggatcctcccccctgactcaggagtttgggtctgcagtgtgaacacagtggctgggatggtggaaaagcccttcaacatttctgttaaagttcttccaaagcccctgaatgccccaaacgtgattgacactggacataactttgctgtcatcaacatcagctctgagccttactttggggatggaccaatcaaatccaagaagcttctatacaaacccgttaatcactatgaggcttggcaacatattcaagtgacaaatgagattgttacactcaactatttggaacctcggacagaatatgaactctgtgtgcaactggtccgtcgtggagagggtggggaagggcatcctggacctgtgagacgcttcacaacagcttctatcggactccctcctccaagaggtctaaatctcctgcctaaaagtcagaccactctaaatttgacctggcaaccaatatttccaagctcggaagatgacttttatgttgaagtggagagaaggtctgtgcaaaaaagtgatcagcagaatattaaagttccaggcaacttgacttcggtgctacttaacaacttacatcccagggagcagtacgtggtccgagctagagtcaacaccaaggcccagggggaatggagtgaagatctcactgcttggacccttagtgacattcttcctcctcaaccagaaaacatcaagatttccaacattacacactcctcagctgtgatttcttggacaatattggatggctattctatttcttctattactatccgttacaaggttcaaggcaagaatgaagaccagcacgttgatgtgaagataaagaatgccaccatcactcagtatcagctcaagggcctagagcctgaaacagcataccaggtggacatttttgcagagaacaacatagggtcaagcaacccagccttttctcatgaactggtgaccctcccagaatctcaagcaccagcggacctcggaggggggaagatgctgcttatagccatccttggctctgctggaatgacctgcctgactgtgctgttggcctttctgatcatattgcaattgaagagggcaaatgtgcaaaggagaatggcccaagccttccaaaacagggaagaaccagctgtgcagttcaactcagggactctggccctaaacaggaaggtcaaaaacaacccagatcctacaatttatccagtgcttgactggaatgacatcaaatttcaagatgtgattggggagggcaattttggccaagttcttaaggcgcgcatcaagaaggatgggttacggatggatgctgccatcaaaagaatgaaagaatatgcctccaaagatgatcacagggactttgcaggagaactggaagttctttgtaaacttggacaccatccaaacatcatcaatctcttaggagcatgtgaacatcgaggctacttgtacctggccattgagtacgcgccccatggaaaccttctggacttccttcgcaagagccgtgtgctggagacggacccagcatttgccattgccaatagcaccgcgtccacactgtcctcccagcagctccttcacttcgctgccgacgtggcccggggcatggactacttgagccaaaaacagtttatccacagggatctggctgccagaaacattttagttggtgaaaactatgtggcaaaaatagcagattttggattgtcccgaggtcaagaggtgtatgtgaaaaagacaatgggaaggctcccagtgcgctggatggccatcgagtcactgaattacagtgtgtacacaaccaacagtgatgtatggtcctatggtgtgttactatgggagattgttagcttaggaggcacaccctactgcgggatgacttgtgcagaactctacgagaagctgccccagggctacagactggagaagcccctgaactgtgatgatgaggtgtatgatctaatgagacaatgctggcgggagaagccttatgagaggccatcatttgcccagatattggtgtccttaaacagaatgttagaggagcgaaagacctacgtgaataccacgctttatgagaagtttacttatgcaggaattgactgttctgctgaagaagcggcctaggacagaacatctgtataccctctgtttccctttcactggcatgggagacccttgacacctgctgagaaaacatgcctctgccaaaggatgtgatatataagtgtacatatgtgctgtacacctgggaccttcaccactgtagatcccatgcatggatctatgtagtatgctctgactctaataggactgtatatactgttttaagaatgggctgaaatcagaatgcctgtttgtggtttcatatgcaataatatatttttttaaaaatgtggacttcataggaaggcgtgagtacaattagtataatgcataactcattgttgtcctagatattttgatatttacctttatgttgaatgctattaaatgttttcctgtgtcaaagtaaaatattgttaataaacctaacaatgaccctgatagtacaggttaagtgagagaactatatgaattct

SEQ ID NO: 271029 - protein, 1950 aa, Artificial Sequence
  derived and/or modified sequence
MLEAIDKNRALHAAERLQTKLRERGDVANEDKLSLLKSVLQSPLFSQILSLQTSVQQLKDQVNIATSATSNIEYAHVPHLSPAVIPTLQNESFLLSPNNGNLEALTGPGIPHINGKPACDEFDQLIKNMAQGRHVEVFELLKPPSGGLGFSVVGLRSENRGELGIFVQEIQEGSVAHRDGRLKETDQILAINGQALDQTITHQQAISILQKAKDTVQLVIARGSLPQLVSPIVSRSPSAASTISAHSNPVHWQHMETIELVNDGSGLGFGIIGGKATGVIVKTILPGGVADQHGRLCSGDHILKIGDTDLAGMSSEQVAQVLRQCGNRVKLMIARGAIEERTAPTALGITLSSSPTSTPELRVDASTQKGEESETFDVELTKNVQGLGITIAGYIGDKKLEPSGIFVKSITKSSAVEHDGRIQIGDQIIAVDGTNLQGFTNQQAVEVLRHTGQTVLLTLMRRGMKQEAELMSREDVTKDADLSPVNASIIKENYEKDEDFLSSTRNTNILPTEEEGYPLLSAEIEEIEDAQKQEAALLTKWQRIMGINYEIVVAHVSKFSENSGLGISLEATVGHHFIRSVLPEGPVGHSGKLFSGDELLEVNGITLLGENHQDVVNILKELPIEVTMVCCRRTVPPTTQSELDSLGIQHIELEKGSKGLGFSILDYQDPIDPASTVIIIRSLVPGGIAEKDGRLLPGDRLMFVNDVNLENSSLEEAVEALKGAPSGTVRIGVAKPLPLSPEEGYVSAKEDSFLYPPHSCEEAGLADKPLFRADLALVGTNDADLVDESTFESPYSPENDSIYSTQASILSLHGSSCGDGLNYGSSLPSSPPKDVIENSCDPVLDLHMSLEELYTQNLLQRQDENTPSVDISMGPASGFTINDYTPANAIEQQYECENTIVWTESHLPSEVISSAELPSVLPDSAGKGSEYLLEQSSLACNAECVMLQNVSKESFERTINIAKGNSSLGMTVSANKDGLGMIVRSIIHGGAISRDGRIAIGDCILSINEESTISVTNAQARAMLRRHSLIGPDIKITYVPAEHLEEFKISLGQQSGRVMALDIFSSYTGRDIPELPEREEGEGEESELQNTAYSNWNQPRRVELWREPSKSLGISIVGGRGMGSRLSNGEVMRGIFIKHVLEDSPAGKNGTLKPGDRIVEAPSQSESEPEKAPLCSVPPPPPSAFAEMGSDHTQSSASKISQDVDKEDEFGYSWKNIRERYGTLTGELHMIELEKGHSGLGLSLAGNKDRSRMSVFIVGIDPNGAAGKDGRLQIADELLEINGQILYGRSHQNASSIIKCAPSKVKIIFIRNKDAVNQMAVCPGNAVEPLPSNSENLQNKETEPTVTTSDAAVDLSSFKNVQHLELPKDQGGLGIAISEEDTLSGVIIKSLTEHGVAATDGRLKVGDQILAVDDEIVVGYPIEKFISLLKTAKMTVKLTIHAENPDSQAVPSAAGAASGEKKNSSQSLMVPQSGSPEPESIRNTSRSSTPAIFASDPATCPIIPGCETTIEISKGRTGLGLSIVGGSDTLLGAIIIHEVYEEGAACKDGRLWAGDQILEVNGIDLRKATHDEAINVLRQTPQRVRLTLYRDEAPYKEEEVCDTLTIELQKKPGKGLGLSIVGKRNDTGVFVSDIVKGGIADADGRLMQGDQILMVNGEDVRNATQEAVAALLKCSLGTVTLEVGRIKAGPFHSERRPSQSSQVSEGSLSSFTFPLSGSSTSESLESSSKKNALASEIQGLRTVEMKKGPTDSLGISIAGGVGSPLGDVPIFIAMMHPTGVAAQTQKLRVGDRIVTICGTSTEGMTHTQAVNLLKNASGSIEMQVVAGGDVSVVTGHQQEPASSSLSFTGLTSSSIFQDDLGPPQCKSITLERGPDGLGFSIVGGYGSPHGDLPIYVKTVFAKGAASEDGRLKRGDQIIAVNGQSLEGVTHEEAVAILKRTKGTVTLMVLS

SEQ ID NO: 271030 - protein, 304 aa, Artificial Sequence
  derived and/or modified sequence
MQGDQILMVNGEDVRNATQEAVAALLKCSLGTVTLEVGRIKAGPFHSERRPSQSSQVSEGSLSSFTFPLSGSSTSESLESSSKKNALASEIQGLRTVEMKKGPTDSLGISIAGGVGSPLGDVPIFIAMMHPTGVAAQTQKLRVGDRIVTICGTSTEGMTHTQAVNLLKNASGSIEMQVVAGGDVSVVTGHQQEPASSSLSFTGLTSSSIFQDDLGPPQCKSITLERGPDGLGFSIVGGYGSPHGDLPIYVKTVFAKGAASEDGRLKRGDQIIAVNGQSLEGVTHEEAVAILKRTKGTVTLMVLS

SEQ ID NO: 271031 - DNA, 282 bp, Artificial Sequence
  derived and/or modified sequence
atggacacacagaaacagatccataaaacccacaacagtaagaaccagttctttactatcttcttttttttaagtgtagaatttggcaaggagggtacgagaaagaacttctaccttttactgtcaattggtcactacggtagaaaaagtaggcgcgctgacctggggaccgccgacactgcagacaagaccgagccagagtgcttcgctgcaagttggacgtttgacccgaatcctagtgtaaccgtttccggagcccatagcaccgctgtccaccagtag

SEQ ID NO: 271032 - DNA, 5853 bp, Artificial Sequence
  derived and/or modified sequence
atgctggaagcgattgacaaaaatcgggcgctccacgctgccgagagactgcagacaaaattgagagagagaggtgatgtggcaaacgaagacaagctctccttactaaaatccgtgcttcagtcaccgcttttttcccagattctcagtttgcaaacatcagttcagcagttgaaggatcaagtgaatatcgccacctccgccacatctaacattgagtacgcccatgttccccacctctcccctgccgtcatccctacattacagaatgagagtttcctgttgtcccccaataacggcaacctcgaagctctgactggcccagggatccctcacatcaatggaaagcccgcttgcgacgaattcgaccagctgattaaaaacatggcacagggcaggcacgtagaggtgttcgagttgttgaagcctccatctggcggcctcggcttctccgtggtgggcttgagaagtgagaatagaggcgagctcggcatcttcgtgcaagagatccaggaaggctcagtcgcgcaccgggacggacgtctcaaggagacggaccagatcctggcaattaatggacaggcccttgatcagaccatcactcatcaacaggccatttctattctacagaaggctaaggatactgtgcagctagttattgcccgcggcagtctgcctcagcttgtatctcccattgtttcccgctctccaagcgctgcttcaacaatatccgcgcactctaatcccgtacattggcagcacatggagacaatcgagttggtcaacgacggatcgggattgggctttggaatcattgggggaaaagccactggcgtgatcgtgaagactatcctgcccggaggcgtagctgatcagcacggtagactgtgcagtggcgatcacatcttaaagattggcgacactgatctagccggaatgtcttctgagcaggtggcacaagttctgaggcagtgtgggaatcgggtgaagctcatgattgcgcgaggagccatagaagaacggacagctcccacagcactcggaatcacattatcttcctcccccacttctacacccgagctgagagtggacgcatctacacaaaaaggagaagagtccgagacattcgatgttgagctcaccaagaatgtccaaggcctcggaattactatcgccggatacatcggtgataagaaattagagcccagtggaatcttcgtaaagtcgatcacaaagtcaagcgctgtagaacacgatgggcgaatacagattggagatcagatcatagctgtggatgggacaaatttacagggcttcacaaatcagcaggccgtagaggtactcagacacactgggcagaccgtgctgctgactcttatgagacgggggatgaaacaggaagccgagctgatgagtcgggaggatgttacgaaggacgctgacctgtctcccgtaaatgccagtataatcaaggaaaactatgagaaagatgaggattttctgtcctcgacacgaaatactaacatcctccccacagaggaggaagggtacccactgctgtctgcagagattgaggaaattgaagacgctcaaaagcaggaagcagccctcctgactaaatggcagcgtatcatgggcattaactatgaaatcgtggttgctcacgtgagtaaattcagcgagaactccggccttggaatctctttagaagccaccgttggtcaccacttcattcggagtgttctgcctgaaggacccgttggccactccgggaagctgtttagcggtgatgagctcctagaggtgaacggtatcaccttgctgggcgagaatcaccaggatgtcgtgaatatccttaaagagctcccgatcgaagtcacaatggtgtgttgtagacggacggttccccccacgacccagagtgaactggattctctcggcatccagcacatcgaattagaaaaagggagcaagggcctcggcttttccatactcgattatcaagaccctattgacccagctagtaccgtgattatcatccggagcctggttcctggtggcatagccgagaaagacggaaggttactccccggcgaccggctgatgtttgtgaacgacgtcaatctcgagaactccagtctggaggaggccgtcgaggccctgaagggcgcaccctcggggaccgttcggatcggcgttgctaagccgctgccactcagccccgaggagggctatgtctcagcaaaggaagactcgttcttgtacccgccacactcatgtgaggaggcgggcctagcggataaacctctattcagggccgacctagctctcgtgggaactaatgacgccgaccttgtggatgagtcgactttcgaaagcccatattctcccgaaaacgatagcatctactctacacaggcttccatcctgagcctacacggctcatcttgcggggatggcctcaactacggcagcagtctgccctctagccctcctaaagatgttatcgagaatagctgcgaccccgtgttggaccttcacatgagtctagaagaactgtacacgcagaatttgctgcagagacaggacgaaaataccccttccgtggacatttccatgggccctgcctctggatttacaatcaatgactacacacccgccaacgctattgaacagcaatatgaatgtgagaacacgattgtctggacagagagccacttgccttccgaggttatctcttctgctgagctccccagtgttctgccagattccgccggtaagggatccgaatacctgctcgaacagagttctcttgcttgcaacgctgagtgcgtcatgcttcaaaacgtgtctaaagagtccttcgagcgcacaatcaatattgccaagggtaactctagccttggcatgacagtgtccgcaaacaaagacgggctcggaatgatcgtgcgcagtataattcacggtggggccatatcaagagatggtagaattgccatcggcgactgcattctatccattaatgaagagagcacaatctccgtgactaatgcacaggccagagcgatgctgcgccgccacagcttaattggacccgacatcaagattacctacgtacccgccgagcacctggaggaattcaagatctccctcggccagcagtcagggcgggtgatggccttggacatcttttcttcatacaccggaagagacatacccgagcttccggagcgcgaggagggggaaggggaggaatcggaactgcaaaatacagcatacagcaactggaaccaaccacggcgcgtcgagctttggcgagaaccctctaagtcacttggtatatcaatcgtgggtgggcgcgggatggggtcacgcctgagtaacggtgaagtgatgcgtggaattttcattaagcacgtgctggaggatagccctgctgggaaaaatggcacgctcaagccaggtgaccgcatcgtggaagctccttcgcagagcgagtccgagcccgaaaaagctcccctctgtagcgtgccgccccccccgccttccgccttcgccgagatggggagcgaccatacgcagagctccgcatccaagatctcccaggacgttgacaaagaggacgaatttggttatagctggaagaacattcgcgagagatacgggaccctgacaggggagctccatatgattgaattagagaaagggcacagtgggctcggcctgtctcttgccggaaacaaggaccgttcacggatgtccgtgttcattgttggcattgaccctaatggggctgcaggaaaagatggccgccttcagattgcggatgagctgctcgagattaacggacagatcttatacggcagatctcaccagaatgcctcttctatcataaagtgcgcccctagtaaagtcaaaatcattttcattagaaacaaggatgcggtcaaccagatggccgtgtgtccagggaacgccgtagaaccgctgccctccaatagtgaaaacctgcagaacaaagagaccgaacctacagtcacgacctcagacgccgccgtggacctctcctcctttaaaaacgtgcagcacttggagctacccaaagaccagggaggcctgggaattgcaatctcagaagaggatacgttgtcgggagtgatcataaaaagcctaacagaacatggagttgccgctaccgatgggaggttgaaggtcggtgaccagatccttgcggtcgatgatgagatcgtggtgggataccccattgagaaatttatctctctcttgaagacggccaagatgaccgtgaaacttaccatccatgctgagaatcctgatagccaggcggtgccatccgccgcaggagctgcatctggtgaaaagaagaactctagccagtctcttatggtgccacagtctggcagcccggagccggagagtattcggaatacgtcccggagctccacccccgctatattcgcttccgaccccgccacctgccctatcatcccgggttgtgagaccaccattgaaatcagtaaaggaagaaccgggctaggactgagcatcgtcggaggctctgatactctgctgggtgcaattatcattcacgaggtgtacgaggagggggccgcttgcaaagacggaagactgtgggccggtgatcagattctggaggtgaatgggatagatttacggaaggcaacacacgatgaggctatcaatgtgcttcgtcagacccctcagcgcgtgaggctcaccttgtacagagacgaggctccatataaggaagaggaagtgtgcgataccctcacaattgaattgcagaaaaaaccaggaaagggactgggcctgagtattgtgggcaagcgcaacgacacaggcgtctttgtctcggatatcgtcaagggcggcattgcggacgcagacggaaggcttatgcagggagaccagattctgatggtgaacggcgaagacgtgagaaatgcaacccaggaggctgtggcggctctcttaaaatgcagtctggggactgttacactagaggtcgggagaatcaaagccggcccattccactctgagcgcagaccatctcaatcatcacaggtcagtgagggcagcttatccagttttacattcccactgtcgggttcctccaccagcgagagcctggaaagcagctccaaaaaaaatgcgcttgcttcagagatccaaggactccgtactgtggagatgaaaaagggccctacagactctctcggcattagtatcgcagggggggtcggtagtcccttaggtgacgttcccatcttcatcgctatgatgcacccgacaggcgtcgctgctcagacgcagaaacttagggttggtgaccgtatcgttaccatttgcggcacctctaccgaggggatgacacatactcaggccgtgaatctgttgaagaatgcttccgggtctattgagatgcaggtcgtcgccgggggagatgtatctgtcgtgacgggccaccagcaagagcctgccagctctagcctaagttttacagggctgacaagttctagcatattccaggacgatctggggcctccacagtgtaagtccattaccctggaacgcggaccagacggtctcggattctcgattgtcggaggctacggatcacctcacggggatctcccaatttatgttaaaacggtgttcgccaagggtgccgcttcagaggatggacggctgaaaagaggggatcagatcatcgcagtgaacggccagagcctggagggggtgacacacgaagaagcagtggccattctgaagcggaccaagggtacagtcacactgatggtgcttagctag

SEQ ID NO: 271033 - DNA, 915 bp, Artificial Sequence
  derived and/or modified sequence
atgcaaggcgaccaaattttgatggtcaatggagaggatgtcagaaacgccacacaggaagccgtggccgccctcctcaagtgcagtctgggaacggtaactttggaggtcgggcgaataaaggccggccccttccactccgagcgccggcctagtcaaagctcacaggtgtctgaaggctccctctcttcgtttacatttccccttagtggatcttctacttctgagtcgctggagtcctcctccaaaaagaacgcacttgccagtgaaatacagggcttacggaccgtggagatgaagaaagggcccacggacagtctggggataagcattgctggtggagttggctcccctctgggggacgtaccaatatttattgccatgatgcatcccaccggggttgccgcacagacccaaaagctgagagtaggcgacagaatcgtaactatatgcgggacttccactgaggggatgacccacacccaagccgtgaacttactcaagaatgcaagcggatcaatcgaaatgcaggtggtggctggaggcgacgtgtcagttgtcaccggtcatcagcaggagcctgccagttcgtctctatcatttacaggcctgacctcgagctccatattccaggatgacctcgggcctcctcagtgcaaatccattaccttggaacgtggccccgacggactcggattcagcatcgtcggtggctacggctcacctcacggggatctacctatctacgttaagactgtgttcgcgaagggtgctgcttccgaggacggccggctaaagagaggagatcagattatagccgtgaatgggcagagcctggagggtgtcactcacgaggaagccgtggctatactgaaacgtactaagggtacagtaacattgatggttctatcatag

SEQ ID NO: 271034 - DNA, 5853 bp, Artificial Sequence
  derived and/or modified sequence
atgctggaggccatcgacaagaacagagccctgcatgctgctgagcggctgcagaccaagctgcgggagagaggagatgtggccaatgaagacaagctgagcctgctgaagtctgtgctgcagagccccctcttcagccagatcctgagcctgcagacctctgtgcagcagctgaaggaccaggtgaacatcgccaccagcgccaccagcaacatcgagtatgcccacgtgccccacctgagccctgctgtgatccccaccctgcagaatgaaagcttcctgctgagccccaacaatggaaacctggaggccctgaccggccctggcatcccccacatcaacgggaagccagcctgtgatgaatttgaccagctgatcaagaacatggcccagggccgccacgtggaggtgtttgagctgctgaagcccccatctgggggcctgggcttctctgtggtgggcctgcggtctgagaacagaggagagctgggcatctttgtgcaggagatccaggagggctctgtggcccacagagatggccgcctgaaggagacagaccagatcctggccatcaatggccaggccctggaccagaccatcacccaccagcaggccatcagcatcctgcagaaggccaaggacacagtgcagctggtgattgcccggggcagcctgccccagctggtgagccccatcgtgagccgcagccccagcgctgccagcaccatcagcgcccacagcaaccctgtgcactggcagcacatggagaccatcgagctggtgaatgatggcagcggcctgggcttcggcatcatcggcggcaaggccactggagtcatcgtgaagaccatcctgcccggcggcgtggccgaccagcacggccgcctgtgcagcggggaccacatcctgaagattggagacacagacctggccggcatgagcagcgagcaggtggcccaggtgctgcggcagtgtggcaacagagtgaagctgatgattgcccggggggccatcgaggagaggacagcccccacagccctgggcatcaccctgagcagcagccccaccagcaccccagagctgcgggtggatgccagcacccagaagggggaggagagcgagacctttgatgtggagctgaccaagaatgtgcagggcctgggcatcaccatcgccggctacatcggggacaagaagctggagcccagcggcatctttgtgaagagcatcaccaagagcagcgctgtggagcatgatggccgcatccagatcggggaccagatcatcgctgtggatggcaccaacctgcagggcttcaccaaccagcaggccgtggaggtgctgcggcacacaggccagacagtgctgctgaccctgatgagaagaggcatgaagcaggaggccgagctgatgagccgggaggatgtgaccaaggatgctgacctgagccctgtgaatgccagcatcatcaaggagaactatgagaaggatgaggacttcctgagcagcaccaggaacaccaacatcctgcccacagaggaggagggctaccccctgctgtctgctgagattgaggagattgaagatgcccagaagcaggaggccgccctgctgaccaagtggcagaggatcatgggcatcaactatgaaattgtggtggcccacgtgtccaagttctctgaaaattctggcctgggcatcagcctggaggccaccgtgggccaccacttcatccgctctgtgctgcctgagggccctgtgggccacagcggcaagctgttctctggagatgagctgctggaggtgaatggcatcaccctgctgggggagaaccaccaggatgtggtgaacatcctgaaggagctgcccatcgaggtgaccatggtgtgctgcagaagaacagtgccccccaccacccagagcgagctggacagcctgggcatccagcacatcgagctggagaagggcagcaagggcctgggcttcagcatcctggactaccaggaccccattgatcctgccagcaccgtcatcatcatccgcagcctggtgcctgggggcattgctgagaaggatggccgcctgctgcccggggaccggctgatgtttgtgaatgatgtgaacctggagaacagcagcctggaggaggccgtggaggccctgaagggggcccccagcggcaccgtgagaattggagtggccaagcccctgcccctgagccctgaggagggctacgtgtctgccaaggaggacagcttcctgtacccaccccacagctgtgaggaggccggcctggccgacaagcccctcttccgggctgacctggccctggtgggcaccaatgatgctgacctggtggatgagagcacctttgagagcccctacagcccagaaaatgacagcatctacagcacccaggccagcatcctgagcctgcacggcagcagctgtggagatggcctgaactacggcagcagcctgcccagcagcccccccaaggatgtgattgagaacagctgtgaccctgtgctggacctgcacatgagcctggaggagctgtacacccagaacctgctgcagaggcaggatgagaacacccccagcgtggacatctccatgggccctgccagcggcttcaccatcaatgactacaccccagccaatgccatcgagcagcagtatgaatgtgagaacaccatcgtgtggacagagagccacctgcccagcgaggtgatcagcagcgctgagctgcccagcgtgctgcctgacagcgctggaaaaggaagtgagtacctgctggagcagagcagcctggcctgcaatgcagaatgtgtgatgctgcagaatgtgtccaaggagagctttgagaggaccatcaacatcgccaagggcaacagcagcctgggcatgacagtgtctgccaacaaggatggcctgggcatgattgtgcgcagcatcatccacggcggggccatcagcagagatggccgcatcgccatcggggactgcatcctgagcatcaatgaggagagcaccatctctgtgaccaatgcccaggcccgggccatgctgcggcggcacagcctcatcggccctgacatcaagatcacctacgtgcctgctgagcacctggaggagttcaagatcagcctgggccagcagagcggccgggtgatggccctggacatcttcagcagctacacaggccgggacatccctgagctgcctgagcgggaggagggggagggggaggagagcgagctgcagaacacagcctacagcaactggaaccagccccggcgggtggagctgtggagggagcccagcaagagcctgggcatcagcatcgtgggcggccggggcatgggcagccggctgagcaatggagaggtgatgaggggcatcttcatcaagcacgtgctggaggacagccctgctgggaagaatggcaccctgaagccaggggaccgcatcgtggaggcccccagccagagcgagagcgagcctgagaaggcccccctgtgcagcgtgcccccacctcctccttctgcctttgctgagatgggcagtgaccacacccagagcagcgccagcaagatcagccaggatgtggacaaggaggatgaatttggctacagctggaagaacatccgggagagatatggcaccctgactggagagctgcacatgattgagctggagaagggccacagcggcctgggcctgagcctggccggcaacaaggacaggagcaggatgtctgtgttcatcgtgggcatcgaccccaatggagctgctgggaaggatggccgcctgcagattgctgatgagctgctggagatcaatggccagatcctgtatggccgcagccaccagaatgccagcagcatcatcaagtgtgcccccagcaaggtgaagatcatcttcatccggaacaaggatgctgtgaaccagatggctgtgtgccctggaaatgctgtggagcccctgcccagcaacagcgagaacctgcagaacaaggagacagagcccaccgtgaccaccagtgatgctgctgtggacctgagcagcttcaagaatgtgcagcacctggagctgcccaaggaccagggcggcctgggcatcgccatcagcgaggaggacaccctgagcggggtcatcatcaagagcctgacagagcacggcgtggccgccacagatggccgcctgaaggtgggggaccagatcctggccgtggatgatgagatcgtggtgggctaccccatcgagaagttcatcagcctgctgaagacagccaagatgacagtgaagctgaccatccacgcagaaaatccagacagccaggccgtgcccagcgctgctggggccgccagcggggagaagaagaacagcagccagagcctgatggtgccccagagcggcagccctgagcctgagagcatccggaacaccagccgcagcagcaccccagccatctttgccagtgaccctgccacctgccccatcatccctggctgtgagaccaccatcgagatcagcaagggccgcacaggcctgggcctgagcatcgtgggcggcagtgacaccctgctgggcgccatcatcatccacgaggtgtatgaggagggcgccgcctgcaaggatggccgcctgtgggccggggaccagatcctggaggtgaatggaattgacctgaggaaggccacccatgatgaggccatcaacgtgctgcggcagaccccccagagggtgcggctgaccctgtacagagatgaggccccctacaaggaggaggaggtgtgtgacaccctgaccatcgagctgcagaagaagccaggcaagggcctgggcctgagcatcgtgggcaagagaaatgacacaggagtgtttgtgtctgacatcgtgaagggcggcattgctgatgctgatggccgcctgatgcagggcgaccagatcctgatggtgaatggagaagatgtgagaaatgccacccaggaggccgtggccgccctgctgaagtgcagcctgggcaccgtgaccctggaggtgggccgcatcaaggccggccccttccacagcgagcggcggcccagccagagcagccaggtgtctgagggcagcctgagcagcttcaccttccccctgagcggcagcagcaccagcgagagcctggagagcagcagcaagaagaatgccctggccagcgagatccagggcctgaggacagtggagatgaagaagggccccacagacagcctgggcatcagcattgctgggggcgtgggcagccccctgggagatgtgcccatcttcatcgccatgatgcaccccaccggggtggccgcccagacccagaagctgcgggtgggggacagaattgtgaccatctgtggcaccagcacagagggcatgacccacacccaggccgtgaacctgctgaagaatgccagcggcagcattgagatgcaggtggtggccggaggagatgtgtctgtggtgacaggccaccagcaggagcccgccagcagcagcctgtccttcaccggcctgaccagcagcagcatcttccaggatgacctgggccccccccagtgcaagagcatcaccctggagcggggcccagatggcctgggcttcagcatcgtgggcggctacggcagcccccatggagacctgcccatctacgtgaagacagtgtttgccaagggggccgcctctgaagatggccgcctgaagagaggagaccagatcatcgctgtgaatggccagagcctggagggcgtgacccatgaggaggccgtggccatcctgaagaggaccaagggcaccgtgaccctgatggtgctgtcctag

SEQ ID NO: 271035 - DNA, 915 bp, Artificial Sequence
  derived and/or modified sequence
atgcagggcgaccagatcctgatggtgaatggagaagatgtgagaaatgccacccaggaggccgtggccgccctgctgaagtgcagcctgggcaccgtgaccctggaggtgggccgcatcaaggccggccccttccacagcgagcggcggcccagccagagcagccaggtgtctgagggcagcctgagcagcttcaccttccccctgagcggcagcagcaccagcgagagcctggagagcagcagcaagaagaatgccctggccagcgagatccagggcctgaggacagtggagatgaagaagggccccacagacagcctgggcatcagcattgctgggggcgtgggcagccccctgggagatgtgcccatcttcatcgccatgatgcaccccaccggggtggccgcccagacccagaagctgcgggtgggggacagaattgtgaccatctgtggcaccagcacagagggcatgacccacacccaggccgtgaacctgctgaagaatgccagcggcagcattgagatgcaggtggtggccggaggagatgtgtctgtggtgacaggccaccagcaggagcccgccagcagcagcctgtccttcaccggcctgaccagcagcagcatcttccaggatgacctgggccccccccagtgcaagagcatcaccctggagcggggcccagatggcctgggcttcagcatcgtgggcggctacggcagcccccatggagacctgcccatctacgtgaagacagtgtttgccaagggggccgcctctgaagatggccgcctgaagagaggagaccagatcatcgctgtgaatggccagagcctggagggcgtgacccatgaggaggccgtggccatcctgaagaggaccaagggcaccgtgaccctgatggtgctgtcctag

SEQ ID NO: 271036 - DNA, 6001 bp, Artificial Sequence
  derived and/or modified sequence
tgctgttaatcatttcagagaagaacactgaactttgaaaaaaatgttggaagccattgacaaaaatcgggccctgcatgcagcagagcgcttgcaaaccaagctgcgagaacgtggggatgtagcaaatgaagacaaactgagccttctgaagtcagtcctgcagagccctctcttcagtcagattctgagccttcagacttctgtacagcagctgaaagaccaggtaaatattgcaacttcagcaacttcaaatattgaatatgcccacgttcctcatctcagcccagctgtgattcctactctgcaaaatgaatcgtttttattatccccaaacaatgggaatctggaagcacttacaggacctggtattccacacattaatgggaaacctgcttgtgatgaatttgatcagcttatcaaaaatatggcccagggtcgccatgtagaagtttttgagctcctcaaacctccatctggaggccttgggtttagtgttgtgggactaagaagtgaaaacagaggagagctgggaatatttgttcaagagatacaagagggcagtgtggcccatagagatggaagattgaaagaaactgatcaaattcttgctatcaatggacaggctcttgatcagacaattacacatcagcaggctatcagcatcctgcagaaagccaaagatactgtccagctagttattgccagaggctcattgcctcagcttgtcagccccatagtttcccgttctccatctgcagccagcacaatttcagctcactctaatccggttcactggcaacacatggaaacgattgaattggtgaatgatggatctggtttgggatttggcatcataggaggaaaagcaactggtgtgatagtaaaaaccattctgcctggaggagtagctgatcagcatgggcgtttatgcagtggagaccacattctaaagattggtgacacagatctagcaggaatgagcagtgagcaagtagcacaagtccttaggcaatgtggaaatagagttaagttgatgattgcaagaggtgccatagaagaacgtacagcacccactgctttgggcatcaccctctcctcatccccaacttcaacaccagagttgcgggttgatgcttctactcagaaaggtgaagaaagtgagacatttgatgtagaactcactaaaaatgtccaaggattaggaattaccattgctggctacattggagataaaaaattggaaccttcaggaatctttgtaaagagcattacaaaaagcagtgccgttgagcatgatggaagaatccaaattggagaccaaattatagcagtagatggcacaaaccttcagggttttactaatcagcaagcagtagaggtattgcgacatacaggacaaactgtgctcctgacactaatgaggagaggaatgaagcaggaagccgagctcatgtcaagggaagacgtcacaaaagatgcagatttgtctcctgttaatgccagcataatcaaagaaaattatgaaaaagatgaagattttttatcttcgacgagaaacaccaacatattaccaactgaagaagaagggtatccattactgtcagctgagatagaagaaatagaagatgcacaaaaacaagaagctgctctgctgacaaaatggcaaaggattatgggaattaactatgaaatagtggtggcccatgtgagcaagtttagtgagaacagtggattggggataagcctggaagcgacagtgggacatcattttatccgatctgttctaccagagggtcctgttggacacagcgggaagctcttcagtggagacgagctattggaagtaaatggcataactttacttggggaaaatcaccaagatgtggtgaatatcttaaaagaactgcctatagaagtgacaatggtgtgctgtcgtcgaactgtgccacccaccacccaatcagaattggatagcctgggcattcagcacatagagctggagaaagggagcaaaggacttggttttagcattttagattatcaggatccaattgatccagcaagcactgtgattataattcgttctttggtgcctggcggcattgctgaaaaggatggacgacttcttcctggtgaccgactcatgtttgtaaacgatgttaacttggaaaacagcagtcttgaggaagctgtagaagcactgaagggagcaccgtcagggactgtgagaataggagttgctaagcctttacccctttcaccagaagaaggttatgtttctgctaaggaggattcctttctctacccaccacactcctgtgaggaagcagggctggctgacaaacccctcttcagggctgacttggctctggtgggcacaaatgatgctgacttagtagatgaatccacatttgagtctccatactctcctgaaaatgacagcatctactctactcaagcctctattttatctcttcatggcagttcttgtggtgatggcctgaactatggttcttcccttccatcatctcctcctaaggatgttattgaaaattcttgtgatccagtacttgatctgcatatgtctctggaggaactatatacccagaatctcctgcaaagacaggatgagaatacaccttcggtggacataagtatggggcctgcttctggctttactataaatgactacacacctgcaaatgctattgaacaacaatatgaatgtgaaaacacaatagtgtggactgaatctcatttaccaagtgaagttatatcaagtgcagaacttccttctgtgctacccgattcagctggaaagggctctgagtacctgcttgaacagagctccctggcctgtaatgctgagtgtgtcatgcttcaaaatgtatctaaagaatcttttgaaaggactattaatatagcaaaaggcaattctagcctaggaatgacagttagtgctaataaagatggcttggggatgatcgttcgaagcattattcatggaggtgccattagtcgagatggccggattgccattggggactgcatcttgtccattaatgaagagtctaccatcagtgtaaccaatgcccaggcacgagctatgttgagaagacattctctcattggccctgacataaaaattacttatgtgcctgcagaacatttggaagagttcaaaataagcttgggacaacaatctggaagagtaatggcactggatattttttcttcatacactggcagagacattccagaattaccagagcgagaagagggagagggtgaagaaagcgaacttcaaaacacagcatatagcaattggaatcagcccaggcgggtggaactctggagagaaccaagcaaatccttaggcatcagcattgttggtggacgagggatggggagtcggctaagcaatggagaagtgatgaggggcattttcatcaaacatgttctggaagatagtccagctggcaaaaatggaaccttgaaacctggagatagaatcgtagaggcacccagtcagtcagagtcagagccagagaaggctccattgtgcagtgtgcccccaccccctccttcagcctttgccgaaatgggtagtgatcacacacagtcatctgcaagcaaaatctcacaagatgtggacaaagaggatgagtttggttacagctggaaaaatatcagagagcgttatggaaccctaacaggcgagctgcatatgattgaactggagaaaggtcatagtggtttgggcctaagtcttgctgggaacaaagaccgatccaggatgagtgtcttcatagtggggattgatccaaatggagctgcaggaaaagatggtcgattgcaaattgcagatgagcttctagagatcaatggtcagattttatatggaagaagtcatcagaatgcctcatcaatcattaaatgtgccccttctaaagtgaaaataatttttatcagaaataaagatgcagtgaatcagatggccgtatgtcctggaaatgcagtagaacctttgccttctaactcagaaaatcttcaaaataaggagacagagccaactgttactacttctgatgcagctgtggacctcagttcatttaaaaatgtgcaacatctggagcttcccaaggatcaggggggtttgggtattgctatcagcgaagaagatacactcagtggagtcatcataaagagcttaacagagcatggggtagcagccacggatggacgactcaaagtcggagatcagatactggctgtagatgatgaaattgttgttggttaccctattgaaaagtttattagccttctgaagacagcaaagatgacagtaaaacttaccatccatgctgagaatccagattcccaggctgttccttcagcagctggtgcagccagtggagaaaaaaagaacagctcccagtctctgatggtcccacagtctggctccccagaaccggagtccatccgaaatacaagcagatcatcaacaccagcaatttttgcttctgatcctgcaacctgccccattatccctggctgcgaaacaaccatcgagatttccaaagggcgaacagggctgggcctgagcatcgttgggggttcagacacgctgctgggtgccattattatccatgaagtttatgaagaaggagcagcatgtaaagatggaagactctgggctggagatcagatcttagaggtgaatggaattgacttgagaaaggccacacatgatgaagcaatcaatgtcctgagacagacgccacagagagtgcgcctgacactctacagagatgaggccccatacaaagaggaggaagtgtgtgacaccctcactattgagctgcagaagaagccgggaaaaggcctaggattaagtattgttggtaaaagaaacgatactggagtatttgtgtcagacattgtcaaaggaggaattgcagatgccgatggaagactgatgcagggagaccagatattaatggtgaatggggaagacgttcgtaatgccacccaagaagcggttgccgctttgctaaagtgttccctaggcacagtaaccttggaagttggaagaatcaaagctggtccattccattcagagaggaggccatctcaaagcagccaggtgagtgaaggcagcctgtcatctttcacttttccactctctggatccagtacatctgagtcactggaaagtagctcaaagaagaatgcattggcatctgaaatacagggattaagaacagtcgaaatgaaaaagggccctactgactcactgggaatcagcattgctggaggagtaggcagcccacttggtgatgtgcctatatttattgcaatgatgcacccaactggagttgcagcacagacccaaaaactcagagttggggataggattgtcaccatctgtggcacatccactgagggcatgactcacacccaagcagttaacctactgaaaaatgcatctggctccattgaaatgcaggtggttgctggaggagacgtgagtgtggtcacaggtcatcagcaggagcctgcaagttccagtctttctttcactgggctgacgtcaagcagtatatttcaggatgatttaggacctcctcaatgtaagtctattacactagagcgaggaccagatggcttaggcttcagtatagttggaggatatggcagccctcatggagacttacccatttatgttaaaacagtgtttgcaaagggagcagcctctgaagacggacgtctgaaaaggggcgatcagatcattgctgtcaatgggcagagtctagaaggagtcacccatgaagaagctgttgccatccttaaacggacaaaaggcactgtcactttgatggttctctcttgaattggctgccagaattgaaccaacccaacccctagctcacctcctactgtaaagagaatgcactggtcctgacaatttttatgctgtgttcagccgggtcttcaa

SEQ ID NO: 271037 - DNA, 5853 bp, Artificial Sequence
  derived and/or modified sequence
atgctggaggccatcgacaagaaccgggccctgcacgccgccgagaggctgcagacaaagttgcgcgagcgcggggacgttgccaacgaagacaaactctccctcttgaagagcgtgctccagagcccactattctcccagatcctgagtttgcagacgtctgtgcaacagttaaaggaccaagttaatatcgcaactagtgcaacctccaacatcgagtatgctcatgttccacacctgtctccagccgtgatccctacgctccagaatgagagttttctcctgagccccaataacgggaacctcgaggcccttactggccccggaataccccatatcaatggaaagccggcttgcgatgagtttgatcaattgataaagaatatggcacaggggcggcatgtggaggtgttcgaattgctgaagcctccctctggaggtttaggtttttcagtcgtcggtctgaggagtgagaatcgcggcgagttgggcatattcgtgcaggaaattcaggagggttcggtagctcacagagatggacgccttaaggagacggaccagatactggccatcaacggccaggcccttgaccagacaataacccaccaacaagccatctccatcctgcagaaagcaaaagatacagttcagctcgtaatagcacgtggcagtctcccacagctggtgagcccaattgtgagccggtccccttcagcagcctctactatatcggcgcacagtaatcctgttcactggcagcacatggagacgatagaacttgtcaacgatgggtccggtcttggctttggcattattggggggaaggcaaccggagtgattgtgaaaactatcctccctggcggagttgctgaccagcatggacgactttgctcaggcgaccacatattgaaaattggcgatactgatttggccggaatgtcatccgaacaggtcgcccaagtgctccgacaatgtggaaatagggtgaaactgatgatcgctcgcggggccatcgaggagcggaccgctccgaccgccctgggcatcacactgagttcttcccccacttctacccctgaactgcgagtggacgcctctacccagaagggtgaagaatctgaaacgtttgacgtggagctgacaaaaaacgtgcagggcctaggcatcaccatcgccggctacattggagataaaaagctggagccatctgggatattcgtcaaaagcatcaccaaaagcagcgccgtcgagcatgacgggcgcatacaaatcggggatcagatcatcgccgtggacggcacaaaccttcagggctttacaaatcagcaggctgtcgaggtgctcaggcacacgggtcagaccgtgctattaactctgatgcgcagaggaatgaagcaggaggcagagctcatgtcccgagaagacgtcaccaaggacgctgacctgagcccagtgaatgcatcaattatcaaggaaaactacgagaaggatgaagatttcttatcttccactcgcaacaccaatatccttcccacagaggaagagggatatcccctgttgagcgctgagattgaggagatcgaggatgcccaaaagcaggaagcagcactcttgacaaagtggcaaaggattatgggtatcaattacgagattgtcgtcgcgcacgtatctaaattttcggagaattccggcttgggcatttcacttgaggctacagtcggccaccacttcattaggagtgttctgccggaggggcctgtcggccactccggtaagctgtttagcggggatgaactcctggaagttaacggcatcacactgctgggggaaaaccaccaagatgtggtgaacattttgaaggaattgcccatagaggtgaccatggtctgctgtaggcggacagttccgccaaccacgcagtccgaattggattcactgggaatccaacatatcgagttagagaaaggatccaaaggcctgggcttctctatccttgactaccaagatcccatagatccagcaagcacagtcattattatccgtagcctggtgcccggaggcattgcagaaaaagatggccgtttgctgcccggcgacagactgatgtttgtcaatgatgtgaatcttgagaactccagcctggaggaggccgttgaagcccttaaaggcgcaccgtccggcactgtcagaattggcgtcgctaagccactccctttatccccggaagagggctatgtgagtgctaaggaagattccttcctgtaccccccccacagctgtgaagaggcaggcctggcggataaaccactgttcagggccgacctcgctcttgtcggcactaacgacgctgacctggtggacgagtccactttcgaatccccttacagccccgaaaacgacagcatttactcaacacaggccagcatcctttctttgcatggatctagctgcggagatggtctgaattatggaagctctctcccgtcctccccccctaaggatgtcatagagaattcatgtgaccccgtgctggaccttcacatgagcttggaagaattgtatacacagaacttgctgcagcgccaagacgaaaacactccaagtgtggatatctcaatgggacccgcttccggtttcactattaacgattacacaccggcaaatgccatagagcaacagtacgagtgtgagaataccatcgtgtggacagagtcgcatttgccttcagaagtcatttcttctgctgaactacccagcgtgttaccagactcagccggcaaagggtccgaatacctgctagagcagagcagtctcgcctgcaacgcggagtgcgtcatgctacagaacgtcagcaaggagagtttcgagagaaccatcaatattgcaaaaggcaattccagtctgggcatgacggtatctgccaataaggacggcctgggtatgatcgtcaggagcatcatacacggaggggccatatcgcgagacggtcgcatcgcaattggagattgtattctgagcattaacgaagagtccactatcagcgtgacaaacgctcaggcaagggctatgttacgaagacattccctgatcgggccagatataaaaattacctacgtgcccgcagaacaccttgaggagttcaaaatctctttgggtcagcaatcagggcgggtgatggccctggatatattttcctcttataccggcagggatataccggagctgcccgagagggaggagggcgagggagaggaatccgagctccagaatactgcgtacagtaattggaaccaaccccgcagagttgaactctggcgggaaccgtctaaatcacttgggatttcaattgtggggggtaggggcatgggaagcagactctcgaacggagaagtaatgagagggatctttattaagcacgtgctggaagacagtccagcaggcaagaatggtactctaaagcctggggacagaattgtggaggctccaagtcagagcgagagcgaaccagagaaggcacctttgtgtagtgtgcctccccctcctcccagtgcctttgctgagatgggatcagatcatacccaaagctctgcctcaaagatctctcaagacgtcgataaagaagacgagttcggctattcatggaaaaacattagggagcggtatgggacattgactggcgaattgcacatgattgagctggagaagggccatagcggactgggattatctctggcaggcaataaggataggtcccggatgtctgtgtttattgtcgggatagatccaaacggagcggccggcaaagatggcagactccagattgctgacgagctgctcgagatcaacggccaaatcctgtatggccgctcccatcagaacgcaagtagcatcattaaatgtgcacccagcaaagtgaaaatcatatttatcaggaataaggacgctgtgaatcagatggccgtatgcccaggtaatgccgtggagccgctacctagcaattccgagaacctgcagaacaaggaaaccgagccaactgtgacaacgtccgacgccgctgtcgacctgtcatccttcaagaacgtgcaacaccttgagctgcctaaggaccagggtgggcttggaattgccatatccgaggaggacacattgagtggggtgattattaagagcttgacagagcacggggttgccgccactgacggaagactcaaggtcggcgaccagatcctggccgtggatgatgagattgtggtcggttacccaatcgaaaagttcatcagccttctgaagactgctaagatgacagttaagttgactatacacgccgagaatcccgattcacaggcagttccgtcagcggctggcgccgccagcggcgaaaagaaaaactcatcacagtccctcatggtacctcagagtggaagcccagaacctgagtccatacgcaatacatcccggagcagcacccccgcgatcttcgcgtccgacccagcgacgtgtcccatcatccctggatgtgaaaccaccattgaaatctccaaaggccgcacgggcctgggcctatcaatcgttggtgggagcgacactcttttgggggcgatcataatccacgaggtgtatgaggaaggagccgcttgtaaagatggcaggctctgggctggagaccagatactagaggtgaatggcatcgatctgcggaaggccacccacgacgaagcgataaacgttcttaggcagacccctcagcgggtacgactgaccctgtaccgtgacgaagctccctataaagaggaggaagtgtgcgatacgctgaccatagaactccagaagaagcctggaaagggactcggactatccatcgtgggcaaaaggaacgatacaggcgtgttcgtcagtgacattgttaagggtgggatcgctgacgccgatggacgccttatgcagggtgatcagatcctgatggtgaacggagaggacgtccgcaacgcaacacaggaagctgttgctgctctcctgaagtgctcactcgggactgttacgcttgaggtcggtaggatcaaggcggggccgtttcatagtgaacgcaggcccagccagtcttcacaggtcagcgagggatctctgtcaagtttcacgttcccactcagcggatcttcaacctccgagagcctagaatcctccagcaagaaaaacgcgttggcttcagagatccaggggcttcgaaccgtggaaatgaagaagggccccacagattcactcgggatatcaatcgccggcggggtcggctcgcccctcggagacgttcccattttcattgctatgatgcacccaaccggggtcgctgcacagacccagaagctcagagtcggagacaggattgtgacaatctgcgggacaagcaccgaaggcatgacccatactcaggccgtcaatctgctgaagaacgcctcgggatcaattgaaatgcaggttgtcgctggcggggacgttagcgtggtgactggacaccagcaggaacctgcatcatcttcactctcctttacagggctgacatcttcctctatttttcaagacgatctgggccctccacagtgcaagagcatcactttagaacgaggcccagatggcctggggttttccatcgtcggtggttacggctccccacatggagatctgcccatttacgtgaaaactgtgtttgccaagggagctgcttctgaggacggtcggctcaaacggggcgaccagattatcgctgtgaatggccaaagcctggaaggagtgactcacgaggaggcggtagccattttaaaaaggacaaaagggaccgtgacactcatggtactgtcttag

SEQ ID NO: 271038 - DNA, 915 bp, Artificial Sequence
  derived and/or modified sequence
atgcagggcgaccagatcctgatggtgaacggcgaggacgtgcggaacgcaacccaggaggccgtcgctgccctcctcaaatgttccttagggaccgtgaccttggaggtgggacgcattaaggctggaccgtttcattctgagcgaaggccaagccaaagctcccaggtttcagaaggctctctgagctcattcaccttccccctaagtggaagtagtacgtccgagtccttggaatcgtcttccaagaagaacgctctggcctccgaaatccagggactgaggacagtcgaaatgaagaaggggccaaccgacagcctcggcatctcgatagccgggggagtcggctcacccctgggcgatgtaccgatcttcattgcaatgatgcatccaacaggcgtggctgcacagactcagaagcttcgagtgggagacaggatcgttacaatttgcggcactagcaccgaaggtatgactcacacacaggctgttaacctccttaagaacgcgagtgggtctatagaaatgcaggtggtagccggaggggatgtcagcgttgtcacgggtcaccagcaggagcccgcctcgtcatccctctcgttcactggtctgacaagttctagcatcttccaggacgatctggggccgccccagtgtaagagcattacgctagaacgtggccctgacggtctggggttctctattgtgggcgggtacggaagcccccatggcgatttgccgatttacgtgaagacagtgttcgcaaaaggagcggctagtgaggatggccgtctgaaaaggggagatcagattatcgcagtgaacggacagagcctggaaggcgtgacccacgaagaagctgttgccattctcaagcgcactaagggtactgtaaccttaatggtcctttcgtag

SEQ ID NO: 271039 - DNA, 5852 bp, Artificial Sequence
  derived and/or modified sequence
atgctagaggcaatcgacaaaaaccgcgcactgcatgccgcagaaagactccaaaccaagctgagagaacgtggggatgtcgcaaacgaggacaagcttagcttgcttaagtcagtcctgcagtccccactgttctcacagattctgtcactccagaccagtgtgcagcagctcaaagaccaagtgaacatcgccacaagtgctacgtcaaacattgagtacgctcatgtgccacatctcagtccggcagttatccctactctgcagaatgagtcctttctgctcagccctaacaacgggaatctggaagccctgactgggccaggaattccacacatcaacggtaaaccggcttgcgatgagttcgaccagctgatcaagaacatggcacagggaagacacgtagaggtgtttgagctgttgaagcctcccagcgggggtctcgggttttccgtagtgggcttaagatccgaaaacagaggagaattaggtatattcgtccaggagatacaggaggggtctgttgcacatcgcgacggcaggctcaaggaaaccgatcagatcctagccatcaacggtcaggccctcgaccagaccatcacacaccagcaggccatctctattctacagaaagccaaggatactgtacagctggtgattgcccgagggtcgctcccccagctcgtcagtcccatagtctctagatctccaagcgccgctagcacgatcagtgcacacagtaatccggtgcattggcagcatatggaaactatcgaactcgtgaacgatggatccgggctgggatttggcataataggaggtaaggcgaccggggtaatcgtgaagacaatcctccctggcggtgtggccgatcagcacggaagactgtgttccggggaccacatcttaaaaatcggggacacagacctggccggaatgtcttccgagcaagttgctcaggtcctgcgtcaatgcggcaacagagtgaaactcatgatagcccgtggggctattgaggagagaacggcccctaccgcactcggcatcacgctttctagttcccccacatcaacgcctgaacttagagtcgacgcctcgacccagaagggggaggagagcgaaactttcgatgtggagctgaccaagaatgtgcagggcctcggcattactatcgccggatacataggggataaaaagctggaaccatccggaattttcgtgaaaagcattacgaaatcctctgcggtggagcacgacggtagaatccagattggggatcagatcattgcagtggacggcactaacttgcagggattcacaaaccagcaggcagttgaggttctacgtcataccggccagaccgttctgcttaccctgatgagacgtggcatgaagcaggaggctgagctgatgtctagggaagacgtaactaaggacgcggatcttagccctgtgaatgccagcatcattaaggagaattacgaaaaggatgaggattttctgagctctacacgcaacacgaatatcctgccaacagaagaagaaggctatccattgttatctgcggaaatcgaggagatcgaagacgcccaaaagcaggaagccgctctcttgaccaagtggcagcgcataatgggaatcaactatgagatcgtggtggctcatgttagcaagttttcagagaattctggactcgggatctctctggaagctaccgtggggcaccactttatcaggtccgtcttaccggaaggtcccgtcgggcattccggtaaactatttagtggagatgagctcctggaggtgaacggaataacattacttggcgaaaatcaccaggatgtcgtaaacatccttaaagagctccccatagaggttaccatggtctgttgcaggcggacagtcccgccaactacacagtcagaactggacagtctgggtattcagcacattgaactggaaaaaggttccaaaggcctgggcttctctatattggattaccaagaccctatcgacccagcttctacggttattattatcaggtcactggtacccggagggattgcggagaaggatggcagattgctaccaggggacaggctgatgtttgtgaatgatgtgaatttggagaattcaagcctggaggaagctgtggaagcgttaaagggggcaccgagtggaactgtccggatcggcgtcgcaaagccacttccactgtccccagaggaaggctacgttagcgctaaagaggacagttttctgtatcctcctcattcgtgcgaagaagctggcctggcagacaaacctttgttcagggctgatcttgcactggtgggtacaaatgatgccgacttagtcgatgagagcacgtttgagtctccctactccccagaaaatgactccatctatagcacccaagcttctatcctgtctcttcatggcagttcctgtggggacgggcttaactacggatcatctcttccatcctcacccccaaaagatgtgatcgagaattcctgtgatccggttttagacctgcacatgtcactggaggaattgtatacccaaaatctcctccagaggcaagacgaaaacacgccttccgtagacataagcatgggccctgccagtggatttacgatcaatgattacacccccgcaaatgctattgagcagcagtatgagtgcgaaaacactatagtgtggacggagagtcaccttcccagtgaggtgattagcagcgccgagctgccatccgttctgccagacagcgcaggtaaaggtagtgaatatctgctggagcagtcttccttggcctgcaacgctgaatgtgtgatgctgcaaaatgtcagtaaagagtcgtttgagaggacaatcaacatcgccaagggaaatagttcattaggaatgacggtgagcgctaacaaagacggcctgggcatgattgtgaggagtataattcacggcggagccatttcccgcgacggtcgtattgcgattggtgactgtatcctgtctataaatgaggaaagtaccatctctgtcacaaatgcccaggcaagagctatgctcaggaggcacagcttaatcggacctgacattaagattacatatgtacccgctgaacatttagaagaattcaaaatcagtctcggtcagcagtctggcagagtgatggccctggatatctttagtagttacaccggcagagacatccccgaattgcctgagagggaagaaggtgaaggggaagaaagtgaacttcagaatacagcctactccaattggaaccagcctcggagagtagaactgtggagagaaccttcaaaaagccttggtatcagcatcgttggcggtagggggatgggctccaggttgagcaacggtgaggtgatgcgaggaatatttattaagcacgttctcgaagatagcccagccggtaagaacggcacccttaagcctggggataggattgttgaggcgcctagccagagcgagagcgaacctgaaaaggccccactctgctcagtgcccccacccccaccctctgcatttgcggaaatgggttctgatcacacgcagagcagcgccagcaagattagtcaggatgttgacaaggaagacgagtttggctattcttggaagaatatcagagagcgttacggaacactcaccggggagttgcatatgatagaactcgagaaagggcatagcggtttgggcttatcgctcgctggcaataaagaccgatcccgtatgtctgtgtttatagttggcattgatccaaatggcgctgccggaaaagatggacgactccagatagccgacgaactgctcgaaatcaacggacaaatattgtatggccgaagtcaccagaatgctagttcaattatcaagtgcgctccaagtaaggtcaaaattatatttattaggaataaagatgccgtaaatcagatggcggtatgccctgggaacgcggtcgagccccttccatccaatagcgagaacctccagaacaaagaaacagaacctaccgtcaccacgagcgatgcagccgttgatctgagctctttcaaaaatgtacagcatctcgaactccccaaggatcaggggggactcgggattgctatctcggaggaagacaccctatcaggagttattattaaaagtcttactgaacacggggtcgcagccactgacgggaggttaaaggtgggcgaccagatcctggccgtcgacgatgagatcgtggttgggtaccctatcgaaaagttcattagcctgttgaagaccgcaaaaatgactgtcaagcttacgattcatgctgagaaccccgatagccaggcagtgccctcagctgccggtgccgcttcgggcgagaagaagaatagctcacaatccctgatggtaccgcaatctggtagtcctgaacccgagagcatccgtaatacatcgcgctcctctacccctgcgatctttgcttcagaccccgcaacatgtcccatcatccccggatgtgaaacgaccatcgagatcagcaaagggcgaacaggtctcggcttgagtattgtgggcggttccgataccctgctgggagccattatcatacacgaggtatatgaagaaggcgcagcgtgtaaagacggacgactttgggctggtgaccagattcttgaagtgaatggtatagatttaaggaaagcaacccacgacgaggccattaacgttttgagacagactccccagagagttcggttaacgctgtatcgtgatgaggcaccctataaggaagaggaagtatgcgacacccttacaatcgaattacagaagaagccaggcaaagggctaggtctcagtatagttggtaaacgtaacgatacgggggtatttgtctccgacatcgtgaagggcggtatcgctgacgccgatgggaggctgatgcaaggggaccagatcttgatggtgaacggtgaggacgtgaggaatgctactcaggaggctgttgcagctctgttgaagtgctcccttggcacagttaccctcgaggtgggccgaatcaaagcgggtcccttccatagcgaacggagaccctcacagtcctcacaggtgagcgagggcagcctgagctccttcacattccccctttctgggtccagcaccagcgagagcctcgagtcctcctcaaagaaaaatgcgctggcttccgaaatacaagggctgcgcactgtggaaatgaaaaagggaccaaccgactccttggggattagcatcgccggaggagttggttcccctctgggcgatgtgccaattttcattgcaatgatgcatcctacaggcgtggccgcacaaacacagaaattgcgagttggagatagaattgtgaccatctgcggaacctcgacagaggggatgacccatacccaagccgtgaacctgctgaagaatgcctctggcagtattgagatgcaggttgtggccggtggggacgttagcgtagttactggccaccagcaggaaccggcaagctccagcctttcctttaccggccttacaagctcttcgatttttcaggatgatcttgggcctccccagtgcaagtcaatcaccctagagcggggacctgatggtctaggattctctatagtaggaggatatggcagcccacacggcgacctgcccatctatgtcaagaccgtgttcgccaagggcgcagcatccgaagatggacgcctgaaacgcggagatcaaattatcgccgtgaacgggcagagcctggagggcgttacccacgaggaggcggtggccattctaaagcggaccaagggcactgttactctgatggtcctcagcta

SEQ ID NO: 271040 - DNA, 915 bp, Artificial Sequence
  derived and/or modified sequence
atgcaaggtgatcagatcctcatggtcaacggggaggatgttcgtaatgccacacaggaagcagtggcagctttgctaaagtgctccttgggaacggtcactctggaagtggggagaattaaggctggaccttttcatagtgagcgcaggccttctcagtcctctcaggtgtccgaagggtctctgtcctctttcacattccctctttctggcagcagcactagtgagtccctggaatcatctagcaagaagaatgccttagcatctgagatacaagggctgagaaccgttgaaatgaagaagggcccaacagatagcctgggcatctccattgcaggaggcgtgggctcccccttgggggatgtgccaatctttatcgccatgatgcaccccaccggagtcgccgcacagacacagaagctccgggtgggagatcggattgttaccatatgtgggacatccacagagggaatgactcacactcaggcagtgaatctcctgaagaacgcgtccggctcgatcgagatgcaggtcgttgcgggaggtgacgtaagcgtggtcactggacatcagcaggagcctgcctcttctagcctgtcttttaccggactgaccagctcttcaatttttcaagacgacctcggcccaccacaatgcaagtctataactctggagcgaggtcccgacggactaggcttttcaatagtgggcggttacggaagcccacatggggacctccctatttatgtaaagacagtctttgcgaagggtgcagcgtctgaagatgggcgtctcaaaaggggggatcagatcattgccgtgaatggacagagtcttgaaggcgtgacacatgaagaggcagtggctatcctgaagcgaaccaaaggcacagttactttgatggttctctcatag

SEQ ID NO: 271041 - DNA, 5853 bp, Artificial Sequence
  derived and/or modified sequence
atgctggaggccatcgacaagaacagagccctgcacgccgccgagagactgcagaccaagctgagagagagaggcgacgtggccaacgaggacaagctgagcctgctgaagagcgtgctgcagagccccctgttcagccagatcctgagcctgcagaccagcgtgcagcagctgaaggaccaggtgaacatcgccaccagcgccaccagcaacatcgagtacgcccacgtgccccacctgagccccgccgtgatccccaccctgcagaacgagagcttcctgctgagccccaacaacggcaacctggaggccctgaccggccccggcatcccccacatcaacggcaagcccgcctgcgacgagttcgaccagctgatcaagaacatggcccagggcagacacgtggaggtgttcgagctgctgaagccccccagcggcggcctgggcttcagcgtggtgggcctgagaagcgagaacagaggcgagctgggcatcttcgtgcaggagatccaggagggcagcgtggcccacagagacggcagactgaaggagaccgaccagatcctggccatcaacggccaggccctggaccagaccatcacccaccagcaggccatcagcatcctgcagaaggccaaggacaccgtgcagctggtgatcgccagaggcagcctgccccagctggtgagccccatcgtgagcagaagccccagcgccgccagcaccatcagcgcccacagcaaccccgtgcactggcagcacatggagaccatcgagctggtgaacgacggcagcggcctgggcttcggcatcatcggcggcaaggccaccggcgtgatcgtgaagaccatcctgcccggcggcgtggccgaccagcacggcagactgtgcagcggcgaccacatcctgaagatcggcgacaccgacctggccggcatgagcagcgagcaggtggcccaggtgctgagacagtgcggcaacagagtgaagctgatgatcgccagaggcgccatcgaggagagaaccgcccccaccgccctgggcatcaccctgagcagcagccccaccagcacccccgagctgagagtggacgccagcacccagaagggcgaggagagcgagaccttcgacgtggagctgaccaagaacgtgcagggcctgggcatcaccatcgccggctacatcggcgacaagaagctggagcccagcggcatcttcgtgaagagcatcaccaagagcagcgccgtggagcacgacggcagaatccagatcggcgaccagatcatcgccgtggacggcaccaacctgcagggcttcaccaaccagcaggccgtggaggtgctgagacacaccggccagaccgtgctgctgaccctgatgagaagaggcatgaagcaggaggccgagctgatgagcagagaggacgtgaccaaggacgccgacctgagccccgtgaacgccagcatcatcaaggagaactacgagaaggacgaggacttcctgagcagcaccagaaacaccaacatcctgcccaccgaggaggagggctaccccctgctgagcgccgagatcgaggagatcgaggacgcccagaagcaggaggccgccctgctgaccaagtggcagagaatcatgggcatcaactacgagatcgtggtggcccacgtgagcaagttcagcgagaacagcggcctgggcatcagcctggaggccaccgtgggccaccacttcatcagaagcgtgctgcccgagggccccgtgggccacagcggcaagctgttcagcggcgacgagctgctggaggtgaacggcatcaccctgctgggcgagaaccaccaggacgtggtgaacatcctgaaggagctgcccatcgaggtgaccatggtgtgctgcagaagaaccgtgccccccaccacccagagcgagctggacagcctgggcatccagcacatcgagctggagaagggcagcaagggcctgggcttcagcatcctggactaccaggaccccatcgaccccgccagcaccgtgatcatcatcagaagcctggtgcccggcggcatcgccgagaaggacggcagactgctgcccggcgacagactgatgttcgtgaacgacgtgaacctggagaacagcagcctggaggaggccgtggaggccctgaagggcgcccccagcggcaccgtgagaatcggcgtggccaagcccctgcccctgagccccgaggagggctacgtgagcgccaaggaggacagcttcctgtaccccccccacagctgcgaggaggccggcctggccgacaagcccctgttcagagccgacctggccctggtgggcaccaacgacgccgacctggtggacgagagcaccttcgagagcccctacagccccgagaacgacagcatctacagcacccaggccagcatcctgagcctgcacggcagcagctgcggcgacggcctgaactacggcagcagcctgcccagcagcccccccaaggacgtgatcgagaacagctgcgaccccgtgctggacctgcacatgagcctggaggagctgtacacccagaacctgctgcagagacaggacgagaacacccccagcgtggacatcagcatgggccccgccagcggcttcaccatcaacgactacacccccgccaacgccatcgagcagcagtacgagtgcgagaacaccatcgtgtggaccgagagccacctgcccagcgaggtgatcagcagcgccgagctgcccagcgtgctgcccgacagcgccggcaagggcagcgagtacctgctggagcagagcagcctggcctgcaacgccgagtgcgtgatgctgcagaacgtgagcaaggagagcttcgagagaaccatcaacatcgccaagggcaacagcagcctgggcatgaccgtgagcgccaacaaggacggcctgggcatgatcgtgagaagcatcatccacggcggcgccatcagcagagacggcagaatcgccatcggcgactgcatcctgagcatcaacgaggagagcaccatcagcgtgaccaacgcccaggccagagccatgctgagaagacacagcctgatcggccccgacatcaagatcacctacgtgcccgccgagcacctggaggagttcaagatcagcctgggccagcagagcggcagagtgatggccctggacatcttcagcagctacaccggcagagacatccccgagctgcccgagagagaggagggcgagggcgaggagagcgagctgcagaacaccgcctacagcaactggaaccagcccagaagagtggagctgtggagagagcccagcaagagcctgggcatcagcatcgtgggcggcagaggcatgggcagcagactgagcaacggcgaggtgatgagaggcatcttcatcaagcacgtgctggaggacagccccgccggcaagaacggcaccctgaagcccggcgacagaatcgtggaggcccccagccagagcgagagcgagcccgagaaggcccccctgtgcagcgtgcccccccccccccccagcgccttcgccgagatgggcagcgaccacacccagagcagcgccagcaagatcagccaggacgtggacaaggaggacgagttcggctacagctggaagaacatcagagagagatacggcaccctgaccggcgagctgcacatgatcgagctggagaagggccacagcggcctgggcctgagcctggccggcaacaaggacagaagcagaatgagcgtgttcatcgtgggcatcgaccccaacggcgccgccggcaaggacggcagactgcagatcgccgacgagctgctggagatcaacggccagatcctgtacggcagaagccaccagaacgccagcagcatcatcaagtgcgcccccagcaaggtgaagatcatcttcatcagaaacaaggacgccgtgaaccagatggccgtgtgccccggcaacgccgtggagcccctgcccagcaacagcgagaacctgcagaacaaggagaccgagcccaccgtgaccaccagcgacgccgccgtggacctgagcagcttcaagaacgtgcagcacctggagctgcccaaggaccagggcggcctgggcatcgccatcagcgaggaggacaccctgagcggcgtgatcatcaagagcctgaccgagcacggcgtggccgccaccgacggcagactgaaggtgggcgaccagatcctggccgtggacgacgagatcgtggtgggctaccccatcgagaagttcatcagcctgctgaagaccgccaagatgaccgtgaagctgaccatccacgccgagaaccccgacagccaggccgtgcccagcgccgccggcgccgccagcggcgagaagaagaacagcagccagagcctgatggtgccccagagcggcagccccgagcccgagagcatcagaaacaccagcagaagcagcacccccgccatcttcgccagcgaccccgccacctgccccatcatccccggctgcgagaccaccatcgagatcagcaagggcagaaccggcctgggcctgagcatcgtgggcggcagcgacaccctgctgggcgccatcatcatccacgaggtgtacgaggagggcgccgcctgcaaggacggcagactgtgggccggcgaccagatcctggaggtgaacggcatcgacctgagaaaggccacccacgacgaggccatcaacgtgctgagacagaccccccagagagtgagactgaccctgtacagagacgaggccccctacaaggaggaggaggtgtgcgacaccctgaccatcgagctgcagaagaagcccggcaagggcctgggcctgagcatcgtgggcaagagaaacgacaccggcgtgttcgtgagcgacatcgtgaagggcggcatcgccgacgccgacggcagactgatgcagggcgaccagatcctgatggtgaacggcgaggacgtgagaaacgccacccaggaggccgtggccgccctgctgaagtgcagcctgggcaccgtgaccctggaggtgggcagaatcaaggccggccccttccacagcgagagaagacccagccagagcagccaggtgagcgagggcagcctgagcagcttcaccttccccctgagcggcagcagcaccagcgagagcctggagagcagcagcaagaagaacgccctggccagcgagatccagggcctgagaaccgtggagatgaagaagggccccaccgacagcctgggcatcagcatcgccggcggcgtgggcagccccctgggcgacgtgcccatcttcatcgccatgatgcaccccaccggcgtggccgcccagacccagaagctgagagtgggcgacagaatcgtgaccatctgcggcaccagcaccgagggcatgacccacacccaggccgtgaacctgctgaagaacgccagcggcagcatcgagatgcaggtggtggccggcggcgacgtgagcgtggtgaccggccaccagcaggagcccgccagcagcagcctgagcttcaccggcctgaccagcagcagcatcttccaggacgacctgggccccccccagtgcaagagcatcaccctggagagaggccccgacggcctgggcttcagcatcgtgggcggctacggcagcccccacggcgacctgcccatctacgtgaagaccgtgttcgccaagggcgccgccagcgaggacggcagactgaagagaggcgaccagatcatcgccgtgaacggccagagcctggagggcgtgacccacgaggaggccgtggccatcctgaagagaaccaagggcaccgtgaccctgatggtgctgagctag

SEQ ID NO: 271042 - DNA, 915 bp, Artificial Sequence
  derived and/or modified sequence
atgcagggcgaccagatcctgatggtgaacggcgaggacgtgagaaacgccacccaggaggccgtggccgccctgctgaagtgcagcctgggcaccgtgaccctggaggtgggcagaatcaaggccggccccttccacagcgagagaagacccagccagagcagccaggtgagcgagggcagcctgagcagcttcaccttccccctgagcggcagcagcaccagcgagagcctggagagcagcagcaagaagaacgccctggccagcgagatccagggcctgagaaccgtggagatgaagaagggccccaccgacagcctgggcatcagcatcgccggcggcgtgggcagccccctgggcgacgtgcccatcttcatcgccatgatgcaccccaccggcgtggccgcccagacccagaagctgagagtgggcgacagaatcgtgaccatctgcggcaccagcaccgagggcatgacccacacccaggccgtgaacctgctgaagaacgccagcggcagcatcgagatgcaggtggtggccggcggcgacgtgagcgtggtgaccggccaccagcaggagcccgccagcagcagcctgagcttcaccggcctgaccagcagcagcatcttccaggacgacctgggccccccccagtgcaagagcatcaccctggagagaggccccgacggcctgggcttcagcatcgtgggcggctacggcagcccccacggcgacctgcccatctacgtgaagaccgtgttcgccaagggcgccgccagcgaggacggcagactgaagagaggcgaccagatcatcgccgtgaacggccagagcctggagggcgtgacccacgaggaggccgtggccatcctgaagagaaccaagggcaccgtgaccctgatggtgctgagctag

SEQ ID NO: 271043 - DNA, 759 bp, Artificial Sequence
  derived and/or modified sequence
atgctcgggggtgtgcccactctgtgtggaacaggcaatgagacctggaccctgcttgcgcttgggcaggccatagcccgacgtctcaagccatttggcgttcagagatttctttatacaggtcggcagccgcgtccagaggaagctgcggagtttcaagccgaattcgtgtccaccccagagttagcggcccagagtgactttatcgtcgttgcctgcagtctgacccctgcaacagagggtctttgcaataaggactttttccaaaagatgaaggagaccgcggtgtttataaatatatcacggtatcctcgagcaacattacctagtaagcctggcgaagagcctagtccactgctgcccagcggagacttcctgccccggggtctcttggttagaccgcaggccgagttagccggatttcacaaaccgaacaatcagcttagaaattcttgggaatatacacggcccccttaccgagaagaggagccttcggaatgggcgtggcccgtgtgtttctctgctgtggctcctaccagaaggggcttggctcatagttcagttgcctctggctcagtaccccgcgagccactccaggcccattacccaccgccacagcgagccggccttgaagatcttaaaggcccacttgaagccgccagccacactgcggaacctgggttcgtttggctgtggtttagtgacactctcaatctgatgctgctcgggggtcagacactgaaattgacatggtcttag

SEQ ID NO: 271044 - DNA, 1590 bp, Artificial Sequence
  derived and/or modified sequence
ttctgcagatgaggcagagacacttttcttccagtggcccttatttggagaagcctggcagaagggcgtgagcctagccaagcagctatctattggtggttctctgtcatcctgcctggtgcaggggtgcgggtgagggtggagagtgtggagaacctgtctagccaacgaacagccctgcctctcactagagagttgcttggaggaacccaacagctttggggcacgttctgagcctgaaaatccaactgtacaaatctgtctcagcagcagcttacatgaaaattgtaagtttggggtgagctggcagtttggcagtgccaccaaaaagtcaaatggggtctgagactgcattcacagaagcagagggtccaggacaaaggaggggactgcttgaccaggtgtctcccttgtgaaaacctctccagttctcagaggttaggaaaaacctgagtggctttccagatggcttggaccatgtgaggacagcatcagccagtcacagcctcaggggagctgaggtgctgtctccagatccctggggcagtgtgggctggctgggggctagttacagtggggcagccagccccccacccgctttggaggagacaggagcaggcaactcgggctgtgctgatgaaaagggtctgccctgagggccgctgttccagaaatgctgggtggtgtccctaccctttgcgggactgggaacgagacatggactctccttgctctaggccaggccattgctcggcgtctgaaaccattcggtgtccagagatttctgtacacagggcgccagcccaggcctgaggaagcagcagaattccaggcagagtttgtgtctacccctgagctggctgcccaatctgatttcatcgtcgtggcctgctccttaacacctgcaaccgagggactctgcaacaaggacttcttccagaagatgaaggaaacagctgtgttcatcaacatcagcaggtatcctagggccaccttacccagcaagcctggagaggagccatccccactgctgccatctggagattttcttccccgtgggttgttggtgagaccccaggctgagcttgctggtttccataaaccaaacaaccaactcagaaattcgtgggaatacacgagacctccgtacagggaagaagagccgtcagagtgggcctggcctgtctgcttctcagcagtggcccccacccggcggggcctggcacacagcagcgtggcttcagggagtgttcccagggagcctctgcaggcccattatcctccaccacaaagggctggacttgaggatctgaagggccctctggaggccgcctcccacactgctgagcctggctttgtctggctgtggttcagtgatactttgaaccttatgctcctgggcggacagaccctaaaactcacgtggtcgtagctcctcacactgtccctaggggtgccttcaggccactgggcatgtatgaaggtgtgattctctgaggaaagagtgattctgatatatgtacttgtcacattggtgttggacacatttgcgccaaaagtatggtaattctattattaaataattctctg

SEQ ID NO: 271045 - DNA, 759 bp, Artificial Sequence
  derived and/or modified sequence
atgctgggcggcgtgcccaccctgtgtggcactggaaatgagacctggaccctgctggccctgggccaggccatcgcccggcggctgaagcccttcggcgtgcagcgcttcctgtacacaggccggcagcccaggcctgaggaggccgctgagttccaggccgagtttgtgtccaccccagagctggccgcccagagcgacttcatcgtggtggcctgcagcctgaccccagccacagagggcctgtgcaacaaggacttcttccagaagatgaaggagacagctgtgttcatcaacatcagccgctacccccgggccaccctgcccagcaagccaggagaggagcccagccccctgctgcccagcggggacttcctgccccggggcctgctggtgcggccccaggccgagctggccggcttccacaagcccaacaaccagctgagaaattcctgggagtacaccaggcctccctaccgggaggaggagcccagcgagtgggcctggcctgtgtgcttctctgctgtggcccccacccggcggggcctggcccacagctctgtggccagcggctctgtgccccgggagcccctgcaggcccactaccccccaccccagagagctggcctggaggacctgaagggccccctggaggccgccagccacacagctgagcccggctttgtgtggctgtggttcagtgacaccctgaacctgatgctgctgggcggccagaccctgaagctgacctggagctag

SEQ ID NO: 271046 - DNA, 759 bp, Artificial Sequence
  derived and/or modified sequence
atgctgggcggcgtgcccaccctgtgcggcaccggcaacgagacctggaccctactagcactcggtcaagctatcgctcgacggctgaagcccttcggcgtgcagaggtttttgtacacaggacgacaaccacgtccggaggaagccgccgagttccaggccgaatttgtctctaccccagaacttgccgcccagtctgactttattgtggtggcgtgctccctaactccagctaccgagggcctgtgcaacaaggacttcttccagaaaatgaaagagaccgccgtttttatcaacatctctcgttacccgcgtgccacattacccagcaagccaggcgaggagccttcccctcttctcccaagcggggactttcttcctagaggtctcttggttagacctcaagctgaactggcaggtttccataagcccaataatcaattgcggaattcctgggagtatactcggcccccctaccgggaagaggagccctctgagtgggcttggccggtctgtttttcagcagttgctcctacaagaaggggattggctcactcaagtgtggcttctgggagcgtgccccgcgaacctctgcaagcgcattatcccccccctcagcgtgcagggcttgaagacctgaagggacctctggaagccgcctctcatactgcagagcctggtttcgtttggttgtggtttagtgatacactgaatctcatgctcctaggtgggcagacgcttaagctcacgtggtcctag

SEQ ID NO: 271047 - DNA, 759 bp, Artificial Sequence
  derived and/or modified sequence
atgctgggcggagtcccgacgttgtgcgggacaggcaatgagacctggaccctgctggccctcggtcaagctatcgcccgtcggttaaagccctttggggtgcagagattcctgtacactgggcgtcaaccccgtcccgaggaagcagcagaatttcaggccgaattcgtgagcacccccgaacttgccgcacagagcgattttattgttgtggcctgcagcttgaccccggcaaccgagggactttgcaataaggacttcttccaaaaaatgaaggaaacagccgtgtttattaatatcagtcggtatcccagagccacgttaccctcgaaacctggggaggaaccaagtcccctcctgccgtccggggacttcctgcctcggggtttgttagttcgtccacaggctgaattagcgggtttccacaaacctaataatcagctgaggaattcctgggaatacacacgccctccctatagggaggaggaaccgagcgaatgggcatggcctgtgtgtttctcagctgtagcccctacacgacgcggtctggcacactcgtctgtggcctccggttcagttccacgcgaaccgctgcaggcccactacccccctccccagcgcgctggactcgaagatctaaaagggcctctggaagctgcttcacacaccgccgaaccaggtttcgtgtggttatggtttagcgacaccctgaacctaatgctgctgggaggacagacccttaagctgacgtggtcctag

SEQ ID NO: 271048 - DNA, 759 bp, Artificial Sequence
  derived and/or modified sequence
atgctgggcggcgtgcccaccctgtgcggcaccggcaacgagacctggaccctgctggccctgggccaggccatcgccagaagactgaagcccttcggcgtgcagagattcctgtacaccggcagacagcccagacccgaggaggccgccgagttccaggccgagttcgtgagcacccccgagctggccgcccagagcgacttcatcgtggtggcctgcagcctgacccccgccaccgagggcctgtgcaacaaggacttcttccagaagatgaaggagaccgccgtgttcatcaacatcagcagataccccagagccaccctgcccagcaagcccggcgaggagcccagccccctgctgcccagcggcgacttcctgcccagaggcctgctggtgagaccccaggccgagctggccggcttccacaagcccaacaaccagctgagaaacagctgggagtacaccagacccccctacagagaggaggagcccagcgagtgggcctggcccgtgtgcttcagcgccgtggcccccaccagaagaggcctggcccacagcagcgtggccagcggcagcgtgcccagagagcccctgcaggcccactacccccccccccagagagccggcctggaggacctgaagggccccctggaggccgccagccacaccgccgagcccggcttcgtgtggctgtggttcagcgacaccctgaacctgatgctgctgggcggccagaccctgaagctgacctggagctag

SEQ ID NO: 271049 - protein, 372 aa, Artificial Sequence
  derived and/or modified sequence
MKQLPVLEPGDKPRKATWYTLTVPGDSPCARVGHSCSYLPPVGNAKRGKVFIVGGANPNRSFSDVHTMDLGKHQWDLDTCKGLLPRYEHASFIPSCTPDRIWVFGGANQSGNRNCLQVLNPETRTWTTPEVTSPPPSPRTFHTSSAAIGNQLYVFGGGERGAQPVQDTKLHVFDANTLTWSQPETLGNPPSPRHGHVMVAAGTKLFIHGGLAGDRFYDDLHCIDISDMKWQKLNPTGAAPAGCAAHSAVAMGKHVYIFGGMTPAGALDTMYQYHTEEQHWTLLKFDTLLPPGRLDHSMCIIPWPVTCASEKEDSNSLTLNHEAEKEDSADKVMSHSGDSHEESQTATLLCLVFGGMNTEGEIYDDCIVTVVD

SEQ ID NO: 271050 - protein, 244 aa, Artificial Sequence
  derived and/or modified sequence
GRGSPDTGSITVSGRESESFRGVGPSRVQRTGKGLPWLRPGHFDRISLFFPDPVSYPLELPRGDEICWAGSGGCCGRSRPREASLTELWTLGTAVSGLGRRYTLTVPGDSPCARVGHSCSYLPPVGNAKRGKVFIVGGANPNRSFSDVHTMDLGKHQWDLDTCKGLLPRYEHASFIPSCTPDRIWVFGGANQSGNRNCLQVLNPETRTWTTPEVTSPPPSPRTFHTSSAAIGNQLYVFGGGERG

SEQ ID NO: 271051 - DNA, 1504 bp, Artificial Sequence
  derived and/or modified sequence
aggggcgagggtccccggataccgggtctatcacggtctcgggcagggagtctgaatcttttaggggagtgggcccaagccgggtgcaaagaacggggaagggccttccctggctccgtcccggccactttgaccgaatcagcctgttctttcccgaccccgtctcctatcccctagaactgccacgtggggatgagatttgctgggctggtagcggcggctgctgcgggaggtcccgcccacgtgaagccagcctaactgagctctggactttggggacagctgtcagtggcctaggccgcaggacaccatgaagcaactgccagtcttggaacctggagacaagcccaggaaagcaacatggtacaccttgactgtccctggagacagcccctgtgctcgagttggccacagctgttcatatttacccccagttggtaatgccaagagagggaaggtcttcattgttgggggagcaaatccaaacagaagcttctcagacgtgcacaccatggatctgggaaaacaccagtgggacttagatacctgcaagggcctcttgccccggtatgaacatgctagcttcattccctcctgcacacctgaccgtatctgggtatttggaggtgccaaccaatcaggaaatcgaaattgtctacaagtcctgaatcctgaaaccaggacgtggaccacgccagaagtgaccagccccccaccatccccaagaacattccacacatcatcggcagccattggaaaccagctatatgtctttgggggcggagagagaggtgcccagcccgtgcaggacacgaagctgcatgtgtttgacgcaaacactctgacctggtcacagccagagacacttggaaatcctccatctccccggcatggtcatgtgatggtggcagcagggacaaagctcttcatccacggaggcttggcgggggacagattctatgatgacctccactgcattgatataagtgacatgaaatggcagaagctaaatcccactggggctgctccagcaggctgtgctgcccactcagctgtggccatgggaaaacatgtgtacatctttggtggaatgactcctgcaggagcactggacacaatgtaccagtatcacacagaagagcagcattggaccttgcttaaatttgatactcttctaccccctggacgattggaccattccatgtgtatcattccatggccagtgacgtgtgcttctgagaaagaagattccaactctctcactctgaaccatgaagctgagaaagaggattcagctgacaaagtaatgagccacagtggtgactcacatgaggaaagccagactgctacactgctctgtttggtgtttggtgggatgaatacagaaggggaaatctatgacgattgtattgtgactgtagtggactaataaaacccacatttttattacctgtcagttactttcagaatagttaagtaaaacattagctgttttatacctcca

SEQ ID NO: 271052 - DNA, 2450 bp, Artificial Sequence
  derived and/or modified sequence
gtcacggctcgcgactggcctaagtcgccgcagaactgccacgtggggatgagatttgctgggctggtagcggcggctgctgcgggaggtcccgcccacgtgaagccagcctaactgagctctggactttggggacagctgtcagtggcctaggccgcaggacaccatgaagcaactgccagtcttggaacctggagacaagcccaggaaagcaacatggtacaccttgactgtccctggagacagcccctgtgctcgagttggccacagctgttcatatttacccccagttggtaatgccaagagagggaaggtcttcattgttgggggagcaaatccaaacagaagcttctcagacgtgcacaccatggatctgggaaaacaccagtgggacttagatacctgcaagggcctcttgccccggtatgaacatgctagcttcattccctcctgcacacctgaccgtatctgggtatttggaggtgccaaccaatcaggaaatcgaaattgtctacaagtcctgaatcctgcttttaaatcttggggattttggactgtcttggcaaatcctaagtatcatcttcattcttccttgatgtttaaaccaggacgtggaccacgccagaagtgaccagccccccaccatccccaagaacattccacacatcatcggcagccattggaaaccagctatatgtctttgggggcggagagagaggtgcccagcccgtgcaggacacgaagctgcatgtgtttgacgcaagtatggactggtgggcaccttggggctggtcagggccatcccagtttacacattacctaatataggaagcagaagttagaaaaggaaagcctgactaagtgtctcacttctagacttctttgttatatctcttagctgatatctttttcccacagcaaaattggcatttaaaaagggatagtgaggcctggcatggtggctcacacctgtaatcccagagctttggaaggctgaggcaggtggaccgcttaaggtcaggagttcgagaacagcctggccaacataccttttctctactaaaaacacaaaaattatccgggcatgatggtatgcacctgtaatcccagttactcaggaggctgaggcaggagaatcgcttaaacccaggaggaggaagtttcagtgagccaagattgggccactgcactcagcctgggcaacagagcaatactccatctcaaataaataaataaataaataaataaataaataaataaataaaactaaaaaggtaggccgggaacggtggctcacgtctgtgatcccagcactttgtgacgcccaggtgggaggatcacctgaggtcaggagtttgaaaccagcctggccatcatggcaaaaccccatctctactaaaaatacaaaaattggccgggtgcagcggtgggtgcctgtaatcccagctactcgggaggctgaggcaggagaatcacttgaacccgggaggcggaggtggcaatgaaccaagatcgtgccattgcactccagccttggcaacagagcgagactctctcaaaaactaaataaaaaaataaaaaggtataatgatcaagttaaaaagtttaaaccatacaatttataaagtaaaaaagtaaaagaaagaataagaaagacaaaaaacaaacagaagtaaaagattccccttcagcctttcctttccccgcctcaggtacatgcctgggtgattttttttctttttctttttttttttttgagatggagtctcgctctgttgcccaggctggagtgcagttgcccgatctcggctcactgcaacctccgcctcccgggttcaagcgattctcctgcctcggcctcccaactagctgggattaccagcatgcaccaacatgtccatctaattttttgcgtttttagtagagacagggtttcaccatgttggccaggctggtcttgaagcctgacctcaggtaatctgcccacttcagcctcccaaagtgctgggattacaggcttgagccactgcacccggccagatttttgtatttttattgtagagatgcagttttgccatgttgcccaggctggtctcaaactcatgagctcaagcaatctgcctgcctctgcctgcccacctctgccaccacactcagccaaaatttttaccttgcaaagtaaaattgggaaaattaagagatagcacattcccaagccagagtatttgggaaaaaaaaaaaaaaagacacatcacagtgtgacttttctctttccagaaagaatgggctttgtgattcttttaaagcagttttaaaagtttaaataatattggttttgaatatataaaactataaggaacaagaaaaaaaacatatgtatgtgtatatgtgtgtgtgtgtgtacatgtgtatgtactatcaccccaaaattaaattactgttaacatctc

SEQ ID NO: 271053 - DNA, 1365 bp, Artificial Sequence
  derived and/or modified sequence
gcctaagtcgccgcagaactgccacgtggggatgagatttgctgggctggtagcggcggctgctgcgggaggtcccgcccacgtgaagccagcctaactgagctctggactttggggacagctgtcagtggcctaggccgcaggacaccatgaagcaactgccagtcttggaacctggagacaagcccaggaaagcaacatggtacaccttgactgtccctggagacagcccctgtgctcgagttggccacagctgttcatatttacccccagttggtaatgccaagagagggaaggtcttcattgttgggggagcaaatccaaacagaagcttctcagacgtgcacaccatggatctgggaaaacaccagtgggacttagatacctgcaagggcctcttgccccggtatgaacatgctagcttcattccctcctgcacacctgaccgtatctgggtatttggaggtgccaaccaatcaggaaatcgaaattgtctacaagtcctgaatcctgcttttaaatcttggggattttggactgtcttggcaaatcctaagtatcatcttcattcttccttgatgtttaaaccaggacgtggaccacgccagaagtgaccagccccccaccatccccaagaacattccacacatcatcggcagccattggaaaccagctatatgtctttgggggcggagagagaggtgcccagcccgtgcaggacacgaagctgcatgtgtttgacgcaaacactctgacctggtcacagccagagacacttggaaatcctccatctccccggcatggtcatgtgatggtggcagcagggacaaagctcttcatccacggaggcttggcgggggacagattctatgatgacctccactgcattgatataagtgacatgaaatggcagaagctaaatcccactggggctgctccagcaggctgtgctgcccactcagctgtggccatgggaaaacatgtgtacatctttggtggaatgactcctgcaggagcactggacacaatgtaccagtatcacacagaagagcagcattggaccttgcttaaatttgatactcttctaccccctggacgattggaccattccatgtgtatcattccatggccagtgacgtgtgcttctgagaaagaagattccaactctctcactctgaaccatgaagctgagaaagaggattcagctgacaaagtaatgagccacagtggtgactcacatgaggaaagccagactgctacactgctctgtttggtgtttggtgggatgaatacagaaggggaaatctatgacgattgtattgtgactgtagtggactaataaaacccacatttttattacctgtc

SEQ ID NO: 271054 - DNA, 1466 bp, Artificial Sequence
  derived and/or modified sequence
ggagtcacggctcgcgactggcctaagtcgccgcagaactgccacgtggggatgagatttgctgggctggtagcggcggctgctgcgggaggtcccgcccacgtgaagccagcctaactgagctctggactttggggacagctgtcagtggcctaggccgcaggacaccatgaagcaactgccagtcttggaacctggagacaagcccaggaaagcaacatggtacaccttgactgtccctggagacagcccctgtgctcgagttggccacagctgttcatatttacccccagttggtaatgccaagagagggaaggtcttcattgttgggggagcaaatccaaacagaagcttctcagacgtgcacaccatggatctgggaaaacaccagtgggacttagatacctgcaagggcctcttgccccggtatgaacatgctagcttcattccctcctgcacacctgaccgtatctgggtatttggaggtgccaaccaatcaggaaatcgaaattgtctacaagtcctgaatcctgaaaccaggacgtggaccacgccagaagtgaccagccccccaccatccccaagaacattccacacatcatcggcagccattggaaaccagctatatgtctttgggggcggagagagaggtgcccagcccgtgcaggacacgaagctgcatgtgtttgacgcaaacactctgacctggtcacagccagagacacttggaaatcctccatctccccggcatggtcatgtgatggtggcagcagggacaaagctcttcatccacggaggcttggcgggggacagattctatgatgacctccactgcattgatataagtgacatgaaatggcagaagctaaatcccactggggctgctccagcaggctgtgctgcccactcagctgtggccatgggaaaacatgtgtacatctttggtggaatgactcctgcaggagcactggacacaatgtaccagtatcacacagaagagcagcattggaccttgcttaaatttgatactcttctaccccctggacgattggaccattccatgtgtatcattccatggccagtgacgtgtgcttctgagaaagaagattccaactctctcactctgaaccatgaagctgagaaagaggattcagctgacaaagtaatgagccacagtggtgactcacatgaggaaagccagactgctacactgctctgtttggtgtttggtgggatgaatacagaaggggaaatctatgacgattgtattgtgactgtagtggactaataaaacccacatttttattacctgtcagttactttcagaatagttaagtaaaacattagctgttttatacctccaaaatatcttctgcattatatatctgtttttctcctactttggtaggtgaagaaactaatgcaaataattcttatgtgcactaaaccttgctatattgcctctc

SEQ ID NO: 271055 - protein, 321 aa, Artificial Sequence
  derived and/or modified sequence
MKQLPVLEPGDKPRKATWYTLTVPGDSPCARVGHSCSYLPPVGNAKRGKVFIVGGANPNRSFSDVHTMDLETRTWTTPEVTSPPPSPRTFHTSSAAIGNQLYVFGGGERGAQPVQDTKLHVFDANTLTWSQPETLGNPPSPRHGHVMVAAGTKLFIHGGLAGDRFYDDLHCIDISDMKWQKLNPTGAAPAGCAAHSAVAMGKHVYIFGGMTPAGALDTMYQYHTEEQHWTLLKFDTLLPPGRLDHSMCIIPWPVTCASEKEDSNSLTLNHEAEKEDSADKVMSHSGDSHEESQTATLLCLVFGGMNTEGEIYDDCIVTVVD

SEQ ID NO: 271056 - DNA, 1313 bp, Artificial Sequence
  derived and/or modified sequence
ggagtcacggctcgcgactggcctaagtcgccgcagaactgccacgtggggatgagatttgctgggctggtagcggcggctgctgcgggaggtcccgcccacgtgaagccagcctaactgagctctggactttggggacagctgtcagtggcctaggccgcaggacaccatgaagcaactgccagtcttggaacctggagacaagcccaggaaagcaacatggtacaccttgactgtccctggagacagcccctgtgctcgagttggccacagctgttcatatttacccccagttggtaatgccaagagagggaaggtcttcattgttgggggagcaaatccaaacagaagcttctcagacgtgcacaccatggatctggaaaccaggacgtggaccacgccagaagtgaccagccccccaccatccccaagaacattccacacatcatcggcagccattggaaaccagctatatgtctttgggggcggagagagaggtgcccagcccgtgcaggacacgaagctgcatgtgtttgacgcaaacactctgacctggtcacagccagagacacttggaaatcctccatctccccggcatggtcatgtgatggtggcagcagggacaaagctcttcatccacggaggcttggcgggggacagattctatgatgacctccactgcattgatataagtgacatgaaatggcagaagctaaatcccactggggctgctccagcaggctgtgctgcccactcagctgtggccatgggaaaacatgtgtacatctttggtggaatgactcctgcaggagcactggacacaatgtaccagtatcacacagaagagcagcattggaccttgcttaaatttgatactcttctaccccctggacgattggaccattccatgtgtatcattccatggccagtgacgtgtgcttctgagaaagaagattccaactctctcactctgaaccatgaagctgagaaagaggattcagctgacaaagtaatgagccacagtggtgactcacatgaggaaagccagactgctacactgctctgtttggtgtttggtgggatgaatacagaaggggaaatctatgacgattgtattgtgactgtagtggactaataaaacccacatttttattacctgtcagttactttcagaatagttaagtaaaacattagctgttttatacctccaaaatatcttctgcattatatatctgtttttctcctactttggtaggtgaagaaactaatgcaaataattcttatgtgcactaaaccttgctatattgcctctc

SEQ ID NO: 271057 - protein, 154 aa, Artificial Sequence
  derived and/or modified sequence
MKQLPVLEPGDKPRKATWYTLTVPGDSPCARVGHSCSYLPPVGNAKRGKVFIVGGANPNRSFSDVHTMDLGKHQWDLDTCKGLLPRYEHASFIPSCTPDRIWVFGGANQSGNRNCLQVLNPAFKSWGFWTVLANPKYHLHSSLMFKPGRGPRQK

SEQ ID NO: 271058 - DNA, 465 bp, Artificial Sequence
  derived and/or modified sequence
atgaagcagctgcccgtgctggagcccggcgacaagcccagaaaggccacctggtacaccctgaccgtgcccggcgacagcccctgcgccagagtgggccacagctgcagctacctgccccccgtgggcaacgccaagagaggcaaggtgttcatcgtgggcggcgccaaccccaacagaagcttcagcgacgtgcacaccatggacctgggcaagcaccagtgggacctggacacctgcaagggcctgctgcccagatacgagcacgccagcttcatccccagctgcacccccgacagaatctgggtgttcggcggcgccaaccagagcggcaacagaaactgcctgcaggtgctgaaccccgccttcaagagctggggcttctggaccgtgctggccaaccccaagtaccacctgcacagcagcctgatgttcaagcccggcagaggccccagacagaagtag

SEQ ID NO: 271059 - DNA, 465 bp, Artificial Sequence
  derived and/or modified sequence
atgaagcagctgcctgtgctggagcctggcgacaagcctcggaaagcaacatggtacaccttaacagtgcccggggacagcccatgcgcccgcgttggccattcgtgtagttacctgcccccagtggggaacgccaaacggggcaaagtctttattgtgggaggggcgaacccgaacagatcgttcagtgacgtgcacaccatggatctgggaaagcaccagtgggatctcgacacgtgcaaaggcttgctgcctcgttatgaacatgcgtccttcatcccctcctgtacaccagaccggatctgggttttcggcggagctaatcagtccggaaatcgtaactgtctccaagttttgaatcctgcttttaagagttggggcttctggaccgtgttagccaatccgaagtatcacctgcacagctcactcatgtttaagccaggccgagggccacgacaaaagtag

SEQ ID NO: 271060 - DNA, 465 bp, Artificial Sequence
  derived and/or modified sequence
atgaagcaactgcccgtgctggagcccggcgataagcctcgtaaagccacatggtacacgttaaccgtgcccggggatagtccatgtgccagagtgggccattcttgctcttatctgccgcccgtgggtaatgctaaacgcgggaaggtgttcatcgtgggcggcgcaaatcctaatcggtctttctctgacgtgcacactatggatctcgggaaacaccagtgggacctggacacctgcaaggggttgctgccccgatatgaacacgcatccttcattccctcatgtacacctgacaggatctgggtttttggcggggctaaccagtcaggcaaccgcaattgcctgcaagttctgaacccagcgttcaagagttggggcttctggaccgtgttggcaaacccgaagtatcatctgcattcctccctgatgttcaaacccgggcgagggcctcggcaaaagtag

SEQ ID NO: 271061 - DNA, 465 bp, Artificial Sequence
  derived and/or modified sequence
atgaagcagctgcctgtgctggagcccggggacaagcccaggaaggccacctggtacaccctgactgtgcctggggacagcccctgtgcccgggtgggccacagctgcagctacctgccccctgtgggcaatgccaagaggggcaaggtgttcatcgtgggcggggccaaccccaacagaagcttcagtgatgtgcacaccatggacctgggcaagcaccagtgggacctggacacctgcaagggcctgctgcccaggtatgaacatgccagcttcatccccagctgcaccccagaccgcatctgggtgtttggaggagccaaccagagcggcaacagaaactgcctgcaggtgctgaacccagccttcaagtcctggggcttctggacagtgctggccaaccccaagtaccacctgcacagcagcctgatgttcaagccaggccggggcccccggcagaagtag

SEQ ID NO: 271062 - DNA, 465 bp, Artificial Sequence
  derived and/or modified sequence
atgaagcagctgcccgtgctggagcccggcgacaagccccggaaggccacttggtacacattgaccgttccgggtgactccccttgcgcccgggtggggcactcttgttcttacctccctcccgttgggaatgcaaaacggggtaaggtattcatagtgggaggcgccaaccctaatcgaagcttcagcgatgtccacacaatggacttagggaagcaccagtgggacttggacacctgtaaaggcctcctcccgcgatatgaacacgcatctttcatcccttcctgtacccccgacagaatctgggtgttcggcggagcgaaccagtccggtaatcgcaactgcctgcaagtactgaatccggcgtttaaatcttggggtttctggaccgtactcgctaaccctaaataccatctacatagcagtctgatgtttaaacccggccgcgggccaagacagaagtag

SEQ ID NO: 271063 - DNA, 465 bp, Artificial Sequence
  derived and/or modified sequence
atgaagcagctgcccgtgctggagcccggcgacaagccccggaaggcaacatggtacacgcttacggttccaggagattcgccatgtgctagggtcggtcatagctgcagttatttaccgcccgtcggcaatgccaagcggggcaaggtgttcatcgttggcggggcgaacccaaatcgctctttctcagatgttcatactatggacctcgggaagcatcaatgggatctggatacctgcaaaggcctgttaccccgctacgagcacgctagtttcatcccaagttgcacccccgaccgcatctgggtgttcggaggtgccaatcagagtggcaacagaaattgcctgcaagtactaaatcccgcctttaagagctggggattctggactgtgctcgccaaccctaaataccacctgcacagttcactgatgttcaagccaggtcggggccctcgccaaaaatag

SEQ ID NO: 271064 - DNA, 465 bp, Artificial Sequence
  derived and/or modified sequence
atgaagcagctccccgttcttgaaccaggcgataagccacggaaggcaacgtggtatactctgaccgtacctggcgattctccctgcgcacgggtcggacactcatgcagctacctgccccctgtcggcaacgccaaacgcggaaaagtgtttatagttggaggggcaaatcccaatcgatcattctctgatgtgcatactatggacctcggcaagcatcaatgggacctcgacacttgcaagggactgctgccgcgttatgagcacgcaagcttcatccctagctgtacaccagaccggatctgggttttcggcggagctaatcagtccggtaatcggaattgccttcaggtgctgaatccggcattcaaatcctggggtttctggaccgtgctggctaaccctaagtatcatctgcactcctccctcatgtttaagcccggacggggaccgaggcaaaagtag

SEQ ID NO: 271065 - DNA, 465 bp, Artificial Sequence
  derived and/or modified sequence
atgaagcaattgccagtgcttgagcccggtgacaaaccaaggaaagccacttggtacacgctcaccgtgcctggcgattccccatgtgcacgggttggccacagctgttcctatctgccacctgtgggcaatgcaaaacgcggtaaagtgtttatagtgggaggcgcaaacccaaatcgctcattctcagatgtccacacgatggacctgggaaaacatcagtgggatttggatacatgcaaaggcctgcttccacggtacgaacatgcctcatttatcccttcctgtactcctgaccgcatctgggtattcggcggtgccaatcagagtggaaacaggaattgcctccaggtgctcaatcctgccttcaaatcttggggcttctggactgtccttgctaatcccaaataccacctccactcctctctgatgtttaaacccggacgcggaccgaggcagaagtag

SEQ ID NO: 271066 - protein, 862 aa, Artificial Sequence
  derived and/or modified sequence
MRMCTPIRGLLMALAVMFGTAMAFAPIPRITWEHREVHLVQFHEPDIYNYSALLLSEDKDTLYIGAREAVFAVNALNISEKQHEVYWKVSEDKKAKCAEKGKSKQTECLNYIRVLQPLSATSLYVCGTNAFQPACDHLNLTSFKFLGKNEDGKGRCPFDPAHSYTSVMVDGELYSGTSYNFLGSEPIISRNSSHSPLRTEYAIPWLNEPSFVFADVIRKSPDSPDGEDDRVYFFFTEVSVEYEFVFRVLIPRIARVCKGDQGGLRTLQKKWTSFLKARLICSRPDSGLVFNVLRDVFVLRSPGLKVPVFYALFTPQLNNVGLSAVCAYNLSTAEEVFSHGKYMQSTTVEQSHTKWVRYNGPVPKPRPGACIDSEARAANYTSSLNLPDKTLQFVKDHPLMDDSVTPIDNRPRLIKKDVNYTQIVVDRTQALDGTVYDVMFVSTDRGALHKAISLEHAVHIIEETQLFQDFEPVQTLLLSSKKGNRFVYAGSNSGVVQAPLAFCGKHGTCEDCVLARDPYCAWSPPTATCVALHQTESPSRGLIQEMSGDASVCPDKSKGSYRQHFFKHGGTAELKCSQKSNLARVFWKFQNGVLKAESPKYGLMGRKNLLIFNLSEGDSGVYQCLSEERVKNKTVFQVVAKHVLEVKVVPKPVVAPTLSVVQTEGSRIATKVLVASTQGSSPPTPAVQATSSGAITLPPKPAPTGTSCEPKIVINTVPQLHSEKTMYLKSSDNRLLMSLFLFFFVLFLCLFFYNCYKGYLPRQCLKFRSALLIGKKKPKSDFCDREQSLKETLVEPGSFSQQNGEHPKPALDTGYETEQDTITSKVPTDREDSQRIDDLSARDKPFDVKCELKFADSDADGD

SEQ ID NO: 271067 - protein, 59 aa, Artificial Sequence
  derived and/or modified sequence
MRMCTPIRGLLMALAVMFGTAMAFAPIPRITWEHREVHLVQFHEPDIYNYSALLLSEDK

SEQ ID NO: 271068 - protein, 146 aa, Artificial Sequence
  derived and/or modified sequence
MRMCTPIRGLLMALAVMFGTAMAFAPIPRITWEHREVHLVQFHEPDIYNYSALLLSEDKDTLYIGAREAVFAVNALNISEKQHEVYWKVSEDKKAKCAEKGKSKQTECLNYIRVLQPLSATSLYVCGTNAFQPACDHLNLTSFKFL

SEQ ID NO: 271069 - protein, 76 aa, Artificial Sequence
  derived and/or modified sequence
MRMCTPIRGLLMALAVMFGTAMAFAPIPRITWEHREVHLVQFHEPDIYNYSALLLSEDKDTLYIGAREAVFAVNAL

SEQ ID NO: 271070 - protein, 66 aa, Artificial Sequence
  derived and/or modified sequence
MRMCTPIRGLLMALAVMFGTAMAFAPIPRITWEHREVHLVQFHEPDIYNYSALLLSEDKDTLYIGA

SEQ ID NO: 271071 - DNA, 2589 bp, Artificial Sequence
  derived and/or modified sequence
atgagaatgtgcacccccatcagaggcctgctgatggccctggccgtgatgttcggcaccgccatggccttcgcccccatccccagaatcacctgggagcacagagaggtgcacctggtgcagttccacgagcccgacatctacaactacagcgccctgctgctgagcgaggacaaggacaccctgtacatcggcgccagagaggccgtgttcgccgtgaacgccctgaacatcagcgagaagcagcacgaggtgtactggaaggtgagcgaggacaagaaggccaagtgcgccgagaagggcaagagcaagcagaccgagtgcctgaactacatcagagtgctgcagcccctgagcgccaccagcctgtacgtgtgcggcaccaacgccttccagcccgcctgcgaccacctgaacctgaccagcttcaagttcctgggcaagaacgaggacggcaagggcagatgccccttcgaccccgcccacagctacaccagcgtgatggtggacggcgagctgtacagcggcaccagctacaacttcctgggcagcgagcccatcatcagcagaaacagcagccacagccccctgagaaccgagtacgccatcccctggctgaacgagcccagcttcgtgttcgccgacgtgatcagaaagagccccgacagccccgacggcgaggacgacagagtgtacttcttcttcaccgaggtgagcgtggagtacgagttcgtgttcagagtgctgatccccagaatcgccagagtgtgcaagggcgaccagggcggcctgagaaccctgcagaagaagtggaccagcttcctgaaggccagactgatctgcagcagacccgacagcggcctggtgttcaacgtgctgagagacgtgttcgtgctgagaagccccggcctgaaggtgcccgtgttctacgccctgttcaccccccagctgaacaacgtgggcctgagcgccgtgtgcgcctacaacctgagcaccgccgaggaggtgttcagccacggcaagtacatgcagagcaccaccgtggagcagagccacaccaagtgggtgagatacaacggccccgtgcccaagcccagacccggcgcctgcatcgacagcgaggccagagccgccaactacaccagcagcctgaacctgcccgacaagaccctgcagttcgtgaaggaccaccccctgatggacgacagcgtgacccccatcgacaacagacccagactgatcaagaaggacgtgaactacacccagatcgtggtggacagaacccaggccctggacggcaccgtgtacgacgtgatgttcgtgagcaccgacagaggcgccctgcacaaggccatcagcctggagcacgccgtgcacatcatcgaggagacccagctgttccaggacttcgagcccgtgcagaccctgctgctgagcagcaagaagggcaacagattcgtgtacgccggcagcaacagcggcgtggtgcaggcccccctggccttctgcggcaagcacggcacctgcgaggactgcgtgctggccagagacccctactgcgcctggagcccccccaccgccacctgcgtggccctgcaccagaccgagagccccagcagaggcctgatccaggagatgagcggcgacgccagcgtgtgccccgacaagagcaagggcagctacagacagcacttcttcaagcacggcggcaccgccgagctgaagtgcagccagaagagcaacctggccagagtgttctggaagttccagaacggcgtgctgaaggccgagagccccaagtacggcctgatgggcagaaagaacctgctgatcttcaacctgagcgagggcgacagcggcgtgtaccagtgcctgagcgaggagagagtgaagaacaagaccgtgttccaggtggtggccaagcacgtgctggaggtgaaggtggtgcccaagcccgtggtggcccccaccctgagcgtggtgcagaccgagggcagcagaatcgccaccaaggtgctggtggccagcacccagggcagcagcccccccacccccgccgtgcaggccaccagcagcggcgccatcaccctgccccccaagcccgcccccaccggcaccagctgcgagcccaagatcgtgatcaacaccgtgccccagctgcacagcgagaagaccatgtacctgaagagcagcgacaacagactgctgatgagcctgttcctgttcttcttcgtgctgttcctgtgcctgttcttctacaactgctacaagggctacctgcccagacagtgcctgaagttcagaagcgccctgctgatcggcaagaagaagcccaagagcgacttctgcgacagagagcagagcctgaaggagaccctggtggagcccggcagcttcagccagcagaacggcgagcaccccaagcccgccctggacaccggctacgagaccgagcaggacaccatcaccagcaaggtgcccaccgacagagaggacagccagagaatcgacgacctgagcgccagagacaagcccttcgacgtgaagtgcgagctgaagttcgccgacagcgacgccgacggcgactag

SEQ ID NO: 271072 - DNA, 2589 bp, Artificial Sequence
  derived and/or modified sequence
atgcggatgtgcacgccaatccgcggactcctcatggcactcgctgtgatgttcggcaccgccatggcctttgccccgatcccgcggatcacctgggagcaccgtgaagtgcacctggttcagttccatgaacctgatatttataattatagcgcgctactgctaagcgaggacaaggacaccctgtacatcggcgcacgggaagccgtctttgccgtgaacgctctgaacatcagtgagaaacagcatgaggtgtattggaaagttagtgaggataagaaggctaagtgtgctgaaaaggggaagagcaagcaaaccgagtgccttaattatatccgcgtcctgcagcctttaagcgctacctctctgtacgtgtgcgggacaaacgctttccaacctgcctgcgaccatcttaaccttacctcctttaagtttctgggtaagaatgaagatggtaagggacgatgcccatttgaccccgcccactcttacactagtgttatggtggacggcgagctgtactctggcacgagttataattttcttggtagtgaacccatcatttccaggaactcaagtcactcccctcttcgaactgaatacgcaataccttggctcaacgaaccaagcttcgttttcgccgacgtaatcaggaagtcccccgactcgcctgacggcgaagatgaccgcgtatactttttcttcacagaggttagtgtcgaatatgagttcgtgtttcgcgtgctgatcccaaggatcgcacgggtttgtaaaggggaccagggcgggttgagaaccttgcagaagaaatggacatcattcctaaaggccagactcatttgtagtcggccggattctgggttagtgttcaatgttttaagagacgtgttcgttttgaggtcccccggtttgaaggtgccagtcttttacgccctatttacaccccagctgaataatgtaggattgtctgccgtgtgtgcatacaacttgtctaccgcggaggaagtcttctcccatgggaagtatatgcaaagcactactgttgagcagtcgcacaccaaatgggtccggtataatggacctgtgccaaagcctcggcccggcgcatgtatagacagtgaagctagggctgctaattacacgagctctttgaacctaccagataagactttacagttcgtcaaggatcaccccttaatggatgacagcgtaacgcccatcgataaccgtccccggctgatcaagaaggatgtgaactatactcaaatagtggtcgaccgcacccaagccttggatgggaccgtatatgatgtaatgtttgtaagcaccgacagaggagctctgcacaaggccatctcactggaacacgctgtgcatatcattgaagaaacgcagttatttcaggattttgaacccgtccagacactactccttagcagtaagaagggtaaccgattcgtttacgctggctcgaactctggcgtggtccaggctcctctcgctttctgcggaaagcacggaacttgtgaggattgtgtcttagcacgggacccttactgcgcttggtctccaccaactgctacgtgcgtggccctccatcagactgaatcaccgtcacgcggcctgattcaggagatgtcaggcgacgcgtcggtatgccccgacaagtctaagggctcctataggcagcactttttcaaacatggcggaaccgcagagctcaaatgcagccagaaatcaaatctcgccagggtgttctggaagttccagaacggagtgctcaaagcagagtcaccaaagtacggcctcatgggccgaaaaaatctactcatctttaacctgagtgaaggggattctggggtatatcaatgcctgagcgaggaaagggtaaagaataagacagtgttccaagtcgtggcaaagcatgtgttggaggtgaaggtggtccccaagcctgttgtggctccaacgctcagcgtggttcagactgaggggtctcgaattgcgacaaaggtgctggttgcgtctacacaagggtccagtcctcccactcccgcagtgcaagctacaagtagcggcgccatcaccctgccccccaagcctgcaccaactggcacatcctgcgaaccaaagatcgtcatcaatacagtgccccagcttcatagcgaaaagacaatgtaccttaagtcatctgacaatagactgttgatgtccctgtttctgtttttttttgttctgtttctctgcttgtttttctataattgttataaaggatacctgccaaggcagtgcctgaaattccgctcagctctgcttattggcaagaaaaagccgaagtctgatttttgcgacagggaacagagtctgaaagagaccctggtggaacccggttcatttagtcagcagaatggtgaacacccgaagcctgccttagataccggttacgagactgagcaagatacaatcacctctaaggtgccaaccgaccgagaggatagccagagaattgatgatctgtcagcccgggataagcccttcgatgtcaaatgtgagctgaaatttgccgatagtgatgcagacggtgattag

SEQ ID NO: 271073 - DNA, 2589 bp, Artificial Sequence
  derived and/or modified sequence
atgagaatgtgcacccccatccgcgggctgctgatggcactggcagtgatgtttggcacagcaatggctttcgcccctatccctagaattacgtgggagcatagagaggtacacctcgtccagtttcatgaacctgacatatataattactctgcgctcctcctgagcgaggataaagacaccctgtacataggagccagggaggccgtgtttgctgtgaatgccttaaatattagtgaaaagcaacacgaagtatattggaaagttagtgaggacaaaaaggctaagtgcgcagaaaaaggtaagtcaaaacagaccgagtgcctgaattacattagggtgctccagcctctgtccgccacatccctgtatgtttgcggtactaacgcgtttcagcccgcctgtgaccatctgaatcttacttcctttaaattcttgggtaaaaatgaagacggtaaggggaggtgcccgttcgaccccgcccactcatacacctctgtgatggtggacggcgaactctatagcggtacatcatataactttctgggaagcgagcccatcatatcgcgcaacagtagccactcgcctttgagaaccgagtacgccatcccctggttgaatgagccaagttttgtgttcgctgatgtcatcaggaaatcgcccgattcgcctgatggagaagacgacagagtatattttttcttcacagaggtcagcgtcgaatacgagttcgtcttcagagtcctcattccaaggatcgcccgagtgtgcaagggggaccagggcggcctgcgcaccctacagaaaaagtggacttcattcttaaaagcgcgcctgatttgctctcggccagacagcggcctggtgtttaatgtgcttcgggatgtttttgtgctgcgtagccccggactgaaggtccctgtgttctatgcactctttactccacagctaaacaatgtcggtctttcggccgtctgtgcctataatctcagcacagccgaagaagtcttctcccacggaaagtacatgcaatccaccacagtggaacagtcccacactaagtgggttcgatataatggacctgtccccaagccccgtccaggcgcctgcatcgatagtgaagcaagagccgccaattacactagctctctcaatctccccgataaaaccttgcagtttgttaaagaccaccccttgatggacgatagtgtgactcccatagataaccgccctaggctcatcaaaaaggacgtgaattatacacagattgtggtagatcgaacccaggccctcgatgggaccgtgtatgacgtgatgttcgtttctaccgaccgcggcgcactgcacaaagccatcagcctggagcatgccgttcacatcattgaggaaacacaattattccaggactttgaaccagtccagacgcttcttctatcatcgaaaaaagggaaccgttttgtgtatgccggaagcaacagtggtgtagtacaggccccattggcattttgtggaaagcacggcacatgcgaagattgcgttctggctcgggacccatattgtgcttggagccctcctactgccacctgcgttgctcttcaccagaccgagagtcccagtcgtggactcatccaagaaatgtcaggagatgcctcagtgtgcccggacaagtccaagggatcttaccgacagcacttcttcaagcatggtggtacagctgagctgaaatgttctcagaaatccaatcttgcccgggttttttggaaatttcagaatggcgtactcaaggctgaaagtcccaagtacgggttgatgggaagaaaaaacttgctaatttttaatctcagtgaaggagactctggtgtttaccaatgcctgagtgaagaaagagtgaagaacaagaccgtgttccaagtcgtcgcgaagcatgtcctggaagtcaaagtggtgcctaaacccgtggtggcccctaccctgtccgtggtccagacagaaggttctagaatcgccaccaaagtgcttgtcgctagcactcagggatcgagccctcctacgcccgctgtgcaagcaacaagttcgggagccattaccttgcccccgaagccagcccccacagggaccagctgcgaaccaaagatcgtcatcaacacggtgccacagctgcactctgaaaaaactatgtatctcaagtcttccgacaacaggctgcttatgagcttatttctgttcttcttcgtattgtttttgtgtctgttcttttacaattgttataaaggatatctccccaggcagtgtctcaagttcaggtccgctctgctgattggcaagaagaaaccaaaatctgatttctgcgatcgggaacagagtctgaaggagacattggtggagccgggcagcttctctcaacagaatggagagcatcctaagccggccttggacactggctacgaaacagagcaggacactatcacgagtaaagtccccacggatagggaggatagtcagcgaatcgacgacttatccgctcgagacaaacccttcgatgtaaagtgtgaactcaagttcgctgatagcgatgcagacggggactag

SEQ ID NO: 271074 - DNA, 2589 bp, Artificial Sequence
  derived and/or modified sequence
atgcggatgtgcacgcctattcgaggcctgctgatggccctggccgtgatgtttggaactgctatggccttcgcccccataccacgcataacttgggagcaccgggaggttcatctggtgcagtttcatgaacccgatatttataattatagtgccctgctcctgtctgaggacaaggatacactctacatcggcgcccgcgaggccgtctttgccgttaatgcccttaatatatccgagaaacagcacgaggtctattggaaggtttcagaggacaagaaagcaaaatgcgctgaaaaaggtaagagcaaacagacagagtgtctcaactacatccgtgtgctgcaaccattgtctgccacctccctttacgtgtgtggtaccaatgcatttcagcctgcctgcgaccacttgaacctgacttctttcaagtttttagggaagaatgaggacggcaaggggagatgtccctttgacccggcacactcctacacatcagtgatggttgacggagagctgtattcggggacttcatacaactttttgggaagcgaacctatcattagtaggaacagcagtcacagccctctgcggaccgaatacgccatcccttggttgaatgaaccttcctttgtcttcgctgacgtaattaggaagagcccagacagccccgatggcgaggacgatcgggtctacttcttttttaccgaagtgagtgtggagtatgagtttgtgtttagagtgctgattccccgaatcgcaagagtctgcaagggcgatcagggagggctcaggaccctgcagaaaaaatggaccagtttcctcaaagcccgtctgatatgtagccgccctgactcagggctggtgttcaatgtgttacgcgatgttttcgtgctgcggtcaccgggtctgaaagtccctgtattctacgcactgttcaccccacagctgaacaacgtgggcttgtccgccgtgtgcgcatataatctgagcacagcagaggaagttttctcgcatggaaagtacatgcaaagcaccacagtagaacagagccatacaaagtgggtacggtacaacggcccagtccccaaacctcgcccaggggcgtgcatcgattccgaggcccgcgcggcaaactacacctccagcctgaatctacctgacaaaaccctccaatttgtgaaagaccaccctctgatggatgactcagtgactccaatcgacaaccgcccacgactgatcaagaaggatgtgaactatactcagatcgtggtcgaccgcacacaagccctcgatggcacagtgtatgatgtgatgttcgtttctacagacagaggggccctgcataaggcgatttctctggaacacgccgttcacatcatcgaagaaacacagttattccaagatttcgagccggtgcagactttgcttctcagctcaaaaaaaggtaatcgattcgtttacgcgggctcgaattcgggagtcgtccaggcccctcttgccttttgtgggaaacacgggacctgtgaggactgcgtgctagctagggacccatattgtgcatggtccccccccactgcaacttgcgtcgccttgcatcagacggagagccctagcagaggtctgatccaggaaatgtcaggggacgctagcgtgtgccctgataagagtaaaggaagctataggcaacacttctttaaacacgggggcacagctgaactcaaatgcagccagaagagtaatcttgcccgggtgttctggaagttccagaatggcgtcctaaaggctgaatcccccaaatatgggctaatgggaaggaaaaacctgctcatttttaacctgtccgaaggagattctggagtttatcagtgtctatccgaggaaagagtgaaaaacaaaacagtgttccaggtggtggcaaaacacgtgttagaggttaaggtggttcccaagccggtggtcgctcccactctgagcgtggtacagacagagggctcgcgtatcgccactaaggttctggtggcttccacccagggcagttccccgccgacaccagcagtgcaagccacaagctcaggagccatcacgctgccacctaagcccgcacccactggaacttcttgtgaaccaaaaatcgtgatcaatacagtccctcagttacactcagagaaaacaatgtatctcaagtcaagtgacaatcgacttctgatgtcactcttcctgtttttcttcgtcttgttcctctgtctgttcttttacaactgttataagggctacctcccccgccaatgtctcaaatttagatccgccttattaatcgggaagaaaaaaccaaaatcagacttctgcgatcgcgaacagtctctgaaggaaacacttgtggagccggggtccttttcgcagcagaacggggagcaccccaaacccgcgcttgacaccgggtacgagactgagcaggatacgatcacaagtaaagtcccaaccgaccgtgaagacagccaaaggatcgacgatctgagtgcaagggataaaccttttgatgttaaatgtgagttgaaattcgccgattccgatgctgatggagactag

SEQ ID NO: 271075 - DNA, 2589 bp, Artificial Sequence
  derived and/or modified sequence
atgaggatgtgcacccccatcagaggactgctcatggctcttgctgtgatgttcggaactgccatggctttcgcgcccatcccccgcatcacatgggaacaccgggaagttcatcttgttcagtttcatgagccagatatttataactactctgctctcttgctaagcgaagacaaggacactctgtacattggcgccagggaggccgtgttcgccgttaacgccctgaatatctcggagaaacagcatgaggtttactggaaggtgagcgaggacaagaaagctaagtgcgcggaaaagggtaagagcaagcagacagaatgccttaactatatccgtgttctgcagcctctgagcgccacttccttgtacgtttgcggcaccaatgcttttcagccggcttgcgatcatctgaatctcacatcttttaagtttttggggaaaaacgaggacggtaagggtcggtgccccttcgatcctgcccatagctatactagcgttatggtcgatggcgaactgtattctggcacttcatacaatttcctgggtagtgagcctatcatttctcgcaattctagccacagccccctacgaaccgagtacgctatcccttggcttaatgagcctagctttgtgtttgccgatgttattagaaaaagtcctgatagccccgacggtgaagacgacagagtttatttttttttcaccgaggtgtccgtcgaatatgaattcgtgttccgagtgcttatcccaagaatcgcacgggtgtgtaagggcgaccaaggaggcctgcggactctccaaaagaaatggaccagttttctcaaggccagactcatctgctcacggcccgattccggactggtgttcaatgtgctgcgggacgtgtttgtcttgcggtcaccaggtctcaaagtgcccgtgttttacgcccttttcacgccccaattgaacaatgtcggcctctctgcagtgtgcgcctataacctgtctacagcagaggaggtgttctctcacgggaaatacatgcagagcactacagtggaacagagccataccaagtgggtccggtataatgggcctgtcccaaaacctagacccggggcctgtattgattcggaggcacgtgccgcaaactacaccagtagccttaatctccccgataagactcttcagtttgtaaaagaccacccactgatggacgattcggtcacgcccatcgacaatcgccctcggcttattaagaaggacgtgaactacactcagatagttgttgaccgcactcaggccctggatggtaccgtctatgatgtcatgttcgtgagcactgatcggggggcgctgcacaaggcgatctctctggagcatgcggtgcacataattgaggagacacagctgttccaggacttcgaacccgtccagacccttctgctctctagtaagaagggaaacagattcgtctacgccggctccaactctggagttgtgcaggccccccttgcgttttgtggcaagcacggaacatgtgaggattgcgtcttggcccgcgacccctattgtgcttggtcccccccaaccgcaacctgtgttgcactgcatcagaccgagtccccctctcgcggcctcatccaagaaatgtccggcgatgctagcgtctgccctgacaagtccaaaggctcctacagacagcacttttttaaacacggaggcacggctgaattgaagtgttctcagaaatcaaatctggcgcgcgttttttggaaatttcagaatggggtgttaaaagctgagtcccctaaatacggtttgatggggaggaaaaatctgctgatattcaaccttagtgaaggcgattcaggcgtttaccagtgcctttccgaggagagggtaaagaacaagaccgtgtttcaggttgttgcaaagcacgtgctagaggtaaaagtcgtcccaaagcctgtcgtagctcctacccttagcgtggtacagactgagggtagccgtatcgccacaaaagtcctggtcgcctcgactcaggggagtagccctcctacacccgccgtgcaggctacttcctcgggcgccatcacactgccccctaagccagccccgactggaacatcctgcgaacccaaaattgtcatcaacaccgtgcctcaactgcacagcgaaaagaccatgtatctcaaaagttccgacaaccggctgctaatgagtctattcctcttttttttcgtgctatttctgtgcctgtttttttacaactgctacaaaggttatttgccccgtcagtgtctcaaattccgctccgctctactgataggaaagaagaaaccaaaatcagacttctgcgatcgcgagcagagcctcaaagaaacgctcgtggagccgggctcctttagtcaacagaatggggaacaccctaaacccgcgctcgatacgggctatgaaacggaacaagatacaattaccagtaaggttcccactgaccgcgaggactcccagcggattgatgatctaagtgctagagataagcccttcgatgtaaaatgtgagctgaagtttgccgatagcgatgccgatggcgattag

SEQ ID NO: 271076 - DNA, 2589 bp, Artificial Sequence
  derived and/or modified sequence
atgaggatgtgcacccccatccggggcctgctgatggccctggccgtgatgtttggaacagccatggcctttgcccccatcccccgcatcacctgggagcaccgggaggtgcacctggtgcagttccacgagccagacatctacaactacagcgccctgctgctgtctgaggacaaggacaccctgtacatcggggcccgggaggccgtgtttgctgtgaatgccctgaacatcagcgagaagcagcacgaggtgtactggaaggtgtctgaggacaagaaggccaagtgtgccgagaagggcaagagcaagcagacagaatgtctgaactacatccgggtgctgcagcccctgagcgccaccagcctgtatgtgtgtggcaccaatgccttccagcctgcctgtgaccacctgaacctgaccagcttcaagttcctgggcaagaatgaagatggcaagggccgctgcccctttgatcctgcccacagctacacctctgtgatggtggatggagagctgtacagcggcaccagctacaacttcctgggcagcgagcccatcatcagcaggaacagcagccacagccccctgaggacagaatatgccatcccctggctgaatgagcccagctttgtgtttgctgatgtgatcaggaagagcccagacagcccagatggagaagatgacagagtgtacttcttcttcacagaggtgtctgtggagtatgaatttgtgttccgggtgctgatccccagaattgcccgggtgtgcaagggggaccagggcggcctgcggaccctgcagaagaagtggaccagcttcctgaaggcccggctcatctgcagcaggccagacagcggcctggtgttcaacgtgctgagagatgtgtttgtgctgcggagccctggcctgaaggtgcctgtgttctacgccctcttcaccccccagctgaacaacgtgggcctgtctgctgtgtgtgcctacaacctgagcacagctgaggaggtgttcagccacggcaagtacatgcagagcaccaccgtggagcagagccacaccaagtgggtgcgctacaatggacctgtgcccaagcccaggcctggggcctgcattgattctgaggcccgggccgccaactacaccagcagcctgaacctgcctgacaagaccctgcagtttgtgaaggaccaccccctgatggatgattctgtgacccccatcgacaaccggcccaggctcatcaagaaggatgtgaactacacccagatcgtggtggacaggacccaggccctggatggcaccgtgtatgatgtgatgtttgtgtccacagacagaggagccctgcacaaggccatcagcctggagcacgctgtgcacatcatcgaggagacccagctgttccaggactttgagcctgtgcagaccctgctgctgagcagcaagaagggcaacagatttgtgtatgccggcagcaacagcggcgtggtgcaggcccccctggccttctgtgggaagcacggcacctgtgaggactgtgtgctggcccgggacccctactgtgcctggagccccccaacagccacctgtgtggccctgcaccagacagagagccccagccggggcctcatccaggagatgtctggagatgcctctgtgtgcccagacaagagcaagggcagctaccggcagcacttcttcaagcacggcggcacagctgagctgaagtgcagccagaagagcaacctggcccgggtcttctggaagttccagaatggagtgctgaaggccgagagccccaagtatggcctgatgggcaggaagaacctgctgatcttcaacctgtctgagggggacagcggcgtgtaccagtgcctgtctgaggagcgggtgaagaacaagacagtgttccaggtggtggccaagcacgtgctggaggtgaaggtggtgcccaagcctgtggtggcccccaccctgtctgtggtgcagacagagggcagccgcatcgccaccaaggtgctggtggccagcacccagggcagcagcccccccaccccagctgtgcaggccaccagcagcggggccatcaccctgccccccaagccagcccccaccggcaccagctgtgagcccaagatcgtcatcaacacagtgccccagctgcacagcgagaagaccatgtacctgaagagcagtgacaaccggctgctgatgagcctcttcctgttcttctttgtgctcttcctgtgcctcttcttctacaactgctacaagggctacctgccccggcagtgcctgaagttccgcagcgccctgctgattggcaagaagaagcccaagagtgacttctgtgaccgggagcagagcctgaaggagaccctggtggagcccggcagcttcagccagcagaatggagagcaccccaagccagccctggacaccggctatgaaacagagcaggacaccatcaccagcaaggtgcccacagaccgggaggacagccagagaattgatgacctgagcgcccgggacaagccctttgatgtgaagtgtgagctgaagtttgctgacagtgatgctgatggagactag

SEQ ID NO: 271077 - DNA, 2589 bp, Artificial Sequence
  derived and/or modified sequence
atgcggatgtgcacccccatccggggcctgctgatggccctggccgtgatgttcggcactgccatggccttcgctcctattcccaggatcacttgggaacacagggaagtgcacctcgttcaattccatgagccagacatctataattattctgctcttctactatcagaggacaaggacacattgtatataggagctcgcgaggccgtgttcgcggtgaacgcactcaacatctcagagaagcaacacgaggtgtattggaaagtgagcgaagacaaaaaggcgaagtgtgcagaaaaaggaaaatccaagcaaacggagtgcctgaattacattcgagtgcttcagccactcagcgctacatccctgtacgtgtgtggaactaacgcctttcagcccgcctgcgatcacttaaatttaacaagctttaagttcttgggtaagaacgaggacggaaagggcagatgccctttcgatccagctcactcgtatacatctgtcatggtggatggcgaactatactctgggacatcatataacttcctcggtagcgagcccatcatttcacggaatagttcccactcaccccttcgaacggagtacgcaatcccctggctcaatgagccatccttcgtgtttgcggatgtgattaggaagagccctgatagtccagatggcgaagacgacagggtgtatttcttcttcactgaggtgagtgtggagtatgagtttgtcttcagggtgctgattccccgaatcgcaagggtttgcaagggagatcaagggggcctgcggaccctccagaaaaagtggacaagtttccttaaggcccgcctcatctgttcacgtcctgactctgggttagtgttcaatgtcttacgtgacgtgttcgtgctgagaagtcccggcctcaaggtgcctgtgttttacgctctgtttaccccgcagctcaacaatgtcgggcttagtgcggtgtgcgcctacaatctgagcacagccgaggaggtctttagccacgggaaatacatgcaaagcaccaccgtcgaacagtcccacactaagtgggtccggtataacggaccggtgcctaagcctaggcccggagcctgtatcgacagcgaggctcgggccgccaattacacctcctccctcaaccttcccgacaaaactctccagtttgttaaggatcacccactcatggatgattcagtgactcccatcgataaccgtcctcgtttaatcaaaaaggatgtcaattacacgcagattgtggtcgatcgtacacaggctctggacgggacagtctacgatgtcatgttcgtttcgacagatagaggagctttacataaagctatcagcctagagcatgcggtacatatcattgaagagacacagttgtttcaggactttgagcctgtccaaaccctcctcttgtcttccaaaaagggaaaccggttcgtttatgccggctctaactccggcgttgtgcaggccccgctcgccttctgcggtaagcacgggacttgtgaggactgtgttctcgctagagatccatactgtgcttggagccccccaaccgccacatgtgttgcgctccatcagaccgagtcaccatctaggggattaattcaggaaatgagtggggatgcatctgtgtgccccgataaatctaaaggttcttacagacagcatttcttcaagcacggtggaacggccgaactgaagtgttcacagaaatccaacctggctagggtgttttggaagtttcaaaacggggtactcaaagcagaaagtcctaagtatggccttatgggcagaaaaaacttgctgatttttaatctgagcgaaggtgactcaggagtttatcaatgtctcagcgaggagagggtcaaaaacaaaaccgttttccaagtggtcgctaagcacgtgctcgaagtgaaggtagttcctaagcccgtcgtcgcgcctactctgtccgtagtccagacagaaggtagcagaatcgccactaaggttctggttgccagcacacagggatcgtcaccacctacacccgctgtccaggcaacatcttccggggcaatcacactgcctcccaagcctgccccaacagggacctcctgtgaacccaagattgtgataaatactgttccccagcttcactcggaaaagaccatgtacttaaagtcctccgataatcgcctactgatgtctctttttctgttcttcttcgtgttgttcttatgtctgttcttctataattgctataaaggctatctaccccggcagtgtctgaaatttcggtccgccctgctcatcggcaaaaagaaacccaagtctgacttctgcgatagggagcaatcgctgaaggagacactcgtggaaccaggtagctttagtcagcaaaatggcgaacatcctaaaccagccctggacaccggttatgaaacggagcaagatactatcacttccaaagtcccaacagatcgcgaggactcccagagaatcgacgatctcagcgcaagggacaaaccctttgacgtaaagtgcgagctcaaattcgccgacagcgatgccgacggggactag

SEQ ID NO: 271078 - DNA, 2589 bp, Artificial Sequence
  derived and/or modified sequence
atgcggatgtgcacccccatccggggcctgctgatggccctggccgtaatgttcggcacagccatggcattcgctcccattcctcgaataacctgggaacaccgggaggtccacctcgtccaattccatgaacccgacatttacaattatagcgcgctcctcctcagcgaagataaggatacactgtatatcggcgcacgcgaggccgtgttcgccgttaatgctctcaacatcagcgaaaaacaacacgaggtgtactggaaggtaagcgaggataagaaagctaaatgtgccgagaagggaaagtcgaagcaaaccgaatgcttgaattacatcagggttttgcaacccctctctgccacatccctctacgtgtgtggaacgaatgcattccaaccggcatgtgaccacttaaatttgacctctttcaagttcctaggtaaaaacgaggacgggaagggtcgatgtcctttcgacccggcccactcatacacctcagttatggtggatggagaactgtactctggcacaagctacaatttcctgggatctgaacccatcatatcaaggaactcatcccatagccccctgagaacagaatacgccatcccttggttaaatgagccttcattcgtgttcgccgacgtcatacggaaatcacccgatagtcctgatggtgaagacgacagggtatacttcttcttcactgaggtgtctgtcgagtacgaattcgtcttcagagtgcttattccaagaattgccagggtctgcaaaggcgatcaggggggcttgcgcaccttgcagaaaaagtggactagcttcctcaaagccagactcatctgctcccggcccgacagcggactggtttttaacgtccttagagacgtctttgtgctgagatctccaggtcttaaggtccccgtgttttacgcgctgtttaccccacaactcaataacgtgggactgagcgctgtgtgcgcctacaacttgtccaccgccgaggaggtcttttcccatggaaagtatatgcagtctaccacagtggagcagtcacatacaaagtgggtcaggtacaatgggccagtccccaagccgcggccaggggcttgcatagattcagaagctcgggcagcaaactatacttcttcccttaacctacccgataagacgctgcaattcgtgaaggatcacccactaatggatgatagcgtcactccaatcgataacagaccccggctcattaagaaggacgtgaactacactcaaatagtcgttgatcgaacgcaggcactggacgggaccgtctacgacgtaatgttcgtctctaccgacaggggggctttgcacaaagctatcagtttggaacacgctgtccatattatcgaagaaactcagctgttccaggactttgaacccgtccaaacgcttcttctcagctccaaaaagggcaaccgattcgtctatgccggcagtaactcgggggtcgtgcaagcacctctggccttctgtggcaaacatgggacatgtgaggattgcgtcctggcgagggacccctattgtgcctggagcccaccaaccgccacttgtgtcgctctgcaccaaacagagtcaccatcaagggggctgattcaagaaatgtccggagatgcttccgtgtgccccgataaaagcaaaggaagctataggcagcacttcttcaagcacggcggcactgccgagctgaaatgctcgcaaaaaagcaacctcgcacgagtattctggaagttccagaacggcgttctgaaagcagagagtccgaagtatggcctgatgggtaggaagaacctgcttatcttcaaccttagcgagggagacagtggggtgtaccagtgtctttcagaagaacgcgtgaagaacaagacggttttccaggtggttgcaaagcacgtactggaagtcaaggtagttcctaaaccggtcgtcgcccccactctgagtgtggtgcagactgaagggtctagaatagccacaaaggtgctggtcgcaagtactcagggctcctcaccaccaactccagcagtgcaggctacatccagcggggccattacactgccacccaagccggcacctaccggcacctcttgcgagcccaagatagttattaacacagtgccacagttgcattccgaaaaaactatgtacctgaagtccagcgacaataggctcctcatgagccttttcctgttcttctttgtgcttttcctgtgcctttttttttataactgctacaaagggtatctgccgaggcaatgcctgaaatttagaagcgctctcttgatcgggaagaaaaagccaaagagcgacttctgcgacagggagcagtcactgaaggaaacactggttgaaccaggctccttttctcagcagaacggcgagcatcctaagcccgctctagataccggctatgaaacagaacaggacaccatcacaagtaaagttcccacagaccgggaggactctcagcggattgacgacctttccgccagagataaaccatttgacgtgaagtgcgaactaaaattcgcggactcagatgcagatggagactag

SEQ ID NO: 271079 - DNA, 2589 bp, Artificial Sequence
  derived and/or modified sequence
atgcggatgtgcacccccatccggggcctgctgatggccctggccgttatgttcggcaccgctatggcatttgcccccattcctagaataacttgggagcatagagaggtccatcttgtgcagttccacgaaccagatatatataattacagcgctctcctactgtccgaggataaggatactctgtatatcggtgccagagaggccgtctttgcggtcaacgctttgaacatctcagaaaaacagcacgaagtctactggaaggtttccgaggacaagaaggccaaatgcgctgaaaagggtaagagcaagcaaaccgagtgcctaaactacatcagggtgttgcagccgcttagtgcaacttctctctacgtctgcggtactaatgcgttccagccagcctgtgatcacctaaacttgacttcctttaagttcctgggcaaaaatgaggacggcaaaggccgctgtccatttgatcctgcccattcctacacttctgtcatggtcgacggtgaactgtactccgggacaagttacaattttctcggaagtgaacccattatctcgcgtaatagctctcacagccctttgcgaacagaatatgccattccatggcttaatgaaccgtcattcgtattcgccgacgtgatccggaagtctcccgattctcccgatggcgaagatgaccgagtgtattttttctttaccgaggtgagcgtagagtacgaatttgtgtttcgagtgctcattcctcgtatagcacgtgtttgcaaaggcgaccagggagggctgcggacattgcagaagaaatggacgtccttcctgaaagctcgcctaatctgttcccgccccgactcgggtttggtgttcaatgtactaagggatgtgttcgtcttgcggagccccgggcttaaagtgcctgtgttctacgccctttttactccacaactgaataatgtgggcttgtccgcggtctgcgcctataacctctctaccgcagaggaggtttttagccatggcaagtatatgcagtcaacaacggttgagcagtctcacacaaagtgggtgcggtacaatggtccagtgcctaagccaaggcctggtgcttgtatagatagcgaggcccgagcggctaattatacgtcaagtctgaaccttcctgacaagacacttcagtttgtgaaagatcatcctttgatggatgactcagtcacacccatcgacaatcggcctagactcataaagaaggatgtcaactatacccagatagtggtcgatagaacacaggccctggatggtacagtctacgatgttatgttcgtctctacggatcgcggcgctctgcataaagctatcagcctggaacatgcagttcacattatcgaagagacgcagctgttccaggattttgagcccgtccagactctcctgctgtcctctaaaaagggaaacagattcgtgtatgcaggcagcaatagcggtgttgtgcaggcccctctcgctttctgtggcaagcacggaacctgtgaagattgcgtcctggctagagacccttactgtgcctggtcccctcctaccgctacgtgtgtggctctgcaccagactgaatccccgtcccgcgggctgatccaggagatgtctggagacgcctccgtctgccctgataaaagcaagggttcctacagacagcacttcttcaagcacggcggtacagccgagctcaagtgttcacagaaaagcaacctagctcgggttttctggaagttccagaacggcgtgttgaaggccgaatcgcccaagtatggactgatgggaaggaaaaacctgttaatctttaacctgagcgaaggtgatagtggcgtgtatcagtgcttgtcagaggagagagtcaagaacaagaccgtgttccaggttgttgcaaagcatgtgctggaggtaaaagttgtgccaaaaccagttgtggccccgacactgagtgtcgtccagactgagggtagtagaattgccactaaagtgctggttgcttccactcaaggaagcagcccccctaccccggcagtacaggccacctctagtggggccatcactctccctcctaagcccgcacccaccggcacgtcttgcgagcccaaaatagtaataaacaccgttccacagctgcatagcgagaagaccatgtacctcaagagcagtgacaaccgactcctgatgtccctgtttctgttcttctttgtcctatttctctgccttttcttctacaattgttataaaggctatctacccagacagtgtctaaaatttcgttctgctctgttgataggaaaaaagaagccaaaatctgacttctgtgacagagaacaaagccttaaagagaccctcgttgagccgggtagcttctctcagcagaacggagagcaccccaagccagcactagacacggggtacgaaactgaacaggatactatcacctcgaaggtgcccaccgatcgggaggactctcagagaatcgatgatctaagcgccagggacaaaccatttgacgtcaagtgcgagctgaagttcgccgatagtgacgccgatggtgactag

SEQ ID NO: 271080 - DNA, 2589 bp, Artificial Sequence
  derived and/or modified sequence
atgcggatgtgcacccccatccggggcctgctgatggccctggccgtcatgttcggtacagccatggccttcgccccaatcccgcgaatcacatgggagcaccgggaggtccacttagtgcagttccacgaaccagacatatacaactactcagcccttttgctgagtgaggataaagatactctctatattggcgcaagagaggccgtgtttgccgtaaacgccctgaacatcagtgaaaagcagcacgaagtgtattggaaagtgtctgaagacaagaaggcaaagtgcgcagaaaaaggtaagagcaagcagacagagtgccttaattacattagagttctccagccactctccgccacctctctctatgtgtgcggaacaaacgccttccaacctgcgtgcgatcacttgaacctgacaagtttcaaattcctgggaaagaatgaagatgggaaggggcgctgcccctttgaccctgcacactcttacacatccgtcatggtagacggggaactctactccggaaccagctacaatttcctcggaagcgagcctatcataagcagaaactcatctcactccccgctcaggacagaatatgccatcccttggctcaacgagcctagtttcgtgtttgccgacgtcattagaaagagccccgattcaccggacggcgaagatgatcgggtgtacttctttttcactgaggtgagtgtagagtacgaattcgtgtttagggtgctcattccccgcatcgcacgagtgtgtaaaggggaccagggaggactgcggactctgcaaaagaagtggacgtcatttctcaaagcccgcctgatttgttcaagaccggacagcggcctagtgttcaacgtgctgagagacgtgtttgttctgcggtcccctgggctcaaggtgcccgtgttttacgctctattcacgccccagctgaataatgtagggttgtctgctgtttgcgcctacaacctctctacagccgaagaggtgtttagccatggaaagtacatgcagtccacaacagtcgagcagagccatactaaatgggtcaggtacaacgggccagtgcctaagccacgcccaggtgcttgtattgactctgaagcgcgggctgctaattacacttcctccctgaatctgccggacaagaccttgcagttcgtcaaagaccatcccttgatggacgactcggttacccctatcgacaacaggccccgactgatcaagaaagatgtcaactacacccagattgtggtggacaggacgcaggcccttgacgggaccgtgtacgacgtgatgttcgtgtctaccgatcgcggggcgttgcacaaggcaatatctctggaacacgctgtacatatcatcgaggaaactcaattgttccaagatttcgagcctgtccaaactctgctcctttcatctaagaaaggcaatcgcttcgtctacgcggggagcaattccggagttgtgcaggctccactggccttctgtggcaaacacggcacatgtgaggattgcgtcctggctcgcgacccttactgtgcctggtctccaccaacagccacgtgcgtggctctccatcagacagaatctccctcccgcggtctcattcaggaaatgagcggcgacgccagcgtgtgtccggacaagagcaagggctcttataggcagcatttctttaaacatggcgggacagcagagctgaagtgtagccaaaagtctaatctggcgagggtgttctggaagttccagaacggggtcctgaaagccgaatcacccaagtacggattaatgggcagaaagaatctcctgatttttaatctgagcgaaggagacagcggtgtgtaccagtgtctgtccgaagagagagttaagaataagacagtgttccaggttgttgccaaacacgtcctggaagtgaaagtagtaccaaagcccgtggtggcccctaccctgagcgtggtgcaaacagaaggcagccggattgccaccaaagtcctagtggcttccacccagggctcctctccccccacgcccgcagttcaagctaccagttcaggagccatcaccctgcccccaaaacccgcacctaccggcacatcatgtgaacccaagatcgtgattaacactgtcccacagttgcactcggagaaaaccatgtacctcaaaagttcagataaccgcctgctgatgagcctgttcctcttcttctttgtgctgtttctgtgcctgtttttttataactgctacaaaggctacctgccacgtcagtgtctaaaatttcgatcggccctgttgatcggtaagaagaaacctaaatcagacttttgtgatagggaacagtccctcaaggagacccttgttgagccaggatcgttttcccagcagaacggcgagcaccctaagccagcccttgatacggggtatgagacagagcaggacacaatcaccagcaaggtacccactgacagagaggactcgcagagaatcgatgatttgagcgcccgggataagccattcgatgtgaaatgtgaactcaagtttgctgatagtgatgcggacggggactag

SEQ ID NO: 271081 - DNA, 2589 bp, Artificial Sequence
  derived and/or modified sequence
atgaggatgtgcaccccaattcggggtctgctcatggcccttgctgtgatgtttgggactgcgatggcctttgctccgattccccgaatcacgtgggagcacagagaagtccatctggtgcagttccatgagcccgatatctacaattactctgccctgctactgagtgaggataaagatacattatatattggtgcccgagaggctgtattcgctgtcaatgccttaaacatctccgaaaagcagcatgaagtttattggaaagtatcggaggataagaaggcgaaatgcgcagaaaaggggaaaagcaaacaaacagagtgcctgaattacattagagttctccagcctctgtctgccacctctttgtatgtgtgtggaactaacgcatttcagcccgcatgcgaccacctgaatctaacatctttcaaattccttggaaaaaacgaagacgggaaaggccgatgcccgttcgaccccgctcattcttatacttccgtcatggtagatggtgaactctattcaggaacgtcctacaattttttgggatctgagcccatcatctcacgcaactcttcccattcccccctccgtaccgaatacgctataccctggctcaacgagcccagttttgtattcgcagacgtgattcgcaagagccccgattcgcctgatggagaagacgaccgcgtgtactttttcttcaccgaagtctctgtagagtacgaatttgtcttccgtgttctgattcctcggatagcccgagtctgtaaaggggaccagggcggtctgcggacactgcaaaaaaagtggacaagttttttgaaagccagactcatctgtagtcggcctgatagtggcctcgtctttaatgttctccgcgatgtatttgtcctacgttctcccggtcttaaagtgccagtgttttatgccctgttcacgcctcaactcaataatgtgggactgagcgccgtatgcgcctataacctctcaactgccgaggaagtgttcagccacggcaagtacatgcagagcacaaccgttgagcaaagccacacaaagtgggtgcggtacaacggccctgtgcccaagcctcgtcctggcgcttgcatcgactccgaggcaagggctgcaaattacacctcaagccttaacctgcctgataagactctgcagtttgttaaagaccacccacttatggacgactctgtgacgccaatcgacaataggccgaggctcatcaaaaaagacgtcaactacactcaaatcgtagtcgacaggacccaggccctggatggaactgtgtacgacgtgatgtttgtgagcacagatcgaggcgctctccataaggctatcagcttagagcacgcggtccacattatcgaagagacccagttatttcaggactttgagccagtgcagacgctattgctgtcgagcaagaagggtaaccgattcgtgtatgctgggagtaactccggggtggtgcaggcacccctcgctttttgtggcaaacatgggacctgcgaagactgtgtgttagctagagatccttactgcgcctggtcccctccaactgcaacgtgtgttgccctccatcagaccgagtcacccagcagaggcctaatccaggagatgagcggggatgctagcgtgtgtccggataagagcaaaggctcttacagacagcatttcttcaagcacggcggaacggctgagctgaaatgctcccagaaaagcaacctcgcacgagtgttttggaagttccagaatggcgtgctcaaggcagagagccccaagtatggactgatgggacgcaaaaacctcctgattttcaatttgtcggaaggggatagcggcgtttaccagtgtctttctgaggagagagtgaagaacaagaccgtcttccaggtagtcgctaaacacgtgcttgaggtgaaagtggtgccaaagcctgttgtggcccctacgctaagcgtggtccagactgagggctcccggattgccactaaagtcctggttgcctccactcagggttccagcccgcctacgcccgctgtgcaggccacgtccagtggcgcaatcactctgccacctaaaccagctcctacgggcacatcctgcgaacccaagattgtgatcaacaccgtgcctcagctgcattcggagaagaccatgtacctcaaaagtagcgataatcgcctgttgatgtcactctttctcttcttctttgtgctcttcctctgcctgttcttttataactgctataagggctacttgccacggcaatgcttgaagtttagaagcgccttgctgattggcaagaagaagcctaagtcggatttctgcgatagggagcagtccctcaaggagacactggtggagccgggttctttcagccaacagaatggagagcatccaaagcctgcgcttgatacaggctacgaaaccgaacaggacacaatcacctccaaggtccctaccgatcgagaggatagccaaaggattgatgacctgagtgccagggataagcccttcgacgtgaagtgtgagctcaaatttgctgactcagatgctgacggggactag

SEQ ID NO: 271082 - DNA, 2589 bp, Artificial Sequence
  derived and/or modified sequence
atgcgcatgtgtacccctatcagaggcctactgatggccctggccgtgatgttcggaacagctatggcattcgcgcctatcccacgcataacatgggaacaccgggaagtgcatctggtccagtttcacgaacctgacatatacaattactctgccctcctcctttcagaagataaagacaccctgtatattggagcgcgtgaggctgtcttcgcagtgaatgccttaaatatctccgaaaaacagcacgaggtctactggaaagtcagtgaggacaaaaaggcaaagtgcgcagaaaaaggtaaaagcaaacaaacagaatgcctgaattacattagagtcctacagcccctaagtgctacttctctgtacgtctgcggtactaacgcatttcagcctgcttgtgatcacctaaatctgacaagcttcaagtttctgggaaaaaatgaggatggaaaggggaggtgtcctttcgatcccgctcatagctataccagcgtcatggttgatggcgagctgtacagcggcaccagctacaacttcttgggcagtgagccaattattagtaggaattcttcccattctccgctgaggaccgaatatgccataccatggctcaacgagcctagtttcgtcttcgctgatgttatacggaagtcgccagatagtcccgacggtgaagatgacagggtttactttttcttcactgaggtgtccgtagagtatgagttcgtctttagggttttgattcccagaattgccagggtttgcaagggcgatcaggggggactgaggactctgcagaaaaaatggaccagcttcctaaaagcacgtctgatctgtagccggcctgatagcggattggtgttcaatgttctgcgggatgtcttcgtactgcgaagtccaggattgaaagttccagtgttctatgcgctatttacgcctcagcttaataacgtggggctgtctgcagtctgtgcttacaacttgtctaccgcggaggaggtattcagtcatggaaagtatatgcagagtacaacagtagagcagagtcacactaagtgggtacgatacaacggtcctgtgccaaaaccgaggccgggagcctgcattgactcagaggcccgagccgctaattacacctcctccctgaacttgccagacaagacactgcagttcgtgaaagatcaccccctgatggatgactccgtgaccccgatcgacaaccgaccgcgattaatcaaaaaggatgttaattacacccaaattgtggtggataggactcaggctttggacgggactgtctatgatgtgatgtttgtgtccacagacaggggggctctccacaaggctatatccctggagcatgccgtccacatcattgaagagacgcagctgttccaggatttcgagccggtgcagactcttttgctaagtagcaagaagggaaaccgcttcgtttatgccggatccaactccggagtggtgcaggcaccactagcattttgtggcaaacacggtacgtgcgaggattgcgtgcttgccagagatccctactgcgcttggtcccccccaacggctacatgcgtggccctccaccagacagaaagcccctctcgcggtctgatccaggagatgtccggagatgctagcgtatgtcccgacaagtcgaaaggctcctatagacagcacttttttaagcacggcggtaccgccgaactgaagtgctctcaaaagtctaatctggctcgggtgttttggaaattccagaacggtgttctgaaggcggaatcccccaaatacggtctgatgggcagaaagaacctgctgatcttcaatctatccgaaggcgatagcggagtataccagtgcctgtcagaagagagagtgaaaaacaagaccgtatttcaggtcgtcgcaaaacacgtgctggaggtgaaggtcgttccaaagcctgtagtggctccgaccctgagtgttgttcagacggagggctccaggatagccaccaaagtcctggtcgcctccactcaaggctcatctccacctacacccgcagtgcaggcgacctccagcggagccattacccttccaccaaaacccgctccgacgggcacctcttgtgaaccgaagatcgtcatcaataccgtgccacagctgcactcagaaaagacaatgtaccttaaatccagcgacaaccggctgctcatgtccctcttcctgttctttttcgtgctcttcctttgtctcttcttctacaattgttacaaagggtatttgccccgacagtgcctaaagtttcgaagcgccctcctgatcgggaagaagaaaccaaaaagcgacttctgtgacagagaacagagtctgaaagaaacactggtggagcctggtagcttctcccaacaaaacggggagcatcctaagcctgcccttgacacagggtatgagacagagcaggacaccattacaagcaaggtgcctactgaccgtgaagacagtcagcgaatcgacgatttgagcgctagagataagccattcgatgtgaagtgtgagctgaaattcgcagattcagacgcagatggggactag

SEQ ID NO: 271083 - DNA, 2589 bp, Artificial Sequence
  derived and/or modified sequence
atgaggatgtgcacacctatcaggggccttcttatggcacttgcagtgatgttcggcacagctatggcctttgccccaattcctaggatcacctgggaacaccgtgaggtccatctcgtccagtttcatgaaccggacatttacaactattctgcactccttctctccgaagacaaggacacactctacatcggggcacgcgaagctgtgttcgccgtcaatgcacttaatataagcgagaagcaacatgaggtatactggaaagtttcagaggataagaaggccaaatgtgcagagaaaggaaagagcaagcagaccgaatgcctgaactatatccgggtcttgcaaccacttagtgcgactagtttgtatgtgtgcgggaccaatgcatttcagccggcatgtgatcacctaaatctaacctccttcaagttcctcggaaaaaatgaggacggcaagggaagatgcccatttgacccagctcattcatatacctcagtcatggtcgacggagagttgtattctgggacttcctataacttcctagggtccgagccaataatttcacgaaattctagtcattccccattgcgcacagagtacgccattccctggctgaatgaaccatctttcgtgtttgcggacgtgattaggaagagccccgatagccctgatggcgaggatgacagggtgtactttttctttaccgaggtgtcggtggagtacgagttcgtttttagggtcctcatccctcgtatcgctagggtatgcaaaggggatcagggcggtctgaggacactgcagaagaaatggacttccttcctcaaagctcgtctgatttgttcacggccagactcaggcttggtgtttaacgtgctgagggacgtgtttgtgctgagatctcccggactgaaggtcccagtgttttacgccctgttcactccccagctgaacaacgtaggcctttccgccgtttgcgcctacaacctgtcaacggctgaggaggtgttcagtcacggcaaatacatgcagtctaccacggttgagcagtcccacacaaaatgggtcagatacaacgggcctgtccccaagcctagacccggagcatgcatcgatagtgaggctcgggcagctaattacacatcaagcctgaatttgcctgacaagacgttgcagttcgtcaaggatcaccctctcatggatgatagcgtcactccgatcgacaataggcctagattaattaaaaaagatgttaactatacacagatcgtcgttgataggactcaggccctggatggtacggtgtacgatgtgatgttcgtgtcaaccgatagaggtgcactgcataaggcaatctcactggagcatgccgtccacataattgaagagacccaactcttccaggatttcgagccagtacagacattgctactttctagtaagaagggcaatcgcttcgtttacgctggctcgaactctggcgtggttcaggcacccctagcattttgcggcaagcatggtacctgtgaggactgtgtgctggccagggacccttactgcgcatggtctccccctaccgctacttgcgtggctctgcaccaaaccgagtccccatcacgaggtttaatacaggagatgagtggcgacgccagcgtgtgtcccgataagagcaaaggttcatacagacagcatttctttaagcacggcggtactgctgagctaaaatgcagtcagaaatccaacctcgcgagagtgttttggaagtttcagaatggtgtgctgaaggccgagtcacccaagtatggcctcatgggccgtaaaaatcttcttatctttaatttgagcgagggagactcgggtgtataccagtgtctctccgaagaacgggtaaaaaataaaacagtgtttcaagtggttgccaagcatgtgctggaggtaaaggttgtgccaaagccagtggttgcccctaccctgtccgtggtgcaaaccgaggggtccagaattgctactaaagttctggtggcttcaacccaggggtcgtcgcctcccaccccggctgttcaggcaacgtcgagtggtgccatcacgctgccacccaaacccgctcccaccggcacaagctgtgagccgaaaatagtgattaataccgtaccgcagctccactcagaaaaaaccatgtatctcaagagttcggataatagactgttgatgtctttattcctttttttttttgtgctgttcctgtgtctgttcttctataactgttacaagggctacctaccacgacagtgcctcaagttcaggtcggcgttgctaatcggcaagaaaaaaccaaagagtgacttctgtgaccgggaacagagccttaaggagaccttggtagagcccggaagcttctctcagcagaatggcgagcacccaaagcccgctctggacacgggatatgaaaccgaacaggacacaatcacatccaaggtgccgacagaccgcgaggattcccagaggatagatgacttgtccgcgagagacaagccttttgatgttaaatgcgagctcaagttcgccgactccgacgccgatggggattag

SEQ ID NO: 271084 - DNA, 2589 bp, Artificial Sequence
  derived and/or modified sequence
atgaggatgtgcacgcctatccgaggcctgttgatggccctggcagtcatgttcggaaccgcgatggctttcgcccctatccctcgaattacctgggaacacagagaggtacacctggttcaatttcacgaacccgatatatataattattcagctctattgctgtcagaagacaaggacaccctgtacatcggagccagagaggcagtcttcgcagtgaacgccctgaacatctctgaaaaacagcacgaggtctactggaaggtgtcagaggacaagaaagccaaatgtgctgagaagggcaagtcgaagcagacagagtgtctgaactacatccgggttctccagccccttagcgccacctctctgtacgtctgtggtactaacgctttccagcccgcttgcgatcatctgaatttgactagcttcaaattcctcgggaaaaatgaggacggaaaaggtagatgtccattcgatcccgctcactcctatacgtccgtgatggtggacggggagctgtatagcggtacctcatacaactttctcggctctgagcctatcatctctaggaacagctcacattctccgctgagaaccgagtacgctataccctggctgaatgaaccttcattcgtgttcgcagatgttatccggaagtcccctgactcccccgacggagaggacgaccgcgtatatttctttttcacagaggtatcagtcgagtacgagtttgtgttcagggtccttatccccaggattgctcgggtctgcaagggggaccaggggggactccggactcttcagaagaaatggacgagctttctcaaagctcgattgatttgctcaaggccggactcagggctggtgttcaacgtgctgagggacgtgttcgtattgagatcgccgggtctgaaggtgcctgtcttctacgcactgtttactccacagttgaacaacgtgggattgtccgctgtttgcgcctataatctgtccaccgctgaagaagtttttagtcacggaaaatacatgcagtctaccaccgtcgagcagtcacacaccaaatgggttcgttataatgggccagtcccaaaacccaggcctggtgcttgtatcgactcggaagcccgtgcagctaactatacctccagccttaatttacccgataaaaccctccaattcgtaaaggatcaccctctgatggacgattcagtaactcctattgacaaccgacctcggctgataaagaaggacgttaattacactcagattgtcgtcgatagaacacaggctctggacggcacagtgtacgatgtcatgttcgtaagtaccgatcgcggagccttgcacaaggctatttcattagagcacgccgtgcacattatcgaggagacgcagctttttcaggatttcgaacctgtacagacactgctgctttcatcgaaaaaaggaaacaggttcgtgtatgccggtagtaattccggagtcgttcaagcgccattggccttctgcggcaagcatgggacatgcgaagactgcgtgctagcgagggacccttattgcgcctggagcccaccaactgccacatgtgtagcattgcaccagactgaaagtcccagcaggggcctgattcaggagatgagtggagatgcaagcgtgtgccctgataagagtaaaggcagttaccgacagcacttcttcaagcatgggggaactgctgagctgaaatgttcacaaaaaagtaatctggccagagtgttctggaaattccagaatggcgtgctgaaagcagaatctccgaaatacgggctaatggggaggaagaatctgttaatctttaatctgagcgagggcgactccggtgtgtaccaatgtctgagtgaggaacgagtcaaaaataagaccgtgtttcaggtggttgccaagcacgttcttgaggtgaaggttgtgccaaagccagtggtcgcccctaccctatccgtggtccagaccgagggttccagaattgccacaaaggttctcgtggccagcacccagggctcgtcaccaccgacccctgccgttcaggcaactagctccggtgcgattacactgccacctaagccggcacccacgggcacgagctgcgagcccaagatcgtcatcaacacagtaccgcagcttcactcagaaaagactatgtacctcaaatcctctgacaatagactgctgatgtccctgtttctgttcttcttcgtgctgttcctatgcctgtttttttataactgctataagggatacctgcccagacagtgcttgaaatttcgatcggctttgctgattggaaagaagaaaccgaagtctgacttttgcgatcgagagcaaagcctaaaggagaccttagtcgaaccgggaagcttctctcagcagaacggggagcacccgaagcctgccttggacaccggatacgaaacagaacaggacaccattacatctaaagtgccgaccgatcgagaggactctcagcgcatcgatgacctgagcgctcgggacaagcctttcgatgtaaagtgtgagctaaaattcgcagatagcgatgctgatggggactag

SEQ ID NO: 271085 - DNA, 4503 bp, Artificial Sequence
  derived and/or modified sequence
actctgctaacaccagatagtggaaagaaaccatgtgctgaaatgtttgacgacactgatggtttgactctgctaactggaatggcttattgtgcaagaaagtacacctggtcgggtcctggggctcatctctagcaccagcaaagatttctgaagacgtctttctagaaatgactggaaagtttcaagaggcataagatacagcatttcttctgaggccctgaagaagtatcaagtgggctttgacattgcggtggtgagagcgacccctcctcacctggagaactgggaaatgtggattctcagggaccgcgctgttcacgagctccaggctgtgctgctggccctggtcctggggcgctgagccgcatctgcaatagcacacctgcccggccacctgctgccgtgagcctttgctgctgaagcccctggggtcgcctctacctgatgaggatgtgcacccccattagggggctgctcatggcccttgcagtgatgtttgggacagcgatggcatttgcacccataccccggatcacctgggagcacagagaggtgcacctggtgcagtttcatgagccagacatctacaactactcagccttgctgctgagcgaggacaaggacaccttgtacataggtgcccgggaggcggtcttcgctgtgaacgcactcaacatctccgagaagcagcatgaggtgtattggaaggtctcagaagacaaaaaagcaaaatgtgcagaaaaggggaaatcaaaacagacagagtgcctcaactacatccgggtgctgcagccactcagcgccacttccctttacgtgtgtgggaccaacgcattccagccggcctgtgaccacctgaacttaacatcctttaagtttctggggaaaaatgaagatggcaaaggaagatgtccctttgacccagcacacagctacacatccgtcatggttgatggagaactttattcggggacgtcgtataattttttgggaagtgaacccatcatctcccgaaattcttcccacagtcctctgaggacagaatatgcaatcccttggctgaacgagcctagtttcgtgtttgctgacgtgatccgaaaaagcccagacagccccgacggcgaggatgacagggtctacttcttcttcacggaggtgtctgtggagtatgagtttgtgttcagggtgctgatcccacggatagcaagagtgtgcaagggggaccagggcggcctgaggaccttgcagaagaaatggacctccttcctgaaagcccgactcatctgctcccggccagacagcggcttggtcttcaatgtgctgcgggatgtcttcgtgctcaggtccccgggcctgaaggtgcctgtgttctatgcactcttcaccccacagctgaacaacgtggggctgtcggcagtgtgcgcctacaacctgtccacagccgaggaggtcttctcccacgggaagtacatgcagagcaccacagtggagcagtcccacaccaagtgggtgcgctataatggcccggtacccaagccgcggcctggagcgtgcatcgacagcgaggcacgggccgccaactacaccagctccttgaatttgccagacaagacgctgcagttcgttaaagaccaccctttgatggatgactcggtaaccccaatagacaacaggcccaggttaatcaagaaagatgtgaactacacccagatcgtggtggaccggacccaggccctggatgggactgtctatgatgtcatgtttgtcagcacagaccggggagctctgcacaaagccatcagcctcgagcacgctgttcacatcatcgaggagacccagctcttccaggactttgagccagtccagaccctgctgctgtcttcaaagaagggcaacaggtttgtctatgctggctctaactcgggcgtggtccaggccccgctggccttctgtgggaagcacggcacctgcgaggactgtgtgctggcgcgggacccctactgcgcctggagcccgcccacagcgacctgcgtggctctgcaccagaccgagagccccagcaggggtttgattcaggagatgagcggcgatgcttctgtgtgcccggataaaagtaaaggaagttaccggcagcattttttcaagcacggtggcacagcggaactgaaatgctcccaaaaatccaacctggcccgggtcttttggaagttccagaatggcgtgttgaaggccgagagccccaagtacggtcttatgggcagaaaaaacttgctcatcttcaacttgtcagaaggagacagtggggtgtaccagtgcctgtcagaggagagggttaagaacaaaacggtcttccaagtggtcgccaagcacgtcctggaagtgaaggtggttccaaagcccgtagtggcccccaccttgtcagttgttcagacagaaggtagtaggattgccaccaaagtgttggtggcatccacccaagggtcttctcccccaaccccagccgtgcaggccacctcctccggggccatcacccttcctcccaagcctgcgcccaccggcacatcctgcgaaccaaagatcgtcatcaacacggtcccccagctccactcggagaaaaccatgtatcttaagtccagcgacaaccgcctcctcatgtccctcttcctcttcttctttgttctcttcctctgcctctttttctacaactgctataagggatacctgcccagacagtgcttgaaattccgctcggccctactaattgggaagaagaagcccaagtcagatttctgtgaccgtgagcagagcctgaaggagacgttagtagagccagggagcttctcccagcagaatggggagcaccccaagccagccctggacaccggctatgagaccgagcaagacaccatcaccagcaaagtccccacggatagggaggactcacagaggatcgacgacctttctgccagggacaagccctttgacgtcaagtgtgagctgaagttcgctgactcagacgcagatggagactgaggccggctgtgcatccccgctggtgcctcggctgcgacgtgtccaggcgtggagagttttgtgtttctcctgttcagtatccgagtctcgtgcagtgctgcgtaggttagcccgcatcgtgcagacaacctcagtcctcttgtctattttctcttgggttgagcctgtgacttggtttctctttgtccttttggaaaaatgacaagcattgcatcccagtcttgtgttccgaagtcagtcggagtacttgaagaaggcccacgggcggcacggagttcctgagccctttctgtagtgggggaaaggtggctggacctctgttggctgagaagagcatcccttcagcttcccctccccgtagcagccactaaaagattatttaattccagattggaaatgacattttagtttatcagattggtaacttatcgcctgttgtccagattggcacgaaccttttcttccacttaattatttttttaggattttgctttgattgtgtttatgtcatgggtcatttttttttagttacagaagcagttgtgttaatatttagaagaagatgtatatcttccagattttgttatatatttggcataaaatacggcttacgttgcttaagattctcagggataaacttccttttgctaaatgcattctttctgcttttagaaatgtagacataaacactccccggagcccactcaccttttttctttttctttttttttttttaactttattccttgagggaagcattgtttttggagagattttctttctgtacttcgttttacttttctttttttttaacttttactctctcgaagaagaggaccttcccacatccacgaggtgggttttgagcaagggaaggtagcctggatgagctgagtggagccaggctggcccagagctgagatgggagtgcggtacaatctggagcccacagctgtcggtcagaacctcctgtgagacagatggaaccttcacaagggcgcctttggttctctgaacatctcctttctcttcttgcttcaattgcttacccactgcctgcccagactttctatccagcctcactgagctgcccactactggaagggaactgggcctcggtggccggggccgcgagctgtgaccacagcaccctcaagcatacggcgctgttcctgccactgtcctgaagatgtgaatgggtggtacgatttcaacactggttaatttcacactccatctccccgctttgtaaatacccatcgggaagagactttttttccatggtgaagagcaataaactctggatgtttgtgcgcgtgtgtggacagtcttatcttccagcatgataggatttgaccattttggtgtaaacatttgtgttttataagatttaccttgtttttatttttctactttgaattgtatacatttggaaagtacccaaataaatgagaagcttctatcctt

SEQ ID NO: 271086 - DNA, 4382 bp, Artificial Sequence
  derived and/or modified sequence
agcgctctcgcgcgccgcagcatcccagccgccgctgccgccgccgggcctccccgccaccccctccccggcccggccgcctcccgccgctgccgccgccgccgccgccgccattcctggcgcccgaactcgcccggccgggagccgccgcgggcaggacgcgcgctgcagactctgctaacaccagatagtggaaagaaaccatgtgctgaaatgtttgacgacactgatggtttgcatttcttctgaggccctgaagaagtatcaagtgggctttgacattgcggtggtgagagcgacccctcctcacctggagaactgggaaatgtggattctcagggaccgcgctgttcacgagctccaggctgtgctgctggccctggtcctggggcgctgagccgcatctgcaatagcacacctgcccggccacctgctgccgtgagcctttgctgctgaagcccctggggtcgcctctacctgatgaggatgtgcacccccattagggggctgctcatggcccttgcagtgatgtttgggacagcgatggcatttgcacccataccccggatcacctgggagcacagagaggtgcacctggtgcagtttcatgagccagacatctacaactactcagccttgctgctgagcgaggacaaggacaccttgtacataggtgcccgggaggcggtcttcgctgtgaacgcactcaacatctccgagaagcagcatgaggtgtattggaaggtctcagaagacaaaaaagcaaaatgtgcagaaaaggggaaatcaaaacagacagagtgcctcaactacatccgggtgctgcagccactcagcgccacttccctttacgtgtgtgggaccaacgcattccagccggcctgtgaccacctgaacttaacatcctttaagtttctggggaaaaatgaagatggcaaaggaagatgtccctttgacccagcacacagctacacatccgtcatggttgatggagaactttattcggggacgtcgtataattttttgggaagtgaacccatcatctcccgaaattcttcccacagtcctctgaggacagaatatgcaatcccttggctgaacgagcctagtttcgtgtttgctgacgtgatccgaaaaagcccagacagccccgacggcgaggatgacagggtctacttcttcttcacggaggtgtctgtggagtatgagtttgtgttcagggtgctgatcccacggatagcaagagtgtgcaagggggaccagggcggcctgaggaccttgcagaagaaatggacctccttcctgaaagcccgactcatctgctcccggccagacagcggcttggtcttcaatgtgctgcgggatgtcttcgtgctcaggtccccgggcctgaaggtgcctgtgttctatgcactcttcaccccacagctgaacaacgtggggctgtcggcagtgtgcgcctacaacctgtccacagccgaggaggtcttctcccacgggaagtacatgcagagcaccacagtggagcagtcccacaccaagtgggtgcgctataatggcccggtacccaagccgcggcctggagcgtgcatcgacagcgaggcacgggccgccaactacaccagctccttgaatttgccagacaagacgctgcagttcgttaaagaccaccctttgatggatgactcggtaaccccaatagacaacaggcccaggttaatcaagaaagatgtgaactacacccagatcgtggtggaccggacccaggccctggatgggactgtctatgatgtcatgtttgtcagcacagaccggggagctctgcacaaagccatcagcctcgagcacgctgttcacatcatcgaggagacccagctcttccaggactttgagccagtccagaccctgctgctgtcttcaaagaagggcaacaggtttgtctatgctggctctaactcgggcgtggtccaggccccgctggccttctgtgggaagcacggcacctgcgaggactgtgtgctggcgcgggacccctactgcgcctggagcccgcccacagcgacctgcgtggctctgcaccagaccgagagccccagcaggggtttgattcaggagatgagcggcgatgcttctgtgtgcccggataaaagtaaaggaagttaccggcagcattttttcaagcacggtggcacagcggaactgaaatgctcccaaaaatccaacctggcccgggtcttttggaagttccagaatggcgtgttgaaggccgagagccccaagtacggtcttatgggcagaaaaaacttgctcatcttcaacttgtcagaaggagacagtggggtgtaccagtgcctgtcagaggagagggttaagaacaaaacggtcttccaagtggtcgccaagcacgtcctggaagtgaaggtggttccaaagcccgtagtggcccccaccttgtcagttgttcagacagaaggtagtaggattgccaccaaagtgttggtggcatccacccaagggtcttctcccccaaccccagccgtgcaggccacctcctccggggccatcacccttcctcccaagcctgcgcccaccggcacatcctgcgaaccaaagatcgtcatcaacacggtcccccagctccactcggagaaaaccatgtatcttaagtccagcgacaaccgcctcctcatgtccctcttcctcttcttctttgttctcttcctctgcctctttttctacaactgctataagggatacctgcccagacagtgcttgaaattccgctcggccctactaattgggaagaagaagcccaagtcagatttctgtgaccgtgagcagagcctgaaggagacgttagtagagccagggagcttctcccagcagaatggggagcaccccaagccagccctggacaccggctatgagaccgagcaagacaccatcaccagcaaagtccccacggatagggaggactcacagaggatcgacgacctttctgccagggacaagccctttgacgtcaagtgtgagctgaagttcgctgactcagacgcagatggagactgaggccggctgtgcatccccgctggtgcctcggctgcgacgtgtccaggcgtggagagttttgtgtttctcctgttcagtatccgagtctcgtgcagtgctgcgtaggttagcccgcatcgtgcagacaacctcagtcctcttgtctattttctcttgggttgagcctgtgacttggtttctctttgtccttttggaaaaatgacaagcattgcatcccagtcttgtgttccgaagtcagtcggagtacttgaagaaggcccacgggcggcacggagttcctgagccctttctgtagtgggggaaaggtggctggacctctgttggctgagaagagcatcccttcagcttcccctccccgtagcagccactaaaagattatttaattccagattggaaatgacattttagtttatcagattggtaacttatcgcctgttgtccagattggcacgaaccttttcttccacttaattatttttttaggattttgctttgattgtgtttatgtcatgggtcatttttttttagttacagaagcagttgtgttaatatttagaagaagatgtatatcttccagattttgttatatatttggcataaaatacggcttacgttgcttaagattctcagggataaacttccttttgctaaatgcattctttctgcttttagaaatgtagacataaacactccccggagcccactcaccttttttctttttctttttttttttttaactttattccttgagggaagcattgtttttggagagattttctttctgtacttcgttttacttttctttttttttaacttttactctctcgaagaagaggaccttcccacatccacgaggtgggttttgagcaagggaaggtagcctggatgagctgagtggagccaggctggcccagagctgagatgggagtgcggtacaatctggagcccacagctgtcggtcagaacctcctgtgagacagatggaaccttcacaagggcgcctttggttctctgaacatctcctttctcttcttgcttcaattgcttacccactgcctgcccagactttctatccagcctcactgagctgcccactactggaagggaactgggcctcggtggccggggccgcgagctgtgaccacagcaccctcaagcatacggcgctgttcctgccactgtcctgaagatgtgaatgggtggtacgatttcaacactggttaatttcacactccatctccccgctttgtaaatacccatcgggaagagactttttttccatggtgaagagcaataaactctggatgtttgtg

SEQ ID NO: 271087 - DNA, 4824 bp, Artificial Sequence
  derived and/or modified sequence
ggcaacccgctcgggtccccttccacactgtggaagctttgttctttcgctcttgctactgctagctctttgggtccacgctgcttttatgagctgtaacactcaccgcgaagatctgcagcttcactcctgagcccagcgagaccacgagcccaccgggaggaacgaacaactccagacgcgctgccttaagagctgtaacactcaccgtgaaggtctgcagcttcactcccgagccagcgagaccacgaacccaccagaaggaagaaactctgaacacatctgaacatcagaagggacagactccagacgcgccaccactctgctaacaccagatagtggaaagaaaccatgtgctgaaatgtttgacgacactgatggtttgactctgctaactggaatggcttattgtgcaagaaagtacacctggtcgggtcctggggctcatctctagcaccagcaaagatttctgaagacgtctttctagaaatgactggaaagtttcaagaggcataagatacagcatttcttctgaggccctgaagaagtatcaagtgggctttgacattgcggtggtgagagcgacccctcctcacctggagaactgggaaatgtggattctcagggaccgcgctgttcacgagctccaggctgtgctgctggccctggtcctggggcgctgagccgcatctgcaatagcacacctgcccggccacctgctgccgtgagcctttgctgctgaagcccctggggtcgcctctacctgatgaggatgtgcacccccattagggggctgctcatggcccttgcagtgatgtttgggacagcgatggcatttgcacccataccccggatcacctgggagcacagagaggtgcacctggtgcagtttcatgagccagacatctacaactactcagccttgctgctgagcgaggacaaggacaccttgtacataggtgcccgggaggcggtcttcgctgtgaacgcactcaacatctccgagaagcagcatgaggtgtattggaaggtctcagaagacaaaaaagcaaaatgtgcagaaaaggggaaatcaaaacagacagagtgcctcaactacatccgggtgctgcagccactcagcgccacttccctttacgtgtgtgggaccaacgcattccagccggcctgtgaccacctgaacttaacatcctttaagtttctggggaaaaatgaagatggcaaaggaagatgtccctttgacccagcacacagctacacatccgtcatggttgatggagaactttattcggggacgtcgtataattttttgggaagtgaacccatcatctcccgaaattcttcccacagtcctctgaggacagaatatgcaatcccttggctgaacgagcctagtttcgtgtttgctgacgtgatccgaaaaagcccagacagccccgacggcgaggatgacagggtctacttcttcttcacggaggtgtctgtggagtatgagtttgtgttcagggtgctgatcccacggatagcaagagtgtgcaagggggaccagggcggcctgaggaccttgcagaagaaatggacctccttcctgaaagcccgactcatctgctcccggccagacagcggcttggtcttcaatgtgctgcgggatgtcttcgtgctcaggtccccgggcctgaaggtgcctgtgttctatgcactcttcaccccacagctgaacaacgtggggctgtcggcagtgtgcgcctacaacctgtccacagccgaggaggtcttctcccacgggaagtacatgcagagcaccacagtggagcagtcccacaccaagtgggtgcgctataatggcccggtacccaagccgcggcctggagcgtgcatcgacagcgaggcacgggccgccaactacaccagctccttgaatttgccagacaagacgctgcagttcgttaaagaccaccctttgatggatgactcggtaaccccaatagacaacaggcccaggttaatcaagaaagatgtgaactacacccagatcgtggtggaccggacccaggccctggatgggactgtctatgatgtcatgtttgtcagcacagaccggggagctctgcacaaagccatcagcctcgagcacgctgttcacatcatcgaggagacccagctcttccaggactttgagccagtccagaccctgctgctgtcttcaaagaagggcaacaggtttgtctatgctggctctaactcgggcgtggtccaggccccgctggccttctgtgggaagcacggcacctgcgaggactgtgtgctggcgcgggacccctactgcgcctggagcccgcccacagcgacctgcgtggctctgcaccagaccgagagccccagcaggggtttgattcaggagatgagcggcgatgcttctgtgtgcccggataaaagtaaaggaagttaccggcagcattttttcaagcacggtggcacagcggaactgaaatgctcccaaaaatccaacctggcccgggtcttttggaagttccagaatggcgtgttgaaggccgagagccccaagtacggtcttatgggcagaaaaaacttgctcatcttcaacttgtcagaaggagacagtggggtgtaccagtgcctgtcagaggagagggttaagaacaaaacggtcttccaagtggtcgccaagcacgtcctggaagtgaaggtggttccaaagcccgtagtggcccccaccttgtcagttgttcagacagaaggtagtaggattgccaccaaagtgttggtggcatccacccaagggtcttctcccccaaccccagccgtgcaggccacctcctccggggccatcacccttcctcccaagcctgcgcccaccggcacatcctgcgaaccaaagatcgtcatcaacacggtcccccagctccactcggagaaaaccatgtatcttaagtccagcgacaaccgcctcctcatgtccctcttcctcttcttctttgttctcttcctctgcctctttttctacaactgctataagggatacctgcccagacagtgcttgaaattccgctcggccctactaattgggaagaagaagcccaagtcagatttctgtgaccgtgagcagagcctgaaggagacgttagtagagccagggagcttctcccagcagaatggggagcaccccaagccagccctggacaccggctatgagaccgagcaagacaccatcaccagcaaagtccccacggatagggaggactcacagaggatcgacgacctttctgccagggacaagccctttgacgtcaagtgtgagctgaagttcgctgactcagacgcagatggagactgaggccggctgtgcatccccgctggtgcctcggctgcgacgtgtccaggcgtggagagttttgtgtttctcctgttcagtatccgagtctcgtgcagtgctgcgtaggttagcccgcatcgtgcagacaacctcagtcctcttgtctattttctcttgggttgagcctgtgacttggtttctctttgtccttttggaaaaatgacaagcattgcatcccagtcttgtgttccgaagtcagtcggagtacttgaagaaggcccacgggcggcacggagttcctgagccctttctgtagtgggggaaaggtggctggacctctgttggctgagaagagcatcccttcagcttcccctccccgtagcagccactaaaagattatttaattccagattggaaatgacattttagtttatcagattggtaacttatcgcctgttgtccagattggcacgaaccttttcttccacttaattatttttttaggattttgctttgattgtgtttatgtcatgggtcatttttttttagttacagaagcagttgtgttaatatttagaagaagatgtatatcttccagattttgttatatatttggcataaaatacggcttacgttgcttaagattctcagggataaacttccttttgctaaatgcattctttctgcttttagaaatgtagacataaacactccccggagcccactcaccttttttctttttctttttttttttttaactttattccttgagggaagcattgtttttggagagattttctttctgtacttcgttttacttttctttttttttaacttttactctctcgaagaagaggaccttcccacatccacgaggtgggttttgagcaagggaaggtagcctggatgagctgagtggagccaggctggcccagagctgagatgggagtgcggtacaatctggagcccacagctgtcggtcagaacctcctgtgagacagatggaaccttcacaagggcgcctttggttctctgaacatctcctttctcttcttgcttcaattgcttacccactgcctgcccagactttctatccagcctcactgagctgcccactactggaagggaactgggcctcggtggccggggccgcgagctgtgaccacagcaccctcaagcatacggcgctgttcctgccactgtcctgaagatgtgaatgggtggtacgatttcaacactggttaatttcacactccatctccccgctttgtaaatacccatcgggaagagactttttttccatggtgaagagcaataaactctggatgtttgtgcgcgtgtgtggacagtcttatcttccagcatgataggatttgaccattttggtgtaaacatttgtgttttataagatttaccttgtttttatttttctactttgaattgtatacatttggaaagtacccaaataaatgagaagcttctatccttga

SEQ ID NO: 271088 - DNA, 5684 bp, Artificial Sequence
  derived and/or modified sequence
attacgtggctcctgtgttaatagaatcatggagggatcagcgtcggctcctgagcgtctgcagtcctgcacgtggctctggttttgcgattctgattctcttgatctaattgttggtgctgctactgcaccccacgatccctgtcttgagactgatctcccacactgcaaaggagtgacagccatgctatggaaccttgccacaccacggtggacaccgttctgtttggctgaaaaccagccatccaaaaataaaggaagatgaacagctctttagtgcttgtaattatgccatatgtgtttctgctttttccttctttgcctcatgaagatgaattttaaaggatacatatctggagctaatagacaattagatagtacttttttggttcacagactctgctaactggaatggcttattgtgcaagaaagtacacctggtcgggtcctggggctcatctctagcaccagcaaagatttctgaagacgtctttctagaaatgactggaaagtttcaagaggcataagatacagcatttcttctgaggccctgaagaagtatcaagtgggctttgacattgcggtggtgagagcgacccctcctcacctggagaactgggaaatgtggattctcagggaccgcgctgttcacgagctccaggctgtgctgctggccctggtcctggggcgctgagccgcatctgcaatagcacacctgcccggccacctgctgccgtgagcctttgctgctgaagcccctggggtcgcctctacctgatgaggatgtgcacccccattagggggctgctcatggcccttgcagtgatgtttgggacagcgatggcatttgcacccataccccggatcacctgggagcacagagaggtgcacctggtgcagtttcatgagccagacatctacaactactcagccttgctgctgagcgaggacaaggacaccttgtacataggtgcccgggaggcggtcttcgctgtgaacgcactcaacatctccgagaagcagcatgaggtgtattggaaggtctcagaagacaaaaaagcaaaatgtgcagaaaaggggaaatcaaaacagacagagtgcctcaactacatccgggtgctgcagccactcagcgccacttccctttacgtgtgtgggaccaacgcattccagccggcctgtgaccacctgaacttaacatcctttaagtttctggggaaaaatgaagatggcaaaggaagatgtccctttgacccagcacacagctacacatccgtcatggttgatggagaactttattcggggacgtcgtataattttttgggaagtgaacccatcatctcccgaaattcttcccacagtcctctgaggacagaatatgcaatcccttggctgaacgagcctagtttcgtgtttgctgacgtgatccgaaaaagcccagacagccccgacggcgaggatgacagggtctacttcttcttcacggaggtgtctgtggagtatgagtttgtgttcagggtgctgatcccacggatagcaagagtgtgcaagggggaccagggcggcctgaggaccttgcagaagaaatggacctccttcctgaaagcccgactcatctgctcccggccagacagcggcttggtcttcaatgtgctgcgggatgtcttcgtgctcaggtccccgggcctgaaggtgcctgtgttctatgcactcttcaccccacagctgaacaacgtggggctgtcggcagtgtgcgcctacaacctgtccacagccgaggaggtcttctcccacgggaagtacatgcagagcaccacagtggagcagtcccacaccaagtgggtgcgctataatggcccggtacccaagccgcggcctggagcgtgcatcgacagcgaggcacgggccgccaactacaccagctccttgaatttgccagacaagacgctgcagttcgttaaagaccaccctttgatggatgactcggtaaccccaatagacaacaggcccaggttaatcaagaaagatgtgaactacacccagatcgtggtggaccggacccaggccctggatgggactgtctatgatgtcatgtttgtcagcacagaccggggagctctgcacaaagccatcagcctcgagcacgctgttcacatcatcgaggagacccagctcttccaggactttgagccagtccagaccctgctgctgtcttcaaagaagggcaacaggtttgtctatgctggctctaactcgggcgtggtccaggccccgctggccttctgtgggaagcacggcacctgcgaggactgtgtgctggcgcgggacccctactgcgcctggagcccgcccacagcgacctgcgtggctctgcaccagaccgagagccccagcaggggtttgattcaggagatgagcggcgatgcttctgtgtgcccggataaaagtaaaggaagttaccggcagcattttttcaagcacggtggcacagcggaactgaaatgctcccaaaaatccaacctggcccgggtcttttggaagttccagaatggcgtgttgaaggccgagagccccaagtacggtcttatgggcagaaaaaacttgctcatcttcaacttgtcagaaggagacagtggggtgtaccagtgcctgtcagaggagagggttaagaacaaaacggtcttccaagtggtcgccaagcacgtcctggaagtgaaggtggttccaaagcccgtagtggcccccaccttgtcagttgttcagacagaaggtagtaggattgccaccaaagtgttggtggcatccacccaagggtcttctcccccaaccccagccgtgcaggccacctcctccggggccatcacccttcctcccaagcctgcgcccaccggcacatcctgcgaaccaaagatcgtcatcaacacggtcccccagctccactcggagaaaaccatgtatcttaagtccagcgacaaccgcctcctcatgtccctcttcctcttcttctttgttctcttcctctgcctctttttctacaactgctataagggatacctgcccagacagtgcttgaaattccgctcggccctactaattgggaagaagaagcccaagtcagatttctgtgaccgtgagcagagcctgaaggagacgttagtagagccagggagcttctcccagcagaatggggagcaccccaagccagccctggacaccggctatgagaccgagcaagacaccatcaccagcaaagtccccacggatagggaggactcacagaggatcgacgacctttctgccagggacaagccctttgacgtcaagtgtgagctgaagttcgctgactcagacgcagatggagactgaggccggctgtgcatccccgctggtgcctcggctgcgacgtgtccaggcgtggagagttttgtgtttctcctgttcagtatccgagtctcgtgcagtgctgcgtaggttagcccgcatcgtgcagacaacctcagtcctcttgtctattttctcttgggttgagcctgtgacttggtttctctttgtccttttggaaaaatgacaagcattgcatcccagtcttgtgttccgaagtcagtcggagtacttgaagaaggcccacgggcggcacggagttcctgagccctttctgtagtgggggaaaggtggctggacctctgttggctgagaagagcatcccttcagcttcccctccccgtagcagccactaaaagattatttaattccagattggaaatgacattttagtttatcagattggtaacttatcgcctgttgtccagattggcacgaaccttttcttccacttaattatttttttaggattttgctttgattgtgtttatgtcatgggtcatttttttttagttacagaagcagttgtgttaatatttagaagaagatgtatatcttccagattttgttatatatttggcataaaatacggcttacgttgcttaagattctcagggataaacttccttttgctaaatgcattctttctgcttttagaaatgtagacataaacactccccggagcccactcaccttttttctttttctttttttttttttaactttattccttgagggaagcattgtttttggagagattttctttctgtacttcgttttacttttctttttttttaacttttactctctcgaagaagaggaccttcccacatccacgaggtgggttttgagcaagggaaggtagcctggatgagctgagtggagccaggctggcccagagctgagatgggagtgcggtacaatctggagcccacagctgtcggtcagaacctcctgtgagacagatggaaccttcacaagggcgcctttggttctctgaacatctcctttctcttcttgcttcaattgcttacccactgcctgcccagactttctatccagcctcactgagctgcccactactggaagggaactgggcctcggtggccggggccgcgagctgtgaccacagcaccctcaagcatacggcgctgttcctgccactgtcctgaagatgtgaatgggtggtacgatttcaacactggttaatttcacactccatctccccgctttgtaaatacccatcgggaagagactttttttccatggtgaagagcaataaactctggatgtttgtgcgcgtgtgtggacagtcttatcttccagcatgataggatttgaccattttggtgtaaacatttgtgttttataagatttaccttgtttttatttttctactttgaattgtatacatttggaaagtacccaaataaatgagaagcttctatccttgatttggggaagacattccttagcggaggctgtgcagcctcccgcccctgcatggcccaggcgggacagctgggctcgctcttttctgtccgtttcctgctgtgttttgccctctctggcctgtgacgtgctcctggcgacttcttcctcagtgccctctcttttctgtcctctctgtctcacagcctcgtctcctaagcccctccctcctcctggctcctcttccctgtcctgtctgggccatgtgggggacaggaggctttcctctccctggaccccctggccagcctcgggtgcggggcccgacagcagctcgagggtctccttgctgccgcccttcctgagtgaccaggcacagcacgtgcacgccctggggaacttctacctcttctgccaggccacaggtgagttgggccctctctgtcccctgtgccctgtccatctgtctcctcccacaggtggggggcgggcgggggcatcctccacatccctccacatgttcctttaccttccttatctgtcctggctgcgtccctcgggttgagccgtttcacgctttcattgtgggtccatcccgagggaaactgtagacagtgtgaagccacttctagtgtacaggggtcaaccagtgttttctgtaaagggctagatatttaggccttgtgggctgcaggctgtgtcacagccactaagctctgctgttgtattgtaaaaccagccatagtcaatacacaacgagtggtcagggctgtgtgccagtaaaactttatttataaaaatgcacggtgggccagatttgccccaaaggccccagtttcccaacctgtggtatataggattgcttctccctt

SEQ ID NO: 271089 - protein, 914 aa, Artificial Sequence
  derived and/or modified sequence
MGDSRDLCPHLDSIGEVTKEDLLLKSKGTCQSCGVTGPNLWACLQVACPYVGCGESFADHSTIHAQAKKHNLTVNLTTFRLWCYACEKEVFLEQRLAAPLLGSSSKFSEQDSPPPSHPLKAVPIAVADEGESESEDDDLKPRGLTGMKNLGNSCYMNAALQALSNCPPLTQFFLECGGLVRTDKKPALCKSYQKLVSEVWHKKRPSYVVPTSLSHGIKLVNPMFRGYAQQDTQEFLRCLMDQLHEELKEPVVATVALTEARDSDSSDTDEKREGDRSPSEDEFLSCDSSSDRGEGDGQGRGGGSSQAETELLIPDEAGRAISEKERMKDRKFSWGQQRTNSEQVDEDADVDTAMAALDDQPAEAQPPSPRSSSPCRTPEPDNDAHLRSSSRPCSPVHHHEGHAKLSSSPPRASPVRMAPSYVLKKAQVLSAGSRRRKEQRYRSVISDIFDGSILSLVQCLTCDRVSTTVETFQDLSLPIPGKEDLAKLHSAIYQNVPAKPGACGDSYAAQGWLAFIVEYIRRFVVSCTPSWFWGPVVTLEDCLAAFFAADELKGDNMYSCERCKKLRNGVKYCKVLRLPEILCIHLKRFRHEVMYSFKINSHVSFPLEGLDLRPFLAKECTSQITTYDLLSVICHHGTAGSGHYIAYCQNVINGQWYEFDDQYVTEVHETVVQNAEGYVLFYRKSSEEAMRERQQVVSLAAMREPSLLRFYVSREWLNKFNTFAEPGPITNQTFLCSHGGIPPHKYHYIDDLVVILPQNVWEHLYNRFGGGPAVNHLYVCSICQVEIEALAKRRRIEIDTFIKLNKAFQAEESPGVIYCISMQWFREWEAFVKGKDNEPPGPIDNSRIAQVKGSGHVQLKQGADYGQISEETWTYLNSLYGGGPEIAIRQSVAQPLGPENLHGEQKIEAETRAV

SEQ ID NO: 271090 - DNA, 4371 bp, Artificial Sequence
  derived and/or modified sequence
ggcggcgcagttgcgagtgcaggtgagttccgggccgccaccggctgcttctgtgggccgggcctctgagcattggcgaccccagcccggctccgggctgacagggcctggcttcgccaggctccttgccagaggcctccactcactccagacccctatagcccgtcgctgtcagctgtcaacaaaggatgcgaatgctggccgcttcctgtgggcttcgtgtcacccagaggtgagcccaggccaggatgggggactccagggacctttgccctcaccttgactccataggagaggtgaccaaagaggacttgctgctcaaatctaagggaacctgtcagtcgtgtggggtcaccggaccaaacctatgggcctgtctgcaggttgcctgcccctatgttggctgcggagaatcctttgctgaccacagcaccattcatgcacaggcaaaaaagcacaacttgaccgtgaacctgaccacgttccgactgtggtgttacgcctgtgagaaggaggtattcctggagcagcggctggcagcccctctgctgggctcctcttccaagttctctgaacaggactccccgccaccctcccaccctctgaaagctgttcctattgctgtggctgatgaaggagagtctgagtcagaggacgatgacctgaaacctcgaggcctcacgggcatgaagaacctcgggaactcctgctacatgaacgctgccctgcaggccctgtccaattgcccgccgctgactcagttcttcttggagtgtggcggcctggtgcgcacagataagaagccagccctgtgcaagagctaccagaagctggtctctgaggtctggcataagaaacggccaagctacgtggtccccaccagtctgtctcatgggatcaagttggtcaacccaatgttccgaggctatgcccagcaggacacccaagagttccttcgctgcctgatggaccagctgcacgaggagctcaaggagccggtggtggccacggtggcgctgacggaggctcgggactcagattcgagtgacacggatgagaaacgggagggtgaccggagcccatcagaagatgagttcttgtcctgtgactcgagcagtgaccggggtgagggtgacgggcaggggcgtggcgggggcagctcgcaggccgagacggagctgctgatcccagatgaggcgggccgagccatctctgagaaggagcggatgaaggaccgcaagttctcctggggccagcagcgtacaaactcggagcaagtggacgaggacgctgatgtggacactgccatggctgcccttgacgaccagcccgcggaggcccagcccccgtcaccacggtcctccagcccctgccggacgccagagccggacaatgatgctcacctacgcagctcctctcgcccctgcagccccgtccaccaccacgagggccatgccaagctgtctagcagcccccctcgtgcaagccccgtgaggatggcaccgtcgtacgtgctcaagaaagcccaggtattgagtgctggcagccggaggcggaaggagcagcgctaccgcagcgtcatctcagacatctttgacggctccattctcagccttgtgcagtgtctcacctgtgaccgggtatccaccacagtggaaacgttccaggacttatcactgcccattcctggaaaggaggacctggccaagctccattcagccatctaccagaatgtgccggccaagccaggcgcctgtggggacagctatgccgcccagggctggctggccttcattgtggagtacatccgacggtttgtggtatcctgtacccccagctggttttgggggcctgtcgtcaccctggaagactgccttgctgccttctttgccgctgatgagttaaagggtgacaacatgtacagctgtgagcggtgtaagaagctgcggaacggagtgaagtactgcaaagtcctgcggttgcccgagatcctgtgcattcacctaaagcgctttcggcacgaggtgatgtactcattcaagatcaacagccacgtctccttccccctcgaggggctcgacctgcgccccttccttgccaaggagtgcacatcccagatcaccacctacgacctcctctcggtcatctgccaccacggcacggcaggcagtgggcactacatcgcctactgccagaacgtgatcaatgggcagtggtacgagtttgatgaccagtacgtcacagaagtccacgagacggtggtgcagaacgccgagggctacgtactcttctacaggaagagcagcgaggaggccatgcgggagcgacagcaggtggtgtccctggccgccatgcgggagcccagcctgctgcggttctacgtgtcccgcgagtggctcaacaagttcaacaccttcgcggagccaggccccatcaccaaccagaccttcctctgctcccacggaggcatcccgccccacaaataccactacatcgacgacctggtggtcatcctgccccagaacgtctgggagcacctgtacaacagattcgggggtggccccgccgtgaaccacctgtacgtgtgctccatctgccaggtggagatcgaggcactggccaagcgcaggaggatcgagatcgacaccttcatcaagttgaacaaggccttccaggccgaggagtcgccgggcgtcatctactgcatcagcatgcagtggttccgggagtgggaggcgttcgtcaaggggaaggacaacgagccccccgggcccattgacaacagcaggattgcacaggtcaaaggaagcggccatgtccagctgaagcagggagctgactacgggcagatttcggaggagacctggacctacctgaacagcctgtatggaggtggccccgagattgccatccgccagagtgtggcgcagccgctgggcccagagaacctgcacggggagcagaagatcgaagccgagacgcgggccgtgtgatctgctgggctagtctccccatgtgccccaccccgcggaaggcgtgtttgtgcccagaagagaggccgggctgctgcagaaccccgccgtgtaaagaggcagaaaagttggtttggtttgcagtaacgctgcaactagaaaatatatgcacttcaggcttgttgaaacgaccaagactctgtgacgttaatttgggtctttgtcctggcagtgcctctgccagtcactgtcatcgttgtgtcccccacaactgtcctcttgctagctcggcccagctttgtccctggagcccgatgctacccctgtcagacagaggctgcggcctgggccagagtcagggagtagctgctgcttcacggcgtctccactgtgcgattggcccggagccccgaagactcggagggagctgctcagggccggtgagcgcagccagaagccctggccagtgaggagctcacaggtcctccctggtggtcccgccgcacctctgcatctcctgggcgtcaccaggaaggctctgaagtcccgggctgctctcagcacttctcctgcagactgaagactctggactcattgctgattggaacaccaggaggaggttggatttctgccagtgggggatgtttctggaggcagctggtcccccacaccgcgtcctgctgagcctgccccctggattggctgtaatttgcctcgaagttcagcagttcatcttcatgggaaatttgctgagcccccaccagggaaccggatgatgaaacagggatacctcacagcttggccatttgaggcaaaggcagcttcccgagctgatgctaaagaagacagactttcccttcctcccagcagcagcagtgcagagcccacctggagggatgtgggggctgtgcagggtgcagcgctcaggtggatcctgggaagcagcctctggatgctgagtggagggagccactgagcacagcaaggcaccaaagcccctggagaaaccgccagggcgaggtgcgaccatcatcaggatcaaagcagacggggcgtgggtggggaaggggctctgggaccagaccccccacactactgcgtctttgtttctatcagtctttgtagaagcaggtggtggtggaaattccagcaggtgggtcccgcagaggccctgaggcctcacttttcggatcttctgtcccagatcctgctccctccctgctgagcctggggttcccctggcattggccccagccttctgaaagccggcgctgcagccagaggccgcacgctgcactgtcgcgacgcagagaggcttctgtgcaggctgggatcgggccccatgtctgtgctgtctagtttgtgttcaaaatgtcagaataaacacagaataaatgtt

SEQ ID NO: 271091 - DNA, 2745 bp, Artificial Sequence
  derived and/or modified sequence
atgggtgattccagggatctgtgtccacacctcgattccattggcgaggttacgaaagaagacctccttctgaaatccaaaggaacttgtcagtcatgtggcgtcacaggtcccaacctttgggcttgcctgcaagtagcttgcccttatgttggatgtggcgagtcctttgccgaccatagcacgatccatgctcaagccaaaaagcacaatctgaccgtcaatttgactacattccggctttggtgttacgcctgcgagaaggaagtgtttcttgagcagcgtttagcggcgccattattggggtcctcaagcaagttctcagaacaagattcccctcctccctcccaccctctgaaggctgtcccgattgctgtggccgatgagggagagagcgaaagcgaagacgacgacctcaaaccacgaggactcacgggcatgaagaacctgggcaactcctgctacatgaacgccgccctgcaggccctgtctaactgtcccccactcacccagttcttcctcgagtgcggaggcctggtacggactgacaagaagcccgcactatgtaaaagctatcagaagctggtctcggaagtttggcataagaagaggccatcatatgtcgttcccacttctcttagccacggtatcaaattggtcaatcccatgttccgcgggtacgcccaacaggacacccaagagttcctcaggtgcctcatggaccagttacacgaagaactgaaggagccagtcgttgcaacagtcgcactgaccgaagctagggactcagattccagcgacaccgatgagaaaagagagggggacaggtccccatccgaggacgaatttctgagctgtgacagcagctcagatcggggagagggagatggccagggcagaggcggtggctctagtcaggcagagacagagctgcttatcccagacgaagcagggcgggccattagtgagaaggaacgcatgaaggataggaaattctcgtggggccagcagcgcacaaactccgagcaggttgacgaagacgcagatgtggacaccgctatggcagcattggatgaccagcctgccgaagcccagcccccgagccctcgaagttcttctccttgtagaacgcctgaaccagataacgatgcacacctccggtccagttctcgcccgtgttctcctgtgcaccatcacgagggtcacgctaagctttctagtagcccaccaagggcctcgcccgtgagaatggccccatcttatgtcctgaaaaaggcacaagtgctgtctgccggaagccggcgtcggaaagagcaacgctatagatcagttatttccgacatttttgacggctctatcttgtctctggttcagtgcctcacctgtgaccgcgtatcaacaacggtagaaactttccaggacctgtccctacctattccaggaaaggaagacctggcaaaactccactcagctatttaccaaaacgtccccgcaaaacccggcgcatgtggggattcctacgcggctcaaggatggctcgccttcatcgtggagtatattcggaggtttgtggtgagctgcacgcccagctggttctgggggcctgtggtcactcttgaagattgtttggctgccttcttcgccgcagatgagttgaaaggcgataatatgtacagctgtgagaggtgtaagaaattgcgcaacggggtcaaatactgtaaggtgttgagattacctgagatcctgtgcattcacttgaagaggtttcgccacgaggtaatgtattctttcaagatcaacagccacgtctctttcccactcgaaggattagacctcagaccctttctggcgaaggaatgtacaagccaaatcacgacctacgatcttctgtcagtcatctgccaccatggaaccgctgggtctggccactatattgcttactgccagaacgttatcaacggacagtggtatgaatttgatgaccaatatgtcacagaggtgcacgaaaccgtcgtgcagaacgccgagggttacgtcttgttctatagaaagagcagcgaggaagcaatgagggaacggcagcaagttgtgtccctggccgctatgagggagccctccttgctgaggttttacgtctctagggaatggttgaacaaattcaacacatttgcggaaccagggcctatcaccaaccagacatttctgtgctctcacggtggtattccacctcacaaatatcattacatcgatgaccttgtggtgatactacctcagaacgtttgggagcacctgtataacagatttggcggcggccctgccgtgaatcatctgtatgtgtgctccatctgccaggttgaaattgaggctctggcgaagcggagaaggatcgagatcgacacattcatcaaactgaataaggccttccaagccgaagagtcgccaggagtcatctactgtatcagcatgcagtggttcagagagtgggaggccttcgtgaagggcaaggataacgaaccccccgggccaatcgataacagtcggatcgcccaggtgaaggggtctggacatgtgcagctgaagcagggcgcagactacggacagatcagtgaggaaacatggacctatctgaacagcctgtacggtggcggccccgaaattgccatccggcagagtgtggctcagccacttggccccgagaacttgcatggggagcagaagatagaggctgaaactagggcggtttag

SEQ ID NO: 271092 - DNA, 2745 bp, Artificial Sequence
  derived and/or modified sequence
atgggcgactctcgagacctttgcccccacctggactccattggcgaggtgacgaaggaagatttgcttctaaaatccaagggaacctgccaaagttgcggtgtgaccgggcccaatttatgggcatgccttcaggtggcctgcccctacgtgggctgtggcgaatcattcgctgatcattccacaatacacgcacaggctaagaaacacaaccttaccgtcaacctgaccacatttcgcctgtggtgctatgcatgcgaaaaagaggtctttctggagcagaggctggcggctcccctgctgggctcttcctctaagtttagcgaacaggattccccccccccgtctcatcctctgaaagcagtccccatcgctgtggccgacgagggcgaatctgagtccgaagacgatgacctgaaaccccgagggcttaccggaatgaaaaacctcgggaactcttgttacatgaacgccgccctgcaggccttaagcaactgccctcccttaacccaattttttctggagtgcggtggattagtgcggacggacaagaagccagccctctgcaagagctatcagaaactggtcagtgaagtctggcataaaaagcggcctagttacgtggttcctacaagcctatcccacggcattaagctggtgaatcctatgttccggggctacgcccaacaggacactcaggagttccttaggtgtctgatggatcaactgcacgaggaacttaaagagccagtcgtggccacggttgccctgactgaagctcgcgacagcgatagctccgacacagatgaaaagcgggagggtgatcgtagtccgagcgaggatgagttcttgagctgcgattcatcaagcgaccgcggcgaaggagacggacaagggcgagggggtggctcatctcaagccgagacagaactcctaatccccgacgaagcgggacgggcgatttccgaaaaagagcgcatgaaggataggaaattcagctggggtcaacagagaacaaactctgagcaggttgacgaggatgcagatgtggacacggctatggccgctctggatgatcagcccgcagaggcccagcctccctcacctcggtcatcttctccatgtcggacgcctgaaccagataatgatgcacaccttagaagctcatctcgcccatgctcccccgtccatcatcatgaaggacacgccaaattgagttccagcccacccagggcctctcctgtacgcatggccccctcttacgttctgaaaaaggcccaggtcctttcagccggaagccgcaggaggaaagaacagaggtataggtcggtcattagtgacattttcgacgggtcaatcctgtccctggtacagtgcctgacctgcgacagggtgtccaccacggtcgagactttccaagacctctcactccccatccccggaaaagaagatctggcaaagctgcactctgccatttatcagaatgtgccggcaaagccaggggcctgcggagactcatacgctgcccaaggttggctagcctttattgtcgaatacatccgaaggtttgttgtctcatgcacaccctcttggttctggggtcccgtggtgaccctggaggattgtctggccgcttttttcgctgccgatgagcttaagggggataatatgtactcatgtgagcgatgtaaaaaacttcggaatggcgtgaagtattgcaaagtactcaggctccccgagatcctgtgtattcacctaaaaagattcagacatgaggtgatgtacagtttcaagatcaattcacacgtttcgttcccactagaaggtctggatctccgtcccttcttggccaaggaatgcactagccaaattacaacctacgacttgctgtctgtgatctgccaccacggaacggcaggatccggccattatattgcctactgccagaacgtaattaacggacagtggtacgagtttgacgaccagtatgtcactgaagtgcacgagaccgtcgtgcaaaatgccgagggttacgtgctgttttaccgcaagtcttcagaggaggccatgcgagaacgacagcaggtggtaagcctggcagctatgagagagccctctctgcttcgattctatgtgtccagggagtggttaaataagttcaatacgtttgccgagcccgggccaataaccaaccagactttcctgtgtagccacgggggcattcctccccacaaataccactatatagatgatcttgtggtcatccttccacagaatgtatgggaacatttgtacaacagatttggggggggtccagctgtgaatcacttatacgtgtgcagtatttgtcaggtcgagattgaagccttggcgaagcggaggcgtatagagattgataccttcatcaaactgaataaggcattccaggcggaggaaagccctggggtcatttactgcatctctatgcaatggttccgtgagtgggaagcctttgtaaaaggaaaggacaacgagccgcctgggcctatcgacaattccaggatcgcgcaggtcaagggcagcgggcatgtgcagcttaaacagggcgccgactatggacagatcagtgaagaaacttggacttacctaaatagtctctatggcggcggacccgagattgcaattagacagagtgttgctcagccgctgggcccagaaaatctgcacggcgaacagaaaatagaggcggaaacacgggcagtttag

SEQ ID NO: 271093 - DNA, 2745 bp, Artificial Sequence
  derived and/or modified sequence
atgggtgacagtagagacctttgtccgcacctggacagcataggcgaggttactaaggaagatctgctcctcaaatcaaagggcacatgtcagtcctgtggtgtgacaggtccaaacctctgggcatgcttacaagttgcttgcccatatgtcggctgcggcgaatctttcgctgatcacagtactatccacgcacaggcaaaaaagcataacctgaccgttaacttgacgacatttcggctgtggtgttacgcctgtgagaaagaagtttttctggagcagagactggctgcgccccttctgggcagctcctccaaatttagcgagcaggactccccaccaccatcccaccctttgaaggccgtgccgattgctgtagcggacgagggagagtccgaaagcgaggacgatgatttaaagcctcgtggtcttaccggcatgaagaatctgggcaattcatgttacatgaacgcggccttgcaagcactctctaactgtcctccactgacccagttcttcttggaatgtgggggactcgtccggactgacaaaaagcctgccctttgcaagagctaccaaaaactggtgtctgaggtgtggcataagaagcgaccgtcctatgtagttccaacgagcctcagccacgggatcaagctcgttaatcccatgttccgaggatatgctcagcaggacacccaagaatttttaagatgtctgatggaccagctgcatgaagagctgaaggagccagtcgtggccactgtcgccttaacggaggctcgggactccgactcatctgacacagacgaaaagagggagggcgaccgatcaccgagcgaggacgagtttctgtcctgcgatagtagcagtgacaggggggaaggggatggacaaggccgggggggcgggagttctcaggcagagactgaactgttgatacccgatgaagcaggaagggcgatctccgaaaaagagcggatgaaagacagaaagtttagttgggggcagcagaggactaactcggaacaggttgatgaagacgccgatgtggatacggctatggctgccctggatgaccaacctgccgaagcacaaccaccatcgcccagatcttcctctccttgccggactcctgagccagataacgatgcccaccttcgaagctcctcacggccttgtagcccagtgcaccaccatgagggccacgccaagctgagttcatcccctcctagagcaagcccggtgcggatggctccatcttacgtgctgaagaaagcgcaggtgctgtctgccggatcacgaaggcgcaaggagcagaggtatcgaagcgtgatatccgacatttttgacggaagcatccttagtttagtccagtgtttgacatgcgatagggtctcaactacagtggagacgtttcaggacttatcactgcctattccgggaaaagaagatctggctaagctgcactctgccatctatcagaatgtcccagctaagccgggcgcgtgtggcgattcctacgcagcgcagggctggctcgccttcattgtcgagtatattagaagattcgtagttagttgcactccttcatggttctggggacccgttgtgacccttgaagactgcctggccgcattttttgcagccgacgaacttaagggcgacaacatgtactcctgtgaacggtgcaaaaagctgagaaacggtgtgaaatactgtaaggtgctgcggctacccgaaattctttgcatacacctcaaaaggttccgtcatgaagtgatgtactcattcaagattaacagccacgtcagtttccctttggagggtctggatcttagaccatttctggccaaagaatgcacctctcaaattaccacttacgacctgctatccgtcatctgccaccacgggacggctgggtctggtcactatattgcatactgccagaatgtcattaacggacaatggtacgagtttgatgaccaatacgttaccgaagtccatgaaacggttgtccaaaacgccgaggggtacgtgctgttctacaggaaatcatccgaagaggcaatgcgggaacgtcagcaggtggtcagtcttgctgctatgcgagagccatctcttttgagattttacgttagccgagagtggctcaataaattcaatacgtttgccgaacctggccctataaccaaccagaccttcctctgctcccacggggggatacctccccataaataccattacatcgacgaccttgtcgtgattctacctcaaaacgtctgggaacacctgtacaatcgcttcggcggcgggccggccgtcaatcatctgtacgtctgtagtatctgccaggtggaaatcgaggccctcgcgaaacgcaggagaatcgaaatcgacaccttcatcaaacttaataaagcatttcaagcagaggagtcccctggagtcatatactgtatcagcatgcagtggtttcgagaatgggaagcattcgttaaggggaaggataacgagcctcctgggcctatcgataatagccggatcgcccaggtcaaaggttccgggcacgtccaactgaagcagggcgccgactatgggcaaatctccgaagaaacatggacctacctaaacagtctctatggcggcggcccagagatcgccatccggcagtcagtggcacagcccctcggcccagaaaatttgcacggggaacagaaaatcgaggccgagacacgcgccgtgtag

SEQ ID NO: 271094 - DNA, 4305 bp, Artificial Sequence
  derived and/or modified sequence
ctcagagggggcgcgcttgactgacaggcggcggcggcgcagttgcgagtgcaggctccttgccagaggcctccactcactccagacccctatagcccgtcgctgtcagctgtcaacaaaggatgcgaatgctggccgcttcctgtgggcttcgtgtcacccagaggtgagcccaggccaggatgggggactccagggacctttgccctcaccttgactccataggagaggtgaccaaagaggacttgctgctcaaatctaagggaacctgtcagtcgtgtggggtcaccggaccaaacctatgggcctgtctgcaggttgcctgcccctatgttggctgcggagaatcctttgctgaccacagcaccattcatgcacaggcaaaaaagcacaacttgaccgtgaacctgaccacgttccgactgtggtgttacgcctgtgagaaggaggtattcctggagcagcggctggcagcccctctgctgggctcctcttccaagttctctgaacaggactccccgccaccctcccaccctctgaaagctgttcctattgctgtggctgatgaaggagagtctgagtcagaggacgatgacctgaaacctcgaggcctcacgggcatgaagaacctcgggaactcctgctacatgaacgctgccctgcaggccctgtccaattgcccgccgctgactcagttcttcttggagtgtggcggcctggtgcgcacagataagaagccagccctgtgcaagagctaccagaagctggtctctgaggtctggcataagaaacggccaagctacgtggtccccaccagtctgtctcatgggatcaagttggtcaacccaatgttccgaggctatgcccagcaggacacccaagagttccttcgctgcctgatggaccagctgcacgaggagctcaaggagccggtggtggccacggtggcgctgacggaggctcgggactcagattcgagtgacacggatgagaaacgggagggtgaccggagcccatcagaagatgagttcttgtcctgtgactcgagcagtgaccggggtgagggtgacgggcaggggcgtggcgggggcagctcgcaggccgagacggagctgctgatcccagatgaggcgggccgagccatctctgagaaggagcggatgaaggaccgcaagttctcctggggccagcagcgtacaaactcggagcaagtggacgaggacgctgatgtggacactgccatggctgcccttgacgaccagcccgcggaggcccagcccccgtcaccacggtcctccagcccctgccggacgccagagccggacaatgatgctcacctacgcagctcctctcgcccctgcagccccgtccaccaccacgagggccatgccaagctgtctagcagcccccctcgtgcaagccccgtgaggatggcaccgtcgtacgtgctcaagaaagcccaggtattgagtgctggcagccggaggcggaaggagcagcgctaccgcagcgtcatctcagacatctttgacggctccattctcagccttgtgcagtgtctcacctgtgaccgggtatccaccacagtggaaacgttccaggacttatcactgcccattcctggaaaggaggacctggccaagctccattcagccatctaccagaatgtgccggccaagccaggcgcctgtggggacagctatgccgcccagggctggctggccttcattgtggagtacatccgacggtttgtggtatcctgtacccccagctggttttgggggcctgtcgtcaccctggaagactgccttgctgccttctttgccgctgatgagttaaagggtgacaacatgtacagctgtgagcggtgtaagaagctgcggaacggagtgaagtactgcaaagtcctgcggttgcccgagatcctgtgcattcacctaaagcgctttcggcacgaggtgatgtactcattcaagatcaacagccacgtctccttccccctcgaggggctcgacctgcgccccttccttgccaaggagtgcacatcccagatcaccacctacgacctcctctcggtcatctgccaccacggcacggcaggcagtgggcactacatcgcctactgccagaacgtgatcaatgggcagtggtacgagtttgatgaccagtacgtcacagaagtccacgagacggtggtgcagaacgccgagggctacgtactcttctacaggaagagcagcgaggaggccatgcgggagcgacagcaggtggtgtccctggccgccatgcgggagcccagcctgctgcggttctacgtgtcccgcgagtggctcaacaagttcaacaccttcgcggagccaggccccatcaccaaccagaccttcctctgctcccacggaggcatcccgccccacaaataccactacatcgacgacctggtggtcatcctgccccagaacgtctgggagcacctgtacaacagattcgggggtggccccgccgtgaaccacctgtacgtgtgctccatctgccaggtggagatcgaggcactggccaagcgcaggaggatcgagatcgacaccttcatcaagttgaacaaggccttccaggccgaggagtcgccgggcgtcatctactgcatcagcatgcagtggttccgggagtgggaggcgttcgtcaaggggaaggacaacgagccccccgggcccattgacaacagcaggattgcacaggtcaaaggaagcggccatgtccagctgaagcagggagctgactacgggcagatttcggaggagacctggacctacctgaacagcctgtatggaggtggccccgagattgccatccgccagagtgtggcgcagccgctgggcccagagaacctgcacggggagcagaagatcgaagccgagacgcgggccgtgtgatctgctgggctagtctccccatgtgccccaccccgcggaaggcgtgtttgtgcccagaagagaggccgggctgctgcagaaccccgccgtgtaaagaggcagaaaagttggtttggtttgcagtaacgctgcaactagaaaatatatgcacttcaggcttgttgaaacgaccaagactctgtgacgttaatttgggtctttgtcctggcagtgcctctgccagtcactgtcatcgttgtgtcccccacaactgtcctcttgctagctcggcccagctttgtccctggagcccgatgctacccctgtcagacagaggctgcggcctgggccagagtcagggagtagctgctgcttcacggcgtctccactgtgcgattggcccggagccccgaagactcggagggagctgctcagggccggtgagcgcagccagaagccctggccagtgaggagctcacaggtcctccctggtggtcccgccgcacctctgcatctcctgggcgtcaccaggaaggctctgaagtcccgggctgctctcagcacttctcctgcagactgaagactctggactcattgctgattggaacaccaggaggaggttggatttctgccagtgggggatgtttctggaggcagctggtcccccacaccgcgtcctgctgagcctgccccctggattggctgtaatttgcctcgaagttcagcagttcatcttcatgggaaatttgctgagcccccaccagggaaccggatgatgaaacagggatacctcacagcttggccatttgaggcaaaggcagcttcccgagctgatgctaaagaagacagactttcccttcctcccagcagcagcagtgcagagcccacctggagggatgtgggggctgtgcagggtgcagcgctcaggtggatcctgggaagcagcctctggatgctgagtggagggagccactgagcacagcaaggcaccaaagcccctggagaaaccgccagggcgaggtgcgaccatcatcaggatcaaagcagacggggcgtgggtggggaaggggctctgggaccagaccccccacactactgcgtctttgtttctatcagtctttgtagaagcaggtggtggtggaaattccagcaggtgggtcccgcagaggccctgaggcctcacttttcggatcttctgtcccagatcctgctccctccctgctgagcctggggttcccctggcattggccccagccttctgaaagccggcgctgcagccagaggccgcacgctgcactgtcgcgacgcagagaggcttctgtgcaggctgggatcgggccccatgtctgtgctgtctagtttgtgttcaaaatgtcagaataaacacagaataaatgtt

SEQ ID NO: 271095 - DNA, 2745 bp, Artificial Sequence
  derived and/or modified sequence
atgggagacagccgggacctgtgcccccacctggacagcatcggggaggtgaccaaggaggacctgctgctgaagagcaagggcacctgccagagctgtggggtgacaggccccaacctgtgggcctgcctgcaggtggcctgcccctacgtgggctgtggggagagctttgctgaccacagcaccatccacgcccaggccaagaagcacaacctgactgtgaacctgaccaccttccggctgtggtgctacgcctgtgagaaggaggtgttcctggagcagaggctggccgcccccctgctgggcagcagcagcaagttcagcgagcaggacagccccccacccagccaccccctgaaggctgtgcccatcgctgtggctgatgaaggagagagcgagagtgaagatgatgacctgaagccccggggcctgaccggcatgaagaacctgggcaacagctgctacatgaatgctgccctgcaggccctgagcaactgcccccccctgacccagttcttcctggagtgtggcggcctggtgaggacagacaagaagccagccctgtgcaagagctaccagaagctggtgtctgaggtgtggcacaagaagaggcccagctatgtggtgcccaccagcctgagccacggcatcaagctggtgaaccccatgttccggggctacgcccagcaggacacccaggagttcctgcgctgcctgatggaccagctgcacgaggagctgaaggagcctgtggtggccaccgtggccctgacagaggcccgggacagcgacagcagtgacacagatgagaagcgggagggggacaggagccccagtgaagatgagttcctgagctgtgacagcagcagtgacagaggagaaggagatggccagggccggggcggcggcagcagccaggccgagacagagctgctgatcccagatgaagctggccgggccatcagcgagaaggagaggatgaaggacaggaagttctcctggggccagcagaggaccaacagcgagcaggtggatgaagatgctgatgtggacacagccatggccgccctggatgaccagcctgctgaggcccagccccccagccccaggagcagcagcccctgcaggaccccagagccagacaatgatgcccacctgcggagcagcagccggccctgcagccctgtgcaccaccacgagggccacgccaagctgagcagcagccccccccgggccagccctgtgaggatggcccccagctatgtgctgaagaaggcccaggtgctgtctgctggcagcagaagaaggaaggagcagcgctacagaagtgtcatcagtgacatctttgatggcagcatcctgagcctggtgcagtgcctgacctgtgacagagtgtccaccaccgtggagaccttccaggacctgagcctgcccatccctgggaaggaggacctggccaagctgcacagcgccatctaccagaatgtgcctgccaagccaggggcctgtggggacagctatgctgcccagggctggctggccttcatcgtggagtacatcagaagatttgtggtgtcctgcacccccagctggttctggggccctgtggtgaccctggaggactgcctggccgccttctttgctgctgatgagctgaagggggacaacatgtacagctgtgagcgctgcaagaagctgagaaatggagtgaagtactgcaaggtgctgcggctgcctgagatcctgtgcatccacctgaagcgcttcagacatgaggtgatgtacagcttcaagatcaacagccacgtgtccttccccctggagggcctggacctgcggcccttcctggccaaggaatgtaccagccagatcaccacctatgacctgctgagcgtcatctgccaccacggcacagctggcagcggccactacatcgcctactgccagaatgtcatcaatggccagtggtatgaatttgatgaccagtatgtgacagaggtgcatgagaccgtggtgcagaatgctgagggctacgtgctcttctacaggaagagcagcgaggaggccatgagggagcggcagcaggtggtgtccctggccgccatgagggagcccagcctgctgcgcttctacgtgtcccgggagtggctgaacaagttcaacacctttgctgagcccggccccatcaccaaccagaccttcctgtgcagccacggcggcatccccccccacaagtaccactacattgatgacctggtggtgatcctgccccagaatgtgtgggagcacctgtacaacagatttggaggcggccctgctgtgaaccacctgtatgtgtgcagcatctgccaggtggagattgaggccctggccaagagaagacgcatcgagattgacaccttcatcaagctgaacaaggccttccaggccgaggagagccctggggtcatctactgcatctccatgcagtggttccgggagtgggaggcctttgtgaagggcaaggacaatgaacctcctggccccatcgacaacagccgcatcgcccaggtgaagggcagcggccacgtgcagctgaagcagggcgctgactatggccagatcagcgaggagacctggacctacctgaacagcctgtatggaggcggccctgagatcgccatccggcagagcgtggcccagcccctgggccctgagaacctgcacggggagcagaagattgaagctgagaccagggctgtgtag

SEQ ID NO: 271096 - DNA, 2745 bp, Artificial Sequence
  derived and/or modified sequence
atgggcgacagccgggacctgtgcccccacctggacagcatcggcgaggtgacgaaggaggatctcttactgaaaagcaaaggaacgtgtcagagttgcggcgtgactggccctaacctgtgggcatgtctgcaggtcgcctgcccatatgtcggctgtggcgaaagtttcgccgaccattcaaccatacacgcgcaagctaaaaagcacaacctaaccgtgaatctgacaaccttcaggctgtggtgttacgcgtgtgagaaggaggtgttcttggagcagcgtctggcagctccccttctgggtagttccagtaaattcagcgagcaagacagtccacctcctagtcaccctctcaaagccgtccccatcgccgttgcggacgagggtgaatcggagagcgaggacgatgatctaaagcctcgtggcctcactggtatgaaaaacctcggcaactcatgctatatgaacgctgcattacaggccctgtccaactgtcccccactgactcagttcttcctggaatgcggcggcttggtgcgtacagataagaaacctgccttgtgtaagagctatcagaagttggtcagcgaagtttggcacaagaaacggcctagctacgtggttccaacatctttgagtcatggcattaaattagtgaatcccatgtttagggggtatgctcaacaagatactcaggaatttctgcgttgtctgatggaccagttacacgaagagctcaaggaacctgtcgtcgccaccgtagctttgaccgaggcacgtgattccgactcttccgataccgacgaaaagagggaaggtgatcggtcaccatcagaggatgagttcctgagctgtgactcctcatccgacaggggcgagggagacggacaggggagaggcggagggtccagtcaggccgagaccgaattactcatacccgatgaggctgggagggccataagcgaaaaggaacgaatgaaagataggaagttttcatggggacagcaacggaccaatagcgaacaggtggacgaagatgccgacgttgacactgcgatggcagcgctggacgaccagcctgcggaggcgcaacctccttcccctaggtcttctagcccctgccgaactcctgagcctgataacgacgcccacctgaggtcgtcatcccggccctgcagccccgtacatcatcacgaaggacatgccaaactgtcatcttctccacccagggcgtcaccagtgcggatggcaccaagctacgtgttgaaaaaggcccaggttttgagtgccggatcccgccggaggaaggaacagcggtacagatccgtgatatctgacatctttgatggcagtatcctctctttagtgcagtgcctgacatgtgatagagtttccaccactgtcgaaaccttccaggatttgtcacttcctatcccagggaaagaagaccttgccaagctgcacagtgcaatttaccaaaacgtcccagctaaacctggagcatgtggtgactcctacgcggcccagggctggctggccttcatcgtagagtatatcaggcgtttcgtcgtctcttgtacccccagctggttttggggcccagttgttaccctggaagactgtctagctgccttttttgctgccgacgaacttaagggagataacatgtattcttgcgaacggtgtaaaaagctgcggaacggcgtgaagtactgtaaggttctgagactgcctgaaatcttgtgtattcacctgaaaaggtttagacatgaagtgatgtactccttcaagatcaactcccatgtgagcttccccctcgaaggtttagacctgaggcccttcctcgcaaaggaatgcactagccagatcactacgtacgaccttctgtctgttatttgtcaccatggcacggctggatcgggccactacatagcctattgccagaatgttatcaatggacagtggtacgaattcgatgatcagtatgtgacagaggtgcatgagacagtggtgcaaaatgcagaaggctacgtgcttttctatcgaaagagcagcgaggaggccatgagggagaggcaacaggtggttagtcttgccgccatgcgggagccctcgttactgagattctacgtgtctcgcgaatggttgaacaagtttaacacattcgccgagccagggcccattactaatcagaccttcctgtgcagccacggaggaattcccccccataagtaccactatattgacgaccttgtggttatcctaccacaaaacgtatgggagcacttgtataatcgattcggtggagggcctgcagtgaatcatctatatgtctgctccatttgtcaggttgagatcgaggcccttgctaagcgccgccgaatcgagatagacacctttattaaactcaacaaggcctttcaggctgaggagtctcccggtgtcatttattgcatttctatgcaatggtttagggaatgggaagctttcgtgaagggaaaggacaatgagccgcccgggccaattgacaattctcgcatagcgcaggtgaagggcagcggccacgttcagctgaagcagggcgctgattatggccagattagcgaagaaacgtggacataccttaattcgctgtatggaggtggccccgaaattgctattcgtcagtctgtggcccaacccctgggcccagagaacctgcacggcgagcagaagatagaggccgagaccagggcggtctag

SEQ ID NO: 271097 - DNA, 2745 bp, Artificial Sequence
  derived and/or modified sequence
atgggcgacagccgggacctgtgcccccacctggacagcatcggcgaggtgacaaaagaggatctgctgttaaagtccaaaggtacttgccagagttgtggggtcacggggccaaatctgtgggcatgtttgcaagtggcgtgcccctacgtaggatgcggcgaaagtttcgccgaccattctaccattcatgcgcaagccaagaagcacaatctcaccgtgaatctgaccactttccgactctggtgttatgcatgcgaaaaagaggtgtttttggaacagaggctggcggcacccttactggggtcttcgagcaaattttcagagcaggatagcccccctccgtcacaccctttgaaagccgtgcccatcgccgtcgcagatgaaggagagtccgagtctgaagacgacgatctaaaacccagaggcctgaccggaatgaagaacctggggaactcatgctacatgaacgccgcgctgcaggcactgtccaactgtccccctttaactcagtttttccttgaatgcgggggattggtgcggacagacaagaaacctgctttgtgtaagagttatcaaaagctcgtgtccgaggtgtggcataaaaaacggccttcctacgttgtgccgacaagcctctcacacggcatcaaactcgtcaatcctatgtttaggggatatgcacaacaggacacacaggagtttcttcggtgcctcatggaccagctccatgaggaactaaaagagcctgtcgtcgcaaccgtcgcgttgaccgaggccagggatagcgactcttctgatacagacgaaaaacgcgaaggcgaccggagtccttctgaagacgaattcttatcttgtgatagctcctccgacagaggtgaaggggatggacagggcagaggcggaggtagttctcaggccgagacggagttactgattccagacgaggccggcagagcgatctccgagaaagagcggatgaaggaccgcaagttttcctggggacagcagcggaccaactcggaacaggtggatgaagatgctgatgtcgacaccgcgatggccgctttggatgaccagccagccgaagcccaaccgcctagtccccgatccagcagcccgtgccggacacctgagcctgacaatgatgcacatctgaggtcatccagccggccttgttcgcctgtccatcaccacgagggacatgccaaactgtcttcatctccgcctcgtgccagcccagtaaggatggcccctagctacgtgttaaaaaaagcacaggtcctgtctgccggatctaggagaaggaaagaacagaggtatagatctgttattagcgacatctttgacggatcaatactgtcactggtacagtgtttgacttgcgaccgggtctcaacaaccgtggaaacttttcaggacttgagtttaccaatccccggaaaagaggatcttgccaaattacatagcgccatttatcaaaatgtgcccgcaaagcctggcgcttgcggggacagttacgccgcgcagggatggctggcctttattgttgagtatattagacggttcgtcgtgagctgcacaccgagttggttctggggacctgtcgtcaccctggaggactgtctggcagcatttttcgctgccgatgagcttaagggagacaacatgtattcatgcgagagatgcaagaagctgaggaacggggtcaaatattgtaaagtgctcagactgccggagatcctgtgtatacatctcaaacggtttagacacgaggtcatgtacagcttcaagattaattcccatgtctcattcccactggaggggctggacctgcgacccttcctcgctaaagagtgcaccagccagatcactacatacgatctgctgtcagttatttgccaccacggtaccgcgggcagcggtcactacattgcctattgtcagaacgtgataaacggccagtggtatgaatttgacgatcagtacgtcaccgaggtgcatgagactgtggttcaaaacgcagaaggttacgtgttattctataggaagtcttcagaggaagccatgcgggagcgccagcaagtcgtgtccttagcagccatgcgcgaaccctccttgcttagattctatgtgtcccgcgagtggctcaacaagttcaacaccttcgccgaacccggaccaattactaaccagacctttttgtgcagccatggtggaattcccccccacaaatatcactacatcgacgacctggtggtgattctgccgcagaacgtgtgggagcacctgtataacaggtttggaggcggccctgccgttaaccacctgtacgtgtgcagcatttgccaggtcgaaattgaagccttggcaaagcgccgaagaatcgaaatagacacctttatcaagctgaataaggcctttcaggccgaagagtcaccgggtgttatctattgcatttcgatgcagtggttcagggagtgggaggccttcgtaaaaggtaaagacaacgaacctccgggccccatagacaacagtagaatcgcacaagtgaagggctccggccatgtacagttaaagcagggagccgattacggccagatctcagaggagacatggacttacttgaactctctttacggcgggggacctgagattgccatcagacagtctgttgctcagcctctggggcccgaaaacttacatggcgagcaaaagattgaagcagagactcgcgcagtctag

SEQ ID NO: 271098 - DNA, 2745 bp, Artificial Sequence
  derived and/or modified sequence
atgggcgacagccgggacctgtgcccccacctggacagcatcggcgaagtcaccaaggaggatctgcttctcaagagtaaaggtacctgtcagtcttgtggcgttaccggaccaaatctctgggcatgtctgcaagtggcgtgtccttacgtcggctgtggagaatcattcgccgaccacagcacgatccatgctcaggccaagaaacacaacctcactgttaatctgacgacgttcagactatggtgctatgcatgcgagaaggaggtgtttttggagcaaagattggctgctcccttgctggggtctagttcgaaattcagtgagcaggattctccccccccttcccaccctctaaaggccgtcccaatcgccgtcgccgacgagggggagtccgaatccgaggacgacgatcttaaaccaagaggcctgacaggcatgaagaatttagggaacagctgctacatgaatgctgctcttcaggccttatccaactgccctcctctcacacaatttttcctggaatgtggggggctagtgcggaccgacaagaaacctgctctgtgtaagagctaccagaaactcgtgtctgaggtctggcataagaagcgtccgtcatatgtcgtgccaacttctttatctcatgggataaagctcgtaaatcccatgttcaggggctacgcccaacaggacactcaagaattccttcggtgcttgatggatcagcttcatgaggaactaaaagaacccgtcgtggcaactgtggcactcactgaggcaagagattccgactcttccgatactgacgagaagcgagagggtgacaggtcaccttccgaagacgagttcctgagctgtgactcctcctctgatcggggcgaaggtgatggacagggcaggggaggtggtagcagccaggccgaaacagaactcctgattcctgacgaagcagggcgggccatctccgagaaagaacgaatgaaggatcgcaagtttagctggggccaacagcgcacaaactccgagcaagttgacgaggacgccgatgtcgacacagctatggctgctctggatgaccaacccgccgaagcccagcctccttcgccccgatcttcgtcaccatgtaggacccccgaaccagataatgacgcacacttgcgttccagctcacggccatgtagtccggtccatcaccatgaggggcatgccaaattgtccagctccccaccaagggcctctcctgttaggatggccccaagctatgtgttgaaaaaggcccaggtgctgagcgccggctcaaggcgtagaaaggaacagagataccgttctgtaatctccgacattttcgatgggtccatcctgtcgctggtacaatgtctcacatgtgatcgcgtttccaccacagtggagacgttccaggaccttagcctgccgataccgggcaaagaagatctggccaaacttcatagcgccatttaccagaatgtaccggcaaagccaggcgcttgcggggacagttacgcagcacagggttggctcgcatttatcgtagaatacatccgacgctttgtcgtttcatgcaccccctcttggttttggggtccagttgtcacactggaagactgcctagctgcattcttcgccgccgacgaattgaagggagataatatgtatagctgtgagagatgcaaaaagctcaggaatggcgtgaagtactgtaaagtgctccggctgccagaaatcttgtgcatccaccttaaacgtttcagacacgaggttatgtatagctttaaaatcaatagccatgtttccttccctttggagggtctagacctgagaccctttcttgccaaagagtgtacctcgcagattactacctatgatttactttcagtgatctgccatcatgggacagcagggtcaggtcactatatagcttactgccaaaatgtgattaacgggcaatggtacgaatttgacgaccagtatgttaccgaggtgcacgagaccgtggtgcagaatgctgagggttatgttctgttctatcgcaagtcctctgaagaagccatgcgcgaaagacagcaggtcgtgtcactcgccgcgatgagagagccttccctgctgcggttctacgtctcgagagagtggctgaacaagttcaatacctttgcagaaccgggtccgatcaccaaccaaactttcttgtgttcccacggcggcattcccccccacaagtaccattacatcgatgatctggtcgtgatcctgccccagaatgtctgggagcacctttataaccggttcggaggcgggccagccgtcaaccacttgtacgtatgttcaatctgccaggtcgaaatcgaagcacttgctaaacgtcgtcggatagagattgataccttcattaaactgaataaggccttccaggctgaggagtctcccggcgtgatatactgcatcagcatgcagtggtttcgcgagtgggaagccttcgtgaaaggtaaggacaacgaacccccgggtcccatagataatagcaggattgctcaggttaaaggatctggtcatgttcagctcaagcagggtgcagactacggccaaatatccgaggagacttggacatatcttaacagcctgtatgggggcggccccgaaatcgccataaggcagagcgtggcacaacccttaggtccagagaatctgcatggggaacaaaaaattgaggcagaaacgcgcgcagtgtag

SEQ ID NO: 271099 - DNA, 2745 bp, Artificial Sequence
  derived and/or modified sequence
atgggcgatagtcgtgacctgtgcccccatctcgactccatcggtgaagtgactaaagaggacctgttacttaagagtaaagggacctgccagtcttgtggcgtgactggacccaacttgtgggcctgcctgcaagtggcatgcccttatgtcggctgcggagaaagttttgcagaccactctaccattcacgcgcaggcgaagaagcataatttgactgtgaatctgacaaccttcagactctggtgttatgcctgtgaaaaggaggtgttcttggaacagcgcttagctgcccctcttcttggtagcagtagcaaatttagcgagcaagactcccctcccccttcacaccccctgaaagccgtacctatcgccgtggccgacgagggggaaagtgagtctgaggacgatgacttgaagcctcgagggctgactggcatgaaaaacttaggcaacagttgctatatgaacgccgcattgcaagctttgtcgaattgtccacccttaacgcagttcttcttggagtgcggaggactcgtgcgcaccgataagaaacccgcactgtgcaagagctatcaaaagctagtcagcgaggtttggcataagaagcggcctagctacgtcgtgcctacttccctttctcacggaataaagctggtcaatccgatgttccgaggatacgctcagcaggatacacaagagtttctgcgatgcctgatggaccagttgcacgaagaattgaaggagccggtggtagctaccgttgctttaactgaagcccgtgacagcgattcgtccgacaccgacgagaagagggagggagacaggagcccctccgaggacgagtttctgtcttgcgatagctcctcagacagaggagagggcgatggacagggccgaggtggtggctccagccaggctgagactgagctgttgatccccgacgaggctggtcgggctatttctgagaaagagcggatgaaagaccggaaattctcctggggacagcagcgcaccaactctgagcaggtcgacgaggacgccgacgtggataccgctatggcagccctggacgatcaaccggctgaggcacagccacccagtccccgatcatcatctccttgtcgaactcctgagccagataacgacgcccatctccggagttcctcccgcccttgcagcccagtgcaccatcatgaggggcacgctaaactctccagcagtccaccgcgagcctcccctgtcagaatggctccaagttatgtgcttaaaaaggcccaggtgctatctgctggctccagaagaagaaaagagcagcggtatcgatctgtaatctctgacatctttgacggatctatcctgtccctggtgcagtgccttacatgtgatagggttagtactaccgtcgagacctttcaggatttgagcctccccattccaggaaaagaagaccttgccaaactgcattccgccatataccagaacgtgcccgctaagcctggcgcttgtggagattcgtacgctgcacagggttggttagccttcatagttgagtatatccgcagatttgttgtttcctgcaccccctcttggttctgggggcctgtagttaccctggaagactgtctcgctgcatttttcgcggcagacgagctcaagggagataacatgtacagttgtgagcgttgcaaaaagcttcggaatggagtgaagtactgtaaagtgcttagattacctgaaatcctgtgcatccaccttaagcgctttcgacacgaagtgatgtactcgtttaagattaacagtcacgtgagttttccactcgagggcctggatttgcggccatttcttgccaaggagtgtacctcacagattactacttacgatcttctgtccgtcatctgtcaccatggcactgccggaagcggccactatatcgcctattgccagaacgtaatcaacgggcagtggtacgagttcgatgatcaatatgtgaccgaggtgcacgagactgtggttcaaaacgcagagggctacgtcttgttttatcggaagtcttccgaggaggctatgagggagaggcagcaggtcgtgtctttggcggcaatgcgggaaccgtcgctgttacgtttctatgtttcgcgtgagtggctgaataaattcaacactttcgccgaaccaggacctattaccaatcaaacgtttctttgtagtcacggtggcattcccccacataagtaccactacatcgacgacctggttgtgattctacctcaaaacgtatgggagcacctctacaatcgctttggcggtgggcctgccgtgaaccatctctacgtgtgttccatctgtcaagtggaaattgaggccctcgctaaacggagacgaattgagattgataccttcataaaactcaacaaggcattccaggctgaagaatctccgggagtcatctactgtataagtatgcaatggttccgtgaatgggaggcgttcgttaaagggaaggataatgaaccccctgggccaatcgacaactcccgcattgcccaggtgaaaggtagtggccacgtccaactgaaacagggagccgactatggtcagatttccgaggagacatggacctaccttaacagcttatacggcggagggcctgaaatcgccatacggcagtcagtggcacagcctctgggaccagagaatctacacggtgagcaaaagattgaggctgaaaccagagcagtgtag

SEQ ID NO: 271100 - DNA, 2745 bp, Artificial Sequence
  derived and/or modified sequence
atgggtgattctcgcgacctttgcccacaccttgattcaatcggagaggtcacaaaagaggatttacttttaaagagcaaaggcacatgccaatcatgtggcgttaccgggccaaatctttgggcttgcttgcaggtggcctgtccctacgtgggttgtggagagtcgtttgccgatcacagcacaattcatgcacaggcgaaaaagcataatttgactgtgaatctgaccactttccggctatggtgctatgcctgtgagaaggaagtgtttctggaacagagactggctgctcctttgctgggcagctcctcgaagttcagcgagcaagactcccctccgccttctcaccctcttaaagccgttcccattgctgttgccgatgagggagagagtgagtcggaggacgatgacctgaaacctcgcggacttaccggtatgaagaacttggggaatagttgctacatgaatgccgctctgcaggcgctctccaactgcccccctttgacgcaatttttcctggagtgcgggggtttggttaggaccgacaaaaagcctgccctgtgcaagtcgtaccaaaaactggttagcgaagtgtggcataagaagcgtccctcatacgtggttcccaccagtttatcccacggaatcaaattggtaaacccaatgttcaggggctacgcccaacaggacactcaggaattccttagatgcttgatggatcaattacacgaggagctgaaggaaccagtagtcgctaccgttgcattgactgaggcaagggactcagactcatccgataccgatgaaaaaagagagggtgaccgtagcccttctgaggacgaatttctgagttgtgactccagcagtgacaggggggagggggacggccagggaaggggcggaggatcctcacaggcggagaccgagctgctgatccccgacgaagcgggtcgagcaatcagcgaaaaggaaaggatgaaggaccgcaagttcagctggggccagcaacgaacaaactcggaacaggttgatgaagacgctgacgtcgacacagctatggcggctctggacgatcagcctgcagaggcacagcccccttctcctcgatctagctcaccatgccgaactcctgagcctgataatgacgcccacctgcggtcgagctccaggccatgcagcccagtccaccatcacgaagggcatgccaagctaagtagctcgcccccaagagccagcccggtcaggatggccccttcttacgttcttaaaaaagcccaggtgctgtctgcagggtcaaggagaaggaaggagcagagatacaggagcgtgatcagcgacatcttcgacgggagcatcctgagccttgttcaatgcttaacgtgtgaccgagtgtcaacaactgtggagacttttcaggatctgtctctgccaattccgggtaaagaggatcttgcaaaactccattcagccatttaccaaaatgttccagccaaacctggggcttgcggtgactcctacgccgcacagggatggttggcgttcatagtcgaatatatccggaggttcgtggtgtcttgtacgccttcttggttttggggcccagtggtcacgctggaggattgtctcgctgccttttttgctgccgatgagctcaaaggcgacaacatgtattcttgcgaaaggtgcaagaaactccggaacggagtgaaatattgcaaggtgctgagactcccagagattctgtgtatacatcttaagagattcaggcacgaagtcatgtactcttttaagatcaatagccacgtgagcttcccactcgaaggccttgatctgaggcccttcttggccaaagagtgtacatcccagatcacaacttacgacctgttgtccgtgatttgtcaccatgggactgcaggatccggccactacatagcttactgccagaatgtgatcaatgggcaatggtacgagttcgatgatcagtacgtgactgaggtgcacgaaacggtggtgcaaaacgcagagggttacgtgttgttttaccgcaaaagcagcgaagaagcgatgcgtgagcggcaacaggttgtgtccctcgccgcaatgcgcgaaccgagccttctccgcttctacgtgtccagggagtggcttaataagtttaatacctttgctgaacccggacccataacaaatcagacgtttctgtgttcacatggcggtatcccccctcacaaataccattatatcgacgatctggttgtgatcttgcctcagaacgtgtgggaacacctgtacaatcggttcggaggcggtccagcagtgaatcacctctatgtgtgctctatttgtcaagtggaaattgaagctctggctaagagacgtcgcatcgaaatagatacctttattaagctgaataaagcattccaagctgaagaatcccccggagtaatatactgcatctctatgcagtggttcagagagtgggaagccttcgtcaaagggaaagataatgaaccccctgggcctatcgacaactcgaggattgcccaggtgaaaggctccggacatgtgcagcttaaacagggcgcagattatggccagatttctgaagaaacctggacctatttgaactcactgtacggaggaggcccagaaatcgctatccggcagtccgtagctcaaccattggggccagaaaatctgcatggagaacaaaaaatcgaagctgaaacgcgcgcagtgtag

SEQ ID NO: 271101 - DNA, 2745 bp, Artificial Sequence
  derived and/or modified sequence
atgggggactcccgagatttgtgtccacatctggactctatcggggaggttaccaaagaagatctccttctgaagagtaagggaacttgccagagctgcggggtcactgggccaaacctttgggcatgcctacaggttgcatgcccctacgtgggttgtggagaaagttttgctgatcacagtacaatacatgcccaggctaaaaagcataatcttactgttaatctgacgacttttcggttgtggtgttacgcctgtgagaaagaggtgttcctggaacagcgactggccgcacctcttttggggagttcctctaagttctccgaacaggacagtccacccccttcccatcccctgaaggcagtgccaattgctgtcgctgatgaaggcgaaagtgaatccgaagacgatgacttgaagccccgaggtctaacgggcatgaaaaacttaggcaactcctgttatatgaatgctgctctgcaagctttgtctaactgccctccccttactcagtttttcttagaatgtggcggactggtcaggactgacaaaaagcccgctctttgtaagagttatcagaagttggtatcggaggtatggcataagaagcgcccttcatacgttgttcccaccagcctgtcccacggaataaagcttgttaatcccatgtttcgcggttatgcccaacaagatacacaggaatttctccgttgtctgatggaccaactgcacgaagagctgaaggaacccgtggtggcaaccgtcgctctaaccgaagctagggattcggactcttctgatacagatgaaaagcgcgaaggggaccgaagcccttcagaagatgaattcttgagctgtgacagctctagcgatcggggagagggcgatggccaaggcagagggggaggctcaagccaggccgagaccgagctactgatccctgacgaagccggtcgggcaataagcgagaaagagcgaatgaaggaccgtaagttctcgtggggccagcagcgaacgaattctgagcaggtcgatgaagatgctgacgttgacaccgccatggctgcactggatgatcaaccagctgaagctcaacctccctctcctcgaagctctagcccctgtcgcacacccgagccagacaatgacgcacatctccggagctcctcccgcccttgctccccagtgcatcatcacgagggtcacgctaaacttagcagctcaccgcctagagcatctccggtccggatggcccctagctatgtgcttaagaaggctcaggttctatctgccggttcacgcagacgcaaggagcaacgatataggtctgtgattagcgatatatttgatggctcaatcctcagtctggtgcagtgcttgacttgcgaccgggtaagcactaccgtcgaaactttccaagatctctccttacctatacctggcaaggaggatcttgccaaactccatagcgctatctaccagaacgtgccagccaagccaggagcttgcggcgattcctacgcggctcagggttggcttgctttcattgtcgagtacatcaggcgctttgtcgtatcatgtaccccatcctggttctgggggccagtggttacgctagaggactgtctggccgctttcttcgccgcagacgagttgaaaggagataatatgtacagctgcgaaaggtgcaaaaagctgcggaatggcgtgaagtactgcaaagtgctcaggctccctgaaatcctgtgcatccatctcaaaagattcaggcatgaagtaatgtactcattcaagatcaactcccacgtctcattcccattggagggcctggacctgcggccatttctggccaaggagtgcaccagccagattactacttatgatctcctgagcgtaatctgtcaccatgggactgccggtagtggacactatatcgcctattgtcagaatgtgatcaacggacagtggtacgaattcgatgatcaatatgtgaccgaagtccatgagactgtggtgcaaaacgctgagggctacgtattgttctacaggaaatctagcgaagaggccatgcgggagagacagcaggttgtgtccctggccgctatgcgggagccctcactgctgcgtttctacgtgtctcgggaatggttgaacaaattcaacacctttgctgaacctggccctatcacgaatcaaaccttcctctgcagccacggagggatccccccacataagtaccactacatcgatgatctggtcgttatactgccacaaaacgtttgggagcacctgtataatagatttggtggcggacccgctgttaaccacctctatgtctgttcaatttgccaggtggaaatcgaagctttggccaagcggcgtcggattgagatcgacaccttcattaagctgaataaagcattccaggccgaggaaagtccaggtgtgatctattgcatctcaatgcaatggttccgggaatgggaggcatttgttaaaggaaaagacaacgagccccctggccctatcgataactctagaatagcacaagttaagggttcggggcacgtacagcttaagcagggggcagattatggacagattagcgaggaaacttggacctatcttaactctctgtatggcggaggacccgagatagctattcgccaatctgtggcccagcctttgggtcctgagaacctgcacggcgaacaaaagattgaggcagagaccagagccgtctag

SEQ ID NO: 271102 - DNA, 4458 bp, Artificial Sequence
  derived and/or modified sequence
caggcggcggcggcgcagttgcgagtgcaggctccttgccagaggcctccactcactccagacccctatagcccgtcgctgtcagctgtcaacaaaggatgcgaatgctggccgcttcctgtgggcttcgtgtcacccagaggtgagcccaggccaggatgggggactccagggacctttgccctcaccttgactccataggagaggtgaccaaagaggacttgctgctcaaatctaagggaacctgtcagtcgtgtggggtcaccggaccaaacctatgggcctgtctgcaggttgcctgcccctatgttggctgcggagaatcctttgctgaccacagcaccattcatgcacaggcaaaaaagcacaacttgaccgtgaacctgaccacgttccgactgtggtgttacgcctgtgagaaggaggtattcctggagcagcggctggcagcccctctgctgggctcctcttccaagttctctgaacaggactccccgccaccctcccaccctctgaaagctgttcctattgctgtggctgatgaaggagagtctgagtcagaggacgatgacctgaaacctcgaggcctcacgggcatgaagaacctcgggaactcctgctacatgaacgctgccctgcaggccctgtccaattgcccgccgctgactcagttcttcttggagtgtggcggcctggtgcgcacagataagaagccagccctgtgcaagagctaccagaagctggtctctgaggtctggcataagaaacggccaagctacgtggtccccaccagtctgtctcatgggatcaagttggtcaacccaatgttccgaggctatgcccagcaggacacccaagagttccttcgctgcctgatggaccagctgcacgaggagctcaaggagccggtggtggccacggtggcgctgacggaggctcgggactcagattcgagtgacacggatgagaaacgggagggtgaccggagcccatcagaagatgagttcttgtcctgtgactcgagcagtgaccggggtgagggtgacgggcaggggcgtggcgggggcagctcgcaggccgagacggagctgctgatcccagatgaggcgggccgagccatctctgagaaggagcggatgaaggaccgcaagttctcctggggccagcagcgtacaaactcggagcaagtggacgaggacgctgatgtggacactgccatggctgcccttgacgaccagcccgcggaggcccagcccccgtcaccacggtcctccagcccctgccggacgccagagccggacaatgatgctcacctacgcagctcctctcgcccctgcagccccgtccaccaccacgagggccatgccaagctgtctagcagcccccctcgtgcaagccccgtgaggatggcaccgtcgtacgtgctcaagaaagcccaggtattgagtgctggcagccggaggcggaaggagcagcgctaccgcagcgtcatctcagacatctttgacggctccattctcagccttgtgcagtgtctcacctgtgaccgggtatccaccacagtggaaacgttccaggacttatcactgcccattcctggaaaggaggacctggccaagctccattcagccatctaccagaatgtgccggccaagccaggcgcctgtggggacagctatgccgcccagggctggctggccttcattgtggagtacatccgacggtttgtggtatcctgtacccccagctggttttgggggcctgtcgtcaccctggaagactgccttgctgccttctttgccgctgatgagttaaagggtgacaacatgtacagctgtgagcggtgtaagaagctgcggaacggagtgaagtactgcaaagtcctgcggttgcccgagatcctgtgcattcacctaaagcgctttcggcacgaggtgatgtactcattcaagatcaacagccacgtctccttccccctcgaggggctcgacctgcgccccttccttgccaaggagtgcacatcccagatcaccacctacgacctcctctcggtcatctgccaccacggcacggcaggcagtgggcactacatcgcctactgccagaacgtgatcaatgggcagtggtacgagtttgatgaccagtacgtcacagaagtccacgagacggtggtgcagaacgccgagggctacgtactcttctacaggaagagcagcgaggaggccatgcgggagcgacagcaggtggtgtccctggccgccatgcgggagcccagcctgctgcggttctacgtgtcccgcgagtggctcaacaagttcaacaccttcgcggagccaggccccatcaccaaccagaccttcctctgctcccacggaggcatcccgccccacaaataccactacatcgacgacctggtggtcatcctgccccagaacgtctgggagcacctgtacaacagattcgggggtggccccgccgtgaaccacctgtacgtgtgctccatctgccaggtggagatcgaggcactggccaagcgcaggaggatcgagatcgacaccttcatcaagttgaacaaggccttccaggccgaggagtcgccgggcgtcatctactgcatcagcatgcagtggttccgggagtgggaggcgttcgtcaaggggaaggacaacgagccccccgggcccattgacaacagcaggattgcacaggtcaaaggaagcggccatgtccagctgaagcagggagctgactacgggcagatttcggaggagacctggacctacctgaacagcctgtatggaggtggccccgagattgccatccgccagagtgtggcgcagccgctgggcccagagaacctgcacggggagcagaagatcgaagccgagacgcgggccgtgtgatctgctgggctagtctgtaagtcgccccggctggtccctccatggcactctgggtcctctcctcactctccagagaccctcacatgtccttttgaacatccaaagagcaggtccctgaaagcaccttcctggaggatgtgggagggccctggacatggcccggccccactgctgagtgcccgtgtccccacagccccatgtgccccaccccgcggaaggcgtgtttgtgcccagaagagaggccgggctgctgcagaaccccgccgtgtaaagaggcagaaaagttggtttggtttgcagtaacgctgcaactagaaaatatatgcacttcaggcttgttgaaacgaccaagactctgtgacgttaatttgggtctttgtcctggcagtgcctctgccagtcactgtcatcgttgtgtcccccacaactgtcctcttgctagctcggcccagctttgtccctggagcccgatgctacccctgtcagacagaggctgcggcctgggccagagtcagggagtagctgctgcttcacggcgtctccactgtgcgattggcccggagccccgaagactcggagggagctgctcagggccggtgagcgcagccagaagccctggccagtgaggagctcacaggtcctccctggtggtcccgccgcacctctgcatctcctgggcgtcaccaggaaggctctgaagtcccgggctgctctcagcacttctcctgcagactgaagactctggactcattgctgattggaacaccaggaggaggttggatttctgccagtgggggatgtttctggaggcagctggtcccccacaccgcgtcctgctgagcctgccccctggattggctgtaatttgcctcgaagttcagcagttcatcttcatgggaaatttgctgagcccccaccagggaaccggatgatgaaacagggatacctcacagcttggccatttgaggcaaaggcagcttcccgagctgatgctaaagaagacagactttcccttcctcccagcagcagcagtgcagagcccacctggagggatgtgggggctgtgcagggtgcagcgctcaggtggatcctgggaagcagcctctggatgctgagtggagggagccactgagcacagcaaggcaccaaagcccctggagaaaccgccagggcgaggtgcgaccatcatcaggatcaaagcagacggggcgtgggtggggaaggggctctgggaccagaccccccacactactgcgtctttgtttctatcagtctttgtagaagcaggtggtggtggaaattccagcaggtgggtcccgcagaggccctgaggcctcacttttcggatcttctgtcccagatcctgctccctccctgctgagcctggggttcccctggcattggccccagccttctgaaagccggcgctgcagccagaggccgcacgctgcactgtcgcgacgcagagaggcttctgtgcaggctgggatcgggccccatgtctgtgctgtctagtttgtgttcaaaatgtcagaataaacacagaataaatgtt

SEQ ID NO: 271103 - DNA, 2745 bp, Artificial Sequence
  derived and/or modified sequence
atgggcgacagcagagacctgtgcccccacctggacagcatcggcgaggtgaccaaggaggacctgctgctgaagagcaagggcacctgccagagctgcggcgtgaccggccccaacctgtgggcctgcctgcaggtggcctgcccctacgtgggctgcggcgagagcttcgccgaccacagcaccatccacgcccaggccaagaagcacaacctgaccgtgaacctgaccaccttcagactgtggtgctacgcctgcgagaaggaggtgttcctggagcagagactggccgcccccctgctgggcagcagcagcaagttcagcgagcaggacagccccccccccagccaccccctgaaggccgtgcccatcgccgtggccgacgagggcgagagcgagagcgaggacgacgacctgaagcccagaggcctgaccggcatgaagaacctgggcaacagctgctacatgaacgccgccctgcaggccctgagcaactgcccccccctgacccagttcttcctggagtgcggcggcctggtgagaaccgacaagaagcccgccctgtgcaagagctaccagaagctggtgagcgaggtgtggcacaagaagagacccagctacgtggtgcccaccagcctgagccacggcatcaagctggtgaaccccatgttcagaggctacgcccagcaggacacccaggagttcctgagatgcctgatggaccagctgcacgaggagctgaaggagcccgtggtggccaccgtggccctgaccgaggccagagacagcgacagcagcgacaccgacgagaagagagagggcgacagaagccccagcgaggacgagttcctgagctgcgacagcagcagcgacagaggcgagggcgacggccagggcagaggcggcggcagcagccaggccgagaccgagctgctgatccccgacgaggccggcagagccatcagcgagaaggagagaatgaaggacagaaagttcagctggggccagcagagaaccaacagcgagcaggtggacgaggacgccgacgtggacaccgccatggccgccctggacgaccagcccgccgaggcccagccccccagccccagaagcagcagcccctgcagaacccccgagcccgacaacgacgcccacctgagaagcagcagcagaccctgcagccccgtgcaccaccacgagggccacgccaagctgagcagcagcccccccagagccagccccgtgagaatggcccccagctacgtgctgaagaaggcccaggtgctgagcgccggcagcagaagaagaaaggagcagagatacagaagcgtgatcagcgacatcttcgacggcagcatcctgagcctggtgcagtgcctgacctgcgacagagtgagcaccaccgtggagaccttccaggacctgagcctgcccatccccggcaaggaggacctggccaagctgcacagcgccatctaccagaacgtgcccgccaagcccggcgcctgcggcgacagctacgccgcccagggctggctggccttcatcgtggagtacatcagaagattcgtggtgagctgcacccccagctggttctggggccccgtggtgaccctggaggactgcctggccgccttcttcgccgccgacgagctgaagggcgacaacatgtacagctgcgagagatgcaagaagctgagaaacggcgtgaagtactgcaaggtgctgagactgcccgagatcctgtgcatccacctgaagagattcagacacgaggtgatgtacagcttcaagatcaacagccacgtgagcttccccctggagggcctggacctgagacccttcctggccaaggagtgcaccagccagatcaccacctacgacctgctgagcgtgatctgccaccacggcaccgccggcagcggccactacatcgcctactgccagaacgtgatcaacggccagtggtacgagttcgacgaccagtacgtgaccgaggtgcacgagaccgtggtgcagaacgccgagggctacgtgctgttctacagaaagagcagcgaggaggccatgagagagagacagcaggtggtgagcctggccgccatgagagagcccagcctgctgagattctacgtgagcagagagtggctgaacaagttcaacaccttcgccgagcccggccccatcaccaaccagaccttcctgtgcagccacggcggcatccccccccacaagtaccactacatcgacgacctggtggtgatcctgccccagaacgtgtgggagcacctgtacaacagattcggcggcggccccgccgtgaaccacctgtacgtgtgcagcatctgccaggtggagatcgaggccctggccaagagaagaagaatcgagatcgacaccttcatcaagctgaacaaggccttccaggccgaggagagccccggcgtgatctactgcatcagcatgcagtggttcagagagtgggaggccttcgtgaagggcaaggacaacgagccccccggccccatcgacaacagcagaatcgcccaggtgaagggcagcggccacgtgcagctgaagcagggcgccgactacggccagatcagcgaggagacctggacctacctgaacagcctgtacggcggcggccccgagatcgccatcagacagagcgtggcccagcccctgggccccgagaacctgcacggcgagcagaagatcgaggccgagaccagagccgtgtag

SEQ ID NO: 271104 - protein, 2325 aa, Artificial Sequence
  derived and/or modified sequence
MKKGSQQKIFSKAKIPSSSHSPIPSSMSNMRSRSLSPLIGSETLPFHSGGQWCEQVEIADENNMLLDYQDHKGADSHAGVRYITEALIKKLTKQDNLALIKSLNLSLSKDGGKKFKYIENLEKCVKLEVLNLSYNLIGKIEKLDKLLKLRELNLSYNKISKIEGIENMCNLQKLNLAGNEIEHIPVWLGKKLKSLRVLNLKGNKISSLQDISKLKPLQDLISLILVENPVVTLPHYLQFTIFHLRSLESLEGQPVTTQDRQEAFERFSLEEVERLERDLEKKMIETEELKSKQTRFLEEIKNQDKLNKSLKEEAMLQKQSCEELKSDLNTKNELLKQKTIELTRACQKQYELEQELAFYKIDAKFEPLNYYPSEYAEIDKAPDESPYIGKSRYKRNMFATESYIIDSAQAVQIKKMEPDEQLRNDHMNLRGHTPLDTQLEDKEKKISAAQTRLSELHDEIEKAEQQILRATEEFKQLEEAIQLKKISEAGKDLLYKQLSGRLQLVNKLRQEALDLELQMEKQKQEIAGKQKEIKDLQIAIDSLDSKDPKHSHMKAQKSGKEQQLDIMNKQYQQLESRLDEILSRIAKETEEIKDLEEQLTEGQIAANEALKKDLEGVISGLQEYLGTIKGQATQAQNECRKLRDEKETLLQRLTEVEQERDQLEIVAMDAENMRKELAELESALQEQHEVNASLQQTQGDLSAYEAELEARLNLRDAEANQLKEELEKVTRLTQLEQSALQAELEKERQALKNALGKAQFSEEKEQENSELHAKLKHLQDDNNLLKQQLKDFQNHLNHVVDGLVRPEEVAARVDELRRKLKLGTGEMNIHSPSDVLGKSLADLQKQFSEILARSKWERDEAQVRERKLQEEMALQQEKLATGQEEFRQACERALEARMNFDKRQHEARIQQMENEIHYLQENLKSMEEIQGLTDLQLQEADEEKERILAQLRELEKKKKLEDAKSQEQVFGLDKELKKLKKAVATSDKLATAELTIAKDQLKSLHGTVMKINQERAEELQEAERFSRKAAQAARDLTRAEAEIELLQNLLRQKGEQFRLEMEKTGVGTGANSQVLEIEKLNETMERQRTEIARLQNVLDLTGSDNKGGFENVLEEIAELRREVSYQNDYISSMADPFKRRGYWYFMPPPPSSKVSSHSSQATKDSGVGLKYSASTPVRKPRPGQQDGKEGSQPPPASGYWVYSPIRSGLHKLFPSRDADSGGDSQEESELDDQEEPPFVPPPGYMMYTVLPDGSPVPQGMALYAPPPPLPNNSRPLTPGTVVYGPPPAGAPMVYGPPPPNFSIPFIPMGVLHCNVPEHHNLENEVSRLEDIMQHLKSKKREERWMRASKRQSEKEMEELHHNIDDLLQEKKSLECEVEELHRTVQKRQQQKDFIDGNVESLMTELEIEKSLKHHEDIVDEIECIEKTLLKRRSELREADRLLAEAESELSCTKEKTKNAVEKFTDAKRSLLQTESDAEELERRAQETAVNLVKADQQLRSLQADAKDLEQHKIKQEEILKEINKIVAAKDSDFQCLSKKKEKLTEELQKLQKDIEMAERNEDHHLQVLKESEVLLQAKRAELEKLKSQVTSQQQEMAVLDRQLGHKKEELHLLQGSMVQAKADLQEALRLGETEVTEKCNHIREVKSLLEELSFQKGELNVQISERKTQLTLIKQEIEKEEENLQVVLRQMSKHKTELKNILDMLQLENHELQGLKLQHDQRVSELEKTQVAVLEEKLELENLQQISQQQKGEIEWQKQLLERDKREIERMTAESRALQSCVECLSKEKEDLQEKCDIWEKKLAQTKRVLAAAEENSKMEQSNLEKLELNVRKLQQELDQLNRDKLSLHNDISAMQQQLQEKREAVNSLQEELANVQDHLNLAKQDLLHTTKHQDVLLSEQTRLQKDISEWANRFEDCQKEEETKQQQLQVLQNEIEENKLKLVQQEMMFQRLQKERESEESKLETSKVTLKEQQHQLEKELTDQKSKLDQVLSKVLAAEERVRTLQEEERWCESLEKTLSQTKRQLSEREQQLVEKSGELLALQKEADSMRADFSLLRNQFLTERKKAEKQVASLKEALKIQRSQLEKNLLEQKQENSCIQKEMATIELVAQDNHERARRLMKELNQMQYEYTELKKQMANQKDLERRQMEISDAMRTLKSEVKDEIRTSLKNLNQFLPELPADLEAILERNENLEGELESLKENLPFTMNEGPFEEKLNFSQVHIMDEHWRGEALREKLRHREDRLKAQLRHCMSKQAEVLIKGKRQTEGTLHSLRRQVDALGELVTSTSADSASSPSLSQLESSLTEDSQLGQNQEKNASAR

SEQ ID NO: 271105 - protein, 1007 aa, Artificial Sequence
  derived and/or modified sequence
MQHLKSKKREERWMRASKRQSEKEMEELHHNIDDLLQEKKSLECEVEELHRTVQKRQQQKDFIDGNVESLMTELEIEKSLKHHEDIVDEIECIEKTLLKRRSELREADRLLAEAESELSCTKEKVCLLVVWGVSSVWTKNAVEKFTDAKRSLLQTESDAEELERRAQETAVNLVKADQQLRSLQADAKDLEQHKIKQEEILKEINKIVAAKDSDFQCLSKKKEKLTEELQKLQKDIEMAERNEDHHLQVLKESEVLLQAKRAELEKLKSQVTSQQQEMAVLDRQLGHKKEELHLLQGSMVQAKADLQEALRLGETEVTEKCNHIREVKSLLEELSFQKGELNVQISERKTQLTLIKQEIEKEEENLQVVLRQMSKHKTELKNILDMLQLENHELQGLKLQHDQRVSELEKTQVAVLEEKLELENLQQISQQQKGEIEWQKQLLERDKREIERMTAESRALQSCVECLSKEKEDLQEKCDIWEKKLAQTKRVLAAAEENSKMEQSNLEKLELNVRKLQQELDQLNRDKLSLHNDISAMQQQLQEKREAVNSLQEELANVQDHLNLAKQDLLHTTKHQDVLLSEQTRLQKDISEWANRFEDCQKEEETKQQQLQVLQNEIEENKLKLVQQEMMFQRLQKERESEESKLETSKVTLKEQQHQLEKELTDQKSKLDQVLSKVLAAEERVRTLQEEERWCESLEKTLSQTKRQLSEREQQLVEKSGELLALQKEADSMRADFSLLRNQFLTERKKAEKQVASLKEALKIQRSQLEKNLLEQKQENSCIQKEMATIELVAQDNHERARRLMKELNQMQYEYTELKKQMANQKDLERRQMEISDAMRTLKSEVKDEIRTSLKNLNQFLPELPADLEAILERNENLEGELESLKENLPFTMNEGPFEEKLNFSQVHIMDEHWRGEALREKLRHREDRLKAQLRHCMSKQAEVLIKGKRQTEGTLHSLRRQVDALGELVTSTSADSASSPSLSQLESSLTEDSQLGQNQEKNASAR

SEQ ID NO: 271106 - protein, 1773 aa, Artificial Sequence
  derived and/or modified sequence
MKAQKSGKEQQLDIMNKQYQQLESRLDEILSRIAKETEEIKDLEEQLTEGQIAANEALKKDLEGVISGLQEYLGTIKGQATQAQNECRKLRDEKETLLQRLTEVEQERDQLEIVAMDAENMRKELAELESALQEQHEVNASLQQTQGDLSAYEAELEARLNLRDAEANQLKEELEKVTRLTQLEQSALQAELEKERQALKNALGKAQFSEEKEQENSELHAKLKHLQDDNNLLKQQLKDFQNHLNHVVDGLVRPEEVAARVDELRRKLKLGTGEMNIHSPSDVLGKSLADLQKQFSEILARSKWERDEAQVRERKLQEEMALQQEKLATGQEEFRQACERALEARMNFDKRQHEARIQQMENEIHYLQENLKSMEEIQGLTDLQLQEADEEKERILAQLRELEKKKKLEDAKSQEQVFGLDKELKKLKKAVATSDKLATAELTIAKDQLKSLHGTVMKINQERAEELQEAERFSRKAAQAARDLTRAEAEIELLQNLLRQKGEQFRLEMEKTGVGTGANSQVLEIEKLNETMERQRTEIARLQNVLDLTGSDNKGGFENVLEEIAELRREVSYQNDYISSMADPFKRRGYWYFMPPPPSSKVSSHSSQATKDSGVGLKYSASTPVRKPRPGQQDGKEGSQPPPASGYWVYSPIRSGLHKLFPSRDADSGGDSQEESELDDQEEPPFVPPPGYMMYTVLPDGSPVPQGMALYAPPPPLPNNSRPLTPGTVVYGPPPAGAPMVYGPPPPNFSIPFIPMGVLHCNVPEHHNLENEVSRLEDIMQHLKSKKREERWMRASKRQSEKEMEELHHNIDDLLQEKKSLECEVEELHRTVQKRQQQKDFIDGNVESLMTELEIEKSLKHHEDIVDEIECIEKTLLKRRSELREADRLLAEAESELSCTKEKTKNAVEKFTDAKRSLLQTESDAEELERRAQETAVNLVKADQQLRSLQADAKDLEQHKIKQEEILKEINKIVAAKDSDFQCLSKKKEKLTEELQKLQKDIEMAERNEDHHLQVLKESEVLLQAKRAELEKLKSQVTSQQQEMAVLDRQLGHKKEELHLLQGSMVQAKADLQEALRLGETEVTEKCNHIREVKSLLEELSFQKGELNVQISERKTQLTLIKQEIEKEEENLQVVLRQMSKHKTELKNILDMLQLENHELQGLKLQHDQRVSELEKTQVAVLEEKLELENLQQISQQQKGEIEWQKQLLERDKREIERMTAESRALQSCVECLSKEKEDLQEKCDIWEKKLAQTKRVLAAAEENSKMEQSNLEKLELNVRKLQQELDQLNRDKLSLHNDISAMQQQLQEKREAVNSLQEELANVQDHLNLAKQDLLHTTKHQDVLLSEQTRLQKDISEWANRFEDCQKEEETKQQQLQVLQNEIEENKLKLVQQEMMFQRLQKERESEESKLETSKVTLKEQQHQLEKELTDQKSKLDQVLSKVLAAEERVRTLQEEERWCESLEKTLSQTKRQLSEREQQLVEKSGELLALQKEADSMRADFSLLRNQFLTERKKAEKQVASLKEALKIQRSQLEKNLLEQKQENSCIQKEMATIELVAQDNHERARRLMKELNQMQYEYTELKKQMANQKDLERRQMEISDAMRTLKSEVKDEIRTSLKNLNQFLPELPADLEAILERNENLEGELESLKENLPFTMNEGPFEEKLNFSQVHIMDEHWRGEALREKLRHREDRLKAQLRHCMSKQAEVLIKGKRQTEGTLHSLRRQVDALGELVTSTSADSASSPSLSQLESSLTEDSQLGQNQEKNASAR

SEQ ID NO: 271107 - protein, 482 aa, Artificial Sequence
  derived and/or modified sequence
MEQSNLEKLELNVRKLQQELDQLNRDKLSLHNDISAMQQQLQEKREAVNSLQEELANVQDHLNLAKQDLLHTTKHQDVLLSEQTRLQKDISEWANRFEDCQKEEETKQQQLQVLQNEIEENKLKLVQQEMMFQRLQKERESEKSKLDQVLSKVLAAEERVRTLQEEERWCESLEKTLSQTKRQLSEREQQLVEKSGELLALQKEADSMRADFSLLRNQFLTERKKAEKQVASLKEALKIQRSQLEKNLLEQKQENSCIQKEMATIELVAQDNHERARRLMKELNQMQYEYTELKKQMANQKDLERRQMEISDAMRTLKSEVKDEIRTSLKNLNQFLPELPADLEAILERNENLEGELESLKENLPFTMNEGPFEEKLNFSQVHIMDEHWRGEALREKLRHREDRLKAQLRHCMSKQAEVLIKGKRQTEGTLHSLRRQVDALGELVTSTSADSASSPSLSQLESSLTEDSQLGQNQEKNASAR

SEQ ID NO: 271108 - protein, 2325 aa, Artificial Sequence
  derived and/or modified sequence
MKKGSQQKIFSKAKIPSSSHSPIPSSMSNMRSRSLSPLIGSETLPFHSGGQWCEQVEIADENNMLLDYQDHKGADSHAGVRYITEALIKKLTKQDNLALIKSLNLSLSKDGGKKFKYIENLEKCVKLEVLNLSYNLIGKIEKLDKLLKLRELNLSYNKISKIEGIENMCNLQKLNLAGNEIEHIPVWLGKKLKSLRVLNLKGNKISSLQDISKLKPLQDLISLILVENPVVTLPHYLQFTIFHLRSLESLEGQPVTTQDRQEAFERFSLEEVERLERDLEKKMIETEELKSKQTRFLEEIKNQDKLNKSLKEEAMLQKQSCEELKSDLNTKNELLKQKTIELTRACQKQYELEQELAFYKIDAKFEPLNYYPSEYAEIDKAPDESPYIGKSRYKRNMFATESYIIDSAQAVQIKKMEPDEQLRNDHMNLRGHTPLDTQLEDKEKKISAAQTRLSELHDEIEKAEQQILRATEEFKQLEEAIQLKKISEAGKDLLYKQLSGRLQLVNKLRQEALDLELQMEKQKQEIAGKQKEIKDLQIAIDSLDSKDPKHSHMKAQKSGKEQQLDIMNKQYQQLESRLDEILSRIAKETEEIKDLEEQLTEGQIAANEALKKDLEGVISGLQEYLGTIKGQATQAQNECRKLRDEKETLLQRLTEVEQERDQLEIVAMDAENMRKELAELESALQEQHEVNASLQQTQGDLSAYEAELEARLNLRDAEANQLKEELEKVTRLTQLEQSALQAELEKERQALKNALGKAQFSEEKEQENSELHAKLKHLQDDNNLLKQQLKDFQNHLNHVVDGLVRPEEVAARVDELRRKLKLGTGEMNIHSPSDVLGKSLADLQKQFSEILARSKWERDEAQVRERKLQEEMALQQEKLATGQEEFRQACERALEARMNFDKRQHEARIQQMENEIHYLQENLKSMEEIQGLTDLQLQEADEEKERILAQLRELEKKKKLEDAKSQEQVFGLDKELKKLKKAVATSDKLATAELTIAKDQLKSLHGTVMKINQERAEELQEAERFSRKAAQAARDLTRAEAEIELLQNLLRQKGEQFRLEMEKTGVGTGANSQVLEIEKLNETMERQRTEIARLQNVLDLTGSDNKGGFENVLEEIAELRREVSYQNDYISSMADPFKRRGYWYFMPPPPSSKVSSHSSQATKDSGVGLKYSASTPVRKPRPGQQDGKEGSQPPPASGYWVYSPIRSGLHKLFPSRDADSGGDSQEESELDDQEEPPFVPPPGYMMYTVLPDGSPVPQGMALYAPPPPLPNNSRPLTPGTVVYGPPPAGAPMVYGPPPPNFSIPFIPMGVLHCNVPEHHNLENEVSRLEDIMQHLKSKKREERWMRASKRQSEKEMEELHHNIDDLLQEKKSLECEVEELHRTVQKRQQQKDFIDGNVESLMTELEIEKSLKHHEDIVDEIECIEKTLLKRRSELREADRLLAEAESELSCTKEKTKNAVEKFTDAKRSLLQTESDAEELERRAQETAVNLVKADQQLRSLQADAKDLEQHKIKQEEILKEINKIVAAKDSDFQCLSKKKEKLTEELQKLQKDIEMAERNEDHHLQVLKESEVLLQAKRAELEKLKSQVTSQQQEMAVLDRQLGHKKEELHLLQGSMVQAKADLQEALRLGETEVTEKCNHIREVKSLLEELSFQKGELNVQISERKTQLTLIKQEIEKEEENLQVVLRQMSKHKTELKNILDMLQLENHELQGLKLQHDQRVSELEKTQVAVLEEKLELENLQQISQQQKGEIEWQKQLLERDKREIERMTAESRALQSCVECLSKEKEDLQEKCDIWEKKLAQTKRVLAAAEENSKMEQSNLEKLELNVRKLQQELDQLNRDKLSLHNDISAMQQQLQEKREAVNSLQEELANVQDHLNLAKQDLLHTTKHQDVLLSEQTRLQKDISEWANRFEDCQKEEETKQQQLQVLQNEIEENKLKLVQQEMMFQRLQKERESEESKLETSKVTLKEQQHQLEKELTDQKSKLDQVLSKVLAAEERVRTLQEEERWCESLEKTLSQTKRQLSEREQQLVEKSGELLALQKEADSMRADFSLLRNQFLTERKKAEKQVASLKEALKIQRSQLEKNLLEQKQENSCIQKEMATIELVAQDNHERARRLMKELNQMQYEYTELKKQMANQKDLERRQMEISDAMRTLKSEVKDEIRTSLKNLNQFLPELPADLEAILERNENLEGELESLKENLPFTMNEGPFEEKLNFSQVHIMDEHWRGEALREKLRHREDRLKAQLRHCMSKQAEVLIKGKRQTEGTLHSLRRQVDALGELVTSTSADSASSPSLSQLESSLTEDSQLGQNQKQNNSLR

SEQ ID NO: 271109 - DNA, 3024 bp, Artificial Sequence
  derived and/or modified sequence
atgcagcacctgaagagcaagaagagagaggagagatggatgagagccagcaagagacagagcgagaaggagatggaggagctgcaccacaacatcgacgacctgctgcaggagaagaagagcctggagtgcgaggtggaggagctgcacagaaccgtgcagaagagacagcagcagaaggacttcatcgacggcaacgtggagagcctgatgaccgagctggagatcgagaagagcctgaagcaccacgaggacatcgtggacgagatcgagtgcatcgagaagaccctgctgaagagaagaagcgagctgagagaggccgacagactgctggccgaggccgagagcgagctgagctgcaccaaggagaaggtgtgcctgctggtggtgtggggcgtgagcagcgtgtggaccaagaacgccgtggagaagttcaccgacgccaagagaagcctgctgcagaccgagagcgacgccgaggagctggagagaagagcccaggagaccgccgtgaacctggtgaaggccgaccagcagctgagaagcctgcaggccgacgccaaggacctggagcagcacaagatcaagcaggaggagatcctgaaggagatcaacaagatcgtggccgccaaggacagcgacttccagtgcctgagcaagaagaaggagaagctgaccgaggagctgcagaagctgcagaaggacatcgagatggccgagagaaacgaggaccaccacctgcaggtgctgaaggagagcgaggtgctgctgcaggccaagagagccgagctggagaagctgaagagccaggtgaccagccagcagcaggagatggccgtgctggacagacagctgggccacaagaaggaggagctgcacctgctgcagggcagcatggtgcaggccaaggccgacctgcaggaggccctgagactgggcgagaccgaggtgaccgagaagtgcaaccacatcagagaggtgaagagcctgctggaggagctgagcttccagaagggcgagctgaacgtgcagatcagcgagagaaagacccagctgaccctgatcaagcaggagatcgagaaggaggaggagaacctgcaggtggtgctgagacagatgagcaagcacaagaccgagctgaagaacatcctggacatgctgcagctggagaaccacgagctgcagggcctgaagctgcagcacgaccagagagtgagcgagctggagaagacccaggtggccgtgctggaggagaagctggagctggagaacctgcagcagatcagccagcagcagaagggcgagatcgagtggcagaagcagctgctggagagagacaagagagagatcgagagaatgaccgccgagagcagagccctgcagagctgcgtggagtgcctgagcaaggagaaggaggacctgcaggagaagtgcgacatctgggagaagaagctggcccagaccaagagagtgctggccgccgccgaggagaacagcaagatggagcagagcaacctggagaagctggagctgaacgtgagaaagctgcagcaggagctggaccagctgaacagagacaagctgagcctgcacaacgacatcagcgccatgcagcagcagctgcaggagaagagagaggccgtgaacagcctgcaggaggagctggccaacgtgcaggaccacctgaacctggccaagcaggacctgctgcacaccaccaagcaccaggacgtgctgctgagcgagcagaccagactgcagaaggacatcagcgagtgggccaacagattcgaggactgccagaaggaggaggagaccaagcagcagcagctgcaggtgctgcagaacgagatcgaggagaacaagctgaagctggtgcagcaggagatgatgttccagagactgcagaaggagagagagagcgaggagagcaagctggagaccagcaaggtgaccctgaaggagcagcagcaccagctggagaaggagctgaccgaccagaagagcaagctggaccaggtgctgagcaaggtgctggccgccgaggagagagtgagaaccctgcaggaggaggagagatggtgcgagagcctggagaagaccctgagccagaccaagagacagctgagcgagagagagcagcagctggtggagaagagcggcgagctgctggccctgcagaaggaggccgacagcatgagagccgacttcagcctgctgagaaaccagttcctgaccgagagaaagaaggccgagaagcaggtggccagcctgaaggaggccctgaagatccagagaagccagctggagaagaacctgctggagcagaagcaggagaacagctgcatccagaaggagatggccaccatcgagctggtggcccaggacaaccacgagagagccagaagactgatgaaggagctgaaccagatgcagtacgagtacaccgagctgaagaagcagatggccaaccagaaggacctggagagaagacagatggagatcagcgacgccatgagaaccctgaagagcgaggtgaaggacgagatcagaaccagcctgaagaacctgaaccagttcctgcccgagctgcccgccgacctggaggccatcctggagagaaacgagaacctggagggcgagctggagagcctgaaggagaacctgcccttcaccatgaacgagggccccttcgaggagaagctgaacttcagccaggtgcacatcatggacgagcactggagaggcgaggccctgagagagaagctgagacacagagaggacagactgaaggcccagctgagacactgcatgagcaagcaggccgaggtgctgatcaagggcaagagacagaccgagggcaccctgcacagcctgagaagacaggtggacgccctgggcgagctggtgaccagcaccagcgccgacagcgccagcagccccagcctgagccagctggagagcagcctgaccgaggacagccagctgggccagaaccaggagaagaacgccagcgccagatag

SEQ ID NO: 271110 - DNA, 5322 bp, Artificial Sequence
  derived and/or modified sequence
atgaaggcccagaagagcggcaaggagcagcagctggacatcatgaacaagcagtaccagcagctggagagcagactggacgagatcctgagcagaatcgccaaggagaccgaggagatcaaggacctggaggagcagctgaccgagggccagatcgccgccaacgaggccctgaagaaggacctggagggcgtgatcagcggcctgcaggagtacctgggcaccatcaagggccaggccacccaggcccagaacgagtgcagaaagctgagagacgagaaggagaccctgctgcagagactgaccgaggtggagcaggagagagaccagctggagatcgtggccatggacgccgagaacatgagaaaggagctggccgagctggagagcgccctgcaggagcagcacgaggtgaacgccagcctgcagcagacccagggcgacctgagcgcctacgaggccgagctggaggccagactgaacctgagagacgccgaggccaaccagctgaaggaggagctggagaaggtgaccagactgacccagctggagcagagcgccctgcaggccgagctggagaaggagagacaggccctgaagaacgccctgggcaaggcccagttcagcgaggagaaggagcaggagaacagcgagctgcacgccaagctgaagcacctgcaggacgacaacaacctgctgaagcagcagctgaaggacttccagaaccacctgaaccacgtggtggacggcctggtgagacccgaggaggtggccgccagagtggacgagctgagaagaaagctgaagctgggcaccggcgagatgaacatccacagccccagcgacgtgctgggcaagagcctggccgacctgcagaagcagttcagcgagatcctggccagaagcaagtgggagagagacgaggcccaggtgagagagagaaagctgcaggaggagatggccctgcagcaggagaagctggccaccggccaggaggagttcagacaggcctgcgagagagccctggaggccagaatgaacttcgacaagagacagcacgaggccagaatccagcagatggagaacgagatccactacctgcaggagaacctgaagagcatggaggagatccagggcctgaccgacctgcagctgcaggaggccgacgaggagaaggagagaatcctggcccagctgagagagctggagaagaagaagaagctggaggacgccaagagccaggagcaggtgttcggcctggacaaggagctgaagaagctgaagaaggccgtggccaccagcgacaagctggccaccgccgagctgaccatcgccaaggaccagctgaagagcctgcacggcaccgtgatgaagatcaaccaggagagagccgaggagctgcaggaggccgagagattcagcagaaaggccgcccaggccgccagagacctgaccagagccgaggccgagatcgagctgctgcagaacctgctgagacagaagggcgagcagttcagactggagatggagaagaccggcgtgggcaccggcgccaacagccaggtgctggagatcgagaagctgaacgagaccatggagagacagagaaccgagatcgccagactgcagaacgtgctggacctgaccggcagcgacaacaagggcggcttcgagaacgtgctggaggagatcgccgagctgagaagagaggtgagctaccagaacgactacatcagcagcatggccgaccccttcaagagaagaggctactggtacttcatgccccccccccccagcagcaaggtgagcagccacagcagccaggccaccaaggacagcggcgtgggcctgaagtacagcgccagcacccccgtgagaaagcccagacccggccagcaggacggcaaggagggcagccagcccccccccgccagcggctactgggtgtacagccccatcagaagcggcctgcacaagctgttccccagcagagacgccgacagcggcggcgacagccaggaggagagcgagctggacgaccaggaggagccccccttcgtgcccccccccggctacatgatgtacaccgtgctgcccgacggcagccccgtgccccagggcatggccctgtacgccccccccccccccctgcccaacaacagcagacccctgacccccggcaccgtggtgtacggccccccccccgccggcgcccccatggtgtacggcccccccccccccaacttcagcatccccttcatccccatgggcgtgctgcactgcaacgtgcccgagcaccacaacctggagaacgaggtgagcagactggaggacatcatgcagcacctgaagagcaagaagagagaggagagatggatgagagccagcaagagacagagcgagaaggagatggaggagctgcaccacaacatcgacgacctgctgcaggagaagaagagcctggagtgcgaggtggaggagctgcacagaaccgtgcagaagagacagcagcagaaggacttcatcgacggcaacgtggagagcctgatgaccgagctggagatcgagaagagcctgaagcaccacgaggacatcgtggacgagatcgagtgcatcgagaagaccctgctgaagagaagaagcgagctgagagaggccgacagactgctggccgaggccgagagcgagctgagctgcaccaaggagaagaccaagaacgccgtggagaagttcaccgacgccaagagaagcctgctgcagaccgagagcgacgccgaggagctggagagaagagcccaggagaccgccgtgaacctggtgaaggccgaccagcagctgagaagcctgcaggccgacgccaaggacctggagcagcacaagatcaagcaggaggagatcctgaaggagatcaacaagatcgtggccgccaaggacagcgacttccagtgcctgagcaagaagaaggagaagctgaccgaggagctgcagaagctgcagaaggacatcgagatggccgagagaaacgaggaccaccacctgcaggtgctgaaggagagcgaggtgctgctgcaggccaagagagccgagctggagaagctgaagagccaggtgaccagccagcagcaggagatggccgtgctggacagacagctgggccacaagaaggaggagctgcacctgctgcagggcagcatggtgcaggccaaggccgacctgcaggaggccctgagactgggcgagaccgaggtgaccgagaagtgcaaccacatcagagaggtgaagagcctgctggaggagctgagcttccagaagggcgagctgaacgtgcagatcagcgagagaaagacccagctgaccctgatcaagcaggagatcgagaaggaggaggagaacctgcaggtggtgctgagacagatgagcaagcacaagaccgagctgaagaacatcctggacatgctgcagctggagaaccacgagctgcagggcctgaagctgcagcacgaccagagagtgagcgagctggagaagacccaggtggccgtgctggaggagaagctggagctggagaacctgcagcagatcagccagcagcagaagggcgagatcgagtggcagaagcagctgctggagagagacaagagagagatcgagagaatgaccgccgagagcagagccctgcagagctgcgtggagtgcctgagcaaggagaaggaggacctgcaggagaagtgcgacatctgggagaagaagctggcccagaccaagagagtgctggccgccgccgaggagaacagcaagatggagcagagcaacctggagaagctggagctgaacgtgagaaagctgcagcaggagctggaccagctgaacagagacaagctgagcctgcacaacgacatcagcgccatgcagcagcagctgcaggagaagagagaggccgtgaacagcctgcaggaggagctggccaacgtgcaggaccacctgaacctggccaagcaggacctgctgcacaccaccaagcaccaggacgtgctgctgagcgagcagaccagactgcagaaggacatcagcgagtgggccaacagattcgaggactgccagaaggaggaggagaccaagcagcagcagctgcaggtgctgcagaacgagatcgaggagaacaagctgaagctggtgcagcaggagatgatgttccagagactgcagaaggagagagagagcgaggagagcaagctggagaccagcaaggtgaccctgaaggagcagcagcaccagctggagaaggagctgaccgaccagaagagcaagctggaccaggtgctgagcaaggtgctggccgccgaggagagagtgagaaccctgcaggaggaggagagatggtgcgagagcctggagaagaccctgagccagaccaagagacagctgagcgagagagagcagcagctggtggagaagagcggcgagctgctggccctgcagaaggaggccgacagcatgagagccgacttcagcctgctgagaaaccagttcctgaccgagagaaagaaggccgagaagcaggtggccagcctgaaggaggccctgaagatccagagaagccagctggagaagaacctgctggagcagaagcaggagaacagctgcatccagaaggagatggccaccatcgagctggtggcccaggacaaccacgagagagccagaagactgatgaaggagctgaaccagatgcagtacgagtacaccgagctgaagaagcagatggccaaccagaaggacctggagagaagacagatggagatcagcgacgccatgagaaccctgaagagcgaggtgaaggacgagatcagaaccagcctgaagaacctgaaccagttcctgcccgagctgcccgccgacctggaggccatcctggagagaaacgagaacctggagggcgagctggagagcctgaaggagaacctgcccttcaccatgaacgagggccccttcgaggagaagctgaacttcagccaggtgcacatcatggacgagcactggagaggcgaggccctgagagagaagctgagacacagagaggacagactgaaggcccagctgagacactgcatgagcaagcaggccgaggtgctgatcaagggcaagagacagaccgagggcaccctgcacagcctgagaagacaggtggacgccctgggcgagctggtgaccagcaccagcgccgacagcgccagcagccccagcctgagccagctggagagcagcctgaccgaggacagccagctgggccagaaccaggagaagaacgccagcgccagatag

SEQ ID NO: 271111 - DNA, 6978 bp, Artificial Sequence
  derived and/or modified sequence
atgaagaagggcagccagcagaagatcttcagcaaggccaagatccccagcagcagccacagccccatccccagcagcatgagcaacatgagaagcagaagcctgagccccctgatcggcagcgagaccctgcccttccacagcggcggccagtggtgcgagcaggtggagatcgccgacgagaacaacatgctgctggactaccaggaccacaagggcgccgacagccacgccggcgtgagatacatcaccgaggccctgatcaagaagctgaccaagcaggacaacctggccctgatcaagagcctgaacctgagcctgagcaaggacggcggcaagaagttcaagtacatcgagaacctggagaagtgcgtgaagctggaggtgctgaacctgagctacaacctgatcggcaagatcgagaagctggacaagctgctgaagctgagagagctgaacctgagctacaacaagatcagcaagatcgagggcatcgagaacatgtgcaacctgcagaagctgaacctggccggcaacgagatcgagcacatccccgtgtggctgggcaagaagctgaagagcctgagagtgctgaacctgaagggcaacaagatcagcagcctgcaggacatcagcaagctgaagcccctgcaggacctgatcagcctgatcctggtggagaaccccgtggtgaccctgccccactacctgcagttcaccatcttccacctgagaagcctggagagcctggagggccagcccgtgaccacccaggacagacaggaggccttcgagagattcagcctggaggaggtggagagactggagagagacctggagaagaagatgatcgagaccgaggagctgaagagcaagcagaccagattcctggaggagatcaagaaccaggacaagctgaacaagagcctgaaggaggaggccatgctgcagaagcagagctgcgaggagctgaagagcgacctgaacaccaagaacgagctgctgaagcagaagaccatcgagctgaccagagcctgccagaagcagtacgagctggagcaggagctggccttctacaagatcgacgccaagttcgagcccctgaactactaccccagcgagtacgccgagatcgacaaggcccccgacgagagcccctacatcggcaagagcagatacaagagaaacatgttcgccaccgagagctacatcatcgacagcgcccaggccgtgcagatcaagaagatggagcccgacgagcagctgagaaacgaccacatgaacctgagaggccacacccccctggacacccagctggaggacaaggagaagaagatcagcgccgcccagaccagactgagcgagctgcacgacgagatcgagaaggccgagcagcagatcctgagagccaccgaggagttcaagcagctggaggaggccatccagctgaagaagatcagcgaggccggcaaggacctgctgtacaagcagctgagcggcagactgcagctggtgaacaagctgagacaggaggccctggacctggagctgcagatggagaagcagaagcaggagatcgccggcaagcagaaggagatcaaggacctgcagatcgccatcgacagcctggacagcaaggaccccaagcacagccacatgaaggcccagaagagcggcaaggagcagcagctggacatcatgaacaagcagtaccagcagctggagagcagactggacgagatcctgagcagaatcgccaaggagaccgaggagatcaaggacctggaggagcagctgaccgagggccagatcgccgccaacgaggccctgaagaaggacctggagggcgtgatcagcggcctgcaggagtacctgggcaccatcaagggccaggccacccaggcccagaacgagtgcagaaagctgagagacgagaaggagaccctgctgcagagactgaccgaggtggagcaggagagagaccagctggagatcgtggccatggacgccgagaacatgagaaaggagctggccgagctggagagcgccctgcaggagcagcacgaggtgaacgccagcctgcagcagacccagggcgacctgagcgcctacgaggccgagctggaggccagactgaacctgagagacgccgaggccaaccagctgaaggaggagctggagaaggtgaccagactgacccagctggagcagagcgccctgcaggccgagctggagaaggagagacaggccctgaagaacgccctgggcaaggcccagttcagcgaggagaaggagcaggagaacagcgagctgcacgccaagctgaagcacctgcaggacgacaacaacctgctgaagcagcagctgaaggacttccagaaccacctgaaccacgtggtggacggcctggtgagacccgaggaggtggccgccagagtggacgagctgagaagaaagctgaagctgggcaccggcgagatgaacatccacagccccagcgacgtgctgggcaagagcctggccgacctgcagaagcagttcagcgagatcctggccagaagcaagtgggagagagacgaggcccaggtgagagagagaaagctgcaggaggagatggccctgcagcaggagaagctggccaccggccaggaggagttcagacaggcctgcgagagagccctggaggccagaatgaacttcgacaagagacagcacgaggccagaatccagcagatggagaacgagatccactacctgcaggagaacctgaagagcatggaggagatccagggcctgaccgacctgcagctgcaggaggccgacgaggagaaggagagaatcctggcccagctgagagagctggagaagaagaagaagctggaggacgccaagagccaggagcaggtgttcggcctggacaaggagctgaagaagctgaagaaggccgtggccaccagcgacaagctggccaccgccgagctgaccatcgccaaggaccagctgaagagcctgcacggcaccgtgatgaagatcaaccaggagagagccgaggagctgcaggaggccgagagattcagcagaaaggccgcccaggccgccagagacctgaccagagccgaggccgagatcgagctgctgcagaacctgctgagacagaagggcgagcagttcagactggagatggagaagaccggcgtgggcaccggcgccaacagccaggtgctggagatcgagaagctgaacgagaccatggagagacagagaaccgagatcgccagactgcagaacgtgctggacctgaccggcagcgacaacaagggcggcttcgagaacgtgctggaggagatcgccgagctgagaagagaggtgagctaccagaacgactacatcagcagcatggccgaccccttcaagagaagaggctactggtacttcatgccccccccccccagcagcaaggtgagcagccacagcagccaggccaccaaggacagcggcgtgggcctgaagtacagcgccagcacccccgtgagaaagcccagacccggccagcaggacggcaaggagggcagccagcccccccccgccagcggctactgggtgtacagccccatcagaagcggcctgcacaagctgttccccagcagagacgccgacagcggcggcgacagccaggaggagagcgagctggacgaccaggaggagccccccttcgtgcccccccccggctacatgatgtacaccgtgctgcccgacggcagccccgtgccccagggcatggccctgtacgccccccccccccccctgcccaacaacagcagacccctgacccccggcaccgtggtgtacggccccccccccgccggcgcccccatggtgtacggcccccccccccccaacttcagcatccccttcatccccatgggcgtgctgcactgcaacgtgcccgagcaccacaacctggagaacgaggtgagcagactggaggacatcatgcagcacctgaagagcaagaagagagaggagagatggatgagagccagcaagagacagagcgagaaggagatggaggagctgcaccacaacatcgacgacctgctgcaggagaagaagagcctggagtgcgaggtggaggagctgcacagaaccgtgcagaagagacagcagcagaaggacttcatcgacggcaacgtggagagcctgatgaccgagctggagatcgagaagagcctgaagcaccacgaggacatcgtggacgagatcgagtgcatcgagaagaccctgctgaagagaagaagcgagctgagagaggccgacagactgctggccgaggccgagagcgagctgagctgcaccaaggagaagaccaagaacgccgtggagaagttcaccgacgccaagagaagcctgctgcagaccgagagcgacgccgaggagctggagagaagagcccaggagaccgccgtgaacctggtgaaggccgaccagcagctgagaagcctgcaggccgacgccaaggacctggagcagcacaagatcaagcaggaggagatcctgaaggagatcaacaagatcgtggccgccaaggacagcgacttccagtgcctgagcaagaagaaggagaagctgaccgaggagctgcagaagctgcagaaggacatcgagatggccgagagaaacgaggaccaccacctgcaggtgctgaaggagagcgaggtgctgctgcaggccaagagagccgagctggagaagctgaagagccaggtgaccagccagcagcaggagatggccgtgctggacagacagctgggccacaagaaggaggagctgcacctgctgcagggcagcatggtgcaggccaaggccgacctgcaggaggccctgagactgggcgagaccgaggtgaccgagaagtgcaaccacatcagagaggtgaagagcctgctggaggagctgagcttccagaagggcgagctgaacgtgcagatcagcgagagaaagacccagctgaccctgatcaagcaggagatcgagaaggaggaggagaacctgcaggtggtgctgagacagatgagcaagcacaagaccgagctgaagaacatcctggacatgctgcagctggagaaccacgagctgcagggcctgaagctgcagcacgaccagagagtgagcgagctggagaagacccaggtggccgtgctggaggagaagctggagctggagaacctgcagcagatcagccagcagcagaagggcgagatcgagtggcagaagcagctgctggagagagacaagagagagatcgagagaatgaccgccgagagcagagccctgcagagctgcgtggagtgcctgagcaaggagaaggaggacctgcaggagaagtgcgacatctgggagaagaagctggcccagaccaagagagtgctggccgccgccgaggagaacagcaagatggagcagagcaacctggagaagctggagctgaacgtgagaaagctgcagcaggagctggaccagctgaacagagacaagctgagcctgcacaacgacatcagcgccatgcagcagcagctgcaggagaagagagaggccgtgaacagcctgcaggaggagctggccaacgtgcaggaccacctgaacctggccaagcaggacctgctgcacaccaccaagcaccaggacgtgctgctgagcgagcagaccagactgcagaaggacatcagcgagtgggccaacagattcgaggactgccagaaggaggaggagaccaagcagcagcagctgcaggtgctgcagaacgagatcgaggagaacaagctgaagctggtgcagcaggagatgatgttccagagactgcagaaggagagagagagcgaggagagcaagctggagaccagcaaggtgaccctgaaggagcagcagcaccagctggagaaggagctgaccgaccagaagagcaagctggaccaggtgctgagcaaggtgctggccgccgaggagagagtgagaaccctgcaggaggaggagagatggtgcgagagcctggagaagaccctgagccagaccaagagacagctgagcgagagagagcagcagctggtggagaagagcggcgagctgctggccctgcagaaggaggccgacagcatgagagccgacttcagcctgctgagaaaccagttcctgaccgagagaaagaaggccgagaagcaggtggccagcctgaaggaggccctgaagatccagagaagccagctggagaagaacctgctggagcagaagcaggagaacagctgcatccagaaggagatggccaccatcgagctggtggcccaggacaaccacgagagagccagaagactgatgaaggagctgaaccagatgcagtacgagtacaccgagctgaagaagcagatggccaaccagaaggacctggagagaagacagatggagatcagcgacgccatgagaaccctgaagagcgaggtgaaggacgagatcagaaccagcctgaagaacctgaaccagttcctgcccgagctgcccgccgacctggaggccatcctggagagaaacgagaacctggagggcgagctggagagcctgaaggagaacctgcccttcaccatgaacgagggccccttcgaggagaagctgaacttcagccaggtgcacatcatggacgagcactggagaggcgaggccctgagagagaagctgagacacagagaggacagactgaaggcccagctgagacactgcatgagcaagcaggccgaggtgctgatcaagggcaagagacagaccgagggcaccctgcacagcctgagaagacaggtggacgccctgggcgagctggtgaccagcaccagcgccgacagcgccagcagccccagcctgagccagctggagagcagcctgaccgaggacagccagctgggccagaaccagaagcagaacaacagcctgagatag

SEQ ID NO: 271112 - DNA, 6978 bp, Artificial Sequence
  derived and/or modified sequence
atgaaaaagggatctcagcagaagattttctccaaggccaagattccttcctctagtcatagtcctattcctagctctatgtccaacatgaggagtagatctctgtcacccctgattggtagcgaaacactgcccttccatagtggagggcagtggtgtgaacaggtcgaaatagcagacgagaacaatatgttgcttgactaccaggatcacaaaggtgctgatagccatgctggtgtgcgttacatcacagaggccctgattaagaagctgacaaaacaagataacctggcactgattaagtccctgaacctgagcttaagtaaggatggcggtaagaagttcaagtatatagaaaaccttgaaaaatgcgttaaattagaggtcttgaacctctcatacaatctgatcggcaagattgaaaaactggacaagttgctgaagctccgggagctgaatctgagctacaataaaatttctaagatagaaggtatagagaacatgtgtaatctccagaaactcaacctggcaggtaatgaaatagaacatataccagtctggctgggcaagaagttaaaatccctgcgggttttgaatttgaagggcaacaaaatcagttctttacaagatatcagcaaacttaaaccattgcaggacctaatttcactgatcctggtcgaaaacccagtcgtgaccctgccacactatctgcaattcactatctttcacctccggtccctagaatctctggagggacagccagttaccacccaggatcgtcaggaggcttttgagcgtttttcactggaggaagtggaacggttggaacgcgatctggaaaaaaagatgatcgaaactgaagaacttaaatccaaacagacccgttttcttgaagaaatcaaaaatcaagataaactgaataagtcacttaaggaagaggccatgctgcaaaaacaatcatgcgaagagcttaaatcagacctgaataccaagaatgagctactgaaacagaagacaatcgaactgacccgcgcctgccagaagcagtacgagttggagcaagaactggctttctacaaaatcgatgccaaatttgagcccctgaactactatccctctgaatatgcagaaattgacaaggcccctgatgaatctccttatattggcaaatcacgctataagaggaatatgttcgccaccgaatcctacatcatcgattctgcacaggcggtgcaaattaaaaagatggaacccgatgaacaactccggaatgaccatatgaatctacggggacacactcctctggatacgcaattagaagataaagagaagaaaatcagcgcagctcagacacgactgagcgagctccacgatgaaatcgagaaagctgagcagcagatcctccgggctacggaggaatttaagcagctggaagaggctatccagttgaagaaaatctccgaagcaggaaaggacttgctctataagcagctgagcggccgactgcagctggtaaacaagctccgccaagaagctctggatctggagctgcagatggagaaacaaaagcaggagattgcagggaaacaaaaagaaatcaaagacctgcagatcgccatcgactcactagattcgaaagatcccaagcattcccatatgaaggcccagaagtctgggaaagaacagcaactagatatcatgaacaaacaatatcagcagctggagagtcggctcgacgaaatactgagtaggattgccaaggaaaccgaagagatcaaagacctggaagagcagctgacagaagggcagattgcagccaacgaagcgttaaagaaagacctcgagggagttatctcgggactgcaggagtacctggggacaattaaagggcaggctacacaggcccagaacgaatgcagaaagctcagagacgagaaggaaaccctgctacagcgcctcacggaagtcgagcaagagcgcgaccagttagagatcgtggcaatggatgctgagaacatgcgcaaagagcttgccgagctcgagtcggccctgcaggaacagcatgaggttaatgcgtcccttcagcagacacaaggcgatctaagcgcctacgaagctgaactggaggccagacttaatcttcgcgacgccgaggccaaccagctaaaagaagaactcgagaaggtgaccagactgactcagttggaacagagcgctttgcaagcggagcttgagaaagagcggcaagccctcaagaatgccctggggaaagctcagtttagtgaggaaaaggaacaagagaactccgagctgcatgcaaagcttaagcacctgcaagacgataataacctgttgaagcagcagctgaaagattttcaaaatcatctgaaccacgttgtcgatggactggtgaggccagaggaggtggctgcaagagtagacgaactgagacggaagctcaagctgggtacgggcgaaatgaatattcattcaccttccgacgtgctgggtaagagtttggctgacctgcagaaacaattctcggagattcttgcacgttccaagtgggaaagagacgaagcccaagtccgtgagcggaaactccaggaagaaatggccctgcaacaggaaaagctggcaaccggtcaagaggagttcagacaagcctgcgaacgtgctctggaggcacgaatgaacttcgacaaacgccagcatgaagctagaatccagcagatggagaatgagattcactatctgcaggaaaatcttaaaagtatggaggagatccaggggctaactgatctgcagctccaggaagccgatgaggaaaaggagcgtatcctggcccagttgcgcgagctcgaaaaaaaaaaaaaattagaagatgccaaaagccaggaacaggtgttcggactggacaaggagctgaagaagttgaagaaggccgttgcaacgtccgacaagctggctacagctgagcttactatcgccaaggaccagctgaaatcactccacggaaccgtaatgaagattaaccaggagcgcgccgaggaactgcaagaggccgagaggttcagcaggaaggctgctcaagcagcgagggatctgacgagagctgaggccgaaattgaactcctgcagaacctgctaagacagaaaggagagcaattcagactagaaatggagaaaacaggggtggggacaggggctaattcacaagttcttgagatcgaaaagttgaatgagaccatggagcgccagcggactgaaatcgcacgtctacagaacgtgctggatctgaccgggagcgataacaagggcggctttgaaaatgttctggaggaaatagcagaattgcgcagggaagtatcctaccagaatgactacatctcaagtatggctgatcccttcaaaagacgggggtattggtatttcatgcctcctcctccttccagcaaagtgtctagccacagttcccaggccactaaagattcgggcgtcgggctgaaatactccgcctctacacctgtgaggaagccccgtccggggcaacaggatggaaaggaggggagccagccccccccagctagcggatactgggtgtacagcccaattcggtccgggctccacaagttgtttccctcccgggatgccgacagtgggggagacagccaggaggagagcgaactagatgatcaggaggaaccgccctttgttcccccccccggctatatgatgtataccgtgctccctgacgggtcaccagttcctcagggcatggcgctttatgcaccgccaccacccttgccgaacaactctcgcccactgacacctggcacggtcgtatatggcccgccaccggccggagcccccatggtctacggccccccaccacccaatttctcaatcccgttcatccccatgggggttctccactgcaacgtcccggaacaccacaatttggagaatgaagttagccgtctggaggacatcatgcagcaccttaaatccaagaagcgcgaggagcggtggatgcgcgccagtaagcgacaatctgagaaggaaatggaagagctgcatcataatatagatgatctgctccaagagaagaagtcactagaatgcgaggtcgaagagctccataggactgtgcagaagagacagcaacagaaggactttattgatgggaacgtagaatcattaatgactgagttagaaatcgaaaagtcactcaaacaccacgaggacatcgtagacgagatagagtgtattgaaaaaaccctcctgaagcgcaggtcagaactcagggaagccgataggctactcgcagaggctgagtccgagttatcgtgcacaaaagagaagacaaagaatgcggtagaaaagtttaccgatgctaagcgaagtctccttcagacagagagtgatgccgaagaattagaacgcagggcacaggagactgccgttaatctggtgaaggccgatcagcagctcagaagcctgcaagcagacgcaaaggacctggaacaacataaaatcaaacaggaggaaattttgaaggaaataaacaagatagttgcagcaaaggacagcgacttccaatgcctgagcaagaaaaaagaaaagctcacagaagagctgcagaagttgcaaaaagacatagagatggctgagcgcaatgaggaccatcacctccaggtgttgaaggaatccgaagtgctgttgcaggccaaacgggccgagcttgaaaagctgaaaagtcaggtgacctcccagcagcaagagatggccgttctggaccggcagctgggacacaaaaaggaagaactgcatcttttgcaaggatcaatggtccaggccaaggcagatttacaggaagctctccggctcggggaaacggaggtgaccgaaaagtgcaatcacatacgggaagtgaaatctcttctggaggagttaagtttccagaaaggggagctaaacgtgcagatcagcgaacggaaaacacaacttactctgatcaaacaggagattgaaaaggaggaggagaacctccaagtagtgctgcggcagatgtccaagcataaaactgaacttaaaaacattttagatatgctgcaactagagaatcatgagctccagggcctgaaactgcagcatgaccagagagtaagcgagttagagaagactcaggttgccgtactcgaagagaagctggagttggaaaatctccaacaaatctcacagcagcaaaagggcgagatcgaatggcagaagcagctgcttgaaagagacaagcgagaaatcgagcggatgaccgctgagagtagagctcttcagagctgtgtggagtgcctcagtaaggaaaaagaggacctgcaagaaaaatgcgacatctgggaaaaaaagctggcacagaccaaaagggtactggctgcagccgaggagaacagcaaaatggaacaaagcaatctggaaaaactcgaacttaatgtccgcaagctgcagcaagagttggaccagctgaatagagacaagttgagcctccataacgacatttcagcaatgcaacagcagctgcaggaaaagcgggaggccgtgaattctttgcaagaagagctggcgaatgtacaagaccatctcaatctcgctaagcaggacttactgcacacgacaaaacaccaggacgtcttgcttagtgaacagaccagactgcagaaagacatctctgaatgggctaacagatttgaggattgccagaaggaggaggagacaaaacaacaacagctccaggttcttcaaaacgagattgaagagaacaaactcaagctggtccagcaagagatgatgttccagcgcctccagaaagagcgggaatcggaggaaagtaaattagagacgagcaaagtgaccctgaaggaacagcagcaccagcttgagaaggagcttacggaccagaaaagtaagttggaccaggtcttgtcaaaggttctggctgccgaggagagggtgcggaccttacaggaagaggaaagatggtgtgaaagccttgagaagacactctcccagacaaaaagacaactgtctgagagagaacagcaattagttgaaaaatctggggaacttctggccctgcagaaggaggccgactcaatgcgcgccgattttagtctgctgaggaatcagtttcttacagaacgtaaaaaagctgagaagcaggtggcctcccttaaggaggcattgaaaattcaaagaagccagttagagaagaacctgctggagcagaagcaggagaacagttgcattcaaaaggaaatggctaccatagagctcgtcgcacaggataaccacgagcgcgctcgaagacttatgaaagaactgaatcagatgcagtacgaatatactgagttaaagaagcagatggctaatcagaaggatctagaacggcgtcaaatggaaatttctgacgctatgaggacattgaagtctgaggtcaaggacgagatccgaacatccctcaagaatctgaatcaattcttgccagaactgcccgctgacctggaggccatcttggagcggaatgagaatctggagggtgagctggagagtctcaaagaaaatctgccatttactatgaatgaaggccctttcgaagaaaaattaaatttctcgcaggtgcacattatggatgagcattggcggggcgaggcccttcgagaaaagttgaggcaccgggaagatcgccttaaggcgcagttgagacattgcatgagtaagcaggctgaagtgcttatcaaaggaaagcgacagacagagggcaccctgcactcgctgcgacggcaggtcgatgctctcggcgaattggtaacctctacatctgcagacagtgctagctccccctcactgtcgcagctggagagttccctgacagaggactctcagctgggtcagaaccaggaaaaaaatgcatcagcgaggtag

SEQ ID NO: 271113 - DNA, 3024 bp, Artificial Sequence
  derived and/or modified sequence
atgcagcatctgaagagcaagaaaagagaggagcggtggatgagggccagtaaacggcagtccgaaaaagagatggaggagcttcaccataatatcgatgacttattacaggaaaagaaatccctggaatgtgaggtggaggagcttcatcggaccgttcagaaacgccagcagcagaaagactttatcgatgggaacgtggagtcactcatgacagagcttgagatcgaaaagagcctgaaacatcacgaagacattgtcgacgagatagagtgcattgagaagacactattgaaaaggagatccgagctccgcgaggccgacaggctcctggccgaggccgaaagcgaactgtcctgcaccaaggagaaagtctgtctgctcgtggtgtggggtgtgagctccgtttggacgaagaacgcggtggaaaagttcacagacgcgaaacggtccctcttgcagaccgagtctgatgctgaggagctggagagacgcgcccaagagacggctgtgaacctggtgaaggcagaccagcagttgcggtccttgcaggctgatgctaaagatttagagcaacacaagatcaaacaggaggagattctcaaggagattaataagatagtggccgccaaggactcagatttccaatgtcttagcaagaaaaaagagaagctgacagaggaactgcagaaactccaaaaagatatcgagatggctgagaggaatgaagatcaccatctgcaggtgctgaaggagtcggaggtccttctgcaggcaaaacgtgcagaactggagaagctaaagagccaagtaaccagtcagcagcaggagatggctgttttagacagacagctcggccataaaaaggaggaactgcacctgctccagggctcaatggtccaggcgaaggctgatctgcaagaagcattgcggctaggcgaaaccgaagtgactgagaaatgtaatcacattcgagaagtcaaaagtctcctggaggaattatcctttcaaaagggtgagttaaatgttcagataagcgaacgcaagacccagttgaccctcataaagcaggagattgagaaggaggaggaaaacctgcaagtggtcctcagacagatgtctaagcacaagaccgaactcaagaatattctcgatatgttacagctcgaaaaccacgaactgcagggactgaagctgcagcacgatcagcgcgtatctgaactggaaaagacacaggtcgccgttttggaggaaaagttggagttagaaaacctacagcagatatctcagcaacagaaaggtgaaattgagtggcagaagcagcttctcgaacgggataaacgagagatcgagcgcatgacagcggagagtcgagcgctccagagttgtgtggagtgcctgtctaaagaaaaggaggatcttcaggaaaagtgcgacatctgggaaaagaagctggctcagacaaagagagtcttagctgcagctgaggaaaattccaaaatggagcagtcgaatctggagaagctcgagttgaacgtacgcaaacttcaacaggagctggaccagttgaacagggataagttgtctctgcacaatgacattagcgccatgcagcagcagcttcaagaaaagcgagaggctgtgaattctctacaggaggaactggctaacgtgcaggaccacctaaacctggctaagcaggacctacttcacactacaaagcaccaagatgtcctcctctctgagcagacgaggctacagaaggacatatctgagtgggccaaccggttcgaagactgccagaaagaggaagagactaagcagcaacaactacaggtgctacagaatgagattgaggaaaacaagctcaagttggtgcaacaggaaatgatgttccagaggctgcaaaaagaacgcgaatccgaggaaagtaaactcgagactagcaaagttaccctgaaggaacagcagcatcagctggaaaaagagttgacagatcagaagtcaaaacttgaccaggtgctcagcaaggtgctggctgctgaggagcgagtgaggaccttgcaggaggaggagcgttggtgtgaaagcctggaaaagaccctatcccagaccaagcgacagctctcggagagagaacagcagttggtagagaagagcggtgagctgctggctctgcagaaggaagcagattccatgcgcgcggatttctctttgctgcgtaaccaattcctgaccgagcggaagaaggcggaaaagcaggtcgcctccctgaaggaggctttaaagattcaaaggtcgcagcttgagaaaaacctcctcgagcagaaacaagaaaattcttgcattcagaaagagatggccacgatcgagctggtcgcacaggataaccacgaaagggctcgacggttgatgaaagagcttaaccagatgcaatacgagtataccgaactcaaaaaacaaatggctaatcaaaaggatctagaacgtcggcagatggagatatcagacgcaatgaggacattgaagtcggaagtgaaagacgagattcggacaagtcttaaaaacttgaatcagtttctacctgagctaccagccgacctggaagctatcttggagcgcaatgaaaacctagaaggcgagctagagtccttaaaagagaatcttcccttcactatgaatgaggggccctttgaagagaagctgaacttcagccaagttcatattatggacgaacattggcggggggaagccctgcgtgaaaaattacgtcatcgcgaggacaggctgaaggcccagctccggcactgtatgtcaaaacaagcagaggtgctcatcaaggggaagagacaaacagagggcacacttcactcattacggaggcaggtagacgccctgggcgagctggtcacgagcacatccgctgactctgcatctagcccaagcctcagccagctagaatcttctttgactgaggatagtcagctgggccaaaaccaggagaagaacgcgtcagcccgctag

SEQ ID NO: 271114 - DNA, 5322 bp, Artificial Sequence
  derived and/or modified sequence
atgaaagcccagaaatccgggaaagagcagcaactggacatcatgaacaagcagtatcagcagctcgagtctaggctggacgagattctatccagaatcgctaaggagacggaagagatcaaagatctcgaggaacaactgacggagggccagattgctgccaatgaggcactgaagaaagatctggaaggagtgatctccggcctgcaagaatatttgggcacaattaagggccaagcaacccaggctcagaatgaatgtaggaagttgagggatgagaaggagaccctgctgcagcggctgaccgaagtggagcaggaaagagatcagttggagattgtagcgatggacgctgagaacatgcgcaaggagctcgctgagcttgagtcagccctgcaggagcaacacgaagtgaatgcatcccttcaacagactcagggcgatctgtcggcatacgaagccgagttggaggcacgtcttaacctgagggacgcagaagccaaccagctgaaggaggagctagagaaggtgactcgtttgacccaattggaacagagcgcccttcaggcagaactggagaaggagaggcaagctctgaagaacgccctgggaaaagcacagttctcagaagaaaaagagcaggagaactccgagttgcacgctaagcttaaacacctccaagacgacaacaatctgctgaaacaacagctcaaggactttcagaaccatttgaaccacgttgtggacggactggtgagacctgaagaggtggccgcacgcgtcgatgaactgagacgcaagcttaagctcggcaccggagagatgaacatccattctccttctgatgtgttaggcaagagcctggcagacctccagaagcagttctcagagatcttagcgcggagcaagtgggagagagatgaagctcaggtaagggagagaaagctgcaggaggaaatggccctacagcaggagaaactcgcgacagggcaagaggaatttaggcaggcgtgtgaacgcgcccttgaagccagaatgaactttgataagagacaacatgaagcccggatccagcagatggaaaatgagatccactacctgcaggaaaacctcaagtccatggaggaaattcaggggctgaccgatttgcagttacaggaagccgacgaagagaaagagcggatcttggcccagctgcgcgagcttgaaaagaagaaaaagctggaagacgctaagagccaggagcaggtgttcggacttgataaagagttaaaaaagctcaaaaaagcagtggccacctcagacaagctggctaccgctgagttgacaatagcaaaggaccaactgaaaagcctgcacggcactgtgatgaaaatcaaccaagagcgcgccgaggaactgcaggaggccgagagattcagcagaaaggctgctcaggctgccagagatctgacccgggctgaagccgaaatagagttgctgcagaatttactacggcagaaaggtgaacagtttagactagagatggaaaagactggcgtgggcacaggggctaattcgcaggtgctggaaatcgaaaagctcaatgagacaatggagcgtcagaggactgaaatcgcccggctccaaaatgtactcgacctgactgggagtgacaataagggcggctttgagaacgtccttgaggaaattgcggaattgagacgggaggttagctaccagaacgactacatcagctctatggcagatccattcaagcgtcgggggtactggtactttatgccgcctcctccatcatcaaaggttagctcacattcttcccaagcaaccaaggactccggtgtcggattaaagtactcagcttcaaccccagttcgaaagcctcggccagggcagcaggacgggaaggaaggcagccagcctcccccggccagcggctattgggtgtattcaccaatacgatctgggctgcataagctatttcccagccgggatgccgatagcgggggcgacagccaggaggagtccgagctggacgaccaggaagagccccccttcgtgccaccccctggctacatgatgtacacagtgctgccagacggatccccagtgccacagggcatggctttgtatgctccccctccacccctacctaataattctcgtcctttgacaccaggcacggtggtttacggtccacctcctgccggagcgccaatggtttacgggcccccaccacccaatttctccattcctttcatccccatgggagttctgcactgcaacgtccctgagcatcataatctggagaatgaggtgtcacggctcgaggatattatgcagcatctgaagtctaagaagagggaagaacgttggatgagagcgtcaaaacggcaaagcgagaaggaaatggaagaattgcaccataatatcgacgatcttctgcaggagaagaaatctttggagtgcgaggttgaagaacttcatcgcacggtacaaaagcgacagcagcagaaggactttatcgacgggaacgtggagagtcttatgacagaattagagattgagaaatcgctcaagcaccacgaagatatagtggatgagatcgaatgtatcgaaaagacattattgaagcgtaggagcgagctgcgagaggccgatcgccttctggccgaggccgagtcagaattgtcatgcacaaaggaaaagacaaaaaatgcagtggagaagtttaccgatgccaagagaagcttgctgcagaccgaatcagatgccgaggaactggagcgccgtgctcaggagacagctgtaaaccttgttaaagccgaccagcagctacgcagtttgcaggcggacgctaaagatctggaacaacacaagatcaaacaggaagagatcctcaaagaaatcaataaaatcgttgccgccaaggactctgattttcagtgcctgagcaagaagaaagagaagttgaccgaagagttgcaaaaacttcaaaaagacatagagatggcagagcgtaatgaagaccatcatttacaggttctcaaggagtccgaagtgcttcttcaggccaaaagagccgaacttgaaaagctaaaatctcaagtgacaagtcaacagcaggagatggctgtgctggacaggcagcttggtcacaaaaaggaggagctgcatctgctgcagggatccatggtgcaggccaaagccgatctccaagaggcactccggttgggcgagactgaggtgactgaaaaatgcaatcacattagggaggttaaatccctgctggaagagctttccttccaaaaaggagagctaaatgtccaaattagcgaacgaaaaacacaactcactctaataaagcaggaaattgagaaagaagaagagaacctccaggttgtcttgaggcagatgtcaaagcataagactgagcttaagaacatcctcgatatgctgcagcttgagaaccatgagctccagggcttaaaattacagcatgaccagcgggtgagcgaacttgaaaaaactcaggttgccgtgttagaggagaagctggaactcgaaaacctacagcagatttcgcaacagcagaagggggagatagaatggcagaagcagctgctggaaagggacaaaagggaaattgagcggatgacagcagagtctagggccctacaatcttgtgtagaatgtctgagtaaggaaaaagaagatctgcaggaaaaatgtgatatttgggaaaaaaagctggcccagaccaaacgagtactggcagccgccgaggagaattcaaagatggagcaaagtaatctggaaaaattggagctgaacgtcaggaaactgcagcaggaactagaccagctgaacagagacaagctgtcactccacaacgatatctctgccatgcagcaacagctgcaagagaagcgggaggcagtcaatagcctccaagaagaactggctaacgttcaggaccatctgaacctcgcgaagcaagacttgctgcatactactaaacaccaagacgtccttctaagcgaacagacaaggttacagaaggacatttcagagtgggcaaatagatttgaagattgccagaaagaggaagaaaccaaacagcagcaactacaggtgttacaaaacgaaatcgaggagaacaagttaaagctggttcaacaggagatgatgtttcagaggttacagaaagaaagggaatccgaggagagcaaattggaaaccagcaaggtgacactcaaggagcagcagcatcagctggagaaggaactaactgatcagaagagcaaactcgaccaggtgttatcaaaagtgctggccgcagaggagagagtgcggaccctgcaagaggaggagcgttggtgcgagtccctcgagaagacgttgagtcagacgaaacggcagctatcagagcgagagcagcagcttgtcgaaaaatcaggggagctcttggctctacagaaagaagccgactctatgagagctgacttcagccttttgcgaaatcagttcttgactgaacgcaagaaggccgaaaagcaggtagccagtttaaaagaggccctgaagatccagcgcagccagctcgagaaaaacctgctggagcaaaaacaggaaaactcatgtatacagaaggagatggccacgatcgaactggtggcacaggataaccacgaacgcgctcgcaggctcatgaaagagctgaatcagatgcagtacgagtacaccgagctgaaaaagcagatggccaatcagaaagacctggagcgaaggcagatggaaatctcagacgccatgaggaccctgaagtctgaagtgaaagacgaaatccgcaccagccttaaaaatcttaatcagtttctacccgagttgcctgccgatcttgaagccatcctcgaacgaaatgaaaatcttgagggagagctcgagagccttaaagagaatttgcccttcacaatgaatgaaggcccgttcgaagagaagttaaatttctctcaggtccatattatggatgaacattggagaggagaggcattacgcgagaagctgaggcacagagaggacagactgaaggcacaattaaggcattgtatgtccaagcaggccgaagtcctgatcaagggtaagcggcagactgagggcacgctccatagcctccgacgccaagttgatgctctgggtgaactggtgactagcacaagtgcagatagcgcctcctcaccgtccctatcacaacttgagtcctccctgacagaagattcacagcttggccagaatcaggagaaaaacgcatccgcccggtag

SEQ ID NO: 271115 - DNA, 6978 bp, Artificial Sequence
  derived and/or modified sequence
atgaagaaaggcagtcagcagaagatcttctccaaagcgaagattccttcctcctcacatagccccattcctagctcgatgtctaacatgcgaagcagaagtctgtcccctctcattgggtccgagacactcccgtttcactccggaggacagtggtgtgagcaggtcgagatcgcagatgagaataacatgttgctggactaccaggatcacaaaggcgccgactcccatgcaggagttcggtatataactgaggccttaatcaagaagctgacgaagcaggataacctggcgctcattaaatcccttaacctgagtttgtcgaaagacggcggcaagaaattcaaatatatagaaaatctggaaaaatgcgtaaagctcgaagttttgaatctttcctacaatctaatagggaaaattgaaaagctggacaagctgttaaagctgagagagctaaatctgtcctacaataaaatctccaagattgagggtatcgaaaatatgtgtaacctgcagaagctcaatttagccggaaacgagatcgagcacatccctgtctggctcggcaaaaagcttaaaagcctgcgcgtgctgaacctgaagggtaacaaaataagctcattgcaagatatctccaagctgaagccacttcaagatctcatttccctcatcctggtggaaaaccctgtcgtcactctcccccactacctgcaattcaccatctttcatttacggtccttggagtcactagaagggcaaccagtgaccacacaggatcggcaagaagcatttgagcggttctcattagaggaggttgagagacttgagagggacttggagaagaaaatgattgaaaccgaggagctaaagtctaagcagaccagattcctggaagaaatcaagaaccaagacaagcttaacaagagcttaaaggaggaagccatgctccagaagcaaagctgcgaagagttaaagagcgatttaaacactaagaatgagctcctgaagcagaaaaccatcgagctgacaagagcctgccagaagcaatatgagctggaacaagagctggccttctacaaaatcgatgccaagttcgaaccactgaattattaccccagtgagtacgccgaaattgacaaggcacctgatgaaagtccctacatcggcaagagccgatataagcggaacatgtttgcaacagagtcatacatcatcgactccgcccaagccgtgcagattaagaaaatggaaccggacgaacagctccgcaatgaccatatgaacctgcgggggcacacgcctctcgatactcaactcgaggataaggaaaagaaaatcagcgccgctcagaccaggctgagcgagctccacgatgagatcgagaaggccgagcagcagattctccgggctactgaggagttcaaacagctggaagaggccatacagttgaagaaaattagtgaagccggaaaggatcttctgtacaagcagctctcgggccgccttcagcttgttaacaagctccggcaagaggccctggatctggaactccaaatggagaaacagaagcaggagatagctgggaagcaaaaggagattaaagacctccagatcgcgattgactctttagatagcaaggatcccaaacactcccacatgaaggcccagaaaagtggaaaagaacagcagctggacattatgaataagcagtaccagcagctagaaagccgcctcgatgagattctgtcacgaatcgccaaggagactgaagagatcaaggatctcgaggaacaacttactgaaggtcagatcgccgcgaacgaggccctcaaaaaagaccttgaaggagtcatttcaggtttgcaagagtatctcggtacaattaaagggcaggccactcaagcccagaacgaatgcagaaagctgcgggatgaaaaagagacacttctccagagactcactgaggtggaacaggagagagaccagttggaaattgtggccatggacgctgagaacatgcgtaaggagctggcggagctcgaaagcgcactgcaggaacagcacgaagttaacgcttctctgcaacagacacagggcgaccttagcgcgtatgaggctgagctggaagctcgcttaaacctcagagacgctgaggccaatcaactcaaggaggaactggaaaaagtgacccggctgacccaactcgaacaatcagcgcttcaggcagagttagaaaaagagagacaagcccttaagaacgcactcggaaaggcgcagttttcagaagagaaggagcaggagaattcagaattacacgcaaaactcaaacatcttcaggatgataataacctgctcaaacaacaactgaaggattttcaaaaccatctcaatcacgtagtggacgggctggtccggccagaggaggttgccgcacgtgtggacgagctgcggcggaagctgaaacttgggacaggcgagatgaatatacactccccatccgacgtcttaggtaagtcactggccgatcttcagaagcagttttctgagatcttagcccgaagcaaatgggagcgagatgaggcccaggttcgggagcgcaaattgcaagaggaaatggcactccagcaggagaaactcgccacaggacaggaagaattcagacaggcatgcgagagagccctggaggcacggatgaactttgataaacggcagcacgaagctcggatacagcagatggagaacgagattcactacctccaggagaatttaaagagtatggaggaaatccagggcctgaccgacctccaactgcaggaggcagacgaggaaaaagagcgcatcctcgcacagttacgggagttagaaaaaaagaagaagcttgaggacgcgaagagtcaggagcaagtcttcggtctggacaaggagctgaagaagctgaagaaagcagtggccaccagcgataagttagctaccgctgagcttaccatcgccaaggatcaattgaaatctttgcatggtacagttatgaagattaatcaggagagggccgaagagttgcaggaagctgagcggtttagtcgtaaagccgctcaggccgcccgcgacctgacccgggctgaggcagaaatcgaactgctccagaatctgctgagacagaaaggcgaacagttcagacttgagatggagaagaccggggtgggcaccggagcaaattcacaggttcttgagatagaaaagttgaacgaaaccatggaacggcagcggaccgaaattgcccggctccagaatgtattggacctcaccggcagcgacaataagggcggattcgagaatgtgcttgaggagattgccgagttacggagagaggtctcctatcagaacgactatattagcagcatggctgatccctttaagcgcagaggatattggtacttcatgcctccaccacccagcagcaaggtttcctcccatagttctcaagcaaccaaagacagcggcgtcggactaaaatacagcgccagtacccctgtgcgcaagccgcgccccgggcagcaggacggcaaagagggctctcaaccaccgcccgcctcaggatactgggtttacagcccaatacgctccggactgcacaagctatttccctcccgagacgcggatagcggaggggacagccaggaggagtcggagcttgacgaccaggaggaacctccttttgttccccctccaggctatatgatgtatacggtgctcccggacggatctcctgtgccacagggtatggcactttacgctccccctcctcctcttcccaataattcccgcccgcttacgccaggcaccgtggtatatggcccgcctcccgccggagcccccatggtgtacggcccccctcctccaaatttcagcattccctttattccaatgggggtgctgcattgtaatgtgcccgaacatcacaacctcgagaatgaagtttccaggctcgaggatattatgcagcatctaaagtcaaagaaaagagaggagcgatggatgagggcttctaagaggcagtcagagaaggaaatggaagaactccaccataacattgacgacctgctgcaagagaaaaagtctctggagtgcgaggttgaggaactgcacagaaccgtgcaaaagcggcagcaacaaaaagattttatagatggcaacgtcgaaagccttatgactgaactagaaatcgaaaagtccctgaagcaccacgaggatattgtcgacgaaattgagtgcatcgagaaaaccctcctaaagcgccggtcagagctgagggaggcagacaggctcctggccgaggccgagagcgaattgtcatgcacaaaagagaaaacgaaaaacgctgtggagaaattcaccgacgccaagcgctccctgctccagaccgaatctgatgctgaggaattggaacggagggcacaagagaccgcagtgaatttggtaaaggcagatcagcaattgaggtcactccaagctgacgcgaaggatttagaacaacataaaatcaaacaagaggagatactgaaagagatcaataaaatagtggcggctaaagacagcgattttcaatgtttgtctaagaagaaggagaagctaacagaggagctccaaaagctgcagaaggacatcgaaatggctgagcgtaatgaagatcaccatctgcaggtgcttaaggaatcagaagtgcttctgcaggcaaaaagagccgagcttgagaagctgaaatcccaggtcacgtcccagcagcaagaaatggcagtgctggacagacagcttggacataagaaagaggagctccatctcctgcagggaagcatggtgcaagcaaaagccgacttacaagaagcacttagactcggggaaacagaagtcactgagaagtgcaatcatatacgggaggtcaagagtctgctagaagaactctctttccaaaaaggtgagttaaatgtccagatttctgagaggaagacacagctcacactgattaagcaagaaatcgagaaggaggaggagaacctgcaagttgtcctgcggcagatgtcgaaacacaaaacagagttaaaaaacattctagacatgctgcaactcgaaaaccatgaacttcaggggctgaagcttcagcacgaccagagggtttccgaacttgagaagacccaggttgccgtgttagaggaaaagttagagctcgaaaacctccagcagatatcgcagcagcagaagggtgaaatagagtggcagaaacaacttttggagagggacaaaagagaaatcgagaggatgacagctgaatcacgcgcgctccaaagttgcgttgagtgccttagcaaggaaaaagaggatctccaggaaaagtgtgacatctgggagaagaaactagctcagactaaacgcgtgctagcagcagccgaagagaacagcaagatggagcaatccaatcttgaaaaattggagctgaatgtgagaaaactgcaacaagaactggaccagttgaatcgggataaattgagcctgcacaacgacatcagtgccatgcagcaacagctccaagagaaacgagaggccgtgaactctctccaggaagagttggccaatgtgcaggatcacctgaacctggctaaacaggatctcttgcacaccacgaaacatcaggatgttctcttatcagagcaaactagactccagaaagatataagtgaatgggctaaccgctttgaagattgtcagaaggaagaagagactaagcagcaacagttacaggtccttcagaacgagatcgaggagaacaagttgaagcttgtgcagcaggagatgatgttccagcgcttgcaaaaagaacgagagtccgaggagtccaagctcgagacgagcaaggttactttaaaagagcaacaacaccaattagaaaaggaactgaccgatcaaaagtcaaaactcgatcaggtcctgtctaaagtgctggcagccgaggagcgggtgaggactctgcaggaggaggagcgttggtgtgaatcactggaaaaaacgttatcccagaccaaaaggcagctgtcagagagagagcagcagctagtggaaaagagcggtgagttgctggccctgcaaaaagaggcagattcaatgcgggccgatttctccctgctaaggaaccagttcttaaccgaaaggaaaaaggcggagaagcaggtcgcgtccctgaaggaggcactaaaaattcagcgctctcagctggaaaagaatctgctggagcagaaacaggaaaactcttgcattcaaaaggaaatggctacgattgaactggtggcacaggataatcatgagagggcacgcagattaatgaaggagctcaatcagatgcagtatgaatataccgaattaaaaaaacaaatggcaaatcaaaaggaccttgaaagacgacagatggaaatcagcgacgccatgcgtaccttgaagagcgaggtcaaagatgaaattcggacatctcttaagaacctgaatcagtttcttcctgagctccctgccgatctcgaggccatcctcgagagaaatgagaacttagaaggcgaacttgaatccttgaaagaaaatctgccgtttaccatgaatgagggaccctttgaggagaaacttaatttctcacaggtgcatatcatggacgaacattggcgtggcgaggcattacgagaaaaacttcggcaccgcgaggaccgcctgaaggctcaattacggcactgtatgtcgaagcaggctgaagtgcttatcaaagggaaaaggcagaccgagggcaccttgcatagcctgcggcggcaggtagatgcactgggagagctggtcactagcacatcagcggattcggcatccagtccctccttaagtcaattggagtcatctcttaccgaggacagccagctggggcaaaatcaggaaaaaaatgcatctgcccgctag

SEQ ID NO: 271116 - DNA, 6978 bp, Artificial Sequence
  derived and/or modified sequence
atgaagaagggctcgcagcagaagatcttctccaaagcgaagattcccagctccagtcatagccccatcccttcaagtatgtcaaacatgaggagtaggagtctgagccctctgataggcagtgagacgcttcccttccattccggagggcagtggtgtgaacaagtcgagatcgccgatgagaataatatgctgctggattaccaggatcataaaggcgcggactctcatgcaggcgttaggtatattaccgaggcactgattaagaaactcaccaaacaggacaatctagcccttataaaatcgttgaacctttctctcagcaaagacggcggaaagaaatttaaatacatcgagaatcttgagaagtgcgtgaaactggaggttctaaacctgagttacaaccttattggcaaaatagagaagcttgataagctgttgaaacttcgtgaattaaatctttcctacaataaaatatccaaaatcgaaggcatcgagaatatgtgtaatctgcagaaactcaacctggccggcaacgaaattgaacatatacccgtctggctgggcaagaaactgaaatccttacgagtgcttaatctgaaaggcaataaaatctcatccctgcaggatataagcaagctgaaacccctgcaggatctcataagcctcatcttagtggaaaatccagtggtcactctgccccactacctgcagttcaccatattccatctacgaagtttagaaagtctcgaaggccagccagtaactacacaggatcgccaggaagcgtttgagcgcttcagtctcgaggaagttgaacggctcgagcgcgatctggagaaaaagatgattgaaactgaagaactgaaaagtaaacagacccgtttcctcgaggaaattaaaaatcaggacaagctcaacaagtctctgaaggaagaagcaatgctgcagaaacagtcctgtgaggagttgaaatctgacctgaacacaaaaaacgagttactgaaacagaagaccatcgaactaacacgggcctgtcaaaaacaatacgaattggagcaagagctggccttttataagatcgatgccaagttcgagcccttgaactattaccccagtgagtatgctgaaatcgataaggcacccgacgaaagtccatacatcggcaagtctcgctacaagagaaatatgtttgctaccgaaagttacattatcgactctgcccaggccgtgcagatcaaaaaaatggagcctgacgaacagctccgaaatgaccacatgaaccttagggggcataccccccttgatacccagttggaagataaggagaagaaaattagcgcagcccagacaagactctcagaacttcacgacgaaatcgagaaagccgaacagcagatcctccgcgcgaccgaggagttcaaacagctggaggaggccatccaactcaagaagatcagtgaggcaggaaaggacctgctctataaacagctatcagggaggctccagctggtgaataagttgcggcaggaagccttagatctggagctgcaaatggaaaaacagaagcaggagatcgccggtaagcagaaagaaattaaggatttacagattgcaatcgactcattggactccaaggatccaaagcatagccacatgaaagctcaaaagagcggcaaggaacaacaattggatattatgaataaacagtatcaacagttggagtccagactcgatgagatcctcagtagaatcgctaaagagaccgaagaaatcaaagacttagaagaacaattgactgagggacagatagccgctaatgaagccctgaagaaagatttggagggggtgatttctggtttacaggaatacctcggtacgatcaagggtcaggcaactcaggcccagaatgagtgccgaaaactacgggacgagaaggagacgctcctgcagcgccttaccgaggtggaacaagagcgcgaccagctcgaaatcgtggcaatggacgcggaaaacatgcgaaaagaactcgcggagctagagtcggctcttcaggaacagcacgaggttaatgccagcctgcaacagacacagggagacttatcagcctatgaagctgagcttgaggcacgactgaacctcagggacgccgaggcaaatcagctgaaggaggagctggaaaaggtcacgaggctgacacagctggagcaatctgccctccaggctgagctcgaaaaggagcgtcaggctctgaagaacgccctgggcaaagcgcaattctcagaggaaaaagaacaagaaaactcagaacttcacgctaagctgaaacacttgcaagatgacaataacctactgaaacaacaactgaaggacttccagaaccatctgaatcacgtcgtggacggcctggtgaggcccgaggaggtcgcagccagggtggatgaattacgtcggaagcttaagttgggcaccggagagatgaatatacatagtcccagcgatgtcctcggcaagtcccttgcggatctgcagaagcagttctccgagatcctagccaggtcaaagtgggaacgagacgaagcacaggtacgcgagcggaagctgcaagaggagatggccctgcagcaggaaaaactggcaacaggccaggaggaatttcgtcaggcctgcgagagggcgttggaagccaggatgaactttgacaaacgccaacacgaagctaggattcaacaaatggagaatgaaatccactacctgcaggagaacctcaaatctatggaagagatacaaggtttaacagacctgcaactgcaggaggctgacgaggagaaggagcgcatcctagctcagctccgcgaattggagaaaaagaagaaactggaagacgcaaagtcacaggagcaggtattcggcctggataaggaactgaaaaagttgaaaaaagcagttgcaaccagcgacaaactcgccaccgcggagctcacaattgccaaggatcagctgaaatctctccacgggacagtgatgaagatcaaccaagaaagggccgaagagctccaagaagccgaaaggtttagccggaaagctgctcaggctgcacgggatctgactcgggccgaggcagaaatagagttgctgcagaacctgctgagacagaaaggagagcagtttaggctggaaatggagaagacgggcgtggggaccggcgcaaattctcaggttttggaaatcgagaaactcaacgagactatggaaaggcagaggactgagattgctagattacaaaacgtcttggatcttacaggttccgacaacaagggcggattcgagaatgtattggaagaaatagccgagctgcgccgggaggtgtcttaccagaacgattatatctcctctatggcagatcccttcaagaggcgaggttactggtattttatgccaccccccccctcctcaaaggttagctcacactccagccaggctacaaaggactctggggtcggcttaaaatacagtgccagcaccccagttcggaaacccaggcccggccagcaggacgggaaggagggaagtcagccaccacctgcctcgggttattgggtttactccccaatcaggagtggactccataagcttttccctagtcgcgacgccgattctggaggcgattctcaggaagaatccgagctcgacgaccaggaagagcccccgttcgtgccaccccctggctacatgatgtatactgttcttcccgatggctcacctgtgccacagggtatggctctgtacgcccctcctcccccactccctaataacagccggccattgacacctggtaccgttgtatatgggccaccgccagcaggagctcccatggtgtacggacctccacctcctaacttttccattcccttcattcccatgggcgtgctccattgcaatgtgcctgagcaccataacttagaaaatgaggtaagtagactcgaggatatcatgcagcatctgaaatcgaagaagcgcgaggaacgctggatgcgagcttccaagcggcaaagcgaaaaggagatggaggagctccaccacaatatcgatgacctactccaggaaaagaagagcctggaatgcgaggtggaggagctccacagaactgttcagaagagacagcagcaaaaagatttcatcgatggtaacgttgagagcctgatgacggagttggagatagagaagtccctcaaacaccatgaggacattgtggacgagattgagtgtatcgaaaagactctactaaagcggcgatctgaacttcgagaggccgaccgcctacttgctgaggcagagagcgagttgtcatgcaccaaggaaaagacgaagaacgctgttgaaaaatttaccgacgccaagaggtctctgctgcagacggaaagcgacgccgaggagctcgagcgtcgagcgcaggagacggccgtgaacctggtgaaggccgatcaacagctcagatccctccaggctgacgcaaaagacctggagcagcacaagatcaagcaggaagagatcctcaaagaaattaacaaaattgtggctgctaaggattccgacttccagtgcctgtcgaagaaaaaggagaagctcacagaagagctccaaaagctccagaaagatattgaaatggcagaaaggaacgaagaccatcacctgcaagtattgaaagagtctgaagtccttttacaggctaaacgcgccgagttggagaagttgaaatcccaagtcacttcgcagcagcaggagatggccgtgctggaccgacaactcggacacaagaaagaggagctccacctcctccagggatccatggtccaggccaaggccgatctgcaggaagccttgaggttgggtgaaacagaagtgacagaaaagtgcaaccatatcagagaggttaagtcccttcttgaagagctctcatttcagaagggcgaattgaatgtgcagatctcagagaggaagacgcagctaaccctcatcaagcaagagattgaaaaggaggaggaaaatctacaggtggtattaagacagatgtctaaacataagaccgagctgaagaacatactggacatgctgcagctcgagaaccacgagttgcagggccttaagctccaacatgatcaaagggttagcgaactcgaaaaaacccaggtggctgttttggaggagaaactggaattggagaacttgcagcagatctcccagcagcagaaaggagagattgagtggcagaaacaactgctcgaacgggacaaacgcgaaatcgagcgcatgacagccgagagtagggcactgcagagctgtgtggagtgcttgagcaaagaaaaagaagacctacaagagaagtgtgacatatgggaaaagaagctggcccagaccaagagggtcctcgcagccgctgaggagaactccaagatggaacagagcaacttggaaaagctggagctcaatgtgcggaaactccaacaagaactggaccaactgaaccgagacaaactgtcactccacaacgacatttccgcaatgcaacagcagttgcaggagaagcgggaggccgtcaacagcctacaggaggaactggcaaacgtgcaggatcacctgaatctagcaaagcaggatctgcttcacacaactaaacatcaggatgtccttctctctgaacagacgcgcctgcagaaagatataagtgagtgggccaaccgattcgaggattgtcagaaggaggaagaaacaaagcagcagcaacttcaggtgctacagaatgaaattgaggagaacaagctgaagctggtgcagcaggaaatgatgttccagaggctccaaaaggaacgcgagagcgaggagtctaagttggaaactagcaaggtgacgttgaaggaacagcaacaccaactcgaaaaggaactaaccgaccagaaatctaaactggaccaggtactctccaaggtactcgccgcagaggagcgcgtccgcactctccaggaggaagagcggtggtgtgaatccctggagaaaaccttgagccagactaagcggcaactttccgagcgggagcagcaacttgtggaaaaatctggcgaactgctcgctctgcagaaagaagccgactcaatgcgggcggatttcagcctcctgcgcaatcaatttctgacagagcggaagaaagctgagaagcaagtggctagcctgaaagaggctcttaaaatacagaggagccaactggaaaagaatctgctggagcaaaaacaggaaaattcctgtattcaaaaagaaatggcgacgattgaactggtcgcgcaggataaccacgaacgggcacggcgactaatgaaggagcttaatcagatgcagtatgagtacaccgaacttaaaaagcaaatggcaaaccagaaggatctggagcggcggcagatggagatcagcgacgccatgcggacgctcaaaagcgaggtgaaggacgaaatcaggaccagtttgaaaaaccttaaccaatttctgcctgagttgccagccgacctagaggcaattctggagaggaatgaaaatctggaaggtgagctggaatcacttaaggagaatctccctttcaccatgaatgaggggccattcgaggagaagctcaattttagccaggttcacatcatggatgaacattggcgtggagaagctctaagagagaaactgagacacagggaggacagattaaaagcccagttgcggcactgtatgagcaagcaagcagaggtgttgatcaagggtaagagacagaccgaaggaacattgcactccctacgtcgccaggttgacgctctaggagagctggtaaccagcacctcggctgattcagccagctcaccttccctgtcccagcttgagtcttctctgactgaagacagtcagttaggtcagaatcagaagcagaataattctctgagatag

SEQ ID NO: 271117 - DNA, 6978 bp, Artificial Sequence
  derived and/or modified sequence
atgaagaagggcagccagcagaagatcttcagcaaggccaagatccccagcagcagccacagccccatccccagctccatgagcaacatgaggagccgcagcctgagccccctgattggcagcgagaccctgcccttccacagcggcggccagtggtgtgagcaggtggagattgctgatgagaacaacatgctgctggactaccaggaccacaagggagctgacagccacgccggcgtgcgctacatcacagaggccctgatcaagaagctgaccaagcaggacaacctggccctgatcaagagcctgaacctgagcctgagcaaggatggcggcaagaagttcaagtacatcgagaacctggagaagtgtgtgaagctggaggtgctgaacctgagctacaacctgattggcaagattgagaagctggacaagctgctgaagctgcgggagctgaacctgagctacaacaagatcagcaagattgagggcatcgagaacatgtgcaacctgcagaagctgaacctggccggaaatgaaattgagcacatccctgtgtggctgggcaagaagctgaagagcctgcgggtgctgaacctgaagggcaacaagatcagcagcctgcaggacatcagcaagctgaagcccctgcaggacctgatcagcctcatcctggtggagaaccctgtggtgaccctgccccactacctgcagttcaccatcttccacctgcggagcctggagagcctggagggccagcctgtgaccacccaggaccggcaggaggcctttgagcgcttcagcctggaggaggtggagcggctggagcgggacctggagaagaagatgattgaaacagaggagctgaagagcaagcagacccgcttcctggaggagatcaagaaccaggacaagctgaacaagagcctgaaggaggaggccatgctgcagaagcagagctgtgaggagctgaagagtgacctgaacaccaagaatgagctgctgaagcagaagaccatcgagctgacccgggcctgccagaagcagtatgagctggagcaggagctggccttctacaagattgatgccaagtttgagcccctgaactactaccccagtgaatatgcagaaattgacaaggccccagatgagagcccctacatcggcaagagccgctacaagaggaacatgtttgccacagagagctacatcattgattctgcccaggccgtgcagatcaagaagatggagccagatgagcagctgagaaatgaccacatgaacctgcggggccacacccccctggacacccagctggaggacaaggagaagaagatctctgctgcccagacccggctgtctgagctgcatgatgaaattgagaaggccgagcagcagatcctgcgggccacagaggagttcaagcagctggaggaggccatccagctgaagaagatcagcgaggccggcaaggacctgctgtacaagcagctgagcggccgcctgcagctggtgaacaagctgcggcaggaggccctggacctggagctgcagatggagaagcagaagcaggagattgctgggaagcagaaggagatcaaggacctgcagatcgccatcgacagcctggacagcaaggaccccaagcacagccacatgaaggcccagaagagcggcaaggagcagcagctggacatcatgaacaagcagtaccagcagctggagagccggctggatgagatcctgagcagaattgccaaggagacagaggagatcaaggacctggaggagcagctgacagagggccagattgctgccaatgaggccctgaagaaggacctggagggcgtcatcagcggcctgcaggagtacctgggcaccatcaagggccaggccacccaggcccagaatgaatgtaggaagctgagagatgagaaggagaccctgctgcagaggctgacagaggtggagcaggagcgggaccagctggagatcgtggccatggatgctgagaacatgaggaaggagctggccgagctggagagcgccctgcaggagcagcacgaggtgaatgccagcctgcagcagacccagggcgacctgagcgcctatgaggccgagctggaggcccggctgaacctgagagatgctgaggccaaccagctgaaggaggagctggagaaggtgacccggctgacccagctggagcagagcgccctgcaggccgagctggagaaggagcggcaggccctgaagaatgccctgggcaaggcccagttcagcgaggagaaggagcaggagaacagcgagctgcacgccaagctgaagcacctgcaggatgacaacaacctgctgaagcagcagctgaaggacttccagaaccacctgaaccacgtggtggatggcctggtgcggcctgaggaggtggccgcccgggtggatgagctgcggaggaagctgaagctgggcaccggggagatgaacatccacagccccagtgatgtgctgggcaagagcctggccgacctgcagaagcagttcagcgagatcctggcccggagcaagtgggagagagatgaggcccaggtgcgggagaggaagctgcaggaggagatggccctgcagcaggagaagctggccaccggccaggaggagttccggcaggcctgtgagcgggccctggaggccaggatgaactttgacaagaggcagcacgaggcccgcatccagcagatggagaatgagatccactacctgcaggagaacctgaagtccatggaggagatccagggcctgacagacctgcagctgcaggaggctgatgaggagaaggagcgcatcctggcccagctgcgggagctggagaagaagaagaagctggaggatgccaagagccaggagcaggtgtttggcctggacaaggagctgaagaagctgaagaaggctgtggccaccagtgacaagctggccacagctgagctgaccatcgccaaggaccagctgaagagcctgcatggaacagtgatgaagatcaaccaggagcgggcagaggagctgcaggaggccgagcgcttcagcaggaaggccgcccaggccgcccgggacctgaccagggctgaggccgagattgagctgctgcagaacctgctgcggcagaagggggagcagttccggctggagatggagaagacaggagtgggcaccggggccaacagccaggtgctggagattgagaagctgaatgagaccatggagcggcagaggacagaaattgcccggctgcagaatgtgctggacctgactggaagtgacaacaagggcggctttgaaaatgtgctggaggagattgctgagctgcggcgggaggtgtcctaccagaatgactacatcagctccatggctgaccccttcaagagaagaggctactggtacttcatgcctcctccacccagcagcaaggtgagcagccacagcagccaggccaccaaggacagcggcgtgggcctgaagtacagcgccagcacccctgtgaggaagccccggcccggccagcaggacggcaaggagggcagccagcccccaccagccagcggctactgggtgtacagccccatccgcagcggcctgcacaagctgttccccagcagagatgctgacagcggcggggacagccaggaggagagcgagctggatgaccaggaggagcccccatttgtgcccccacctggctacatgatgtacacagtgctgcctgatggcagccctgtgccccagggcatggccctgtatgcccctcctccacccctgcccaacaacagccggcccctgaccccaggcaccgtggtgtatggccccccacctgctggggcccccatggtgtatggccccccaccacccaacttcagcatccccttcatccccatgggcgtgctgcactgcaatgtgcctgagcaccacaacctggagaatgaggtgtcccggctggaggacatcatgcagcacctgaagagcaagaagcgggaggagcgctggatgagggccagcaagaggcagagcgagaaggagatggaggagctgcaccacaacattgatgacctgctgcaggagaagaagagcctggagtgtgaggtggaggagctgcacaggacagtgcagaagaggcagcagcagaaggacttcattgatggaaatgtggagagcctgatgacagagctggagattgagaagagcctgaagcaccatgaagatattgtggatgaaattgagtgcatcgagaagaccctgctgaagagaagaagtgagctgcgggaggccgaccggctgctggccgaggccgagagcgagctgagctgcaccaaggagaagaccaagaatgctgtggagaagttcacagatgccaagaggagcctgctgcagacagaaagtgatgctgaggagctggagcggcgggcccaggagacagctgtgaacctggtgaaggctgaccagcagctgcggagcctgcaggctgatgccaaggacctggagcagcacaagatcaagcaggaggagatcctgaaggagatcaacaagatcgtggccgccaaggacagcgacttccagtgcctgagcaagaagaaggagaagctgacagaggagctgcagaagctgcagaaggacatcgagatggccgagagaaatgaagaccaccacctgcaggtgctgaaggagagcgaggtgctgctgcaggccaagagagctgagctggagaagctgaagagccaggtgaccagccagcagcaggagatggctgtgctggaccggcagctgggccacaagaaggaggagctgcacctgctgcagggctccatggtgcaggccaaggctgacctgcaggaggccctgcggctgggggagacagaggtgacagagaagtgcaaccacatccgggaggtgaagagcctgctggaggagctgtccttccagaagggggagctgaatgtgcagatcagcgagaggaagacccagctgaccctcatcaagcaggagattgagaaggaggaggagaacctgcaggtggtgctgcggcagatgagcaagcacaagacagagctgaagaacatcctggacatgctgcagctggagaaccacgagctgcagggcctgaagctgcagcacgaccagagggtgtctgagctggagaagacccaggtggccgtgctggaggagaagctggagctggagaacctgcagcagatcagccagcagcagaagggggagattgagtggcagaagcagctgctggagcgggacaagcgggagattgaaagaatgacagctgagagccgggccctgcagagctgtgtggagtgcctgagcaaggagaaggaggacctgcaggagaagtgtgacatctgggagaagaagctggcccagaccaagagggtgctggccgctgctgaggagaacagcaagatggagcagagcaacctggagaagctggagctgaatgtgaggaagctgcagcaggagctggaccagctgaacagagacaagctgagcctgcacaatgacatcagcgccatgcagcagcagctgcaggagaagcgggaggccgtgaacagcctgcaggaggagctggccaacgtgcaggaccacctgaacctggccaagcaggacctgctgcacaccaccaagcaccaggatgtgctgctgtctgagcagacccggctgcagaaggacatcagcgagtgggccaacagatttgaggactgccagaaggaggaggagaccaagcagcagcagctgcaggtgctgcagaatgaaattgaggagaacaagctgaagctggtgcagcaggagatgatgttccagaggctgcagaaggagcgggagagcgaggagagcaagctggagaccagcaaggtgaccctgaaggagcagcagcaccagctggagaaggagctgacagaccagaagagcaagctggaccaggtgctgagcaaggtgctggccgctgaggagcgggtgaggaccctgcaggaggaggagcgctggtgtgagagcctggagaagaccctgagccagaccaagaggcagctgtctgagcgggagcagcagctggtggagaagagcggggagctgctggccctgcagaaggaggccgacagcatgagagctgacttcagcctgctgaggaaccagttcctgacagagaggaagaaggccgagaagcaggtggccagcctgaaggaggccctgaagatccagaggagccagctggagaagaacctgctggagcagaagcaggagaacagctgcatccagaaggagatggccaccatcgagctggtggcccaggacaaccacgagcgggcccggcggctgatgaaggagctgaaccagatgcagtatgagtacacagagctgaagaagcagatggccaaccagaaggacctggagcggcggcagatggagatcagtgatgccatgaggaccctgaagtctgaggtgaaggatgagatccgcaccagcctgaagaacctgaaccagttcctgcctgagctgcctgctgacctggaggccatcctggagagaaatgaaaacctggagggggagctggagagcctgaaggagaacctgcccttcaccatgaatgaaggcccctttgaggagaagctgaacttcagccaggtgcacatcatggatgagcactggagaggagaggccctgcgggagaagctgcggcacagagaagatcggctgaaggcccagctgcggcactgcatgagcaagcaggccgaggtgctgatcaagggcaagaggcagacagagggcaccctgcacagcctgcggcggcaggtggatgccctgggggagctggtgaccagcaccagcgctgacagcgccagcagccccagcctgagccagctggagagcagcctgacagaggacagccagctgggccagaaccaggagaagaatgccagcgccaggtag

SEQ ID NO: 271118 - DNA, 3920 bp, Artificial Sequence
  derived and/or modified sequence
cacttttatacttcccttcgtttgcatgtgttacttcttcagcctaggtctttccccttccgttcgttcttcaaaacccaggcaaaacacctcttcctctgagcagccttctcagaacttttctcccatgtggccagaggaaggagagacttctgtctatctcttctgctagaccccgaactctttggaggcagaggttatccacaagaggcttggcaaatgtttctcagtcatagttggactgtttgaaaaattaaaggttctatttgtctgtcagtttcatccgtgacatttaactttttataccaaagtcttagaatctaccatcattttttgggccattgataccactttaaccacagttaatttcagcttttggcaggaaagagaggaaacatcctgtgatgtttcagcactgcatttttttccccatctcattcaggagaatgaagtttctagattagaagacataatgcagcatttaaaatcaaagaagcgggaagaaaggtggatgagagcatccaagcggcagtcggagaaagaaatggaagaactgcatcataatattgatgatcttttgcaagagaagaaaagcttagagtgtgaagtagaagaattacatagaactgtccagaaacgtcaacagcaaaaggacttcattgatggaaatgttgagagtcttatgactgaactagaaatagaaaaatcactcaaacatcatgaagatattgtagatgaaattgagtgcattgagaagactcttctgaaacgtcgctcagagctcagggaagctgaccgactcctggcagaggctgagagtgaactttcatgcactaaagaaaaggtttgtcttcttgtggtttggggtgtgagctcagtgtggacaaaaaatgctgttgaaaagttcactgatgccaagagaagtttattgcaaactgagtcagatgctgaggaattagaaaggagagctcaggaaactgctgttaacctcgtcaaagctgatcagcagctaagatcgctccaggctgatgcaaaggatttggagcagcacaaaatcaagcaagaagaaatcttgaaagaaataaacaaaattgtagcagcaaaagactcagacttccaatgtttaagcaagaagaaggaaaaactgacagaagagcttcagaaactacagaaagacatagagatggcagaacgcaatgaggatcaccacctgcaggtccttaaagaatctgaggtgcttcttcaggccaaaagagccgagctggaaaagctgaaaagccaggtgacaagtcagcagcaggagatggctgtcttggacaggcagttagggcataaaaaggaggagctgcatctactccaaggaagcatggtccaggcaaaagctgacctccaggaagctctgagactgggagagactgaagtaactgagaagtgcaatcacattagggaagtaaaatctcttctggaagaactgagttttcagaaaggagaactaaatgttcagattagtgaaagaaaaactcaacttacacttataaagcaggaaattgaaaaagaggaagaaaatcttcaggttgttttaaggcagatgtctaaacataaaaccgaactaaagaatattctggacatgttgcaacttgaaaaccatgagctacaaggtttgaagctacaacatgaccaaagggtatctgaattagagaagactcaggtggcagtgctagaggagaaactggagttagagaatttgcagcagatatcccagcagcagaaaggggaaatagagtggcagaagcagctccttgagagggataaacgagaaatagaacgaatgactgctgagtcccgagctttacaatcgtgtgttgagtgtttgagcaaagaaaaggaagatctccaagagaaatgtgacatttgggaaaaaaagttggcacaaaccaaaagggttttagcagcagcagaagaaaatagcaaaatggagcaatcaaacttagaaaagttggaattgaatgtcagaaaactgcagcaggaactagaccaactaaacagagacaagttgtcactgcataacgacatttcagcaatgcaacagcagctccaagaaaaacgagaagcagtaaactcactgcaggaggaactagctaatgtccaagaccatttgaacctagcaaaacaggacctgcttcacaccaccaagcatcaggatgtgttgctcagtgagcagacccgactccagaaggacatcagtgaatgggcaaataggtttgaagactgtcagaaagaagaggagacaaaacaacaacaacttcaagtgcttcagaatgagattgaagaaaacaagctcaaactagtccaacaagaaatgatgtttcagagactccagaaagagagagaaagtgaagaaagcaaattagaaaccagtaaagtgacactgaaggagcaacagcaccagctggaaaaggaattaacagaccagaaaagcaaactggaccaagtgctctcaaaggtgctggcagctgaagagcgtgttaggactctgcaggaagaggagaggtggtgtgagagcctggagaagacactctcccaaactaaacggcagctttcagaaagggagcagcaattggtggagaaatcaggtgagctgttggccctccagaaagaggcagattctatgagggcagacttcagccttctgcggaaccagttcttgacagaaagaaagaaagctgagaagcaggtggccagcctgaaggaagcacttaagatccagcggagccagctggagaaaaaccttcttgagcaaaaacaggagaacagctgcatacaaaaggaaatggcaacaattgaactggtagcccaggacaaccatgagcgggccaggcgcctgatgaaggagctcaaccagatgcagtatgagtacacggagctcaagaaacagatggcaaaccaaaaagatttggagagaagacaaatggaaatcagtgatgcaatgaggacacttaaatctgaggtgaaggatgaaatcagaaccagcttgaagaatcttaatcagtttcttccagaactaccagcagatctagaagctattttggaaagaaacgaaaacctagaaggagaattggaaagcttgaaagagaaccttccatttaccatgaatgagggaccttttgaagaaaaactgaacttttcccaagttcacataatggatgaacactggcgtggagaagcactccgggagaaactgcgtcaccgggaagaccgactcaaggcccaactccgacactgtatgtccaagcaagcagaagtattaattaaaggaaagcggcagacagagggcactttacacagtttgaggagacaagtagatgctttaggggaattggtcaccagcacctctgcagattcagcgtcatcacccagtctgtctcagctggagtcttccctcacagaggactctcaacttggacaaaatcaggaaaagaatgcctcagccagatgaggaatactgtcttgtgtaaatatattcaaggaaaacacctccactacctcactgacttcataattggaatgtcacatggtttttttaatcaagatgcagtgaactgagattctgaaactccactgtagtttactttgcctgtaccattaatgccaatgtttttataaatcacttgtacatagtacatatgggaatagttgcatatgggaatttaaaccaacatgtggctgagcctttttttttttaatcttcgtaacatgtttaaaaaaaaacagtgattttaactgcatatttgaacctacaaactggtaaatcttattaacaaaaagaatgtacttaaggccctctttatttatagtgtcgagttatttttgaattttgcttaaaatctatttttcatatgaaaataaaagataacaatcaa

SEQ ID NO: 271119 - DNA, 5824 bp, Artificial Sequence
  derived and/or modified sequence
gccggaaagcagaaggagattaaggacctgcaaatagccatagatagcctggattccaaagacccaaaacattcccatatgaaggctcaaaagagcggtaaagaacaacagcttgacattatgaacaagcagtaccaacaacttgaaagtcgtttggatgagatactttctagaattgctaaggaaacggaagagattaaggaccttgaagaacagcttactgaaggccagatagcagcaaatgaagccctgaagaaggatttagaaggtgttatcagtgggttgcaagaatacctggggaccattaaaggccaggcaactcaggcccagaatgagtgcaggaagctgcgggatgagaaagagacattgttgcagagattgacagaagtcgagcaggagagagaccagctggaaatagttgccatggatgcagaaaatatgaggaaggagcttgcagagctagaaagtgccctccaagagcagcatgaggtgaatgcatctttgcagcagacccagggagatctcagtgcctatgaagctgagctagaggctcggctaaacctaagggatgctgaagccaaccagctcaaggaagagttggaaaaagtaacaagacttacccagttagaacaatcagcccttcaagcagaacttgagaaggaaaggcaagccctcaagaatgcccttggaaaagcccagttctcagaagaaaaggagcaagagaacagtgagctccatgcaaaacttaaacacttgcaggatgacaataatctgttaaaacagcaacttaaagatttccagaatcaccttaaccatgtggttgatggtttggttcgtccagaagaagtggcagctcgtgtggatgagctaagaagaaaactgaaattaggaactggggaaatgaacatccatagtccttcagatgtcttagggaaaagtcttgctgatttacagaaacaattcagtgaaattcttgcacgctccaagtgggaaagagatgaagcacaagttagagagagaaaactccaagaagaaatggctctgcagcaagagaaactggcaactggacaagaagagttcaggcaggcctgtgagagagccctggaagcaagaatgaattttgataagaggcaacatgaagcaagaatccagcaaatggagaatgaaattcactatttgcaagaaaatctaaaaagtatggaggaaatccaaggccttacagatctccaacttcaggaagctgatgaagagaaggagagaattctggcccaactccgagagttagagaaaaagaagaaacttgaagatgccaaatctcaggagcaagtttttggtttagataaagaactgaagaaactaaagaaagccgtggccacctctgataagctagccacagctgagctcaccattgccaaagaccagctgaagtcccttcatggaactgttatgaaaattaaccaggagcgagcagaggagttgcaggaagcagagaggttcagcagaaaggcagcacaagcagccagagatctcacccgagcagaagctgagatcgaactcctgcagaatctcctcaggcagaagggggagcagtttcgacttgagatggagaaaacaggtgtaggtactggagcaaactcacaggtcctagaaattgagaaactgaatgagacaatggaacgacaaaggacagagattgcaaggctgcagaatgtactagacctcactggaagtgacaacaaaggaggctttgaaaatgttttagaagaaattgctgaacttcgacgtgaagtttcttatcagaatgattacataagcagcatggcagatcctttcaaaagacgaggctattggtactttatgccaccaccaccatcatcaaaagtttccagccatagttcccaggccaccaaggactctggtgttggccttaagtactcagcctcaactcctgttagaaaaccacgccctgggcagcaggatgggaaggaaggcagtcaacctccccctgcctcaggatactgggtttattctcccatcaggagtgggttacataaactgtttccaagtagagatgcagacagtggaggagatagtcaggaagagagtgagctggatgaccaagaagaacccccatttgtgcctcctcctggatacatgatgtatactgtgcttcctgatggttctcctgtaccccagggcatggccctgtatgcaccacctcctcccttgccaaacaatagccgacctctcacccctggcactgttgtttatggcccacctcctgctggggcccccatggtgtatgggcctccaccccccaacttctccatccccttcatccctatgggtgtgctgcattgcaacgtccctgaacaccataacttagagaatgaagtttctagattagaagacataatgcagcatttaaaatcaaagaagcgggaagaaaggtggatgagagcatccaagcggcagtcggagaaagaaatggaagaactgcatcataatattgatgatcttttgcaagagaagaaaagcttagagtgtgaagtagaagaattacatagaactgtccagaaacgtcaacagcaaaaggacttcattgatggaaatgttgagagtcttatgactgaactagaaatagaaaaatcactcaaacatcatgaagatattgtagatgaaattgagtgcattgagaagactcttctgaaacgtcgctcagagctcagggaagctgaccgactcctggcagaggctgagagtgaactttcatgcactaaagaaaagacaaaaaatgctgttgaaaagttcactgatgccaagagaagtttattgcaaactgagtcagatgctgaggaattagaaaggagagctcaggaaactgctgttaacctcgtcaaagctgatcagcagctaagatcgctccaggctgatgcaaaggatttggagcagcacaaaatcaagcaagaagaaatcttgaaagaaataaacaaaattgtagcagcaaaagactcagacttccaatgtttaagcaagaagaaggaaaaactgacagaagagcttcagaaactacagaaagacatagagatggcagaacgcaatgaggatcaccacctgcaggtccttaaagaatctgaggtgcttcttcaggccaaaagagccgagctggaaaagctgaaaagccaggtgacaagtcagcagcaggagatggctgtcttggacaggcagttagggcataaaaaggaggagctgcatctactccaaggaagcatggtccaggcaaaagctgacctccaggaagctctgagactgggagagactgaagtaactgagaagtgcaatcacattagggaagtaaaatctcttctggaagaactgagttttcagaaaggagaactaaatgttcagattagtgaaagaaaaactcaacttacacttataaagcaggaaattgaaaaagaggaagaaaatcttcaggttgttttaaggcagatgtctaaacataaaaccgaactaaagaatattctggacatgttgcaacttgaaaaccatgagctacaaggtttgaagctacaacatgaccaaagggtatctgaattagagaagactcaggtggcagtgctagaggagaaactggagttagagaatttgcagcagatatcccagcagcagaaaggggaaatagagtggcagaagcagctccttgagagggataaacgagaaatagaacgaatgactgctgagtcccgagctttacaatcgtgtgttgagtgtttgagcaaagaaaaggaagatctccaagagaaatgtgacatttgggaaaaaaagttggcacaaaccaaaagggttttagcagcagcagaagaaaatagcaaaatggagcaatcaaacttagaaaagttggaattgaatgtcagaaaactgcagcaggaactagaccaactaaacagagacaagttgtcactgcataacgacatttcagcaatgcaacagcagctccaagaaaaacgagaagcagtaaactcactgcaggaggaactagctaatgtccaagaccatttgaacctagcaaaacaggacctgcttcacaccaccaagcatcaggatgtgttgctcagtgagcagacccgactccagaaggacatcagtgaatgggcaaataggtttgaagactgtcagaaagaagaggagacaaaacaacaacaacttcaagtgcttcagaatgagattgaagaaaacaagctcaaactagtccaacaagaaatgatgtttcagagactccagaaagagagagaaagtgaagaaagcaaattagaaaccagtaaagtgacactgaaggagcaacagcaccagctggaaaaggaattaacagaccagaaaagcaaactggaccaagtgctctcaaaggtgctggcagctgaagagcgtgttaggactctgcaggaagaggagaggtggtgtgagagcctggagaagacactctcccaaactaaacggcagctttcagaaagggagcagcaattggtggagaaatcaggtgagctgttggccctccagaaagaggcagattctatgagggcagacttcagccttctgcggaaccagttcttgacagaaagaaagaaagctgagaagcaggtggccagcctgaaggaagcacttaagatccagcggagccagctggagaaaaaccttcttgagcaaaaacaggagaacagctgcatacaaaaggaaatggcaacaattgaactggtagcccaggacaaccatgagcgggccaggcgcctgatgaaggagctcaaccagatgcagtatgagtacacggagctcaagaaacagatggcaaaccaaaaagatttggagagaagacaaatggaaatcagtgatgcaatgaggacacttaaatctgaggtgaaggatgaaatcagaaccagcttgaagaatcttaatcagtttcttccagaactaccagcagatctagaagctattttggaaagaaacgaaaacctagaaggagaattggaaagcttgaaagagaaccttccatttaccatgaatgagggaccttttgaagaaaaactgaacttttcccaagttcacataatggatgaacactggcgtggagaagcactccgggagaaactgcgtcaccgggaagaccgactcaaggcccaactccgacactgtatgtccaagcaagcagaagtattaattaaaggaaagcggcagacagagggcactttacacagtttgaggagacaagtagatgctttaggggaattggtcaccagcacctctgcagattcagcgtcatcacccagtctgtctcagctggagtcttccctcacagaggactctcaacttggacaaaatcaggaaaagaatgcctcagccagatgaggaatactgtcttgtgtaaatatattcaaggaaaacacctccactacctcactgacttcataattggaatgtcacatggtttttttaatcaagatgcagtgaactgagattctgaaactccactgtagtttactttgcctgtaccattaatgccaatgtttttataaatcacttgtacatagtacatatgggaatagttgcatatgggaatttaaaccaacatgtggctgagcctttttttttttaatcttcgtaacatgtttaaaaaaaaacagtgattttaactgcatatttgaacctacaaactggtaaatcttattaacaaaaagaatgtacttaaggccctctttatttatagtgtcgagttatttttgaattttgcttaaaatctatttttcatatgaaaataaaagataacaatcaa

SEQ ID NO: 271120 - DNA, 7660 bp, Artificial Sequence
  derived and/or modified sequence
cgaacttctcccgctctacctcagcctgcgggactgctcggctcggcttctaggcgagacaggggctccctgtgtttcccaggctgcagtgcagtggccagtcacaaggttgatcatagcacattgtagcctggagctcctgggatcaagcaatcctcctgcctcatcctctggagtaactgggactgcaagtatacataccgtgcctgacgaaatatcacaatatttggttttgatgaacacctggctttattcttgcaatgaagaaaggttctcaacaaaaaatattctccaaagcaaagataccatcatcatctcactctcctatcccatcatctatgtccaatatgagatctaggtcactttcacctttgattggatcagagactctaccttttcattctggaggacagtggtgtgagcaagttgagattgcagatgaaaacaatatgcttttggactatcaagaccataaaggagctgattcacatgcaggagttagatatattacagaggccctcattaaaaaacttactaaacaggataatttggctttgataaaatctctgaacctttcactttctaaagacggtggcaagaaatttaagtatattgagaatttggaaaaatgtgttaaacttgaagtactgaatctcagctataatctaatagggaagattgaaaagttggacaagctgttaaaattacgtgaactcaacttatcatataacaaaatcagcaaaattgaaggcatagaaaatatgtgtaatctgcaaaagcttaaccttgcaggaaatgaaattgagcatattccagtatggttagggaagaagttaaaatctttgcgagtcctcaatttgaaaggcaacaagatatcatcgctccaagatataagcaagttgaaaccgcttcaagatttgatttctctgatcctagttgaaaatccagttgtgacccttcctcattacctccagtttaccattttccacctccgttcattggaaagtttggaaggtcagccagtaaccactcaggatagacaggaggcttttgagagattcagtttagaagaggtagaaagactggaaagagacctagaaaaaaagatgatagaaactgaagagcttaagagcaaacaaacaaggttccttgaggaaattaaaaatcaagataaattgaataaatcattaaaagaggaggccatgttacagaaacagagctgtgaggaactcaagagtgacttaaacacaaaaaatgaattgctaaaacagaagaccatagaattaacacgagcatgtcagaagcaatatgagctggaacaggaattggccttttataaaattgatgctaaatttgagccactaaattattatccatcagagtatgctgaaattgataaagccccagatgaaagcccttacattggcaaatccagatacaagagaaatatgtttgccacagagagttatattattgacagtgctcaggcagtacagatcaagaagatggagccagatgaacaacttagaaatgatcacatgaacttgagaggccacacaccactggacacgcaactggaagacaaagaaaaaaaaataagtgcagcacaaactcgactatcagaactgcatgatgaaatagaaaaggcagaacaacaaattttgagagctactgaagaatttaaacaactggaagaagctatacaactaaaaaagatttcagaagcagggaaagaccttctttacaagcagttgagtggtagactacaacttgtaaataaattacgccaggaagctctggatctagaactgcagatggaaaagcaaaagcaggaaattgccggaaagcagaaggagattaaggacctgcaaatagccatagatagcctggattccaaagacccaaaacattcccatatgaaggctcaaaagagcggtaaagaacaacagcttgacattatgaacaagcagtaccaacaacttgaaagtcgtttggatgagatactttctagaattgctaaggaaacggaagagattaaggaccttgaagaacagcttactgaaggccagatagcagcaaatgaagccctgaagaaggatttagaaggtgttatcagtgggttgcaagaatacctggggaccattaaaggccaggcaactcaggcccagaatgagtgcaggaagctgcgggatgagaaagagacattgttgcagagattgacagaagtcgagcaggagagagaccagctggaaatagttgccatggatgcagaaaatatgaggaaggagcttgcagagctagaaagtgccctccaagagcagcatgaggtgaatgcatctttgcagcagacccagggagatctcagtgcctatgaagctgagctagaggctcggctaaacctaagggatgctgaagccaaccagctcaaggaagagttggaaaaagtaacaagacttacccagttagaacaatcagcccttcaagcagaacttgagaaggaaaggcaagccctcaagaatgcccttggaaaagcccagttctcagaagaaaaggagcaagagaacagtgagctccatgcaaaacttaaacacttgcaggatgacaataatctgttaaaacagcaacttaaagatttccagaatcaccttaaccatgtggttgatggtttggttcgtccagaagaagtggcagctcgtgtggatgagctaagaagaaaactgaaattaggaactggggaaatgaacatccatagtccttcagatgtcttagggaaaagtcttgctgatttacagaaacaattcagtgaaattcttgcacgctccaagtgggaaagagatgaagcacaagttagagagagaaaactccaagaagaaatggctctgcagcaagagaaactggcaactggacaagaagagttcaggcaggcctgtgagagagccctggaagcaagaatgaattttgataagaggcaacatgaagcaagaatccagcaaatggagaatgaaattcactatttgcaagaaaatctaaaaagtatggaggaaatccaaggccttacagatctccaacttcaggaagctgatgaagagaaggagagaattctggcccaactccgagagttagagaaaaagaagaaacttgaagatgccaaatctcaggagcaagtttttggtttagataaagaactgaagaaactaaagaaagccgtggccacctctgataagctagccacagctgagctcaccattgccaaagaccagctgaagtcccttcatggaactgttatgaaaattaaccaggagcgagcagaggagttgcaggaagcagagaggttcagcagaaaggcagcacaagcagccagagatctcacccgagcagaagctgagatcgaactcctgcagaatctcctcaggcagaagggggagcagtttcgacttgagatggagaaaacaggtgtaggtactggagcaaactcacaggtcctagaaattgagaaactgaatgagacaatggaacgacaaaggacagagattgcaaggctgcagaatgtactagacctcactggaagtgacaacaaaggaggctttgaaaatgttttagaagaaattgctgaacttcgacgtgaagtttcttatcagaatgattacataagcagcatggcagatcctttcaaaagacgaggctattggtactttatgccaccaccaccatcatcaaaagtttccagccatagttcccaggccaccaaggactctggtgttggccttaagtactcagcctcaactcctgttagaaaaccacgccctgggcagcaggatgggaaggaaggcagtcaacctccccctgcctcaggatactgggtttattctcccatcaggagtgggttacataaactgtttccaagtagagatgcagacagtggaggagatagtcaggaagagagtgagctggatgaccaagaagaacccccatttgtgcctcctcctggatacatgatgtatactgtgcttcctgatggttctcctgtaccccagggcatggccctgtatgcaccacctcctcccttgccaaacaatagccgacctctcacccctggcactgttgtttatggcccacctcctgctggggcccccatggtgtatgggcctccaccccccaacttctccatccccttcatccctatgggtgtgctgcattgcaacgtccctgaacaccataacttagagaatgaagtttctagattagaagacataatgcagcatttaaaatcaaagaagcgggaagaaaggtggatgagagcatccaagcggcagtcggagaaagaaatggaagaactgcatcataatattgatgatcttttgcaagagaagaaaagcttagagtgtgaagtagaagaattacatagaactgtccagaaacgtcaacagcaaaaggacttcattgatggaaatgttgagagtcttatgactgaactagaaatagaaaaatcactcaaacatcatgaagatattgtagatgaaattgagtgcattgagaagactcttctgaaacgtcgctcagagctcagggaagctgaccgactcctggcagaggctgagagtgaactttcatgcactaaagaaaagacaaaaaatgctgttgaaaagttcactgatgccaagagaagtttattgcaaactgagtcagatgctgaggaattagaaaggagagctcaggaaactgctgttaacctcgtcaaagctgatcagcagctaagatcgctccaggctgatgcaaaggatttggagcagcacaaaatcaagcaagaagaaatcttgaaagaaataaacaaaattgtagcagcaaaagactcagacttccaatgtttaagcaagaagaaggaaaaactgacagaagagcttcagaaactacagaaagacatagagatggcagaacgcaatgaggatcaccacctgcaggtccttaaagaatctgaggtgcttcttcaggccaaaagagccgagctggaaaagctgaaaagccaggtgacaagtcagcagcaggagatggctgtcttggacaggcagttagggcataaaaaggaggagctgcatctactccaaggaagcatggtccaggcaaaagctgacctccaggaagctctgagactgggagagactgaagtaactgagaagtgcaatcacattagggaagtaaaatctcttctggaagaactgagttttcagaaaggagaactaaatgttcagattagtgaaagaaaaactcaacttacacttataaagcaggaaattgaaaaagaggaagaaaatcttcaggttgttttaaggcagatgtctaaacataaaaccgaactaaagaatattctggacatgttgcaacttgaaaaccatgagctacaaggtttgaagctacaacatgaccaaagggtatctgaattagagaagactcaggtggcagtgctagaggagaaactggagttagagaatttgcagcagatatcccagcagcagaaaggggaaatagagtggcagaagcagctccttgagagggataaacgagaaatagaacgaatgactgctgagtcccgagctttacaatcgtgtgttgagtgtttgagcaaagaaaaggaagatctccaagagaaatgtgacatttgggaaaaaaagttggcacaaaccaaaagggttttagcagcagcagaagaaaatagcaaaatggagcaatcaaacttagaaaagttggaattgaatgtcagaaaactgcagcaggaactagaccaactaaacagagacaagttgtcactgcataacgacatttcagcaatgcaacagcagctccaagaaaaacgagaagcagtaaactcactgcaggaggaactagctaatgtccaagaccatttgaacctagcaaaacaggacctgcttcacaccaccaagcatcaggatgtgttgctcagtgagcagacccgactccagaaggacatcagtgaatgggcaaataggtttgaagactgtcagaaagaagaggagacaaaacaacaacaacttcaagtgcttcagaatgagattgaagaaaacaagctcaaactagtccaacaagaaatgatgtttcagagactccagaaagagagagaaagtgaagaaagcaaattagaaaccagtaaagtgacactgaaggagcaacagcaccagctggaaaaggaattaacagaccagaaaagcaaactggaccaagtgctctcaaaggtgctggcagctgaagagcgtgttaggactctgcaggaagaggagaggtggtgtgagagcctggagaagacactctcccaaactaaacggcagctttcagaaagggagcagcaattggtggagaaatcaggtgagctgttggccctccagaaagaggcagattctatgagggcagacttcagccttctgcggaaccagttcttgacagaaagaaagaaagctgagaagcaggtggccagcctgaaggaagcacttaagatccagcggagccagctggagaaaaaccttcttgagcaaaaacaggagaacagctgcatacaaaaggaaatggcaacaattgaactggtagcccaggacaaccatgagcgggccaggcgcctgatgaaggagctcaaccagatgcagtatgagtacacggagctcaagaaacagatggcaaaccaaaaagatttggagagaagacaaatggaaatcagtgatgcaatgaggacacttaaatctgaggtgaaggatgaaatcagaaccagcttgaagaatcttaatcagtttcttccagaactaccagcagatctagaagctattttggaaagaaacgaaaacctagaaggagaattggaaagcttgaaagagaaccttccatttaccatgaatgagggaccttttgaagaaaaactgaacttttcccaagttcacataatggatgaacactggcgtggagaagcactccgggagaaactgcgtcaccgggaagaccgactcaaggcccaactccgacactgtatgtccaagcaagcagaagtattaattaaaggaaagcggcagacagagggcactttacacagtttgaggagacaagtagatgctttaggggaattggtcaccagcacctctgcagattcagcgtcatcacccagtctgtctcagctggagtcttccctcacagaggactctcaacttggacaaaatcaggaaaagaatgcctcagccagatgaggaatactgtcttgtgtaaatatattcaaggaaaacacctccactacctcactgacttcataattggaatgtcacatggtttttttaatcaagatgcagtgaactgagattctgaaactccactgtagtttactttgcctgtaccattaatgccaatgtttttataaatcacttgtacatagtacatatgggaatagttgcatatgggaatttaaaccaacatgtggctgagcctttttttttttaatcttcgtaacatgtttaaaaaaaaacagtgattttaactgcatatttgaacctacaaactggtaaatcttattaacaaaaagaatgtacttaaggccctctttatttatagtgtcgagttatttttgaattttgcttaaaatctatttttcatatgaaaataaaagataacaatc

SEQ ID NO: 271121 - DNA, 3024 bp, Artificial Sequence
  derived and/or modified sequence
atgcagcacctgaagagcaagaagcgggaggagcgctggatgagggccagcaagaggcagagcgagaaggagatggaggagctgcaccacaacattgatgacctgctgcaggagaagaagagcctggagtgtgaggtggaggagctgcacaggacagtgcagaagaggcagcagcagaaggacttcattgatggaaatgtggagagcctgatgacagagctggagattgagaagagcctgaagcaccacgaggacatcgtggatgaaattgaatgtattgagaagaccctgctgaagagaagaagtgagctgcgggaggccgaccggctgctggccgaggccgagagcgagctgagctgcaccaaggagaaggtgtgcctgctggtggtgtggggcgtgtcctctgtgtggaccaagaatgctgtggagaagttcacagatgccaagaggagcctgctgcagacagaaagtgatgctgaggagctggagcggcgggcccaggagacagctgtgaacctggtgaaggctgaccagcagctgcggagcctgcaggctgatgccaaggacctggagcagcacaagatcaagcaggaggagatcctgaaggagatcaacaagatcgtggccgccaaggacagcgacttccagtgcctgagcaagaagaaggagaagctgacagaggagctgcagaagctgcagaaggacatcgagatggccgagagaaatgaagaccaccacctgcaggtgctgaaggagagcgaggtgctgctgcaggccaagagagctgagctggagaagctgaagagccaggtgaccagccagcagcaggagatggctgtgctggaccggcagctgggccacaagaaggaggagctgcacctgctgcagggctccatggtgcaggccaaggctgacctgcaggaggccctgcggctgggggagacagaggtgacagagaagtgcaaccacatccgggaggtgaagagcctgctggaggagctgtccttccagaagggggagctgaatgtgcagatcagcgagaggaagacccagctgaccctcatcaagcaggagattgagaaggaggaggagaacctgcaggtggtgctgcggcagatgagcaagcacaagacagagctgaagaacatcctggacatgctgcagctggagaaccacgagctgcagggcctgaagctgcagcacgaccagagggtgtctgagctggagaagacccaggtggccgtgctggaggagaagctggagctggagaacctgcagcagatcagccagcagcagaagggggagattgagtggcagaagcagctgctggagcgggacaagcgggagattgaaagaatgacagctgagagccgggccctgcagagctgtgtggagtgcctgagcaaggagaaggaggacctgcaggagaagtgtgacatctgggagaagaagctggcccagaccaagagggtgctggccgctgctgaggagaacagcaagatggagcagagcaacctggagaagctggagctgaatgtgaggaagctgcagcaggagctggaccagctgaacagagacaagctgagcctgcacaatgacatcagcgccatgcagcagcagctgcaggagaagcgggaggccgtgaacagcctgcaggaggagctggccaacgtgcaggaccacctgaacctggccaagcaggacctgctgcacaccaccaagcaccaggatgtgctgctgtctgagcagacccggctgcagaaggacatcagcgagtgggccaacagatttgaggactgccagaaggaggaggagaccaagcagcagcagctgcaggtgctgcagaatgaaattgaggagaacaagctgaagctggtgcagcaggagatgatgttccagaggctgcagaaggagcgggagagcgaggagagcaagctggagaccagcaaggtgaccctgaaggagcagcagcaccagctggagaaggagctgacagaccagaagagcaagctggaccaggtgctgagcaaggtgctggccgctgaggagcgggtgaggaccctgcaggaggaggagcgctggtgtgagagcctggagaagaccctgagccagaccaagaggcagctgtctgagcgggagcagcagctggtggagaagagcggggagctgctggccctgcagaaggaggccgacagcatgagagctgacttcagcctgctgaggaaccagttcctgacagagaggaagaaggccgagaagcaggtggccagcctgaaggaggccctgaagatccagaggagccagctggagaagaacctgctggagcagaagcaggagaacagctgcatccagaaggagatggccaccatcgagctggtggcccaggacaaccacgagcgggcccggcggctgatgaaggagctgaaccagatgcagtatgagtacacagagctgaagaagcagatggccaaccagaaggacctggagcggcggcagatggagatcagtgatgccatgaggaccctgaagtctgaggtgaaggatgagatccgcaccagcctgaagaacctgaaccagttcctgcctgagctgcctgctgacctggaggccatcctggagagaaatgaaaacctggagggggagctggagagcctgaaggagaacctgcccttcaccatgaatgaaggcccctttgaggagaagctgaacttcagccaggtgcacatcatggatgagcactggagaggagaggccctgcgggagaagctgcggcacagagaagatcggctgaaggcccagctgcggcactgcatgagcaagcaggccgaggtgctgatcaagggcaagaggcagacagagggcaccctgcacagcctgcggcggcaggtggatgccctgggggagctggtgaccagcaccagcgctgacagcgccagcagccccagcctgagccagctggagagcagcctgacagaggacagccagctgggccagaaccaggagaagaatgccagcgccaggtag

SEQ ID NO: 271122 - DNA, 5322 bp, Artificial Sequence
  derived and/or modified sequence
atgaaggcccagaagagcggcaaggagcagcagctggacatcatgaacaagcagtaccagcagctggagagccggctggatgagatcctgagcagaattgccaaggagacagaggagatcaaggacctggaggagcagctgacagagggccagattgctgccaatgaggccctgaagaaggacctggagggcgtcatcagcggcctgcaggagtacctgggcaccatcaagggccaggccacccaggcccagaatgaatgtaggaagctgagagatgagaaggagaccctgctgcagaggctgacagaggtggagcaggagcgggaccagctggagatcgtggccatggatgctgagaacatgaggaaggagctggccgagctggagagcgccctgcaggagcagcacgaggtgaatgccagcctgcagcagacccagggcgacctgagcgcctatgaggccgagctggaggcccggctgaacctgagagatgctgaggccaaccagctgaaggaggagctggagaaggtgacccggctgacccagctggagcagagcgccctgcaggccgagctggagaaggagcggcaggccctgaagaatgccctgggcaaggcccagttcagcgaggagaaggagcaggagaacagcgagctgcacgccaagctgaagcacctgcaggatgacaacaacctgctgaagcagcagctgaaggacttccagaaccacctgaaccacgtggtggatggcctggtgcggcctgaggaggtggccgcccgggtggatgagctgcggaggaagctgaagctgggcaccggggagatgaacatccacagccccagtgatgtgctgggcaagagcctggccgacctgcagaagcagttcagcgagatcctggcccggagcaagtgggagagagatgaggcccaggtgcgggagaggaagctgcaggaggagatggccctgcagcaggagaagctggccaccggccaggaggagttccggcaggcctgtgagcgggccctggaggccaggatgaactttgacaagaggcagcacgaggcccgcatccagcagatggagaatgagatccactacctgcaggagaacctgaagtccatggaggagatccagggcctgacagacctgcagctgcaggaggctgatgaggagaaggagcgcatcctggcccagctgcgggagctggagaagaagaagaagctggaggatgccaagagccaggagcaggtgtttggcctggacaaggagctgaagaagctgaagaaggctgtggccaccagtgacaagctggccacagctgagctgaccatcgccaaggaccagctgaagagcctgcatggaacagtgatgaagatcaaccaggagcgggcagaggagctgcaggaggccgagcgcttcagcaggaaggccgcccaggccgcccgggacctgaccagggctgaggccgagattgagctgctgcagaacctgctgcggcagaagggggagcagttccggctggagatggagaagacaggagtgggcaccggggccaacagccaggtgctggagattgagaagctgaatgagaccatggagcggcagaggacagaaattgcccggctgcagaatgtgctggacctgactggaagtgacaacaagggcggctttgaaaatgtgctggaggagattgctgagctgcggcgggaggtgtcctaccagaatgactacatcagctccatggctgaccccttcaagagaagaggctactggtacttcatgcctcctccacccagcagcaaggtgagcagccacagcagccaggccaccaaggacagcggcgtgggcctgaagtacagcgccagcacccctgtgaggaagccccggcccggccagcaggacggcaaggagggcagccagcccccaccagccagcggctactgggtgtacagccccatccgcagcggcctgcacaagctgttccccagcagagatgctgacagcggcggggacagccaggaggagagcgagctggatgaccaggaggagcccccatttgtgcccccacctggctacatgatgtacacagtgctgcctgatggcagccctgtgccccagggcatggccctgtatgcccctcctccacccctgcccaacaacagccggcccctgaccccaggcaccgtggtgtatggccccccacctgctggggcccccatggtgtatggccccccaccacccaacttcagcatccccttcatccccatgggcgtgctgcactgcaatgtgcctgagcaccacaacctggagaatgaggtgtcccggctggaggacatcatgcagcacctgaagagcaagaagcgggaggagcgctggatgagggccagcaagaggcagagcgagaaggagatggaggagctgcaccacaacattgatgacctgctgcaggagaagaagagcctggagtgtgaggtggaggagctgcacaggacagtgcagaagaggcagcagcagaaggacttcattgatggaaatgtggagagcctgatgacagagctggagattgagaagagcctgaagcaccatgaagatattgtggatgaaattgagtgcatcgagaagaccctgctgaagagaagaagtgagctgcgggaggccgaccggctgctggccgaggccgagagcgagctgagctgcaccaaggagaagaccaagaatgctgtggagaagttcacagatgccaagaggagcctgctgcagacagaaagtgatgctgaggagctggagcggcgggcccaggagacagctgtgaacctggtgaaggctgaccagcagctgcggagcctgcaggctgatgccaaggacctggagcagcacaagatcaagcaggaggagatcctgaaggagatcaacaagatcgtggccgccaaggacagcgacttccagtgcctgagcaagaagaaggagaagctgacagaggagctgcagaagctgcagaaggacatcgagatggccgagagaaatgaagaccaccacctgcaggtgctgaaggagagcgaggtgctgctgcaggccaagagagctgagctggagaagctgaagagccaggtgaccagccagcagcaggagatggctgtgctggaccggcagctgggccacaagaaggaggagctgcacctgctgcagggctccatggtgcaggccaaggctgacctgcaggaggccctgcggctgggggagacagaggtgacagagaagtgcaaccacatccgggaggtgaagagcctgctggaggagctgtccttccagaagggggagctgaatgtgcagatcagcgagaggaagacccagctgaccctcatcaagcaggagattgagaaggaggaggagaacctgcaggtggtgctgcggcagatgagcaagcacaagacagagctgaagaacatcctggacatgctgcagctggagaaccacgagctgcagggcctgaagctgcagcacgaccagagggtgtctgagctggagaagacccaggtggccgtgctggaggagaagctggagctggagaacctgcagcagatcagccagcagcagaagggggagattgagtggcagaagcagctgctggagcgggacaagcgggagattgaaagaatgacagctgagagccgggccctgcagagctgtgtggagtgcctgagcaaggagaaggaggacctgcaggagaagtgtgacatctgggagaagaagctggcccagaccaagagggtgctggccgctgctgaggagaacagcaagatggagcagagcaacctggagaagctggagctgaatgtgaggaagctgcagcaggagctggaccagctgaacagagacaagctgagcctgcacaatgacatcagcgccatgcagcagcagctgcaggagaagcgggaggccgtgaacagcctgcaggaggagctggccaacgtgcaggaccacctgaacctggccaagcaggacctgctgcacaccaccaagcaccaggatgtgctgctgtctgagcagacccggctgcagaaggacatcagcgagtgggccaacagatttgaggactgccagaaggaggaggagaccaagcagcagcagctgcaggtgctgcagaatgaaattgaggagaacaagctgaagctggtgcagcaggagatgatgttccagaggctgcagaaggagcgggagagcgaggagagcaagctggagaccagcaaggtgaccctgaaggagcagcagcaccagctggagaaggagctgacagaccagaagagcaagctggaccaggtgctgagcaaggtgctggccgctgaggagcgggtgaggaccctgcaggaggaggagcgctggtgtgagagcctggagaagaccctgagccagaccaagaggcagctgtctgagcgggagcagcagctggtggagaagagcggggagctgctggccctgcagaaggaggccgacagcatgagagctgacttcagcctgctgaggaaccagttcctgacagagaggaagaaggccgagaagcaggtggccagcctgaaggaggccctgaagatccagaggagccagctggagaagaacctgctggagcagaagcaggagaacagctgcatccagaaggagatggccaccatcgagctggtggcccaggacaaccacgagcgggcccggcggctgatgaaggagctgaaccagatgcagtatgagtacacagagctgaagaagcagatggccaaccagaaggacctggagcggcggcagatggagatcagtgatgccatgaggaccctgaagtctgaggtgaaggatgagatccgcaccagcctgaagaacctgaaccagttcctgcctgagctgcctgctgacctggaggccatcctggagagaaatgaaaacctggagggggagctggagagcctgaaggagaacctgcccttcaccatgaatgaaggcccctttgaggagaagctgaacttcagccaggtgcacatcatggatgagcactggagaggagaggccctgcgggagaagctgcggcacagagaagatcggctgaaggcccagctgcggcactgcatgagcaagcaggccgaggtgctgatcaagggcaagaggcagacagagggcaccctgcacagcctgcggcggcaggtggatgccctgggggagctggtgaccagcaccagcgctgacagcgccagcagccccagcctgagccagctggagagcagcctgacagaggacagccagctgggccagaaccaggagaagaatgccagcgccaggtag

SEQ ID NO: 271123 - DNA, 6978 bp, Artificial Sequence
  derived and/or modified sequence
atgaagaagggcagccagcagaagatcttcagcaaggccaagatccccagcagcagccacagccccatccccagctccatgagcaacatgaggagccgcagcctgagccccctgattggcagcgagaccctgcccttccacagcggcggccagtggtgtgagcaggtggagattgctgatgagaacaacatgctgctggactaccaggaccacaagggagctgacagccacgccggcgtgcgctacatcacagaggccctgatcaagaagctgaccaagcaggacaacctggccctgatcaagagcctgaacctgagcctgagcaaggatggcggcaagaagttcaagtacatcgagaacctggagaagtgtgtgaagctggaggtgctgaacctgagctacaacctgattggcaagattgagaagctggacaagctgctgaagctgcgggagctgaacctgagctacaacaagatcagcaagattgagggcatcgagaacatgtgcaacctgcagaagctgaacctggccggaaatgaaattgagcacatccctgtgtggctgggcaagaagctgaagagcctgcgggtgctgaacctgaagggcaacaagatcagcagcctgcaggacatcagcaagctgaagcccctgcaggacctgatcagcctcatcctggtggagaaccctgtggtgaccctgccccactacctgcagttcaccatcttccacctgcggagcctggagagcctggagggccagcctgtgaccacccaggaccggcaggaggcctttgagcgcttcagcctggaggaggtggagcggctggagcgggacctggagaagaagatgattgaaacagaggagctgaagagcaagcagacccgcttcctggaggagatcaagaaccaggacaagctgaacaagagcctgaaggaggaggccatgctgcagaagcagagctgtgaggagctgaagagtgacctgaacaccaagaatgagctgctgaagcagaagaccatcgagctgacccgggcctgccagaagcagtatgagctggagcaggagctggccttctacaagattgatgccaagtttgagcccctgaactactaccccagtgaatatgcagaaattgacaaggccccagatgagagcccctacatcggcaagagccgctacaagaggaacatgtttgccacagagagctacatcattgattctgcccaggccgtgcagatcaagaagatggagccagatgagcagctgagaaatgaccacatgaacctgcggggccacacccccctggacacccagctggaggacaaggagaagaagatctctgctgcccagacccggctgtctgagctgcatgatgaaattgagaaggccgagcagcagatcctgcgggccacagaggagttcaagcagctggaggaggccatccagctgaagaagatcagcgaggccggcaaggacctgctgtacaagcagctgagcggccgcctgcagctggtgaacaagctgcggcaggaggccctggacctggagctgcagatggagaagcagaagcaggagattgctgggaagcagaaggagatcaaggacctgcagatcgccatcgacagcctggacagcaaggaccccaagcacagccacatgaaggcccagaagagcggcaaggagcagcagctggacatcatgaacaagcagtaccagcagctggagagccggctggatgagatcctgagcagaattgccaaggagacagaggagatcaaggacctggaggagcagctgacagagggccagattgctgccaatgaggccctgaagaaggacctggagggcgtcatcagcggcctgcaggagtacctgggcaccatcaagggccaggccacccaggcccagaatgaatgtaggaagctgagagatgagaaggagaccctgctgcagaggctgacagaggtggagcaggagcgggaccagctggagatcgtggccatggatgctgagaacatgaggaaggagctggccgagctggagagcgccctgcaggagcagcacgaggtgaatgccagcctgcagcagacccagggcgacctgagcgcctatgaggccgagctggaggcccggctgaacctgagagatgctgaggccaaccagctgaaggaggagctggagaaggtgacccggctgacccagctggagcagagcgccctgcaggccgagctggagaaggagcggcaggccctgaagaatgccctgggcaaggcccagttcagcgaggagaaggagcaggagaacagcgagctgcacgccaagctgaagcacctgcaggatgacaacaacctgctgaagcagcagctgaaggacttccagaaccacctgaaccacgtggtggatggcctggtgcggcctgaggaggtggccgcccgggtggatgagctgcggaggaagctgaagctgggcaccggggagatgaacatccacagccccagtgatgtgctgggcaagagcctggccgacctgcagaagcagttcagcgagatcctggcccggagcaagtgggagagagatgaggcccaggtgcgggagaggaagctgcaggaggagatggccctgcagcaggagaagctggccaccggccaggaggagttccggcaggcctgtgagcgggccctggaggccaggatgaactttgacaagaggcagcacgaggcccgcatccagcagatggagaatgagatccactacctgcaggagaacctgaagtccatggaggagatccagggcctgacagacctgcagctgcaggaggctgatgaggagaaggagcgcatcctggcccagctgcgggagctggagaagaagaagaagctggaggatgccaagagccaggagcaggtgtttggcctggacaaggagctgaagaagctgaagaaggctgtggccaccagtgacaagctggccacagctgagctgaccatcgccaaggaccagctgaagagcctgcatggaacagtgatgaagatcaaccaggagcgggcagaggagctgcaggaggccgagcgcttcagcaggaaggccgcccaggccgcccgggacctgaccagggctgaggccgagattgagctgctgcagaacctgctgcggcagaagggggagcagttccggctggagatggagaagacaggagtgggcaccggggccaacagccaggtgctggagattgagaagctgaatgagaccatggagcggcagaggacagaaattgcccggctgcagaatgtgctggacctgactggaagtgacaacaagggcggctttgaaaatgtgctggaggagattgctgagctgcggcgggaggtgtcctaccagaatgactacatcagctccatggctgaccccttcaagagaagaggctactggtacttcatgcctcctccacccagcagcaaggtgagcagccacagcagccaggccaccaaggacagcggcgtgggcctgaagtacagcgccagcacccctgtgaggaagccccggcccggccagcaggacggcaaggagggcagccagcccccaccagccagcggctactgggtgtacagccccatccgcagcggcctgcacaagctgttccccagcagagatgctgacagcggcggggacagccaggaggagagcgagctggatgaccaggaggagcccccatttgtgcccccacctggctacatgatgtacacagtgctgcctgatggcagccctgtgccccagggcatggccctgtatgcccctcctccacccctgcccaacaacagccggcccctgaccccaggcaccgtggtgtatggccccccacctgctggggcccccatggtgtatggccccccaccacccaacttcagcatccccttcatccccatgggcgtgctgcactgcaatgtgcctgagcaccacaacctggagaatgaggtgtcccggctggaggacatcatgcagcacctgaagagcaagaagcgggaggagcgctggatgagggccagcaagaggcagagcgagaaggagatggaggagctgcaccacaacattgatgacctgctgcaggagaagaagagcctggagtgtgaggtggaggagctgcacaggacagtgcagaagaggcagcagcagaaggacttcattgatggaaatgtggagagcctgatgacagagctggagattgagaagagcctgaagcaccatgaagatattgtggatgaaattgagtgcatcgagaagaccctgctgaagagaagaagtgagctgcgggaggccgaccggctgctggccgaggccgagagcgagctgagctgcaccaaggagaagaccaagaatgctgtggagaagttcacagatgccaagaggagcctgctgcagacagaaagtgatgctgaggagctggagcggcgggcccaggagacagctgtgaacctggtgaaggctgaccagcagctgcggagcctgcaggctgatgccaaggacctggagcagcacaagatcaagcaggaggagatcctgaaggagatcaacaagatcgtggccgccaaggacagcgacttccagtgcctgagcaagaagaaggagaagctgacagaggagctgcagaagctgcagaaggacatcgagatggccgagagaaatgaagaccaccacctgcaggtgctgaaggagagcgaggtgctgctgcaggccaagagagctgagctggagaagctgaagagccaggtgaccagccagcagcaggagatggctgtgctggaccggcagctgggccacaagaaggaggagctgcacctgctgcagggctccatggtgcaggccaaggctgacctgcaggaggccctgcggctgggggagacagaggtgacagagaagtgcaaccacatccgggaggtgaagagcctgctggaggagctgtccttccagaagggggagctgaatgtgcagatcagcgagaggaagacccagctgaccctcatcaagcaggagattgagaaggaggaggagaacctgcaggtggtgctgcggcagatgagcaagcacaagacagagctgaagaacatcctggacatgctgcagctggagaaccacgagctgcagggcctgaagctgcagcacgaccagagggtgtctgagctggagaagacccaggtggccgtgctggaggagaagctggagctggagaacctgcagcagatcagccagcagcagaagggggagattgagtggcagaagcagctgctggagcgggacaagcgggagattgaaagaatgacagctgagagccgggccctgcagagctgtgtggagtgcctgagcaaggagaaggaggacctgcaggagaagtgtgacatctgggagaagaagctggcccagaccaagagggtgctggccgctgctgaggagaacagcaagatggagcagagcaacctggagaagctggagctgaatgtgaggaagctgcagcaggagctggaccagctgaacagagacaagctgagcctgcacaatgacatcagcgccatgcagcagcagctgcaggagaagcgggaggccgtgaacagcctgcaggaggagctggccaacgtgcaggaccacctgaacctggccaagcaggacctgctgcacaccaccaagcaccaggatgtgctgctgtctgagcagacccggctgcagaaggacatcagcgagtgggccaacagatttgaggactgccagaaggaggaggagaccaagcagcagcagctgcaggtgctgcagaatgaaattgaggagaacaagctgaagctggtgcagcaggagatgatgttccagaggctgcagaaggagcgggagagcgaggagagcaagctggagaccagcaaggtgaccctgaaggagcagcagcaccagctggagaaggagctgacagaccagaagagcaagctggaccaggtgctgagcaaggtgctggccgctgaggagcgggtgaggaccctgcaggaggaggagcgctggtgtgagagcctggagaagaccctgagccagaccaagaggcagctgtctgagcgggagcagcagctggtggagaagagcggggagctgctggccctgcagaaggaggccgacagcatgagagctgacttcagcctgctgaggaaccagttcctgacagagaggaagaaggccgagaagcaggtggccagcctgaaggaggccctgaagatccagaggagccagctggagaagaacctgctggagcagaagcaggagaacagctgcatccagaaggagatggccaccatcgagctggtggcccaggacaaccacgagcgggcccggcggctgatgaaggagctgaaccagatgcagtatgagtacacagagctgaagaagcagatggccaaccagaaggacctggagcggcggcagatggagatcagtgatgccatgaggaccctgaagtctgaggtgaaggatgagatccgcaccagcctgaagaacctgaaccagttcctgcctgagctgcctgctgacctggaggccatcctggagagaaatgaaaacctggagggggagctggagagcctgaaggagaacctgcccttcaccatgaatgaaggcccctttgaggagaagctgaacttcagccaggtgcacatcatggatgagcactggagaggagaggccctgcgggagaagctgcggcacagagaagatcggctgaaggcccagctgcggcactgcatgagcaagcaggccgaggtgctgatcaagggcaagaggcagacagagggcaccctgcacagcctgcggcggcaggtggatgccctgggggagctggtgaccagcaccagcgctgacagcgccagcagccccagcctgagccagctggagagcagcctgacagaggacagccagctgggccagaaccagaagcagaacaacagcctgaggtag

SEQ ID NO: 271124 - DNA, 6978 bp, Artificial Sequence
  derived and/or modified sequence
atgaagaagggcagccagcagaagatcttcagcaaggccaagatcccctccagtagtcattcccccattcctagttccatgtcaaacatgcggtcacgttctctttcacctttgataggaagtgagactttgcctttccattccggcgggcagtggtgtgaacaggtggaaatcgctgacgaaaataatatgttattggattatcaggatcataagggcgctgatagtcatgcgggggttaggtacattacagaggctctcataaagaaattgacgaaacaggacaacctggccctgattaaatcacttaacttgtcgcttagcaaagatgggggtaaaaagtttaaatatatcgagaatcttgaaaaatgtgttaagctggaggtgttgaatcttagttacaacctgattggtaagatcgaaaaattggataaacttctgaaactacgagagcttaacctttcatataacaaaatctcaaagatagagggaattgagaatatgtgcaaccttcagaaacttaacctcgccggaaacgagattgaacatataccggtgtggctggggaagaagctcaagtcactcagagtccttaatttaaagggcaataaaatttcaagcctgcaagatatcagcaagctgaaacccctgcaggatctcattagcctgatcttggtagaaaatcctgtggttaccctgccacattacctgcagttcaccatctttcacttaaggtcgttggagtctctcgagggacagcccgtgacgacccaggatcgacaggaggccttcgagaggttttctcttgaggaagtggagaggttagagcgagatttggagaagaaaatgatcgaaactgaggaattgaagtctaagcagacaagattcctcgaggaaataaaaaatcaagataaactgaataaaagcctgaaagaagaggccatgctccagaaacagtcctgtgaggaactcaagagcgacctgaacacaaagaacgagttgttgaaacaaaagactatagaacttactagagcttgtcagaaacagtacgagctagaacaagaactggccttctacaagattgacgccaagttcgagccacttaattattatcccagtgagtacgctgagatcgacaaagctcctgacgagagcccgtatataggcaaaagtaggtacaagcggaacatgttcgccactgaatcgtacattattgactcagctcaggcagttcagattaagaagatggagccggatgaacagcttcgaaatgatcacatgaatctgaggggccatacccccctggacacacagttggaggataaggagaagaagatctccgctgcacagaccaggctgagtgagttgcacgacgagattgaaaaggcagaacagcaaattcttcgcgccactgaggaattcaagcagcttgaagaggctatccagcttaaaaaaatttccgaagccggaaaggatctcctttataaacagctgagtgggaggctgcagcttgtcaacaagctcagacaggaggctctagatctggagcttcagatggagaaacagaaacaggaaatcgccggcaaacaaaaagagattaaggacctgcaaatcgccatagactccctcgattccaaagatccgaagcactcacacatgaaggcacagaagagcggtaaagaacagcaattggatattatgaataagcagtaccagcagttggaatctcgccttgatgaaatcctgagtaggattgccaaggaaactgaggaaattaaagacttagaggaacagctgactgaggggcaaattgcagccaacgaggcactgaagaaagatctcgaaggggtgatctccggactgcaggagtacctgggcacgataaagggacaggcaacacaggctcagaacgaatgtagaaagcttcgggacgaaaaagaaacactgctccagagactgactgaagtagaacaagaacgggaccagctggagattgtggcgatggatgcagagaatatgcgcaaggagctggccgaacttgagtctgccctgcaggagcagcacgaagtcaatgccagcctgcagcagactcagggggacctgtcagcttatgaggccgagctggaggcccgccttaatctgagggatgctgaagcgaatcagctgaaggaagaactcgaaaaggtgaccaggcttacgcaactggaacagagcgccctgcaggcagagctcgaaaaggagagacaggccctaaagaatgcgctcggaaaggcccagttcagcgaagaaaaagaacaggaaaacagtgagttgcacgccaagttgaagcaccttcaggatgataacaacctccttaagcagcaactcaaggactttcaaaaccatctgaaccatgttgtggacggcctggtacgacctgaagaggtggctgcccgcgtggacgaactgcgcagaaagctgaaattgggaacgggggaaatgaatattcactcacccagtgacgtcctcggcaaatcgctggctgatctacagaaacagttctcagaaatccttgctagaagtaagtgggagcgagacgaagcacaggttcgagaacgcaagctccaggaagaaatggctctccagcaggagaaactcgccaccgggcaggaagagttccgacaggcatgcgagcgcgccctagaggcgcgcatgaacttcgataaacgccaacatgaggcacgcattcagcaaatggagaatgagatacattatttgcaggagaacctcaagagcatggaggagatccagggattgacagatcttcagctgcaggaggctgatgaggaaaaggaaaggatcctggcccagctgcgggagctagaaaaaaagaagaaactggaagacgcaaaaagccaggagcaagtctttggtctggataaagagctgaaaaagctgaaaaaggcagtggccacctccgacaaattggcaactgctgagctaacgattgccaaagatcagctcaaatccctccatggcactgttatgaaaatcaaccaagagagggccgaggagttgcaggaggcagagcgcttctctagaaaagcagctcaggccgccagagatctaacgagggccgaggcggaaattgagctgctgcagaatcttctgcgccagaagggtgagcagttccgtcttgagatggagaaaactggcgtgggaactggagcgaattcccaggtgcttgagatcgagaaactgaatgaaactatggaacgccaacgaaccgaaattgcccggttacaaaacgtgctggacttgacaggcagtgataacaagggtggatttgaaaacgtgttggaggaaatagccgagctgaggcgcgaagtttcttaccagaatgattatatttcatctatggctgatccattcaagaggaggggttattggtacttcatgcctccccctcccagttccaaagtctctagccacagttcccaggccacgaaagactccggggtaggcctcaaatatagtgctagcacccccgtccggaaaccacgtcctggccaacaggatggcaaggaagggagtcagccaccgcccgcttcgggatactgggtctacagcccaattaggtcaggcttgcataagctcttcccttctagggatgcggactccggtggcgatagccaggaagaatctgaactggacgatcaggaagagccgccatttgtgcctcccccggggtacatgatgtataccgtcctacctgacggttcacccgttccacaaggtatggcactgtatgccccacctccaccactgcccaacaattcccggcctctgactccagggacagtcgtgtatgggccaccccccgccggcgcgccaatggtgtatggacctcccccccctaatttcagtatcccatttatccccatgggggtgcttcactgcaatgtgcccgagcaccataacctggaaaatgaggtgtcccggctggaagacatcatgcaacatctgaagtcaaagaaaagggaggagcggtggatgagagcctcaaaaaggcagtcagaaaaggaaatggaggagctacatcacaatatcgacgatcttctacaggagaagaaatccctggagtgtgaggtagaggagctgcaccggaccgtgcagaagcggcagcagcagaaggattttattgacggaaacgtggagtccttaatgacagaactggaaattgaaaagtcactgaagcaccatgaggatatcgtggatgagattgaatgtatcgagaaaaccctgttgaaaaggcgctcagagctcagagaggcggatcgcttgttggccgaagcagagagtgagctctcatgcacaaaggaaaagaccaaaaatgcagtcgaaaagtttactgacgccaaacggtccctgctgcagacggagtccgacgcagaggaattggaacggcgggctcaagagactgcagtgaacctggtgaaagcggatcagcagctaaggagcctacaggctgacgcgaaagatctagaacaacataaaattaagcaggaggagattcttaaggaaattaataaaattgttgccgctaaggattcagactttcagtgtctatcgaagaagaaagaaaagcttacagaggaactgcagaagcttcagaaggatattgaaatggccgaaagaaacgaggaccaccacttgcaggtgctgaaggagagcgaagtgttacttcaggcgaaacgggccgagttggagaaactgaagtcccaggtgacatcccagcagcaggagatggctgtcctggatagacagctggggcacaaaaaagaggagcttcacctgttgcaaggaagtatggtgcaggctaaggctgatttgcaggaggcactgcgcctgggggagaccgaagtgaccgagaaatgcaatcacataagggaggtaaagagcctgctagaagagctctcctttcagaaaggcgagctgaatgtccagatcagcgaaagaaagactcaactcacccttatcaaacaagaaatcgaaaaagaggaggagaaccttcaggtagtcctgcgtcagatgagtaaacataagactgaattaaagaacattttggacatgctgcagctggaaaaccacgaactgcagggcctgaaattgcagcacgaccaacgtgttagtgaactggagaagacccaggtagctgtgctggaagaaaagctggagctggagaatctgcaacaaatcagccagcaacagaagggcgagattgaatggcagaaacaactactggagcgcgataaacgcgaaatcgagcggatgaccgcagaaagcagagcactgcaatcctgcgttgagtgcttgagcaaagaaaaggaggatcttcaggagaagtgcgatatctgggaaaaaaaactggcgcagacaaagagggtgctggccgccgccgaggagaactctaaaatggagcagagcaatctcgaaaagctggaactaaacgtaagaaagcttcaacaggaactggatcagctgaatcgggataaactgtctctccataacgatatctccgccatgcagcagcaactacaggagaaacgggaagcagtaaacagcttgcaggaggagctggcgaacgtgcaggaccacctgaacttggccaaacaggacctgcttcacactactaagcatcaagatgtcttgttgtcggagcagacacgactccagaaggacatcagtgaatgggcgaaccggttcgaggactgtcaaaaggaagaggagaccaagcaacaacagctccaggtcctgcaaaatgagatcgaggaaaacaagcttaaactggtgcaacaggaaatgatgtttcagagactgcaaaaagaacgtgagtccgaagagtccaagctcgaaaccagcaaggttaccttgaaggagcagcagcaccagttggagaaggagcttacagaccagaagagtaagctcgatcaagtattgagcaaggtactggctgcggaggagcgggtgcgtacactccaggaagaggagcggtggtgcgagtcattggaaaaaactttatcccagactaagagacagctgtctgagagagagcaacagctcgtggagaagtcaggcgagcttctggcacttcagaaagaggcagactctatgagagccgacttctccctgctcagaaaccaatttcttacagagcgcaagaaggctgagaagcaggtggcgagcttgaaagaagcactcaaaatccaacgctctcagcttgaaaaaaacctgttggagcaaaagcaggaaaattcctgcattcaaaaagaaatggccacaattgaactcgtggcccaagacaatcacgagcgggcccgccgcctgatgaaggagcttaatcagatgcaatatgagtacactgagctgaagaagcagatggcgaatcagaaagacttggaaagaagacagatggagatttctgacgccatgagaaccctgaaaagtgaggttaaggatgaaatcaggacatccctcaaaaaccttaaccagttcctgcccgagctgcctgccgatctcgaggcaatcttggaacgaaacgaaaacctggagggagaactggaatctctgaaggagaacttaccattcacgatgaatgaaggacctttcgaagagaagttgaatttcagtcaggtgcatattatggatgaacactggcgtggagaagccctgagggagaagttaagacacagagaagatcgcctgaaagcccagcttaggcactgtatgtccaaacaagccgaggtcctgatcaaaggcaagcggcagacagaaggtaccttacacagcctgagaaggcaagtggacgctttaggagagctagttacctccacaagcgcggacagcgccagttcgccgagtttgagtcagttagaaagctcattgacagaagactcacaactcggacagaaccaggagaagaacgcatcagctcggtag

SEQ ID NO: 271125 - DNA, 7356 bp, Artificial Sequence
  derived and/or modified sequence
gttttgatgaacacctggctttattcttgcaatgaagaaaggttctcaacaaaaaatattctccaaagcaaagataccatcatcatctcactctcctatcccatcatctatgtccaatatgagatctaggtcactttcacctttgattggatcagagactctaccttttcattctggaggacagtggtgtgagcaagttgagattgcagatgaaaacaatatgcttttggactatcaagaccataaaggagctgattcacatgcaggagttagatatattacagaggccctcattaaaaaacttactaaacaggataatttggctttgataaaatctctgaacctttcactttctaaagacggtggcaagaaatttaagtatattgagaatttggaaaaatgtgttaaacttgaagtactgaatctcagctataatctaatagggaagattgaaaagttggacaagctgttaaaattacgtgaactcaacttatcatataacaaaatcagcaaaattgaaggcatagaaaatatgtgtaatctgcaaaagcttaaccttgcaggaaatgaaattgagcatattccagtatggttagggaagaagttaaaatctttgcgagtcctcaatttgaaaggcaacaagatatcatcgctccaagatataagcaagttgaaaccgcttcaagatttgatttctctgatcctagttgaaaatccagttgtgacccttcctcattacctccagtttaccattttccacctccgttcattggaaagtttggaaggtcagccagtaaccactcaggatagacaggaggcttttgagagattcagtttagaagaggtagaaagactggaaagagacctagaaaaaaagatgatagaaactgaagagcttaagagcaaacaaacaaggttccttgaggaaattaaaaatcaagataaattgaataaatcattaaaagaggaggccatgttacagaaacagagctgtgaggaactcaagagtgacttaaacacaaaaaatgaattgctaaaacagaagaccatagaattaacacgagcatgtcagaagcaatatgagctggaacaggaattggccttttataaaattgatgctaaatttgagccactaaattattatccatcagagtatgctgaaattgataaagccccagatgaaagcccttacattggcaaatccagatacaagagaaatatgtttgccacagagagttatattattgacagtgctcaggcagtacagatcaagaagatggagccagatgaacaacttagaaatgatcacatgaacttgagaggccacacaccactggacacgcaactggaagacaaagaaaaaaaaataagtgcagcacaaactcgactatcagaactgcatgatgaaatagaaaaggcagaacaacaaattttgagagctactgaagaatttaaacaactggaagaagctatacaactaaaaaagatttcagaagcagggaaagaccttctttacaagcagttgagtggtagactacaacttgtaaataaattacgccaggaagctctggatctagaactgcagatggaaaagcaaaagcaggaaattgccggaaagcagaaggagattaaggacctgcaaatagccatagatagcctggattccaaagacccaaaacattcccatatgaaggctcaaaagagcggtaaagaacaacagcttgacattatgaacaagcagtaccaacaacttgaaagtcgtttggatgagatactttctagaattgctaaggaaacggaagagattaaggaccttgaagaacagcttactgaaggccagatagcagcaaatgaagccctgaagaaggatttagaaggtgttatcagtgggttgcaagaatacctggggaccattaaaggccaggcaactcaggcccagaatgagtgcaggaagctgcgggatgagaaagagacattgttgcagagattgacagaagtcgagcaggagagagaccagctggaaatagttgccatggatgcagaaaatatgaggaaggagcttgcagagctagaaagtgccctccaagagcagcatgaggtgaatgcatctttgcagcagacccagggagatctcagtgcctatgaagctgagctagaggctcggctaaacctaagggatgctgaagccaaccagctcaaggaagagttggaaaaagtaacaagacttacccagttagaacaatcagcccttcaagcagaacttgagaaggaaaggcaagccctcaagaatgcccttggaaaagcccagttctcagaagaaaaggagcaagagaacagtgagctccatgcaaaacttaaacacttgcaggatgacaataatctgttaaaacagcaacttaaagatttccagaatcaccttaaccatgtggttgatggtttggttcgtccagaagaagtggcagctcgtgtggatgagctaagaagaaaactgaaattaggaactggggaaatgaacatccatagtccttcagatgtcttagggaaaagtcttgctgatttacagaaacaattcagtgaaattcttgcacgctccaagtgggaaagagatgaagcacaagttagagagagaaaactccaagaagaaatggctctgcagcaagagaaactggcaactggacaagaagagttcaggcaggcctgtgagagagccctggaagcaagaatgaattttgataagaggcaacatgaagcaagaatccagcaaatggagaatgaaattcactatttgcaagaaaatctaaaaagtatggaggaaatccaaggccttacagatctccaacttcaggaagctgatgaagagaaggagagaattctggcccaactccgagagttagagaaaaagaagaaacttgaagatgccaaatctcaggagcaagtttttggtttagataaagaactgaagaaactaaagaaagccgtggccacctctgataagctagccacagctgagctcaccattgccaaagaccagctgaagtcccttcatggaactgttatgaaaattaaccaggagcgagcagaggagttgcaggaagcagagaggttcagcagaaaggcagcacaagcagccagagatctcacccgagcagaagctgagatcgaactcctgcagaatctcctcaggcagaagggggagcagtttcgacttgagatggagaaaacaggtgtaggtactggagcaaactcacaggtcctagaaattgagaaactgaatgagacaatggaacgacaaaggacagagattgcaaggctgcagaatgtactagacctcactggaagtgacaacaaaggaggctttgaaaatgttttagaagaaattgctgaacttcgacgtgaagtttcttatcagaatgattacataagcagcatggcagatcctttcaaaagacgaggctattggtactttatgccaccaccaccatcatcaaaagtttccagccatagttcccaggccaccaaggactctggtgttggccttaagtactcagcctcaactcctgttagaaaaccacgccctgggcagcaggatgggaaggaaggcagtcaacctccccctgcctcaggatactgggtttattctcccatcaggagtgggttacataaactgtttccaagtagagatgcagacagtggaggagatagtcaggaagagagtgagctggatgaccaagaagaacccccatttgtgcctcctcctggatacatgatgtatactgtgcttcctgatggttctcctgtaccccagggcatggccctgtatgcaccacctcctcccttgccaaacaatagccgacctctcacccctggcactgttgtttatggcccacctcctgctggggcccccatggtgtatgggcctccaccccccaacttctccatccccttcatccctatgggtgtgctgcattgcaacgtccctgaacaccataacttagagaatgaagtttctagattagaagacataatgcagcatttaaaatcaaagaagcgggaagaaaggtggatgagagcatccaagcggcagtcggagaaagaaatggaagaactgcatcataatattgatgatcttttgcaagagaagaaaagcttagagtgtgaagtagaagaattacatagaactgtccagaaacgtcaacagcaaaaggacttcattgatggaaatgttgagagtcttatgactgaactagaaatagaaaaatcactcaaacatcatgaagatattgtagatgaaattgagtgcattgagaagactcttctgaaacgtcgctcagagctcagggaagctgaccgactcctggcagaggctgagagtgaactttcatgcactaaagaaaagacaaaaaatgctgttgaaaagttcactgatgccaagagaagtttattgcaaactgagtcagatgctgaggaattagaaaggagagctcaggaaactgctgttaacctcgtcaaagctgatcagcagctaagatcgctccaggctgatgcaaaggatttggagcagcacaaaatcaagcaagaagaaatcttgaaagaaataaacaaaattgtagcagcaaaagactcagacttccaatgtttaagcaagaagaaggaaaaactgacagaagagcttcagaaactacagaaagacatagagatggcagaacgcaatgaggatcaccacctgcaggtccttaaagaatctgaggtgcttcttcaggccaaaagagccgagctggaaaagctgaaaagccaggtgacaagtcagcagcaggagatggctgtcttggacaggcagttagggcataaaaaggaggagctgcatctactccaaggaagcatggtccaggcaaaagctgacctccaggaagctctgagactgggagagactgaagtaactgagaagtgcaatcacattagggaagtaaaatctcttctggaagaactgagttttcagaaaggagaactaaatgttcagattagtgaaagaaaaactcaacttacacttataaagcaggaaattgaaaaagaggaagaaaatcttcaggttgttttaaggcagatgtctaaacataaaaccgaactaaagaatattctggacatgttgcaacttgaaaaccatgagctacaaggtttgaagctacaacatgaccaaagggtatctgaattagagaagactcaggtggcagtgctagaggagaaactggagttagagaatttgcagcagatatcccagcagcagaaaggggaaatagagtggcagaagcagctccttgagagggataaacgagaaatagaacgaatgactgctgagtcccgagctttacaatcgtgtgttgagtgtttgagcaaagaaaaggaagatctccaagagaaatgtgacatttgggaaaaaaagttggcacaaaccaaaagggttttagcagcagcagaagaaaatagcaaaatggagcaatcaaacttagaaaagttggaattgaatgtcagaaaactgcagcaggaactagaccaactaaacagagacaagttgtcactgcataacgacatttcagcaatgcaacagcagctccaagaaaaacgagaagcagtaaactcactgcaggaggaactagctaatgtccaagaccatttgaacctagcaaaacaggacctgcttcacaccaccaagcatcaggatgtgttgctcagtgagcagacccgactccagaaggacatcagtgaatgggcaaataggtttgaagactgtcagaaagaagaggagacaaaacaacaacaacttcaagtgcttcagaatgagattgaagaaaacaagctcaaactagtccaacaagaaatgatgtttcagagactccagaaagagagagaaagtgaaaaaagcaaactggaccaagtgctctcaaaggtgctggcagctgaagagcgtgttaggactctgcaggaagaggagaggtggtgtgagagcctggagaagacactctcccaaactaaacggcagctttcagaaagggagcagcaattggtggagaaatcaggtgagctgttggccctccagaaagaggcagattctatgagggcagacttcagccttctgcggaaccagttcttgacagaaagaaagaaagctgagaagcaggtggccagcctgaaggaagcacttaagatccagcggagccagctggagaaaaaccttcttgagcaaaaacaggagaacagctgcatacaaaaggaaatggcaacaattgaactggtagcccaggacaaccatgagcgggccaggcgcctgatgaaggagctcaaccagatgcagtatgagtacacggagctcaagaaacagatggcaaaccaaaaagatttggagagaagacaaatggaaatcagtgatgcaatgaggacacttaaatctgaggtgaaggatgaaatcagaaccagcttgaagaatcttaatcagtttcttccagaactaccagcagatctagaagctattttggaaagaaacgaaaacctagaaggagaattggaaagcttgaaagagaaccttccatttaccatgaatgagggaccttttgaagaaaaactgaacttttcccaagttcacataatggatgaacactggcgtggagaagcactccgggagaaactgcgtcaccgggaagaccgactcaaggcccaactccgacactgtatgtccaagcaagcagaagtattaattaaaggaaagcggcagacagagggcactttacacagtttgaggagacaagtagatgctttaggggaattggtcaccagcacctctgcagattcagcgtcatcacccagtctgtctcagctggagtcttccctcacagaggactctcaacttggacaaaatcaggaaaagaatgcctcagccagatgaggaatactgtcttgtgtaaatatattcaaggaaaacacctccactacctcactgacttcataattggaatgtcacatggtttttttaatcaagatgcagtgaactgagattctgaaactccactgtagtttactttgcctgtaccattaatgccaatgtttttataaatcacttgtacatagtacatatgggaatagttgcatatgggaatttaaaccaacatgtggctgagcctttttttttttaatcttcgtaacatgtttaaaaaaaaacagtgattttaactgcatatttgaacctacaaactggtaaatcttattaacaaaaagaatgtacttaaggccctctttatttatagtgtcgagttatttttgaattttgcttaaaatctatttttcatatgaaaataaaagataacaatc

SEQ ID NO: 271126 - DNA, 3024 bp, Artificial Sequence
  derived and/or modified sequence
atgcagcacctgaagagcaagaagcgggaggagcggtggatgcgggccagtaagagacagagtgagaaagagatggaggagctgcatcataatattgatgacttgctgcaggagaaaaaaagccttgaatgcgaagtggaagagctgcaccgaaccgtccaaaaacgtcagcaacagaaagacttcattgacggaaacgttgaatcactgatgaccgagctggaaatcgagaaaagtctaaagcatcatgaggacattgttgacgaaattgagtgtatcgaaaaaacacttctgaaacgcaggagtgaacttcgagaggcagatagactcctggctgaagctgagtctgagcttagctgcactaaagagaaagtctgccttctcgtggtatggggagtgagtagcgtgtggaccaagaatgcagtggaaaagtttactgacgccaagaggtctctgctgcagacagagtctgacgctgaagaactggaacggagggcgcaggagaccgccgttaatctggtaaaggctgaccagcagctccgaagccttcaggctgatgcaaaagacctagaacaacataagatcaaacaggaagagattctgaaagaaattaacaagattgtcgctgccaaggatagcgattttcagtgcctttcaaagaagaaagagaagttaacagaggaattacaaaagctccagaaggacattgaaatggcagaacggaatgaggaccatcaccttcaggtccttaaggaatctgaggtgctcttgcaggctaagagagctgaactggagaagctgaagagtcaggtcacaagccagcagcaggagatggcagttctggacagacagctgggtcataaaaaggaggagctccacctgttgcagggtagcatggtccaggccaaggccgatcttcaagaagcactgaggttgggcgagaccgaagtcacagaaaagtgtaatcatattagggaagtgaagtccctccttgaggagctcagttttcagaaaggtgaactgaacgtgcagatttcagaacgcaagacccaattgactctgattaaacaggagattgaaaaggaagaggaaaacctccaagtagttttgcggcagatgagcaaacataagactgagttaaaaaatatcctggacatgttacagctcgagaaccacgaactccaggggctcaaactccagcacgatcagcgagtgtctgaactggagaaaacacaggtggcagtcctggaagaaaaactggagctagagaacctgcagcagatttcccagcagcagaaaggcgaaattgaatggcagaagcaactgctcgagcgcgacaagagagaaattgagcgaatgacagccgagtctcgcgctctacagagttgcgtcgagtgtctgtctaaggaaaaagaggaccttcaggagaagtgtgatatctgggagaagaaactcgctcagacaaagagggtgctggcggccgcagaggagaacagcaaaatggagcaatcaaatctggagaaactggaactgaacgttaggaaactccagcaggaactagaccagctgaaccgagataaactgagcctgcacaatgacatttctgccatgcagcagcagctccaggaaaaacgcgaggcggtgaactctctgcaggaggaactggcaaacgtccaggaccatctgaatcttgctaagcaggatttgcttcacaccactaagcatcaagatgtactcttgagtgagcaaacacgactccagaaagatatcagcgaatgggcaaatcgctttgaggactgccagaaggaggaggaaacaaagcagcagcagctccaggtcctccagaatgagattgaggagaacaaattaaagcttgtacagcaagaaatgatgttccagcgactgcagaaagagagagaaagtgaggagtcgaagttggaaacaagcaaagtgacacttaaagagcagcagcaccaactcgagaaagaactcacggatcagaagagcaaactggaccaggtcttgtcaaaagtcctggctgccgaagaacgggtgaggactttacaggaagaagagcgctggtgcgaaagcctggagaagaccctctcacagaccaagagacaactcagcgagagagagcaacagctggtagaaaaaagcggcgagttgttggctttgcagaaggaagcggactcaatgcgggctgatttctctttactgcggaaccagttcctgaccgagagaaagaaggcagaaaagcaagtcgcgtccctgaaggaggcgctgaaaatccagcggtcgcagcttgaaaaaaatttgcttgaacagaagcaagagaacagctgcatccaaaaagaaatggccacaatcgagctggtagcccaggataatcatgagcgggctagacgacttatgaaggaactgaaccagatgcagtacgaatatacagaactgaaaaagcagatggcaaaccagaaggatctggaacgcagacagatggagatttctgatgccatgagaaccttgaagtctgaagtgaaagatgagattcgtactagtttgaagaatctgaaccaattcctaccagaactgccagctgacctcgaggcgatccttgagagaaacgaaaaccttgaaggcgaattagaaagcctcaaggagaacctgccctttacaatgaacgaggggccatttgaagagaagctcaacttcagccaggtccatatcatggacgaacactggcgcggggaagctctgcgggagaagttgaggcatagagaggatcgactgaaggcccaacttaggcactgcatgtccaaacaggccgaggttctgatcaagggcaaacgtcagacagaggggaccttgcattccttgcgccgtcaagtggacgcactgggtgagctggtgactagcacctctgccgactccgcatcatcgccatccctatcccagctggaatcttcactgactgaggacagccagctcggccaaaatcaggagaagaacgccagcgccaggtag

SEQ ID NO: 271127 - DNA, 5322 bp, Artificial Sequence
  derived and/or modified sequence
atgaaggcccagaagagcggcaaggagcagcagctggacatcatgaataagcagtatcaacagctagaatctcgccttgatgagattctgtctaggattgccaaagagacagaagagatcaaggatctcgaagaacagctgactgaaggccagatcgcagctaacgaggcactgaaaaaagatctggaaggcgtgatttcagggctccaagagtacttaggtactatcaaaggacaagcaacacaggctcagaacgagtgtagaaaactccgcgacgagaaggaaaccctgcttcaaaggctgaccgaagttgaacaagaacgggaccagctggagattgttgccatggatgccgagaacatgcggaaggaactcgcagagctggagtctgcactgcaagaacagcatgaggtgaatgcgtcattacagcagacacagggtgatctttccgcctacgaggcggaacttgaggctagactgaacctccgcgacgccgaggccaaccagctcaaggaagaactcgagaaggtgactcggcttacacagctggaacaaagtgctctacaggctgagctggaaaaggaacggcaagctttgaaaaacgccctcgggaaggctcaattcagcgaggagaaggaacaagaaaactccgaattgcacgccaaattaaagcacctacaggacgacaataacctgctcaagcagcagttaaaggatttccagaaccatcttaaccacgtggtcgacggcttggtaaggccggaggaggtagccgcaagagtggacgaactgagacgcaagctgaagcttggaaccggcgaaatgaacattcactctccctctgatgtactggggaaaagcctggccgacctgcaaaaacagttttccgagatactggctcggagtaaatgggagagggacgaagcacaggtgagggaaaggaagctgcaagaggaaatggccctgcagcaagagaagctggctactggtcaggaagaatttcggcaggcctgcgagagagcattggaggctagaatgaactttgataagcgacagcacgaagcacgtatccagcagatggaaaatgagatccactatcttcaggagaatctgaagagtatggaggagatccaaggactgacagacctccaactccaggaagccgacgaggaaaaagaacgaatcctggcccagcttcgagagctggagaagaagaaaaagcttgaggatgcaaaatcacaggaacaggtgttcgggttggacaaggagctgaaaaagcttaaaaaggctgtggctacttccgacaaacttgctactgccgaactgaccattgccaaggaccagctgaagtccttgcacggcacagtgatgaaaatcaaccaggagagggccgaagaactgcaggaggctgagcgcttcagtcgtaaagccgcccaagcagcccgggacctgaccagagccgaagccgaaattgagctgctgcagaacctgctaagacagaaaggcgaacagttccgactcgagatggaaaaaaccggcgtggggaccggcgcgaattcccaggtcctagagattgagaaactgaatgagaccatggagcgccagaggacagaaatcgcccgcctgcagaatgtcttggacctgactggtagcgacaataaggggggttttgaaaacgtcctggaggaaatcgccgaacttcggcgggaggtctcttatcagaacgactatatttcatctatggccgatcctttcaagcgtcgcggctattggtattttatgcccccacccccctcgtcaaaagtctcaagccatagcagtcaggccaccaaggatagtggggttggacttaaatactccgcctccactcccgttagaaagcccagacctggacaacaagatgggaaggaaggatctcagccaccacccgcatctgggtactgggtttattcgcctatcagatctggcctgcacaagctatttccctctagggatgccgatagcgggggcgactcccaagaggagtctgagctggatgatcaggaagaaccgcccttcgtacccccgcccgggtacatgatgtatacagtgttgccagatggatctcctgtgcctcaggggatggctctttatgccccaccacctcccctgcctaacaattcgcgtccgcttactcccggaacagttgtttacggacctccaccagcaggagctccaatggtctacggccctcccccccctaacttttccatcccattcatcccaatgggcgttctgcactgcaacgttcctgaacatcataatctagagaatgaagtgtccaggctcgaagatattatgcaacacctgaaaagtaaaaagagggaagagcgctggatgagagccagcaagcgccagtctgagaaggaaatggaagaactccatcacaatatcgatgacctgctgcaggagaagaagagccttgaatgtgaggtcgaagagctccataggactgtccagaagagacagcagcagaaggattttattgatggtaacgtggagagcctgatgaccgagcttgagatcgaaaaaagcctgaaacaccacgaagatatcgtggacgagatagagtgtatcgaaaagacattgctcaaacggaggtcagaactgcgggaggctgatcggctgctggccgaagctgagtccgaactctcctgcacgaaggaaaagaccaagaacgccgtagagaagttcacagacgcaaaacgatctcttctacagacggagagtgacgctgaggaactggagcgaagggctcaagagactgcggtgaacctggtgaaagctgatcagcaactacgcagcctgcaagcggacgctaaggacctggaacagcacaagataaagcaggaagagatattgaaagaaatcaataagattgttgccgcgaaggacagcgactttcagtgtttgtcaaagaaaaaggagaagctgaccgaggaactgcagaagctgcagaaggatattgaaatggccgaaagaaacgaagaccatcatctccaggtgctcaaagaatcagaagtactccttcaggctaagcgagccgagcttgagaagctgaagagccaggtgacaagtcagcagcaggagatggctgtcctggataggcagcttggccacaagaaggaagagttgcacctgctgcaaggaagcatggtgcaagccaaagcggaccttcaggaggcacttcggctcggcgaaacagaagtgacggaaaagtgcaatcacattagagaggtgaagtccttgttggaagaactatcttttcagaaaggcgagctgaatgtgcagattagtgaacgaaaaacccagcttaccctgatcaagcaggaaatcgaaaaggaggaagagaatttacaggtggtcctgagacaaatgagcaaacataagacagagctgaagaacatcctcgacatgcttcagttagagaatcatgagctgcagggacttaagctgcaacatgaccagcgggtaagcgagctcgaaaaaacacaggtagccgtcctagaggagaaactcgaacttgaaaacctccaacaaatctcccaacagcagaaaggtgagatcgaatggcagaaacagttgctggaaagagataaacgagaaatagagcgtatgaccgccgagagcagggcactgcagagttgtgttgaatgtctcagcaaagagaaggaggacctgcaggagaaatgtgatatctgggagaagaagcttgcccagaccaagcgcgtgctcgccgctgcagaagaaaattctaaaatggagcagtccaacctggagaagcttgagttgaacgtcaggaaactgcagcaagaactggaccagcttaacagagacaagctcagtctgcataacgacattagtgccatgcagcagcagctgcaggaaaagcgcgaggcggtgaactccttgcaggaggagctcgccaacgtgcaggatcacctgaacctggctaaacaggacctcctgcatacgaccaagcaccaggatgtacttcttagcgagcagactcgcctacaaaaggacatctcggagtgggccaatagattcgaagactgccaaaaagaggaagaaaccaaacagcagcagttgcaggtactgcagaatgagattgaggagaacaaactgaagctggtccagcaagagatgatgtttcagaggctacagaaggagagagagtccgaggagagcaagctagaaacatccaaggtgactctgaaagaacaacaacaccaactggagaaagagctaactgaccagaagagcaagctggaccaggtcctgtccaaggttctagctgctgaagaaagggtccgtacgctccaggaagaagagagatggtgtgagagcctggagaaaactttaagccagacaaaaagacagctcagcgaacgggagcaacaactggtcgagaaaagcggggagcttttggcactgcagaaggaagctgattccatgcgagccgatttcagcctgctgaggaatcagttccttactgagcgcaagaaggccgagaagcaggtcgccagtttgaaggaagccttaaagattcagagaagccagctggaaaaaaacttgctggagcagaagcaggagaacagctgtatccaaaaggagatggccacaatcgagctggtggcccaggataaccatgagcgcgccagaaggctgatgaaagagttaaaccagatgcagtatgaatatactgaactaaaaaagcaaatggcaaaccagaaggacttggagaggaggcagatggagatctctgatgccatgaggaccctgaagtccgaggtcaaggatgagatcaggacctctctgaaaaacctcaaccagttcctgccagagctcccggctgatttagaagccatccttgaacgcaatgaaaacctggaaggtgaactggagtctctgaaggagaatctgccctttactatgaacgaaggacccttcgaagaaaagctcaatttttcacaggttcacatcatggacgaacactggagaggcgaggcacttagggaaaaactccgccaccgtgaagacagactaaaagctcaattaaggcattgtatgtccaaacaggcagaagtcctcatcaaaggtaagcgtcagacagagggaacacttcattccctgcgacgacaggtggacgcactcggcgagttagtcacatcaacgagcgcggatagcgcctcgagcccaagtctgtctcagctggagtcttcactgacagaggatagccagctgggccagaaccaggagaaaaatgcctccgcccgatag

SEQ ID NO: 271128 - DNA, 6978 bp, Artificial Sequence
  derived and/or modified sequence
atgaagaagggcagccagcagaagatcttcagcaaggccaagatcccgtcatcttctcacagccctatcccgtcttctatgagcaatatgaggtcacggtcactgtcacctttaatcggatcggagaccttaccttttcactccggcgggcaatggtgcgagcaggtggagatcgctgacgagaataacatgttgctggattaccaggatcacaagggcgcagactcccacgctggcgtgcggtacatcactgaagctttgatcaaaaagctgaccaaacaagataacctcgccctcatcaagagcttgaatctgtcactgtccaaggacggcggaaagaaattcaaatacatagagaatctggagaaatgtgtcaagttggaggtactaaacctatcatacaatctgatcggaaaaatcgagaagctggacaaactgctgaagctccgtgagttgaacctgtcttataataagatctccaagatcgagggtattgagaatatgtgcaacctgcagaaactgaacctggccgggaacgagatcgaacatattccggtctggctcggaaaaaaactgaagtcattgcgagtgctcaacctaaaaggaaacaagattagttccctgcaggacatttcaaagctgaagcccctgcaagacctcatcagcttgattctggtagagaaccccgtggtcactttaccacactacttgcagttcacaatctttcatctccgttccctggaaagcttagaaggccagcccgtcacaacacaagacagacaggaggcctttgaacgatttagcctggaggaggtggaaaggctcgaacgggatctggagaaaaagatgatcgaaacagaagaactgaagagcaaacagacccgctttctagaggaaataaagaaccaggataagctcaacaaatccctgaaggaagaggcaatgttgcagaaacagtcatgtgaggaactcaagtctgacttaaacacaaaaaacgaactcctaaagcagaagacgatcgaactgactcgggcttgtcagaaacagtacgagttagagcaggagcttgccttttacaagatcgacgccaaattcgagccactcaactattaccccagcgagtacgcagaaattgataaagcccccgacgagtctccctacataggaaagagcaggtacaagcgcaacatgtttgccactgagagttatatcattgactctgctcaggcagtacagatcaagaaaatggaacccgacgaacagctgcggaacgaccatatgaacttacggggacatacaccactcgacacacaactggaagataaggagaagaagatctctgcagcccagacacgtttaagcgagttgcatgatgaaatcgaaaaggctgagcaacagatcctgcgcgccactgaagagtttaagcagctggaggaagcaatacagctgaagaaaatttcggaggccggtaaggatctcctatacaagcaactcagcggcagactgcagctggttaacaagctgaggcaagaggccctagacctggaactgcaaatggaaaagcaaaaacaggagatcgccggaaagcaaaaggagatcaaagacctacagatcgcaatcgactctctggattcaaaagaccctaaacacagccacatgaaagctcagaaaagcggaaaggagcagcaacttgatattatgaataaacaataccagcagctcgaaagccggctcgacgaaattctgagcagaatcgccaaggaaactgaagagatcaaggacctcgaggagcagctgacggaaggccaaatcgccgccaacgaagccttgaaaaaagacctcgagggcgtaatttccggtcttcaggagtacttgggtaccattaagggccaagcgacacaggcccaaaatgaatgtagaaaactgagggacgaaaaagaaacgctgctacagaggttaacagaggtggagcaggagagggaccagctggaaatcgtcgccatggacgctgagaatatgaggaaggaactggccgaactggagtctgctctccaggagcagcacgaagttaatgcaagtctccagcagacacagggggatctttcggcctacgaagctgagctcgaggcccgcctgaacttaagggacgctgaagccaaccagcttaaggaagaactggaaaaggttacccgcctcacacaactggagcagagtgccctgcaggcggagttagaaaaagaacggcaagctctgaaaaacgctttgggcaaagctcagttttccgaggaaaaagagcaggagaacagtgaactgcacgccaagctcaaacacctacaggacgacaacaatcttttgaaacaacagctaaaggattttcagaatcaccttaaccatgtagtcgacggccttgtaagaccagaagaagtggcagccagggtggatgagttgaggaggaaactgaagcttggaaccggggaaatgaatatccatagcccatcagacgtcctgggtaaaagccttgccgacctgcagaagcagttttcggagatactggctaggagcaagtgggagcgcgatgaagcccaggtccgcgaacgcaagttgcaggaagagatggccctgcagcaggaaaagttggcaaccggacaggaggaatttaggcaggcctgtgagagagctctcgaagccagaatgaactttgacaagcgtcagcatgaagctaggatccagcaaatggaaaatgagatccactatctccaggaaaacctcaagtctatggaggagatccaggggctcacagacttgcagctgcaggaggcagatgaagaaaaagagcgtatcctggcccagctgagagaattggagaagaaaaaaaagctggaagacgctaaatcacaggagcaggtgttcggcctcgataaagagctcaagaagctgaagaaggctgtcgcaacttctgataagctggcaaccgctgagctgaccatcgcgaaggaccaactgaaaagtcttcacggaacagtcatgaaaatcaaccaagagcgcgccgaagagctgcaagaggcagagcgatttagtcgcaaagctgcccaggcagcacgggacttaactcgcgccgaagccgagattgaactattacagaacctgctgagacagaagggtgaacagtttcgactagaaatggagaagaccggcgttggcacaggcgcaaattcacaggttttagagatcgagaaacttaatgagaccatggagaggcagagaacggaaatcgctcgtttgcagaacgtcttggatctgacggggtccgataataaaggtggcttcgaaaacgtgctcgaagagatcgctgaattgagaagggaggtgtcctaccaaaacgactacatcagcagcatggccgatccatttaagcgccgcggctattggtacttcatgcctccaccaccctccagcaaggtgtcttcccatagtagccaggcaacaaaagactccggggttggtctcaaatactcagcgtcaactcccgtgaggaagcccaggccaggacagcaagatgggaaggagggctctcagcctccacctgcctcaggttactgggtatatagtcccatccgctcgggactgcataaactgtttccctcacgtgatgccgacagcggcggcgactcacaggaggagtctgagctggacgaccaggaggagcctccttttgtaccaccccctggctacatgatgtacaccgttctccccgatgggtcccctgtgcctcaggggatggccctttacgctccacccccacctcttcctaataactctcggcccctaactccaggaaccgttgtgtacggccccccccctgccggtgccccgatggtctatggaccaccccctcccaacttttctattccctttatacctatgggtgtgttgcactgtaacgtcccagagcaccataatttggagaatgaagtgtctagactggaagatatcatgcagcacctaaagagcaaaaagagagaggaacgatggatgcgagctagtaagcggcagagcgaaaaggagatggaagaattgcaccacaacattgacgacctgctgcaggagaaaaagtcactggagtgtgaggtagaagaactccacagaacagtccagaaaaggcaacaacaaaaagatttcatagatggaaatgtcgagtctctgatgactgagctggagatcgagaagtcccttaagcaccatgaagacatagttgatgagatcgagtgtattgagaagaccttgcttaagaggagatcagaactccgggaagcggacaggttgctggccgaggctgaaagcgaactgtcctgcacaaaagaaaagacaaaaaatgctgtggagaaattcacagatgctaagcggtccctgttacagaccgagtcggatgccgaagaactcgagagacgcgctcaggagactgccgtcaatttggtgaaagcggatcagcagcttcggtcgctccaggccgatgccaaagacttggagcagcacaaaattaaacaggaagaaattctcaaggagatcaataagatcgtagcagccaaagattccgatttccagtgtctctctaagaaaaaggagaaacttaccgaagagttgcagaaactgcaaaaagatattgagatggcggaacggaacgaggaccaccacctacaggtgctgaaagagagtgaagtacttctgcaagcaaagagggccgagctggagaagctgaagagtcaggttacttcccagcagcaggaaatggccgtccttgacagacagcttggacacaaaaaggaggagctgcatcttctgcagggatccatggtgcaggctaaagccgatcttcaggaagccttacgcctgggagagacagaggtcacagagaagtgtaatcacattagggaggtcaagtccctactcgaggagctgtcctttcagaaaggcgagttaaacgtccagattagcgaaagaaagacccagctcacactgatcaagcaagagatagagaaggaggaagaaaacctgcaggtggttctgagacagatgagtaaacataagaccgaattgaaaaacatactggatatgctgcagttggagaatcacgagctccagggccttaagctgcaacacgaccaacgcgtgtccgagctcgaaaaaacgcaggtcgccgtgttggaagaaaagcttgaattagaaaacctacaacaaatttctcagcagcaaaagggtgagattgaatggcagaaacagctgctggaaagggataagcgcgagattgaacgcatgacagcagaatcccgagcgctccagtcatgcgttgagtgccttagcaaagaaaaggaagacctgcaagaaaagtgcgacatatgggaaaagaagctggctcagaccaagcgagtgctcgcggccgctgaggaaaatagtaaaatggagcagtccaacctggagaagctggagctgaacgtgcgtaagcttcaacaggagctggatcagctgaatcgggataagcttagtctgcataacgatatctcagccatgcagcagcagctgcaggaaaaacgggaagcagtaaactctctgcaggaggagctagcaaatgtccaggatcacctgaatctagccaagcaagacctcttgcacacaacaaaacatcaggacgtgctgctgagcgaacagacccggctccagaaagatatttccgagtgggccaaccgctttgaagactgtcagaaagaagaggaaactaaacagcagcagctacaggttcttcagaatgagattgaggagaacaaactgaagctggtgcagcaggaaatgatgttccagaggctgcagaaggaacgtgaatccgaggagagcaagctggagactagtaaggtgacactgaaagaacagcagcatcagcttgagaaggagctgaccgaccagaaatccaagctcgaccaggtgctgagtaaagttctcgccgccgaagagcgagtgagaacactgcaggaagaggaaaggtggtgtgagtccctggagaagaccctgtcccaaactaaaaggcagttgtccgaacgggaacagcagcttgtcgagaaaagcggcgaactgttggccctgcagaaagaagccgatagcatgcgggctgatttttccttgctgcgaaaccagttccttactgagagaaagaaggctgagaaacaggtggcctctttgaaggaggcattgaagatccaacggtcgcagctggaaaagaacctgctggagcagaaacaagagaacagctgtatccaaaaggagatggcaacaatcgaactggttgcccaggacaatcatgaaagagcgcggagactgatgaaggagttaaaccaaatgcaatatgagtacacagagctgaaaaaacagatggccaatcagaaggacttggagaggcggcagatggaaatctcagacgctatgagaaccctcaagagtgaggtgaaagacgaaattcggacgtctctgaaaaacctgaatcagtttctgcctgaattgcctgcggatctggaggccatactagaaaggaatgagaacttggagggcgagttggaaagtctgaaagagaatctgccctttacgatgaatgagggtcccttcgaagaaaaactgaatttctctcaggtccacatcatggacgagcactggaggggagaggcactccgtgagaaactaaggcacagagaagatcgtctcaaagcacagttacgccattgcatgtctaagcaagcagaggtgttaatcaagggaaagcgccagaccgagggcactctgcacagcctgagaagacaggtggatgcccttggcgagttagtgaccagcacctctgctgactcggcatcatctccatccttgtcacagctggaatcttctctgacggaggactcacaacttggccagaaccaggaaaaaaatgccagcgctcgatag

SEQ ID NO: 271129 - DNA, 7431 bp, Artificial Sequence
  derived and/or modified sequence
gttttgatgaacacctggctttattcttgcaatgaagaaaggttctcaacaaaaaatattctccaaagcaaagataccatcatcatctcactctcctatcccatcatctatgtccaatatgagatctaggtcactttcacctttgattggatcagagactctaccttttcattctggaggacagtggtgtgagcaagttgagattgcagatgaaaacaatatgcttttggactatcaagaccataaaggagctgattcacatgcaggagttagatatattacagaggccctcattaaaaaacttactaaacaggataatttggctttgataaaatctctgaacctttcactttctaaagacggtggcaagaaatttaagtatattgagaatttggaaaaatgtgttaaacttgaagtactgaatctcagctataatctaatagggaagattgaaaagttggacaagctgttaaaattacgtgaactcaacttatcatataacaaaatcagcaaaattgaaggcatagaaaatatgtgtaatctgcaaaagcttaaccttgcaggaaatgaaattgagcatattccagtatggttagggaagaagttaaaatctttgcgagtcctcaatttgaaaggcaacaagatatcatcgctccaagatataagcaagttgaaaccgcttcaagatttgatttctctgatcctagttgaaaatccagttgtgacccttcctcattacctccagtttaccattttccacctccgttcattggaaagtttggaaggtcagccagtaaccactcaggatagacaggaggcttttgagagattcagtttagaagaggtagaaagactggaaagagacctagaaaaaaagatgatagaaactgaagagcttaagagcaaacaaacaaggttccttgaggaaattaaaaatcaagataaattgaataaatcattaaaagaggaggccatgttacagaaacagagctgtgaggaactcaagagtgacttaaacacaaaaaatgaattgctaaaacagaagaccatagaattaacacgagcatgtcagaagcaatatgagctggaacaggaattggccttttataaaattgatgctaaatttgagccactaaattattatccatcagagtatgctgaaattgataaagccccagatgaaagcccttacattggcaaatccagatacaagagaaatatgtttgccacagagagttatattattgacagtgctcaggcagtacagatcaagaagatggagccagatgaacaacttagaaatgatcacatgaacttgagaggccacacaccactggacacgcaactggaagacaaagaaaaaaaaataagtgcagcacaaactcgactatcagaactgcatgatgaaatagaaaaggcagaacaacaaattttgagagctactgaagaatttaaacaactggaagaagctatacaactaaaaaagatttcagaagcagggaaagaccttctttacaagcagttgagtggtagactacaacttgtaaataaattacgccaggaagctctggatctagaactgcagatggaaaagcaaaagcaggaaattgccggaaagcagaaggagattaaggacctgcaaatagccatagatagcctggattccaaagacccaaaacattcccatatgaaggctcaaaagagcggtaaagaacaacagcttgacattatgaacaagcagtaccaacaacttgaaagtcgtttggatgagatactttctagaattgctaaggaaacggaagagattaaggaccttgaagaacagcttactgaaggccagatagcagcaaatgaagccctgaagaaggatttagaaggtgttatcagtgggttgcaagaatacctggggaccattaaaggccaggcaactcaggcccagaatgagtgcaggaagctgcgggatgagaaagagacattgttgcagagattgacagaagtcgagcaggagagagaccagctggaaatagttgccatggatgcagaaaatatgaggaaggagcttgcagagctagaaagtgccctccaagagcagcatgaggtgaatgcatctttgcagcagacccagggagatctcagtgcctatgaagctgagctagaggctcggctaaacctaagggatgctgaagccaaccagctcaaggaagagttggaaaaagtaacaagacttacccagttagaacaatcagcccttcaagcagaacttgagaaggaaaggcaagccctcaagaatgcccttggaaaagcccagttctcagaagaaaaggagcaagagaacagtgagctccatgcaaaacttaaacacttgcaggatgacaataatctgttaaaacagcaacttaaagatttccagaatcaccttaaccatgtggttgatggtttggttcgtccagaagaagtggcagctcgtgtggatgagctaagaagaaaactgaaattaggaactggggaaatgaacatccatagtccttcagatgtcttagggaaaagtcttgctgatttacagaaacaattcagtgaaattcttgcacgctccaagtgggaaagagatgaagcacaagttagagagagaaaactccaagaagaaatggctctgcagcaagagaaactggcaactggacaagaagagttcaggcaggcctgtgagagagccctggaagcaagaatgaattttgataagaggcaacatgaagcaagaatccagcaaatggagaatgaaattcactatttgcaagaaaatctaaaaagtatggaggaaatccaaggccttacagatctccaacttcaggaagctgatgaagagaaggagagaattctggcccaactccgagagttagagaaaaagaagaaacttgaagatgccaaatctcaggagcaagtttttggtttagataaagaactgaagaaactaaagaaagccgtggccacctctgataagctagccacagctgagctcaccattgccaaagaccagctgaagtcccttcatggaactgttatgaaaattaaccaggagcgagcagaggagttgcaggaagcagagaggttcagcagaaaggcagcacaagcagccagagatctcacccgagcagaagctgagatcgaactcctgcagaatctcctcaggcagaagggggagcagtttcgacttgagatggagaaaacaggtgtaggtactggagcaaactcacaggtcctagaaattgagaaactgaatgagacaatggaacgacaaaggacagagattgcaaggctgcagaatgtactagacctcactggaagtgacaacaaaggaggctttgaaaatgttttagaagaaattgctgaacttcgacgtgaagtttcttatcagaatgattacataagcagcatggcagatcctttcaaaagacgaggctattggtactttatgccaccaccaccatcatcaaaagtttccagccatagttcccaggccaccaaggactctggtgttggccttaagtactcagcctcaactcctgttagaaaaccacgccctgggcagcaggatgggaaggaaggcagtcaacctccccctgcctcaggatactgggtttattctcccatcaggagtgggttacataaactgtttccaagtagagatgcagacagtggaggagatagtcaggaagagagtgagctggatgaccaagaagaacccccatttgtgcctcctcctggatacatgatgtatactgtgcttcctgatggttctcctgtaccccagggcatggccctgtatgcaccacctcctcccttgccaaacaatagccgacctctcacccctggcactgttgtttatggcccacctcctgctggggcccccatggtgtatgggcctccaccccccaacttctccatccccttcatccctatgggtgtgctgcattgcaacgtccctgaacaccataacttagagaatgaagtttctagattagaagacataatgcagcatttaaaatcaaagaagcgggaagaaaggtggatgagagcatccaagcggcagtcggagaaagaaatggaagaactgcatcataatattgatgatcttttgcaagagaagaaaagcttagagtgtgaagtagaagaattacatagaactgtccagaaacgtcaacagcaaaaggacttcattgatggaaatgttgagagtcttatgactgaactagaaatagaaaaatcactcaaacatcatgaagatattgtagatgaaattgagtgcattgagaagactcttctgaaacgtcgctcagagctcagggaagctgaccgactcctggcagaggctgagagtgaactttcatgcactaaagaaaagacaaaaaatgctgttgaaaagttcactgatgccaagagaagtttattgcaaactgagtcagatgctgaggaattagaaaggagagctcaggaaactgctgttaacctcgtcaaagctgatcagcagctaagatcgctccaggctgatgcaaaggatttggagcagcacaaaatcaagcaagaagaaatcttgaaagaaataaacaaaattgtagcagcaaaagactcagacttccaatgtttaagcaagaagaaggaaaaactgacagaagagcttcagaaactacagaaagacatagagatggcagaacgcaatgaggatcaccacctgcaggtccttaaagaatctgaggtgcttcttcaggccaaaagagccgagctggaaaagctgaaaagccaggtgacaagtcagcagcaggagatggctgtcttggacaggcagttagggcataaaaaggaggagctgcatctactccaaggaagcatggtccaggcaaaagctgacctccaggaagctctgagactgggagagactgaagtaactgagaagtgcaatcacattagggaagtaaaatctcttctggaagaactgagttttcagaaaggagaactaaatgttcagattagtgaaagaaaaactcaacttacacttataaagcaggaaattgaaaaagaggaagaaaatcttcaggttgttttaaggcagatgtctaaacataaaaccgaactaaagaatattctggacatgttgcaacttgaaaaccatgagctacaaggtttgaagctacaacatgaccaaagggtatctgaattagagaagactcaggtggcagtgctagaggagaaactggagttagagaatttgcagcagatatcccagcagcagaaaggggaaatagagtggcagaagcagctccttgagagggataaacgagaaatagaacgaatgactgctgagtcccgagctttacaatcgtgtgttgagtgtttgagcaaagaaaaggaagatctccaagagaaatgtgacatttgggaaaaaaagttggcacaaaccaaaagggttttagcagcagcagaagaaaatagcaaaatggagcaatcaaacttagaaaagttggaattgaatgtcagaaaactgcagcaggaactagaccaactaaacagagacaagttgtcactgcataacgacatttcagcaatgcaacagcagctccaagaaaaacgagaagcagtaaactcactgcaggaggaactagctaatgtccaagaccatttgaacctagcaaaacaggacctgcttcacaccaccaagcatcaggatgtgttgctcagtgagcagacccgactccagaaggacatcagtgaatgggcaaataggtttgaagactgtcagaaagaagaggagacaaaacaacaacaacttcaagtgcttcagaatgagattgaagaaaacaagctcaaactagtccaacaagaaatgatgtttcagagactccagaaagagagagaaagtgaagaaagcaaattagaaaccagtaaagtgacactgaaggagcaacagcaccagctggaaaaggaattaacagaccagaaaagcaaactggaccaagtgctctcaaaggtgctggcagctgaagagcgtgttaggactctgcaggaagaggagaggtggtgtgagagcctggagaagacactctcccaaactaaacggcagctttcagaaagggagcagcaattggtggagaaatcaggtgagctgttggccctccagaaagaggcagattctatgagggcagacttcagccttctgcggaaccagttcttgacagaaagaaagaaagctgagaagcaggtggccagcctgaaggaagcacttaagatccagcggagccagctggagaaaaaccttcttgagcaaaaacaggagaacagctgcatacaaaaggaaatggcaacaattgaactggtagcccaggacaaccatgagcgggccaggcgcctgatgaaggagctcaaccagatgcagtatgagtacacggagctcaagaaacagatggcaaaccaaaaagatttggagagaagacaaatggaaatcagtgatgcaatgaggacacttaaatctgaggtgaaggatgaaatcagaaccagcttgaagaatcttaatcagtttcttccagaactaccagcagatctagaagctattttggaaagaaacgaaaacctagaaggagaattggaaagcttgaaagagaaccttccatttaccatgaatgagggaccttttgaagaaaaactgaacttttcccaagttcacataatggatgaacactggcgtggagaagcactccgggagaaactgcgtcaccgggaagaccgactcaaggcccaactccgacactgtatgtccaagcaagcagaagtattaattaaaggaaagcggcagacagagggcactttacacagtttgaggagacaagtagatgctttaggggaattggtcaccagcacctctgcagattcagcgtcatcacccagtctgtctcagctggagtcttccctcacagaggactctcaacttggacaaaatcaggaaaagaatgcctcagccagatgaggaatactgtcttgtgtaaatatattcaaggaaaacacctccactacctcactgacttcataattggaatgtcacatggtttttttaatcaagatgcagtgaactgagattctgaaactccactgtagtttactttgcctgtaccattaatgccaatgtttttataaatcacttgtacatagtacatatgggaatagttgcatatgggaatttaaaccaacatgtggctgagcctttttttttttaatcttcgtaacatgtttaaaaaaaaacagtgattttaactgcatatttgaacctacaaactggtaaatcttattaacaaaaagaatgtacttaaggccctctttatttatagtgtcgagttatttttgaattttgcttaaaatctatttttcatatgaaaataaaagataacaatc

SEQ ID NO: 271130 - DNA, 6978 bp, Artificial Sequence
  derived and/or modified sequence
atgaagaagggcagccagcagaagatcttcagcaaggccaagatcccttcttcgtcacactcccccattccttcaagcatgtctaacatgcgctcccggagtttgtcccctcttatcggatccgagaccctgcccttccatagtggaggacagtggtgcgagcaagtggagatcgctgacgagaacaacatgcttcttgactaccaggatcacaagggggcagacagtcatgccggagttcgctatatcactgaggccttgatcaaaaagctcaccaagcaggataacctggcgcttattaagtctttgaatctgtccctgagcaaggacggtggcaaaaagttcaaatatattgagaacctcgaaaagtgcgttaaactggaggtgctgaacctttcgtacaacctgatcgggaagatcgaaaaactcgacaaactcctgaagctgagggagcttaatttaagctataacaaaatcagcaagatcgagggcatcgaaaacatgtgcaatctgcaaaagctcaatctggctggcaacgaaatcgaacatattcctgtctggttaggtaaaaaactgaagtcactcagagttctgaacttaaaggggaacaaaatttcatcactgcaggacatcagtaagctgaagcctctacaggatctgatctcactgatcctggtggagaaccccgtagtgaccctcccgcattatctgcaattcaccattttccatctgcgttccctagaatctctggaagggcaacccgtcacaacccaggatagacaggaggccttcgagagattctcactggaggaagttgaaaggctggagcgagacctcgagaagaaaatgatagaaacagaggaacttaagtccaagcagacgagatttctcgaggaaattaagaaccaggataaactgaacaagtcattgaaagaagaagccatgttacagaagcaaagctgcgaggagctgaaaagtgacctgaacaccaagaacgaacttctgaagcagaagacaatcgagctgacaagggcctgtcagaagcagtacgagctggaacaggaacttgccttttataagatcgatgccaagtttgagcctctgaattactatccatcagagtacgccgagatagacaaggcacctgatgagagcccctatatcggcaaaagccgttacaaaaggaacatgttcgctacggagtcctacataatcgacagcgcgcaggccgtgcaaataaagaaaatggagcccgacgaacagcttaggaacgaccatatgaatcttagggggcacacaccacttgacactcagcttgaggacaaggaaaagaaaatcagtgcagctcagaccaggctgagtgaactgcatgacgaaatcgagaaagccgaacagcaaattttgcgagctacagaggagttcaagcagctggaagaggctattcagttgaaaaaaatctccgaagccggtaaggacctcttgtacaagcaacttagcggaagactgcagctggtgaacaaactacgacaggaggcacttgaccttgagttgcaaatggaaaaacagaagcaggagattgcaggtaaacagaaggagatcaaggacttgcaaattgctatcgatagcttggatagcaaggaccccaaacacagccacatgaaagcacagaagtctgggaaggagcaacagttggatattatgaataagcagtaccaacagcttgagagtagactcgacgagatcctctctcggatcgcaaaagagactgaggaaatcaaggatttagaagaacaattgactgaaggccaaatagcagccaacgaagccctgaaaaaggacctggaaggggttatcagcggcctgcaggagtatctagggaccattaagggccaagccacgcaggcccagaatgagtgtcgcaaactgagagatgagaaggagaccctgctccaacggctcaccgaagtggagcaagaacgagatcagcttgaaatagtggccatggatgctgagaacatgcgcaaggagctggctgagctagaaagcgcactccaggaacagcatgaggtgaatgcttcactgcagcagacacagggagacttgtctgcctacgaggcagaattagaagcccgactgaatcttagggatgctgaggcaaaccagttgaaagaagagctcgagaaagtgacacggctgacgcaattagaacagtccgctctgcaggcagagctcgagaaggaacgccaagcgctgaagaacgcactaggcaaggcacagtttagtgaagaaaaagagcaggagaatagtgagctgcatgctaagctgaagcatttgcaggacgacaataatctgcttaaacagcagctgaaagatttccagaatcacctgaatcacgtagtcgatggcttggtgcgccctgaggaggtggccgccagagtcgatgagctgcgcagaaagttgaagctcggaacaggagaaatgaacattcattcaccaagcgacgtcctcggaaagtcactggccgatctccagaagcagttctccgagattctggctcgatcaaagtgggagcgcgacgaggcccaggtgcgagagagaaaacttcaggaggaaatggccctccagcaggagaagctggcaactgggcaagaagagttccggcaagcttgcgagcgggccctggaggcgaggatgaattttgacaagcggcagcacgaggcccggatccaacagatggagaatgaaatccactacctgcaggaaaatctaaaatctatggaggaaattcagggactgacagatctgcagctgcaagaagctgacgaagaaaaggagagaatcctggctcaattgagagagctcgagaagaagaagaaactggaagatgccaaatcacaggagcaggttttcggcttagataaagagttaaagaagctgaagaaggctgtggccacttccgacaaattggcgaccgcagagctgaccatcgctaaggaccagttgaaaagtctgcatggaaccgttatgaagatcaaccaagagcgcgccgaggaactccaggaggccgagcgcttttcgcgaaaggctgctcaggctgctagggatcttacacgcgctgaggcagagatcgagttgctgcaaaacttgctaagacagaaaggtgagcagttcagattggaaatggaaaagaccggcgtgggcaccggggcaaactctcaggtactcgaaatcgaaaaattgaatgagaccatggaaagacaacgtaccgagatagcacggctgcagaatgtgctcgacctgacagggtccgacaataaaggcggtttcgagaacgtgctggaggagatcgccgaactccgccgggaagtgagctatcagaacgactatatctcttcaatggccgatccatttaaaaggagaggctactggtactttatgccgcctcctccctcaagcaaagtatcttcgcacagttctcaggctacaaaggatagcggagtaggcttgaagtacagtgcgtctacgccggtcagaaagcctcggcccgggcagcaggacggtaaggaaggaagccaacccccgcccgctagtggctactgggtatactcccctattcgctccgggctccacaagctctttccatctagagacgcagacagtggcggtgacagtcaggaagaatccgaattagacgatcaggaggagccaccgtttgtgcccccccctgggtacatgatgtatactgtgctccctgatggaagccctgttcctcaaggcatggcactgtatgcccctccaccaccgcttccaaacaactctcgccccctgacacccggtacagtcgtctacggacctcctccagccggagccccgatggtctacgggccccctcctcctaacttcagcatacccttcatacctatgggggtgttgcactgtaatgtcccagagcaccacaacttggaaaacgaggtctcccgcctggaggatatcatgcagcaccttaaatccaagaaacgggaagagcgctggatgagagcgtccaagagacagtccgagaaagaaatggaagagctgcatcataatatcgatgacttgttgcaggaaaagaaaagcttggaatgcgaagtcgaggagctgcaccgaaccgtgcagaaacgacagcagcaaaaagattttatcgatggaaatgtggagtctcttatgacagagctagagatcgaaaagtccctgaaacatcatgaggatatcgtggatgagatcgaatgcattgagaagaccctcctgaagcgaaggagcgagctgcgtgaagcagacagactgcttgctgaggctgaatcggagctgagttgcactaaggaaaagacaaaaaatgcagtcgaaaagttcaccgatgctaaaaggagcctgctgcaaactgagtcggacgccgaggagcttgaaagacgggcccaggaaacggctgtgaacctggtgaaggcagatcagcagctaagatccctccaggctgatgcaaaggatctggagcagcacaaaatcaaacaagaagagattttgaaggaaattaataaaattgtagccgccaaggattccgactttcaatgcttgtccaaaaagaaagaaaaactgactgaggagctgcaaaagctccagaaggacatcgaaatggcagaaagaaacgaggatcaccacttgcaagtcctgaaggagtccgaagtgctcctgcaggccaagagagcagagttagagaaactgaagagccaagtcacaagtcagcaacaggagatggccgtgttagatcggcaactgggccacaagaaggaagagcttcacctcctgcagggtagtatggtccaggccaaggccgatttgcaggaagcgttgagactgggggaaacagaggtaactgagaagtgcaatcacataagagaggtgaaaagcttgcttgaagagctaagcttccagaagggcgaactcaatgttcagatcagcgaacggaagacccagctgaccctaataaaacaggaaattgaaaaggaagaagagaatcttcaggtggtccttcgacagatgtccaagcataagactgagctcaagaacattctagacatgctccagctcgagaatcacgagttacagggactgaagctgcagcacgaccagagggtcagcgaactggaaaagacccaagtcgccgtgctggaggagaagcttgaactcgaaaatctccagcagatcagccagcaacagaaaggggagatcgaatggcaaaaacagttgctggaacgcgataaacgcgagatagaacggatgaccgctgagagcagggcattacagagctgcgttgaatgtctgagtaaggaaaaagaggatctgcaagaaaaatgtgatatttgggaaaagaaactagctcagactaaaagggtcttagccgccgcggaagagaatagcaaaatggaacagtcaaacctcgagaagctggaactgaatgtccgaaagctacagcaggagcttgatcaattgaacagagacaaactgtccctgcacaatgacatcagtgcaatgcaacagcagctacaggagaagagagaggccgtgaatagtctgcaggaagagcttgcaaacgtgcaggatcacctgaacttagcaaagcaggatctcttgcacacaaccaaacaccaggacgtcctcctatcggagcagacccgactccaaaaggatatatccgagtgggcaaatcgattcgaagactgtcagaaggaggaagaaacaaaacaacagcagctccaggtgctccagaacgagattgaggagaataaactaaagctggtgcagcaggagatgatgttccagagactgcagaaggagcgcgaatctgaggagagcaagcttgagactagcaaagtgacactgaaagaacagcagcaccagctcgagaaagaactcactgaccagaaaagcaaactggaccaagtcctctccaaggtgctcgccgcagaggaacgcgtccgcacattacaagaagaagaaaggtggtgcgaaagtctagagaagacactgtcacagaccaaacggcagctctcggagagggagcagcagctggtggagaagagcggagagctgcttgcactccaaaaagaagcggactcaatgcgcgccgatttcagtctcttgagaaaccagttcttgaccgagcggaagaaggctgagaagcaggtcgcttccctcaaagaggcactcaagattcagcgaagccagctggaaaaaaatcttctggaacagaagcaggagaattcatgtatacagaaagaaatggctaccatcgagttagttgctcaggataaccacgaaagggcccgacgcttgatgaaagagctgaaccagatgcaatacgagtacacggagctgaaaaagcaaatggccaatcaaaaggacttggagcgacggcagatggagatcagtgatgccatgcgtacattaaagagcgaagtaaaggacgaaataagaacttcattgaaaaatttaaaccagttcttgcccgagcttcctgctgacctcgaggcaatactcgaacgcaatgaaaacttggagggtgagctggagtcgttgaaggaaaatctgccattcacgatgaacgaggggccctttgaagagaagctgaatttttcacaggtgcatataatggatgagcactggaggggcgaggcccttagggaaaagctgcgccatcgcgaggatcgattgaaggcacagcttagacactgcatgtctaagcaggctgaggtgttaattaagggcaaaaggcagacggaggggacactgcactccctccggagacaagtggacgcgttaggggagttagtgacctctacctctgctgacagtgccagttccccctctctgtctcagctggagagctcacttactgaagattcccagctgggccagaatcagaagcagaataatagcctgcggtag

SEQ ID NO: 271131 - DNA, 6978 bp, Artificial Sequence
  derived and/or modified sequence
atgaaaaagggttcgcagcagaagatcttctctaaggcaaaaatcccaagctcctctcacagtccaattcccagtagcatgtcaaacatgaggtccaggagtctcagtccgctgataggatccgagactctgcccttccacagcggcggacagtggtgcgaacaggtcgagatagctgatgaaaacaatatgctgctggattatcaggatcataagggtgccgacagtcacgccggagttcgatacatcacagaggcccttataaaaaaactgaccaaacaggataacctagctctgatcaaaagcttaaatttgagcctgtccaaggacggtggtaaaaagttcaaatacatagaaaacctcgagaagtgcgttaagctagaggtgctgaatttgtcgtacaatctgatcggaaaaattgagaagctcgacaaactactcaaattgcgtgaattgaacctctcatataacaagatctcgaaaattgaaggaatagagaacatgtgtaatctgcagaagctaaatctggctgggaacgaaatagagcatattcctgtctggttaggtaaaaagcttaagtccctcagagtcctcaacctgaaaggcaacaagataagtagtctgcaggatataagcaagctgaagccgctccaggacttgataagcctgatacttgtggaaaacccggttgtcaccctgccacattatctccagttcacaatctttcaccttcgctcactggagtccctggaagggcagcccgtgaccacccaggatcgccaggaagcattcgaacgtttttcacttgaggaggtggagagactagaacgagacctagaaaaaaaaatgattgagaccgaagaactcaagagcaaacagactcgatttctggaagaaatcaagaatcaggataaactaaataaaagcctgaaggaggaagccatgttgcagaaacagtcatgtgaggaacttaaaagtgacttgaatacaaagaacgagctcctcaaacagaaaacgatcgagctgacccgagcatgtcagaaacagtatgagctagagcaagaattagccttctacaagattgacgctaagtttgagcccttgaactattatcccagcgaatacgccgagatcgataaggccccagatgagtccccctatataggaaagagtcggtataaacggaacatgtttgcgactgaaagctacatcattgattctgcacaagccgtacagatcaagaagatggaacccgacgaacagctgcgtaacgaccacatgaatctgcggggacacactcctctagacacccagctggaggacaaagagaaaaaaatctcagccgcacagactcggctgtctgagctgcatgatgaaatagagaaagcagagcagcagatactccgagcgacagaagagttcaaacagctggaagaagccattcagctcaaaaagatcagcgaggccggtaaggacttgctgtataagcagctcagtggaaggctgcagctggtgaacaagctgcgccaggaagcgctggacctggagcttcagatggagaaacaaaaacaagaaatcgccggaaagcagaaagagatcaaggatctgcaaatagcaattgactcactcgattccaaggatcctaaacatagtcatatgaaggcccagaagtccggaaaggagcagcagcttgacatcatgaacaagcagtaccaacagctggaaagcagactcgatgagattctgagccgcattgccaaagaaaccgaggaaatcaaggaccttgaagagcagttaaccgaaggacagatcgccgcaaacgaagccctgaaaaaagacctggaaggtgtgatctcgggactccaggaatacttaggcaccatcaaaggtcaagccacccaagcacagaatgagtgcaggaagctcagggatgaaaaagaaaccctgctgcaaagactcacagaggtcgagcaggagcgcgatcagctggagatcgtcgcaatggacgcagaaaacatgaggaaggaactggctgagctggagtcagccctgcaggaacagcacgaagtgaacgctagtctccaacagacccagggcgacctgtctgcgtacgaggccgaacttgaagcacgattgaacctccgcgacgcggaagccaaccagctgaaagaagaactcgagaaggtcacccggttgacccagctggagcagagcgcactccaggccgagttagagaaagaacggcaggctctaaaaaatgccttgggaaaagcccagttttctgaagaaaaagagcaggaaaacagcgagctgcacgcaaagttgaagcacctccaagatgacaacaacctcctcaagcaacaactgaaggacttccagaatcacctgaatcatgtcgtggacgggctcgtccggcctgaggaggtagcagctcgggtggatgaattgcggcgtaagctgaaattgggcaccggagagatgaacatccacagtccatcagatgttttagggaaaagtcttgcggacctgcaaaaacagttcagcgaaatactagccaggagcaagtgggagcgggatgaggcccaggttcgcgagcgcaaacttcaggaggagatggccttgcagcaggagaaactggctaccggacaggaggaattcagacaggcttgcgagcgtgcccttgaagcacgcatgaattttgataaacgccagcacgaagcgcgaatccagcagatggaaaatgagatccattacctccaggagaatctgaagtccatggaggaaatacagggcttgaccgacctccagctgcaggaggcagacgaagaaaaggaaagaatcctggcccagttaagagaattagaaaagaagaaaaaactggaagatgccaagtcacaggagcaggtctttggcctggataaagagctgaagaaactgaaaaaggccgttgctacaagcgacaagctggcaacagccgaactgaccatcgcgaaagatcagctgaaatctttgcatggcacggtaatgaaaatcaaccaggagcgagcagaagaattacaggaagctgagaggttcagcaggaaggcagcgcaggctgctcgtgaccttacaagggccgaggcagaaattgagctcctgcagaacttgcttagacagaagggcgagcaattccgactggagatggagaagaccggcgtgggtacaggcgcaaattcccaggtcctggaaatcgagaagctaaacgaaaccatggagcgacagaggacagagatcgcgagactacagaatgtgctagacctgactgggtctgataacaaagggggattcgaaaatgttctggaagagatcgctgaacttaggcgggaagtgtcttatcagaacgactacatatcatctatggcggatccatttaagcggagaggctattggtattttatgccccctccgccttcttccaaggtttcttcccatagctctcaggcaaccaaagattcaggagtaggcctgaagtactcggcaagcaccccagtgaggaaacccagacctggccaacaagacggcaaggaaggctcccagccgccacctgcctccgggtactgggtttactcgcctatccgatccggactgcataagttattcccttcacgggacgctgattccggcggagacagccaggaagagtctgaattggatgaccaggaggaaccaccttttgtgccgcctcccggatatatgatgtacaccgtactccccgacgggagccctgttccacaggggatggctctgtacgcgccaccacccccactgcctaataatagcagacccctcacccccggaacggtggtgtacggcccacctccagctggagctcccatggtgtacggaccacctccaccaaacttcagcatcccattcataccaatgggagtgctgcactgtaacgtaccagaacatcacaacctggagaacgaagtctcacgcttagaggatatcatgcagcatcttaagagcaaaaaacgggaggaaaggtggatgagggcaagtaaacggcagtccgagaaagaaatggaagagctgcaccacaacattgatgaccttttgcaggaaaagaagtccctggaatgcgaggtggaggagttacataggactgttcagaagcggcaacaacagaaggacttcatcgacggtaatgtggagagcctaatgactgaactagagattgagaaatcgcttaagcaccacgaggatatcgtcgacgaaattgagtgcatcgagaagacccttctcaaacggagatcggaattgcgggaggctgataggctattggcggaagccgaatctgagctctcttgtactaaggaaaaaacgaagaacgccgttgaaaagttcaccgatgctaagcgaagtctgctgcagacagagtctgacgccgaagaactcgagaggcgtgcacaggaaactgctgtcaacctggtaaaagctgaccaacaattgcgaagccttcaggcggacgccaaggatttggaacagcataagattaaacaggaggaaattctgaaggaaattaataaaatagttgcagcgaaggactctgactttcagtgtcttagtaaaaagaaggaaaagctgactgaggaactgcagaaactgcagaaggatatcgaaatggccgaaagaaacgaagatcatcacctccaggttctgaaggaatctgaggtccttctgcaggctaaacgggcagaacttgagaaacttaagagccaagtgacctcccagcagcaggaaatggccgtcctggacagacaactgggtcacaaaaaggaagagctgcatctgctgcagggttctatggttcaagccaaagctgatctccaggaagctctgcggttgggagagaccgaggtaactgagaaatgtaatcatatccgcgaagtgaaaagcctgctcgaggaattgagctttcagaaaggcgaattgaatgtgcagatctctgaacgcaagacacagttgaccctcattaaacaggaaattgagaaagaagaggagaatttgcaggtggtcctgcgccagatgtctaaacataagaccgagctgaaaaacattctggacatgttgcagctggaaaatcatgagctgcaagggttgaagttgcaacacgatcagagggtcagcgaactagaaaaaacacaggttgccgttcttgaagaaaaactagagcttgagaatttgcagcaaatttctcagcagcagaagggtgaaattgagtggcagaagcaactgttggagcgagataagcgggaaattgaacgcatgactgccgagtctcgggcactccagagctgcgtcgagtgcttgagtaaggagaaggaggacctgcaggaaaaatgcgacatatgggagaaaaaacttgcccaaactaaacgtgtgctagctgccgctgaggaaaactctaagatggagcagagcaacttggagaagctggagctcaatgtcagaaagctgcagcaggagttagatcagttgaaccgggataaactgagtctgcataacgacatcagcgcaatgcaacaacagctgcaggagaagagagaggccgtgaactcactgcaggaagaactggccaacgttcaggatcacttgaacttggctaaacaggaccttctgcatacaacaaagcatcaggatgtgctgttatctgagcagacccgcctgcagaaggacatctccgagtgggcaaatcgttttgaggattgtcagaaggaggaagaaaccaaacaacaacagctgcaggtgctacagaacgagattgaagagaacaagctgaaactcgtacagcaggagatgatgttccagagattgcagaaggaaagagaaagcgaagagagcaagcttgaaacctctaaggtgactctaaaggaacagcagcatcaattagaaaaagaactgaccgaccagaagtccaaactggaccaggtcctgtctaaagtgcttgcagctgaagagagagtccgaaccttgcaagaggaagagcgttggtgcgagtccttggagaaaaccttgagtcagaccaagcgtcagctgtctgaacgcgagcagcagttggttgagaaatcaggggaactgctggcattgcaaaaagaagctgattccatgcgggcagattttagtcttttgcgcaatcagtttctgacagaaaggaagaaagccgagaaacaggtcgcaagtttgaaagaggccttaaagattcagagaagccagcttgaaaagaacttgctggagcagaaacaagagaattcctgcatacagaaggaaatggccactatcgaactggtggcacaggacaatcacgaacgtgctaggagactgatgaaggagctgaatcaaatgcagtacgaatacacagaactgaaaaagcagatggccaaccagaaggatctggaaagacggcagatggaaatttccgatgcaatgcgtacgctgaagagcgaagtaaaggacgagatccgtacctcgctgaaaaatctcaatcagttcctacccgaactcccagccgacttggaagccattctggaacgcaacgaaaacctggaaggcgagctggagtcgctaaaagaaaacttacctttcaccatgaatgagggaccatttgaggagaaactcaacttctctcaagtacacatcatggacgaacattggcgcggagaggctctgagggagaaactccgacacagagaggataggctgaaagcacagctaaggcattgtatgtccaaacaggctgaagtgctgatcaagggcaagaggcagacggaaggaactctccatagtctgcggagacaggtggacgcgcttggagaactggtgacctcgactagcgctgattctgccagcagtccatctctttcccaactggaatccagcctgactgaagactcccagctgggtcagaatcaggagaaaaacgcctcagcaagatac

SEQ ID NO: 271132 - DNA, 3024 bp, Artificial Sequence
  derived and/or modified sequence
atgcagcatcttaagtcaaagaagcgagaagaaagatggatgagagcaagcaaaagacaaagcgaaaaggaaatggaggagctgcaccataatatcgacgacctgctgcaggagaaaaagtccttggaatgcgaggttgaggagctacacagaactgtgcagaagagacagcagcagaaggactttatagacggcaacgtggagtcactgatgacagagctcgagattgaaaagtccttgaagcaccacgaggacattgttgacgagatcgaatgcatcgagaagaccctattaaagagacggtctgagctcagagaggcagacagactcctggcagaggctgagtcagaactatcttgcaccaaggagaaggtgtgcttattggtggtctggggtgtttcttccgtctggactaagaatgcagtcgagaagtttacagatgccaagcgttcccttctacagacagaaagtgacgccgaagagctggagaggagagcgcaggagaccgcagtcaacttagttaaagccgaccaacaattgagaagcctgcaggctgatgcaaaggatttggagcagcataagataaagcaggaggagatcctgaaagagataaataaaattgtggctgccaaggactcggatttccagtgcctttccaagaaaaaggaaaaactgacagaggaactccagaagttacaaaaagacattgagatggccgaacgaaacgaagatcaccacctgcaagtcctgaaggaaagtgaggtcctactccaggccaagagggccgaacttgaaaaactgaagtcacaggtgacaagtcagcagcaggagatggccgtgcttgacagacagttgggtcacaaaaaggaggagcttcacctattgcaaggctcaatggtgcaggccaaagccgacctgcaggaggctttaagactgggagaaacagaagtcacggaaaaatgcaaccatatccgtgaagtgaaaagcttgctcgaagagttgagtttccagaagggggaactgaacgtccagatatcggaacgcaaaacgcagctgactctgatcaagcaagagatcgagaaagaagaggagaatttgcaggtggtcctccggcaaatgtctaagcacaagacagagcttaaaaacatattagatatgttgcagctcgagaaccacgaactgcagggtcttaagttgcagcacgaccagagggtgagcgaacttgaaaaaacccaggtcgctgtgcttgaggaaaagctcgaactggagaacttgcagcagatcagccagcagcaaaaaggcgaaattgaatggcagaagcagcttcttgagcgggacaaacgtgagatcgaacgcatgactgcagagtctagggctcttcagtcttgcgtcgaatgcctgtcaaaagaaaaggaagatctgcaggagaaatgtgacatctgggaaaaaaagctggcacagactaagagggtgcttgctgcagccgaggaaaattctaaaatggaacaatctaatctggagaaacttgagctgaacgttcggaagcttcagcaggagttggatcagctcaatagagataaactctcactgcacaatgatattagcgctatgcaacagcaactgcaagaaaagcgtgaggcagtgaactccctccaggaagagcttgccaatgttcaggatcatctgaacctggccaagcaggatctcctccatacaacgaagcatcaggacgtgcttctctcagagcagaccagattgcaaaaggatatttcagaatgggccaaccgctttgaggactgtcagaaagaggaagaaacaaaacaacagcagcttcaggttcttcaaaacgagattgaggaaaacaagttaaaactcgtccagcaggaaatgatgttccaacgcttgcagaaggagcgcgagtcggaggagtctaaactggagacatcgaaagtcactttaaaggagcaacagcatcagctggagaaagaattaacggatcagaaatccaagctggatcaggttctcagtaaggtcctggctgccgaggaacgggtccgaacgctgcaagaggaggagcggtggtgcgaatctcttgagaagactctttcacagacaaaacgccagctgagcgagagggagcagcagctggtagagaagtctggggagttgttggccctacaaaaggaagcagattctatgagggccgattttagtcttctaaggaatcagtttctgaccgaaagaaaaaaggcggagaagcaagtggcgagtctcaaggaggctctaaaaatacagaggtctcagctggaaaagaatcttctcgagcagaagcaagagaactcgtgtatccagaaagagatggcgaccattgagttggtggctcaagataaccacgaacgcgctcgccgactcatgaaggaactgaaccaaatgcagtacgaatatactgagttgaagaaacagatggcaaaccaaaaagatctggaacggaggcagatggagatttcagacgccatgaggaccctgaagtctgaagtcaaagacgaaattagaactagcctcaaaaatctgaaccagttcttgcctgaactgcctgccgacctggaggcaattctcgagagaaatgaaaatctggaaggtgagctagaatctcttaaagagaacctgccattcacaatgaacgagggcccatttgaggagaagcttaacttctctcaggtccatatcatggatgaacactggcgaggggaggcactgagagagaagcttaggcatagggaggatcggcttaaggcccaactgcgccactgtatgtctaaacaggcggaggttcttatcaagggtaaacggcagactgagggtaccttgcatagtctgcgcagacaagtggatgctctcggcgagctggtgacgtctacaagcgccgacagtgccagcagcccctctctgagccagttggagtccagtcttacagaagactcacagctgggtcagaaccaggagaagaacgcctctgcaaggtag

SEQ ID NO: 271133 - DNA, 5321 bp, Artificial Sequence
  derived and/or modified sequence
atgaaagctcagaaatcggggaaggagcagcagctggatattatgaacaagcagtatcagcagcttgaaagcaggctcgatgaaattctgagccggatcgctaaagaaacagaggaaataaaagacctggaggagcagctgacagaaggacagattgccgcaaacgaggcactaaaaaaggacctggagggcgtgatctccggcctgcaggagtaccttggtactatcaaagggcaagcaacgcaggcacagaatgaatgtcgcaagctcagggatgaaaaagagaccttactgcagagactgacagaggtagagcaagagcgagaccaactggaaattgttgccatggacgccgagaacatgcggaaagagttggctgagctggagtctgcgcttcaagaacagcatgaggttaacgcctctttgcagcagactcagggggacttatctgcatatgaagctgaactggaggcgaggcttaacctacgggacgccgaagccaaccaactgaaggaggaactggaaaaggtcacccggctcacgcaactcgagcagtccgctctgcaggccgagctggaaaaggagagacaggcccttaagaacgcgctagggaaggctcagtttagcgaagagaaggagcaagagaacagtgaactgcacgccaagctgaagcacctgcaggacgacaacaaccttctcaaacaacagctaaaagattttcagaaccacctgaaccacgtggtggatgggctggtcaggcctgaagaggtcgctgcgagggtggatgaactgagaagaaaactgaagcttggcaccggcgagatgaacatccatagtccttccgacgtgttgggcaagtcactggcagatctgcagaaacaattctccgaaatcttggccaggtccaagtgggaaagagatgaggcacaagttcgggagagaaagctacaggaggagatggctctccaacaagaaaagctagcgacaggtcaggaggagttccgccaagcttgcgaacgtgctttggaagcgaggatgaacttcgataagagacagcatgaggccagaattcagcagatggaaaacgagatccactacttacaagagaacctcaaaagcatggaggagattcagggtctgaccgatctgcaactgcaagaagccgatgaggagaaggaaaggattctggcccagcttcgagaactggagaagaagaaaaagctggaagacgccaagagtcaggaacaggtattcggacttgacaaagagctcaagaagctaaaaaaggccgttgctacatcggacaaattggctacagctgagttgacaatcgcaaaagatcagctcaagtcgcttcatgggaccgtgatgaaaattaaccaggagcgggctgaggaactccaagaggccgaaagattttcccggaaggcggcacaggccgctagggatctgaccagagcagaagcggaaatcgagctactgcagaatttgctgagacagaaaggagaacagtttcgcctcgagatggagaagactggtgtgggcacaggtgctaactctcaggtgctcgaaatcgagaagctcaacgagacgatggagcggcagcgaacagagattgcccgtcttcagaatgtcctggacctcaccgggagcgacaataaaggtgggttcgagaacgtactggaagagatcgccgagttacgtcgggaggtctcctatcagaacgattacatttcaagtatggccgaccccttcaagagaagaggctactggtatttcatgccacctcctccgtcaagcaaagtgtcatcccatagctctcaggccaccaaggactctggggtcggactgaagtatagtgcttcaacccccgtgagaaaacccagaccgggtcagcaggatggaaaagagggctctcaacctccccctgcttcaggttattgggtgtattctcccatccgcagcggactgcacaaactgtttccaagcagagacgcagattctgggggagactcccaagaagagagcgaactggacgatcaggaagagccaccgttcgtccccccacccggatacatgatgtacacggtgctccctgatggcagccctgtaccacaggggatggccctgtatgctccgccaccaccccttccaaacaattcccggcctctcacccctggcacagtagtctacggacccccacccgctggcgctccaatggtctacggccctcctcctccaaattttagcatcccattcattccgatgggcgttctgcactgcaatgtgcccgagcaccacaatctggaaaatgaggtgtccagactggaagatatcatgcagcacctgaagagcaagaagagggaagagaggtggatgcgagcctccaaacgccaatccgagaaggaaatggaagagttgcaccataacatagacgatctcttacaggaaaagaagtctctagaatgcgaggtcgaagaattgcacagaacggtacagaagagacagcagcagaaagactttatagatgggaatgtggagtcactcatgaccgagcttgagatcgagaagagcctgaagcaccatgaagacatcgttgatgagatcgaatgtatagagaaaactctgctcaaacgcaggagtgaactgcgagaagctgatcgcctgttggctgaggccgaatccgagctgtcatgcactaaggaaaaaaccaagaacgctgtggaaaagttcaccgatgcaaagagaagtttgctccagactgagtctgatgccgaagaactggaacgacgggcacaagagacagctgtaaacctggtaaaagctgatcaacaactcagatcattacaggctgacgctaaggacctggaacagcataagatcaagcaagaagagatcctaaaagaaataaacaagatcgtggctgccaaggactcggattttcaatgtttgtccaaaaagaaagagaaactgactgaggaactgcagaagcttcaaaaagacattgaaatggctgagcgaaacgaggaccatcacctgcaggtactgaaagagagtgaagtgttactgcaggccaaacgggctgagctcgaaaagcttaagtcccaggttacttcacagcagcaggaaatggctgtgctggatcggcagctgggtcacaagaaggaagaactgcacttgctgcaaggctctatggtgcaagcaaaggccgatctccaggaggccctgcgcctcggcgaaacggaggtgaccgagaagtgtaaccacatccgggaagtgaagtctttgctcgaagagctctctttccagaaaggcgagctgaacgtgcagatttccgagcgcaagacccaactaaccctcattaagcaggagatcgagaaggaggaggagaatctgcaggtggtcctgcgacaaatgtcaaaacacaagaccgaattgaagaacatccttgacatgctgcagctggagaaccacgagttacaaggactcaagctgcagcacgaccagagagtttcagaactggagaaaacccaggttgctgtccttgaggagaagctggagctggaaaacctccagcagatctcccaacagcagaaaggcgaaattgagtggcaaaaacagctgttggagcgagacaaacgtgagattgagagaatgactgccgaaagccgcgcacttcaaagctgcgtagagtgcctctccaaggagaaggaggacctgcaggaaaagtgcgatatttgggaaaaaaaactggcccagaccaagcgtgtcctagccgcagctgaagagaactcaaagatggagcagtctaatctggagaaactcgaactgaatgttcggaagttacagcaggaacttgaccagctgaaccgggataaattgtcactgcacaacgacatttctgcgatgcagcagcagctgcaggagaagcgagaggctgtaaattcgctccaagaggagctggcaaatgtccaggatcacctgaacctggctaagcaggatctgctacatacaacaaaacaccaagatgtgctgctgagcgagcagacgcgcctccagaaggatatttcggagtgggcaaacaggtttgaggactgtcagaaagaggaggagacaaagcagcagcaattgcaggtcctgcagaacgaaatcgaagagaataaattgaaattggtacagcaggagatgatgttccagcgtctacagaaagaaagagaatccgaggaatcgaagctggaaacaagcaaggtgaccctgaaagaacagcaacatcagctggagaaggaactcacagaccaaaaatccaaactggatcaggtactttccaaggtgttagccgcagaggaaagggtgcgtacgcttcaggaggaggaaagatggtgcgagagtttggaaaaaacccttagtcagactaagcgtcaacttagtgaacgggaacagcaattggtcgagaagtcaggtgagctgctggctctgcagaaggaagccgattcaatgagggcagatttttcactcttaagaaaccagttcctcacagaaaggaaaaaagccgagaagcaagtcgcctccctaaaggaagctctgaaaatccagcgctctcagctggaaaagaacttgcttgagcagaagcaggagaattcatgtatccagaaggagatggccacaatcgaattggtagcacaggacaaccatgagagggctaggcggcttatgaaggagctaaatcagatgcaatatgaatataccgaattgaaaaagcagatggctaaccagaaagatctggagcgcaggcagatggagatctctgacgctatgagaacacttaagtctgaggtcaaggatgagatccggactagcttgaagaacctgaaccaattccttcctgagctgcccgcagacctggaggccatcttagaaagaaatgaaaatcttgaaggcgagcttgagagcctcaaagaaaatctcccctttacgatgaacgaggggccattcgaggaaaaactgaacttttcccaggttcatatcatggatgagcattggcggggagaggccctgcgcgaaaaactacggcacagagaggatcgccttaaagcacagttaaggcattgcatgtcgaagcaggcagaagtcctgataaaagggaaacgacagacagaaggcacgctgcacagcctccgtagacaggtggacgcgctaggcgaactcgtgacgtctacctcagcagattctgccagcagcccatccttgtctcagctcgagagctctcttacggaggattcccagctgggacagaaccaggaaaaaaacgcatcagcaaggta

SEQ ID NO: 271134 - DNA, 6977 bp, Artificial Sequence
  derived and/or modified sequence
atgaagaaggggtcccagcagaaaatctttagcaaagcgaagattccttcaagctcccattcccctattccttcatctatgagtaacatgcggtctcgttcgttgtcaccactaatcggctccgagaccctaccattccactccgggggacagtggtgcgagcaggttgagattgcagacgaaaataacatgctccttgattaccaagatcacaaaggagcagattctcacgccggtgtgcgatatatcaccgaggcccttataaagaagcttacaaaacaggacaacttggcactgatcaaatccttgaacctctccttgagcaaagacgggggaaaaaagtttaaatatatagagaacctcgagaaatgcgtgaaactagaagtgctaaacctgtcatacaacctgattgggaagatcgaaaagctggataagctactcaagctacgcgaattaaatctgagttacaataaaatatcaaaaattgagggtattgagaatatgtgcaatttacagaagcttaatttggccggaaatgagatcgaacacatccccgtttggcttgggaaaaaactcaaatccctcagggtcctcaatctgaagggaaataagatttcatccctgcaagatatttctaagttgaagcccctgcaagacctgatctccctgattctggtcgaaaaccctgtagtgaccctaccccactacctccagttcacaatattccatctcagatcactggaaagcctcgaaggtcagccagtgaccacccaggaccgccaggaggctttcgagagattctccctcgaagaagtcgagagactggagcgggacctggaaaagaagatgatcgagaccgaggaattgaagtccaagcagacgcgctttttggaggagatcaaaaaccaagataaattgaataagtcactgaaagaggaggcgatgctccagaagcagtcctgcgaggagctcaagtccgacctgaatacaaagaacgaactgctcaaacagaagaccatagagctcacccgcgcatgccagaaacagtacgagctcgagcaagaactggccttttataagattgacgcaaaatttgagccgctgaactactaccccagcgaatacgccgagattgataaggccccagatgaatctccatacattggcaagagtaggtacaaaagaaatatgttcgccactgagagctacattatcgactccgcacaggctgtgcaaatcaagaaaatggaacccgacgaacaactgaggaatgatcatatgaacctaaggggccacactccactagacactcagttagaggacaaagagaagaagatctcggctgcgcagacaagattgagcgaactgcacgatgaaatcgaaaaagccgaacagcagattcttcgggcaaccgaggagttcaagcaactcgaggaggccatccagcttaagaaaatctcggaggcaggcaaagatctgctttacaagcagctctctggcagactgcagctcgtgaataagctccgccaagaggccctagacctcgaactccaaatggagaagcaaaagcaagaaatcgccggaaagcagaaggaaatcaaagatctccaaattgcaattgacagcctggattccaaggatccgaagcactcacatatgaaggcgcagaaaagcgggaaggagcaacaactcgatattatgaataagcagtatcagcagctggagtccagattagatgagatcttgtcccgcattgccaaagagactgaagaaattaaggaccttgaagaacagctaacagaaggacaaatcgcggcaaacgaggccctaaagaaagatctcgagggggtgatctcgggtctccaagaatacttggggactatcaaaggacaggcaacccaggcccagaacgagtgccggaaactcagagacgagaaggaaacgctcctgcagaggctgaccgaagtggaacaggagcgcgatcaactcgaaatcgtagccatggacgccgagaatatgaggaaggagcttgcagaactggaatccgctctgcaagaacaacacgaggtgaacgccagtctgcagcagacgcagggagatctgagcgcttacgaggccgagctggaggccagactgaacctgagagacgcagaggccaaccagctcaaggaagaattggaaaaagtcaccaggttaactcaactggagcagtcagcactgcaagcggaattagagaaggagcgacaagctctaaagaacgctctaggaaaggcccaatttagcgaggagaaggagcaggagaattctgagctgcacgctaagctgaagcacctccaagatgacaacaatctcctcaaacagcaactgaaggactttcagaaccatttgaatcacgtcgtcgatggcctcgtcagaccggaggaagttgcagcccgtgtggatgagctgaggcggaaactgaagcttggaaccggagagatgaacattcactctccctcagacgtgttgggcaagtcccttgccgatctacagaagcagtttagcgaaattttagctaggtccaagtgggaaagggatgaggcccaagtccgggagcgaaagctacaggaagagatggctctgcagcaggaaaaactcgccaccgggcaagaggaattccgtcaggcatgtgagcgtgcgttggaggctcgtatgaatttcgacaagaggcagcatgaggcaagaattcagcagatggagaacgaaatacactacctgcaagagaacttgaagagcatggaggagattcaggggctgactgacctacagctgcaggaggctgatgaagagaaggaacgaatcttagcgcaactgcgcgaactagaaaagaagaagaagctggaggatgccaaaagtcaggagcaagtgtttgggctggacaaagagctgaaaaaattgaagaaggcagtagccacctccgacaaactggccaccgccgaactcaccatcgccaaagaccagctgaagtcacttcacggcactgtaatgaagatcaatcaggagagagcagaagagctgcaagaggcagagcgttttagtaggaaggcggcacaggccgcaagggacctgaccagggcagaggccgagatcgagctgcttcagaacctgctgcgtcagaagggagagcagtttcggctggagatggagaagaccggggttgggacaggggcaaactcgcaggtgctggagatcgaaaagctgaacgagacgatggagaggcagcgtaccgagatcgccagattgcagaacgtgctggatctcacaggttccgacaataagggaggttttgagaatgtgcttgaagagatagcggaacttaggagagaagtctcataccaaaatgactacatctcatccatggctgatccctttaagagaaggggctactggtatttcatgcctccccctcctagctctaaggtgagctcacacagttcccaggccacaaaggattctggcgtgggtcttaaatacagtgcctccacccctgtaaggaagccgagacctggtcaacaagacggcaaagaaggttcacagccccctccggcttccgggtactgggtgtacagccctataaggagtgggctgcacaagctgttccccagtagagacgccgattccggaggcgactcccaggaggagtctgaattagacgaccaggaggaaccgcctttcgtacctccccctggttatatgatgtatactgtgctgcccgacggcagtcctgtcccccagggtatggccctatatgccccacctcccccactacccaataactcccggcctttgacacctggaactgtggtgtacggaccgccacccgcaggcgcacccatggtgtacgggccaccaccccctaacttcagcatcccctttatcccaatgggtgtgctgcactgcaatgtacccgaacatcataacctagaaaatgaggtctcccgactggaagatatcatgcaacatctcaagtctaaaaaacgagaagagcgatggatgagggcctccaaaagacagagtgaaaaggaaatggaggaactgcaccataatatcgacgatctcctgcaggagaagaaaagtctcgagtgtgaggtggaagagctccatagaaccgtgcagaaacgccagcaacaaaaggattttatcgacggaaatgtagaatctcttatgacagaactggagatcgaaaaatctcttaagcatcacgaggatatcgtggacgaaatcgagtgtatagaaaagacactgctgaagcggagatctgagttgcgagaagcggaccgtctgctcgccgaggctgagagcgagctgtcatgtaccaaggagaagacaaagaacgcggtggagaagttcaccgacgcaaaacgctctctgcttcaaactgagagcgatgccgaagagttagagagaagggctcaggagacagccgtcaacctcgtgaaggccgatcaacagcttaggagcttacaggccgacgctaaagatctcgagcagcacaaaattaagcaggaggaaattttgaaggaaataaacaagattgtggctgcgaaggattctgacttccagtgtctctctaaaaaaaaagaaaagctgactgaagagcttcagaagctccagaaggatatcgaaatggcagagcgcaatgaagaccatcatttgcaagtgctgaaagagtcggaggttctgctgcaggctaaacgcgctgaactggaaaagctgaagagtcaggtgacctcacagcagcaggagatggctgtgttggaccggcagcttggacacaaaaaagaggaactgcaccttttacaaggctcgatggtccaagctaaagccgacctgcaggaggccctgcgcctgggggaaacggaggtaacagaaaagtgcaatcacattagagaggtgaagtcccttttagaggagctctcattccagaaaggggagcttaatgtgcaaattagcgagcggaagactcagttgacattaatcaagcaagaaatcgagaaggaagaagaaaatttgcaggtagttcttaggcagatgagtaaacacaaaacagaattaaaaaacatcctagacatgttgcagcttgaaaaccacgaattacaagggctcaagcttcagcatgatcagcgcgtgagcgaactcgaaaagacccaggtggcggtcttagaggagaagctcgaactcgaaaacctgcaacagatttcccagcagcagaagggggagattgagtggcagaagcagttgttagagagagacaaacgcgaaattgagagaatgacagccgaaagccgcgcactgcagtcttgtgttgagtgtctgagcaaagagaaggaggatctgcaagagaagtgcgatatctgggaaaaaaagctggcacaaactaagagagtcctcgctgcggcagaggaaaattccaagatggagcagagcaatctagaaaaattggagctgaatgtgcgtaagctgcagcaggaactggaccaactgaatcgagataaactgtccttacataacgatatctcagccatgcaacaacagctccaagagaagagggaagcagttaatagcctgcaagaggagctcgccaacgttcaggaccacctcaatttagccaagcaggatctcctccatacaaccaagcaccaagatgttctgcttagcgaacagactagactgcagaaggacatcagtgaatgggctaataggttcgaggactgtcagaaggaagaggagactaagcagcagcagctgcaggtcctgcagaacgaaattgaagagaataagctaaagcttgtgcagcaggaaatgatgttccagcgactgcagaaggagagggaatccgaagaaagtaaactggaaaccagtaaagtgactttgaaagaacagcaacaccagttagagaaggagctgaccgatcaaaagtctaaactggaccaagtgttatctaaggtgctggccgcagaggagagagtgaggaccctccaggaggaagagaggtggtgcgagtctcttgaaaaaaccttaagccagaccaagcggcagctttccgagcgtgagcagcagttggtggaaaagtcaggtgaactgttagccctccagaaagaagccgactctatgagggcagatttttcccttctgagaaaccagttcctaactgaaagaaagaaggccgagaaacaggttgcaagcctcaaagaagctctgaaaatccagcggtcgcaactagagaagaacctcctcgaacagaaacaggaaaactcttgtatacaaaaggagatggctactattgaactggtagcacaggacaatcatgagagagctcgacggctgatgaaggagctgaatcagatgcagtatgaatacaccgagctaaagaaacagatggccaatcagaaggacctcgagagacgccaaatggagatttcggatgcaatgagaacactgaagtctgaagtcaaagacgaaatccgcacaagcctcaaaaacctgaaccagttcctccctgagctccccgcagacttggaggccattttggaaagaaatgaaaatctggagggtgagctggagtcgcttaaagaaaacctgcccttcactatgaacgaaggtcccttcgaggaaaaacttaacttttcccaggttcacatcatggacgagcactggcgcggtgaggctctgcgggagaagctgagacatagggaagaccggttgaaggctcagttaagacactgcatgagcaaacaggccgaagttcttattaaaggcaagaggcaaactgaaggaactttacactccttgcgtaggcaggttgacgcgctaggagaactggtcacttccacatccgcagattctgcttcttctccaagcctgtcacagcttgagtcatcactaacagaggattcacaactgggccagaatcaggagaaaaacgctagtgcgagata

SEQ ID NO: 271135 - DNA, 6977 bp, Artificial Sequence
  derived and/or modified sequence
atgaaaaagggaagtcaacaaaagatcttcagtaaggctaaaattcctagcagcagtcacagcccaattccttccagtatgtccaacatgcgctcaagatcactgtccccactcatcggcagtgagacccttccctttcacagtggtgggcagtggtgtgaacaggtagagatcgctgatgagaacaacatgttactcgattatcaggatcacaagggagctgattcgcacgccggtgtccggtacattactgaggcacttataaagaagctgacgaagcaagacaatctagccctcatcaaatctctgaatctaagtctgtccaaggacggtggtaagaagtttaagtacatagaaaatctcgaaaaatgcgtaaagctcgaggttctcaacctgagttataatctgattggtaaaatagaaaagcttgacaagttgctaaagctgcgcgagctcaacttgtcctataataagatttcgaagatcgaagggattgaaaacatgtgcaacctgcagaagttgaatctggcaggaaatgaaatcgagcacatacctgtgtggcttggaaagaaactgaagagcctcagggtcctcaatcttaaaggcaacaaaattagtagccttcaggacataagcaagctcaaaccccttcaggatttgatcagtctaatcctggtggagaatcccgttgtcacactgccccattacctccaatttactattttccatctgagatcacttgagtccctggagggccaacccgtgaccactcaggacagacaggaggcatttgagaggttcagccttgaggaggtagaacggctggaacgagacctggaaaagaaaatgatcgagacagaggaactgaagtccaaacagacacggtttttggaggagattaagaaccaggacaagctcaacaaaagtttgaaggaagaagctatgctccaaaagcagagctgcgaagaactcaaaagcgatctgaacacaaagaatgaactgttgaagcagaagacaatcgagctcacgagggcctgccagaagcagtatgaacttgagcaggaactggcattctacaaaatcgacgccaaattcgaacctctgaattattatccatctgagtatgcagagattgacaaagctcctgatgaatccccctacattggcaaatcccgatacaagcgtaatatgttcgccaccgagagttacataatcgattcagcccaggccgtccaaatcaagaaaatggagccagacgagcagttgcgcaacgaccatatgaatttaaggggtcacactccgctggacacccagttggaggacaaggagaagaaaatcagtgctgcccaaaccagactgtcagaactgcacgatgagatcgaaaaggccgagcagcagattttgcgggctaccgaagagttcaaacagttggaagaagccattcagctcaagaaaatttccgaagccggaaaagacctcctctataagcaactatcaggcagactgcagctggtgaacaaactgcggcaggaggccctggacctggagttgcagatggagaagcaaaaacaggaaattgctggaaaacaaaaagagatcaaggaccttcagattgccatcgatagcctagactccaaagaccccaagcacagtcacatgaaggctcaaaaaagtggtaaagaacagcagttggatattatgaataagcagtaccagcagcttgagtcccgactggacgaaatcctcagccggatcgccaaagaaacagaagagattaaggatctggaagagcaacttacagaggggcagatagccgctaacgaggctctaaaaaaggacctggaaggcgtaatttcaggccttcaggagtacctgggaaccatcaaagggcaggcaacacaggcgcaaaatgagtgccgaaaattgagagatgagaaggaaactttactacagcgactcacagaagtggagcaagaaagagaccagctcgagatcgtggccatggatgctgaaaacatgaggaaggagctggcggaactagaatccgccctacaggagcagcacgaagtaaacgcatccttacagcagacacagggagatttgagcgcatacgaggcagagctggaagcgagactaaatttgcgtgatgccgaggcgaaccaactcaaggaggagctggagaaggtaacccgtctgacccagctggagcagtctgcgctgcaggccgaacttgaaaaagagcggcaagccctgaaaaacgccttagggaaagcccagttctcagaagagaaagaacaggaaaacagcgagttgcacgccaagctgaagcacctccaggatgataacaatcttctgaagcagcagctgaaggattttcaaaatcacctgaaccacgtagtggatggccttgtgaggcctgaggaggtcgccgctcgtgtggatgaactgcggagaaaactcaaactgggtaccggtgagatgaacatacactccccctccgacgttctggggaaatctctcgccgacctgcagaagcagttctctgaaattctcgcccgaagcaagtgggagagggacgaggcccaggtacgtgaaaggaaactgcaggaggagatggctctgcagcaggagaaattagccacaggacaggaagaatttagacaggcatgcgagagagcgctcgaggccaggatgaattttgacaaacgccagcacgaagcccgaatccaacagatggaaaacgagatccattacctgcaagagaatctgaagagcatggaggaaatccaaggactgaccgatctgcagctgcaggaggcagacgaggagaaggaaagaattctggcacaacttcgtgaacttgagaagaagaagaagctggaagatgccaaaagccaggagcaagtgtttggtttggataaggagctgaagaagttaaaaaaggcagtcgctactagcgacaagctggcaacagccgagctcaccatagccaaggaccaactgaaatccctgcacggtacagtcatgaagattaatcaggagagagccgaggaacttcaggaagcggagagattctccaggaaggcagctcaggctgccagggatctgaccagagcagaagcggagattgagctgctacaaaacctgctgcggcagaaaggtgagcagttccggctcgagatggagaagaccggggtcgggaccggggcaaatagccaagttctggagattgagaagttaaacgaaaccatggaaaggcagaggaccgagatcgccaggttgcagaacgttttggatttaaccgggagtgataataaggggggattcgagaatgtcttagaggaaatcgcagagctcaggcgtgaagtgtcttatcagaacgactacatatcaagcatggccgatccttttaaaaggaggggttactggtacttcatgcctccgcctccctcttctaaagtaagttcccacagttcacaggctaccaaggatagtggcgttgggctcaaatattctgcgagcacccctgttaggaagcctcgacccggtcaacaggacgggaaagagggaagccagcctcctcccgcttccggatattgggtctactcccccatcaggagtggactccacaagctatttccgtcgcgagatgcagattccggaggcgatagtcaagaggagtctgaattagacgatcaggaggagcccccttttgtgcccccacctggatatatgatgtataccgttctacctgacgggagccccgtcccccaagggatggccctgtacgcacctcccccaccgctgcccaataacagtagaccactcacaccaggtacagtcgtttacggtccaccacccgctggagccccaatggtttacgggccaccaccaccaaacttttccatcccctttatccctatgggcgtgttacactgcaacgtgccagagcatcacaatctggagaacgaggtgtctaggttagaggatatcatgcagcacctcaagtcgaagaagagggaagaacgctggatgagagccagtaagagacagagcgagaaagagatggaggagctccatcataacatcgatgatctgctgcaggaaaagaagtctttggaatgtgaagtggaggaactacatcggacagtgcagaaaaggcaacagcagaaagactttatcgacggcaacgtggaaagtcttatgacagaactggagatagagaagtcacttaagcatcacgaagatatagtggatgaaatcgagtgcatcgagaaaactctgttaaagaggcgttccgagctcagagaagccgatcgactgcttgcggaagccgagtcggaattgagttgcacgaaagaaaagaccaagaatgctgtcgagaagttcacggacgccaagcggtcccttctgcagactgagagcgacgccgaagagctggaaaggagggcacaggaaaccgcggtgaatctggttaaagctgatcagcagctgagatctctgcaggccgacgctaaggatttggagcagcacaagatcaagcaggaggaaattctgaaggaaatcaacaagatagtggctgccaaggactccgactttcagtgtttatccaagaagaaagaaaaattgaccgaggagctgcagaagctgcagaaggacatcgagatggccgaacggaatgaggatcatcacctgcaggtgctcaaggaaagcgaggttctcctgcaggctaaacgagctgaacttgagaaactcaagtcacaagtcactagtcaacagcaggaaatggccgtgctggaccggcagctgggacacaagaaggaagagctgcacctgctacagggatctatggtacaggcaaaagctgacttacaggaggccctccgtctgggcgagaccgaagtgacagagaaatgtaatcacatccgagaggttaagtccctacttgaggaactctccttccaaaaaggagagctgaatgtccagatttcagagaggaagacccagctcacccttattaaacaagaaatagagaaggaagaggagaatctgcaagtggtgctgaggcagatgagtaagcacaagactgagttaaaaaatatccttgacatgctgcaattagagaatcatgaattgcaaggcctgaaattacaacacgaccagcgcgtgtccgaacttgagaaaactcaggtagccgtgctcgaggagaagctggagttggagaacctccagcaaatctcacagcagcagaagggagagatcgagtggcagaaacagctgttggaaagagataagcgggaaatcgaaaggatgacagcggagtctcgagccctgcagtcgtgtgtagagtgcctctccaaggagaaggaagatctccaggagaagtgtgacatctgggagaaaaagctggcacagaccaagcgcgtcttagcagcagccgaggaaaatagtaagatggaacaaagcaatctggaaaaactagaactgaacgttagaaaattacaacaagaattagaccagctgaacagagataaactctccttgcataacgatattagcgctatgcagcagcagctgcaggagaaacgtgaggccgtgaactcactgcaggaagaactcgcgaacgtgcaggaccatctgaacctcgccaaacaggacctgctgcacactactaagcatcaggatgtgctgttatccgagcagacgaggctccagaaggacattagtgagtgggctaaccggttcgaggattgtcagaaggaagaggaaacaaagcagcagcagttacaggtccttcagaatgaaatcgaggaaaacaagttaaaactggttcagcaggagatgatgttccagaggctacagaaggaacgcgaatctgaggagagcaaactggaaacaagcaaggttaccctcaaagagcagcagcatcagcttgaaaaggaactgaccgaccaaaaaagcaagttggaccaggtgttgtcaaaggtcctggctgcggaggaacgagtgcgcacactccaggaggaggaaaggtggtgcgagtccttagagaagactttatcccagaccaaacggcagctgagcgagagagaacagcagctagtggaaaagtcaggcgagctgttagcgttgcagaaggaggcggatagcatgcgcgcagacttttctctgctacgtaatcagtttttgacagagagaaagaaagcagagaaacaggtcgcctctcttaaggaagccctcaaaattcagcgctcacagcttgaaaaaaatctgttggaacagaagcaggagaacagctgtatccagaaagaaatggccactatcgaactagtggcccaggacaatcacgagagagccaggcgactcatgaaggagctcaaccagatgcaatacgagtacacagagctgaaaaagcagatggctaatcagaaggacctggagcgcaggcagatggagatctcagatgccatgaggacactgaagtccgaggtcaaggatgaaatccgcacaagtctcaaaaacttgaaccaattcctccctgagctgcctgccgatctggaagccattttggaacggaatgaaaatctagagggggagttagagtcgctgaaggagaatctgcctttcactatgaacgaaggtccattcgaggaaaagctgaacttcagtcaggttcacattatggacgagcattggaggggagaggccctgagggaaaaacttcggcatagggaagacaggctgaaggctcaacttaggcattgcatgagcaagcaggcagaggtactgatcaagggtaagagacagactgagggcacactacattctcttcgtcgccaggtggatgcactgggggaacttgtcacgtctacaagtgccgactccgcaagctctccttccctgtcccagctggagtcctcgcttacagaggactctcagttaggccaaaaccagaagcagaataacagccttaggta

SEQ ID NO: 271136 - DNA, 7006 bp, Artificial Sequence
  derived and/or modified sequence
gttttgatgaacacctggctttattcttgcaatgaagaaaggttctcaacaaaaaatattctccaaagcaaagataccatcatcatctcactctcctatcccatcatctatgtccaatatgagatctaggtcactttcacctttgattggatcagagactctaccttttcattctggaggacagtggtgtgagcaagttgagattgcagatgaaaacaatatgcttttggactatcaagaccataaaggagctgattcacatgcaggagttagatatattacagaggccctcattaaaaaacttactaaacaggataatttggctttgataaaatctctgaacctttcactttctaaagacggtggcaagaaatttaagtatattgagaatttggaaaaatgtgttaaacttgaagtactgaatctcagctataatctaatagggaagattgaaaagttggacaagctgttaaaattacgtgaactcaacttatcatataacaaaatcagcaaaattgaaggcatagaaaatatgtgtaatctgcaaaagcttaaccttgcaggaaatgaaattgagcatattccagtatggttagggaagaagttaaaatctttgcgagtcctcaatttgaaaggcaacaagatatcatcgctccaagatataagcaagttgaaaccgcttcaagatttgatttctctgatcctagttgaaaatccagttgtgacccttcctcattacctccagtttaccattttccacctccgttcattggaaagtttggaaggtcagccagtaaccactcaggatagacaggaggcttttgagagattcagtttagaagaggtagaaagactggaaagagacctagaaaaaaagatgatagaaactgaagagcttaagagcaaacaaacaaggttccttgaggaaattaaaaatcaagataaattgaataaatcattaaaagaggaggccatgttacagaaacagagctgtgaggaactcaagagtgacttaaacacaaaaaatgaattgctaaaacagaagaccatagaattaacacgagcatgtcagaagcaatatgagctggaacaggaattggccttttataaaattgatgctaaatttgagccactaaattattatccatcagagtatgctgaaattgataaagccccagatgaaagcccttacattggcaaatccagatacaagagaaatatgtttgccacagagagttatattattgacagtgctcaggcagtacagatcaagaagatggagccagatgaacaacttagaaatgatcacatgaacttgagaggccacacaccactggacacgcaactggaagacaaagaaaaaaaaataagtgcagcacaaactcgactatcagaactgcatgatgaaatagaaaaggcagaacaacaaattttgagagctactgaagaatttaaacaactggaagaagctatacaactaaaaaagatttcagaagcagggaaagaccttctttacaagcagttgagtggtagactacaacttgtaaataaattacgccaggaagctctggatctagaactgcagatggaaaagcaaaagcaggaaattgccggaaagcagaaggagattaaggacctgcaaatagccatagatagcctggattccaaagacccaaaacattcccatatgaaggctcaaaagagcggtaaagaacaacagcttgacattatgaacaagcagtaccaacaacttgaaagtcgtttggatgagatactttctagaattgctaaggaaacggaagagattaaggaccttgaagaacagcttactgaaggccagatagcagcaaatgaagccctgaagaaggatttagaaggtgttatcagtgggttgcaagaatacctggggaccattaaaggccaggcaactcaggcccagaatgagtgcaggaagctgcgggatgagaaagagacattgttgcagagattgacagaagtcgagcaggagagagaccagctggaaatagttgccatggatgcagaaaatatgaggaaggagcttgcagagctagaaagtgccctccaagagcagcatgaggtgaatgcatctttgcagcagacccagggagatctcagtgcctatgaagctgagctagaggctcggctaaacctaagggatgctgaagccaaccagctcaaggaagagttggaaaaagtaacaagacttacccagttagaacaatcagcccttcaagcagaacttgagaaggaaaggcaagccctcaagaatgcccttggaaaagcccagttctcagaagaaaaggagcaagagaacagtgagctccatgcaaaacttaaacacttgcaggatgacaataatctgttaaaacagcaacttaaagatttccagaatcaccttaaccatgtggttgatggtttggttcgtccagaagaagtggcagctcgtgtggatgagctaagaagaaaactgaaattaggaactggggaaatgaacatccatagtccttcagatgtcttagggaaaagtcttgctgatttacagaaacaattcagtgaaattcttgcacgctccaagtgggaaagagatgaagcacaagttagagagagaaaactccaagaagaaatggctctgcagcaagagaaactggcaactggacaagaagagttcaggcaggcctgtgagagagccctggaagcaagaatgaattttgataagaggcaacatgaagcaagaatccagcaaatggagaatgaaattcactatttgcaagaaaatctaaaaagtatggaggaaatccaaggccttacagatctccaacttcaggaagctgatgaagagaaggagagaattctggcccaactccgagagttagagaaaaagaagaaacttgaagatgccaaatctcaggagcaagtttttggtttagataaagaactgaagaaactaaagaaagccgtggccacctctgataagctagccacagctgagctcaccattgccaaagaccagctgaagtcccttcatggaactgttatgaaaattaaccaggagcgagcagaggagttgcaggaagcagagaggttcagcagaaaggcagcacaagcagccagagatctcacccgagcagaagctgagatcgaactcctgcagaatctcctcaggcagaagggggagcagtttcgacttgagatggagaaaacaggtgtaggtactggagcaaactcacaggtcctagaaattgagaaactgaatgagacaatggaacgacaaaggacagagattgcaaggctgcagaatgtactagacctcactggaagtgacaacaaaggaggctttgaaaatgttttagaagaaattgctgaacttcgacgtgaagtttcttatcagaatgattacataagcagcatggcagatcctttcaaaagacgaggctattggtactttatgccaccaccaccatcatcaaaagtttccagccatagttcccaggccaccaaggactctggtgttggccttaagtactcagcctcaactcctgttagaaaaccacgccctgggcagcaggatgggaaggaaggcagtcaacctccccctgcctcaggatactgggtttattctcccatcaggagtgggttacataaactgtttccaagtagagatgcagacagtggaggagatagtcaggaagagagtgagctggatgaccaagaagaacccccatttgtgcctcctcctggatacatgatgtatactgtgcttcctgatggttctcctgtaccccagggcatggccctgtatgcaccacctcctcccttgccaaacaatagccgacctctcacccctggcactgttgtttatggcccacctcctgctggggcccccatggtgtatgggcctccaccccccaacttctccatccccttcatccctatgggtgtgctgcattgcaacgtccctgaacaccataacttagagaatgaagtttctagattagaagacataatgcagcatttaaaatcaaagaagcgggaagaaaggtggatgagagcatccaagcggcagtcggagaaagaaatggaagaactgcatcataatattgatgatcttttgcaagagaagaaaagcttagagtgtgaagtagaagaattacatagaactgtccagaaacgtcaacagcaaaaggacttcattgatggaaatgttgagagtcttatgactgaactagaaatagaaaaatcactcaaacatcatgaagatattgtagatgaaattgagtgcattgagaagactcttctgaaacgtcgctcagagctcagggaagctgaccgactcctggcagaggctgagagtgaactttcatgcactaaagaaaagacaaaaaatgctgttgaaaagttcactgatgccaagagaagtttattgcaaactgagtcagatgctgaggaattagaaaggagagctcaggaaactgctgttaacctcgtcaaagctgatcagcagctaagatcgctccaggctgatgcaaaggatttggagcagcacaaaatcaagcaagaagaaatcttgaaagaaataaacaaaattgtagcagcaaaagactcagacttccaatgtttaagcaagaagaaggaaaaactgacagaagagcttcagaaactacagaaagacatagagatggcagaacgcaatgaggatcaccacctgcaggtccttaaagaatctgaggtgcttcttcaggccaaaagagccgagctggaaaagctgaaaagccaggtgacaagtcagcagcaggagatggctgtcttggacaggcagttagggcataaaaaggaggagctgcatctactccaaggaagcatggtccaggcaaaagctgacctccaggaagctctgagactgggagagactgaagtaactgagaagtgcaatcacattagggaagtaaaatctcttctggaagaactgagttttcagaaaggagaactaaatgttcagattagtgaaagaaaaactcaacttacacttataaagcaggaaattgaaaaagaggaagaaaatcttcaggttgttttaaggcagatgtctaaacataaaaccgaactaaagaatattctggacatgttgcaacttgaaaaccatgagctacaaggtttgaagctacaacatgaccaaagggtatctgaattagagaagactcaggtggcagtgctagaggagaaactggagttagagaatttgcagcagatatcccagcagcagaaaggggaaatagagtggcagaagcagctccttgagagggataaacgagaaatagaacgaatgactgctgagtcccgagctttacaatcgtgtgttgagtgtttgagcaaagaaaaggaagatctccaagagaaatgtgacatttgggaaaaaaagttggcacaaaccaaaagggttttagcagcagcagaagaaaatagcaaaatggagcaatcaaacttagaaaagttggaattgaatgtcagaaaactgcagcaggaactagaccaactaaacagagacaagttgtcactgcataacgacatttcagcaatgcaacagcagctccaagaaaaacgagaagcagtaaactcactgcaggaggaactagctaatgtccaagaccatttgaacctagcaaaacaggacctgcttcacaccaccaagcatcaggatgtgttgctcagtgagcagacccgactccagaaggacatcagtgaatgggcaaataggtttgaagactgtcagaaagaagaggagacaaaacaacaacaacttcaagtgcttcagaatgagattgaagaaaacaagctcaaactagtccaacaagaaatgatgtttcagagactccagaaagagagagaaagtgaagaaagcaaattagaaaccagtaaagtgacactgaaggagcaacagcaccagctggaaaaggaattaacagaccagaaaagcaaactggaccaagtgctctcaaaggtgctggcagctgaagagcgtgttaggactctgcaggaagaggagaggtggtgtgagagcctggagaagacactctcccaaactaaacggcagctttcagaaagggagcagcaattggtggagaaatcaggtgagctgttggccctccagaaagaggcagattctatgagggcagacttcagccttctgcggaaccagttcttgacagaaagaaagaaagctgagaagcaggtggccagcctgaaggaagcacttaagatccagcggagccagctggagaaaaaccttcttgagcaaaaacaggagaacagctgcatacaaaaggaaatggcaacaattgaactggtagcccaggacaaccatgagcgggccaggcgcctgatgaaggagctcaaccagatgcagtatgagtacacggagctcaagaaacagatggcaaaccaaaaagatttggagagaagacaaatggaaatcagtgatgcaatgaggacacttaaatctgaggtgaaggatgaaatcagaaccagcttgaagaatcttaatcagtttcttccagaactaccagcagatctagaagctattttggaaagaaacgaaaacctagaaggagaattggaaagcttgaaagagaaccttccatttaccatgaatgagggaccttttgaagaaaaactgaacttttcccaagttcacataatggatgaacactggcgtggagaagcactccgggagaaactgcgtcaccgggaagaccgactcaaggcccaactccgacactgtatgtccaagcaagcagaagtattaattaaaggaaagcggcagacagagggcactttacacagtttgaggagacaagtagatgctttaggggaattggtcaccagcacctctgcagattcagcgtcatcacccagtctgtctcagctggagtcttccctcacagaggactctcaacttggacaaaatcagaaacaaaacaatagcctgagg

SEQ ID NO: 271137 - DNA, 6978 bp, Artificial Sequence
  derived and/or modified sequence
atgaagaagggcagccagcagaagatcttcagcaaggccaagatccccagcagcagccacagccccatccccagcagcatgagcaacatgagaagcagaagcctgagccccctgatcggcagcgagaccctgcccttccacagcggcggccagtggtgcgagcaggtggagatcgccgacgagaacaacatgctgctggactaccaggaccacaagggcgccgacagccacgccggcgtgagatacatcaccgaggccctgatcaagaagctgaccaagcaggacaacctggccctgatcaagagcctgaacctgagcctgagcaaggacggcggcaagaagttcaagtacatcgagaacctggagaagtgcgtgaagctggaggtgctgaacctgagctacaacctgatcggcaagatcgagaagctggacaagctgctgaagctgagagagctgaacctgagctacaacaagatcagcaagatcgagggcatcgagaacatgtgcaacctgcagaagctgaacctggccggcaacgagatcgagcacatccccgtgtggctgggcaagaagctgaagagcctgagagtgctgaacctgaagggcaacaagatcagcagcctgcaggacatcagcaagctgaagcccctgcaggacctgatcagcctgatcctggtggagaaccccgtggtgaccctgccccactacctgcagttcaccatcttccacctgagaagcctggagagcctggagggccagcccgtgaccacccaggacagacaggaggccttcgagagattcagcctggaggaggtggagagactggagagagacctggagaagaagatgatcgagaccgaggagctgaagagcaagcagaccagattcctggaggagatcaagaaccaggacaagctgaacaagagcctgaaggaggaggccatgctgcagaagcagagctgcgaggagctgaagagcgacctgaacaccaagaacgagctgctgaagcagaagaccatcgagctgaccagagcctgccagaagcagtacgagctggagcaggagctggccttctacaagatcgacgccaagttcgagcccctgaactactaccccagcgagtacgccgagatcgacaaggcccccgacgagagcccctacatcggcaagagcagatacaagagaaacatgttcgccaccgagagctacatcatcgacagcgcccaggccgtgcagatcaagaagatggagcccgacgagcagctgagaaacgaccacatgaacctgagaggccacacccccctggacacccagctggaggacaaggagaagaagatcagcgccgcccagaccagactgagcgagctgcacgacgagatcgagaaggccgagcagcagatcctgagagccaccgaggagttcaagcagctggaggaggccatccagctgaagaagatcagcgaggccggcaaggacctgctgtacaagcagctgagcggcagactgcagctggtgaacaagctgagacaggaggccctggacctggagctgcagatggagaagcagaagcaggagatcgccggcaagcagaaggagatcaaggacctgcagatcgccatcgacagcctggacagcaaggaccccaagcacagccacatgaaggcccagaagagcggcaaggagcagcagctggacatcatgaacaagcagtaccagcagctggagagcagactggacgagatcctgagcagaatcgccaaggagaccgaggagatcaaggacctggaggagcagctgaccgagggccagatcgccgccaacgaggccctgaagaaggacctggagggcgtgatcagcggcctgcaggagtacctgggcaccatcaagggccaggccacccaggcccagaacgagtgcagaaagctgagagacgagaaggagaccctgctgcagagactgaccgaggtggagcaggagagagaccagctggagatcgtggccatggacgccgagaacatgagaaaggagctggccgagctggagagcgccctgcaggagcagcacgaggtgaacgccagcctgcagcagacccagggcgacctgagcgcctacgaggccgagctggaggccagactgaacctgagagacgccgaggccaaccagctgaaggaggagctggagaaggtgaccagactgacccagctggagcagagcgccctgcaggccgagctggagaaggagagacaggccctgaagaacgccctgggcaaggcccagttcagcgaggagaaggagcaggagaacagcgagctgcacgccaagctgaagcacctgcaggacgacaacaacctgctgaagcagcagctgaaggacttccagaaccacctgaaccacgtggtggacggcctggtgagacccgaggaggtggccgccagagtggacgagctgagaagaaagctgaagctgggcaccggcgagatgaacatccacagccccagcgacgtgctgggcaagagcctggccgacctgcagaagcagttcagcgagatcctggccagaagcaagtgggagagagacgaggcccaggtgagagagagaaagctgcaggaggagatggccctgcagcaggagaagctggccaccggccaggaggagttcagacaggcctgcgagagagccctggaggccagaatgaacttcgacaagagacagcacgaggccagaatccagcagatggagaacgagatccactacctgcaggagaacctgaagagcatggaggagatccagggcctgaccgacctgcagctgcaggaggccgacgaggagaaggagagaatcctggcccagctgagagagctggagaagaagaagaagctggaggacgccaagagccaggagcaggtgttcggcctggacaaggagctgaagaagctgaagaaggccgtggccaccagcgacaagctggccaccgccgagctgaccatcgccaaggaccagctgaagagcctgcacggcaccgtgatgaagatcaaccaggagagagccgaggagctgcaggaggccgagagattcagcagaaaggccgcccaggccgccagagacctgaccagagccgaggccgagatcgagctgctgcagaacctgctgagacagaagggcgagcagttcagactggagatggagaagaccggcgtgggcaccggcgccaacagccaggtgctggagatcgagaagctgaacgagaccatggagagacagagaaccgagatcgccagactgcagaacgtgctggacctgaccggcagcgacaacaagggcggcttcgagaacgtgctggaggagatcgccgagctgagaagagaggtgagctaccagaacgactacatcagcagcatggccgaccccttcaagagaagaggctactggtacttcatgccccccccccccagcagcaaggtgagcagccacagcagccaggccaccaaggacagcggcgtgggcctgaagtacagcgccagcacccccgtgagaaagcccagacccggccagcaggacggcaaggagggcagccagcccccccccgccagcggctactgggtgtacagccccatcagaagcggcctgcacaagctgttccccagcagagacgccgacagcggcggcgacagccaggaggagagcgagctggacgaccaggaggagccccccttcgtgcccccccccggctacatgatgtacaccgtgctgcccgacggcagccccgtgccccagggcatggccctgtacgccccccccccccccctgcccaacaacagcagacccctgacccccggcaccgtggtgtacggccccccccccgccggcgcccccatggtgtacggcccccccccccccaacttcagcatccccttcatccccatgggcgtgctgcactgcaacgtgcccgagcaccacaacctggagaacgaggtgagcagactggaggacatcatgcagcacctgaagagcaagaagagagaggagagatggatgagagccagcaagagacagagcgagaaggagatggaggagctgcaccacaacatcgacgacctgctgcaggagaagaagagcctggagtgcgaggtggaggagctgcacagaaccgtgcagaagagacagcagcagaaggacttcatcgacggcaacgtggagagcctgatgaccgagctggagatcgagaagagcctgaagcaccacgaggacatcgtggacgagatcgagtgcatcgagaagaccctgctgaagagaagaagcgagctgagagaggccgacagactgctggccgaggccgagagcgagctgagctgcaccaaggagaagaccaagaacgccgtggagaagttcaccgacgccaagagaagcctgctgcagaccgagagcgacgccgaggagctggagagaagagcccaggagaccgccgtgaacctggtgaaggccgaccagcagctgagaagcctgcaggccgacgccaaggacctggagcagcacaagatcaagcaggaggagatcctgaaggagatcaacaagatcgtggccgccaaggacagcgacttccagtgcctgagcaagaagaaggagaagctgaccgaggagctgcagaagctgcagaaggacatcgagatggccgagagaaacgaggaccaccacctgcaggtgctgaaggagagcgaggtgctgctgcaggccaagagagccgagctggagaagctgaagagccaggtgaccagccagcagcaggagatggccgtgctggacagacagctgggccacaagaaggaggagctgcacctgctgcagggcagcatggtgcaggccaaggccgacctgcaggaggccctgagactgggcgagaccgaggtgaccgagaagtgcaaccacatcagagaggtgaagagcctgctggaggagctgagcttccagaagggcgagctgaacgtgcagatcagcgagagaaagacccagctgaccctgatcaagcaggagatcgagaaggaggaggagaacctgcaggtggtgctgagacagatgagcaagcacaagaccgagctgaagaacatcctggacatgctgcagctggagaaccacgagctgcagggcctgaagctgcagcacgaccagagagtgagcgagctggagaagacccaggtggccgtgctggaggagaagctggagctggagaacctgcagcagatcagccagcagcagaagggcgagatcgagtggcagaagcagctgctggagagagacaagagagagatcgagagaatgaccgccgagagcagagccctgcagagctgcgtggagtgcctgagcaaggagaaggaggacctgcaggagaagtgcgacatctgggagaagaagctggcccagaccaagagagtgctggccgccgccgaggagaacagcaagatggagcagagcaacctggagaagctggagctgaacgtgagaaagctgcagcaggagctggaccagctgaacagagacaagctgagcctgcacaacgacatcagcgccatgcagcagcagctgcaggagaagagagaggccgtgaacagcctgcaggaggagctggccaacgtgcaggaccacctgaacctggccaagcaggacctgctgcacaccaccaagcaccaggacgtgctgctgagcgagcagaccagactgcagaaggacatcagcgagtgggccaacagattcgaggactgccagaaggaggaggagaccaagcagcagcagctgcaggtgctgcagaacgagatcgaggagaacaagctgaagctggtgcagcaggagatgatgttccagagactgcagaaggagagagagagcgaggagagcaagctggagaccagcaaggtgaccctgaaggagcagcagcaccagctggagaaggagctgaccgaccagaagagcaagctggaccaggtgctgagcaaggtgctggccgccgaggagagagtgagaaccctgcaggaggaggagagatggtgcgagagcctggagaagaccctgagccagaccaagagacagctgagcgagagagagcagcagctggtggagaagagcggcgagctgctggccctgcagaaggaggccgacagcatgagagccgacttcagcctgctgagaaaccagttcctgaccgagagaaagaaggccgagaagcaggtggccagcctgaaggaggccctgaagatccagagaagccagctggagaagaacctgctggagcagaagcaggagaacagctgcatccagaaggagatggccaccatcgagctggtggcccaggacaaccacgagagagccagaagactgatgaaggagctgaaccagatgcagtacgagtacaccgagctgaagaagcagatggccaaccagaaggacctggagagaagacagatggagatcagcgacgccatgagaaccctgaagagcgaggtgaaggacgagatcagaaccagcctgaagaacctgaaccagttcctgcccgagctgcccgccgacctggaggccatcctggagagaaacgagaacctggagggcgagctggagagcctgaaggagaacctgcccttcaccatgaacgagggccccttcgaggagaagctgaacttcagccaggtgcacatcatggacgagcactggagaggcgaggccctgagagagaagctgagacacagagaggacagactgaaggcccagctgagacactgcatgagcaagcaggccgaggtgctgatcaagggcaagagacagaccgagggcaccctgcacagcctgagaagacaggtggacgccctgggcgagctggtgaccagcaccagcgccgacagcgccagcagccccagcctgagccagctggagagcagcctgaccgaggacagccagctgggccagaaccaggagaagaacgccagcgccagatag

SEQ ID NO: 271138 - protein, 515 aa, Artificial Sequence
  derived and/or modified sequence
MVSSVLCRCVASPPPDAAATAASSSASSPASVGDPCGGAICGGPDHRLRLWRLFQTLDVNRDGGLCVNDLAVGLRRLGLHRTEGELQKIVQAGDKDLDGQLDFEEFVHYLQDHEKKLRLVFKSLDKKNDGRIDAQEIMQSLRDLGVKISEQQAEKILKRIRTGHFWGPVTYMDKNGTMTIDWNEWRDYHLLHPVENIPEIILYWKHSTIFDVGENLTVPDEFTVEERQTGMWWRHLVAGGGAGAVSRTCTAPLDRLKVLMQVHASRSNNMGIVGGFTQMIREGGARSLWRGNGINVLKIAPESAIKFMAYEQIKRLVGSDQETLRIHERLVAGSLAGAIAQSSIYPMEVLKTRMALRKTGQYSGMLDCARRILAREGVAAFYKGYVPNMLGIIPYAGIDLAVYETLKNAWLQHYAVNSADPGVFVLLACGTMSSTCGQLASYPLALVRTRMQAQASIEGAPEVTMSSLFKHILRTEGAFGLYRGLAPNFMKVIPAVSISYVVYENLKITLGVQSR

SEQ ID NO: 271139 - DNA, 1548 bp, Artificial Sequence
  derived and/or modified sequence
atggtgagcagcgtgctgtgcagatgcgtggccagccccccccccgacgccgccgccaccgccgccagcagcagcgccagcagccccgccagcgtgggcgacccctgcggcggcgccatctgcggcggccccgaccacagactgagactgtggagactgttccagaccctggacgtgaacagagacggcggcctgtgcgtgaacgacctggccgtgggcctgagaagactgggcctgcacagaaccgagggcgagctgcagaagatcgtgcaggccggcgacaaggacctggacggccagctggacttcgaggagttcgtgcactacctgcaggaccacgagaagaagctgagactggtgttcaagagcctggacaagaagaacgacggcagaatcgacgcccaggagatcatgcagagcctgagagacctgggcgtgaagatcagcgagcagcaggccgagaagatcctgaagagaatcagaaccggccacttctggggccccgtgacctacatggacaagaacggcaccatgaccatcgactggaacgagtggagagactaccacctgctgcaccccgtggagaacatccccgagatcatcctgtactggaagcacagcaccatcttcgacgtgggcgagaacctgaccgtgcccgacgagttcaccgtggaggagagacagaccggcatgtggtggagacacctggtggccggcggcggcgccggcgccgtgagcagaacctgcaccgcccccctggacagactgaaggtgctgatgcaggtgcacgccagcagaagcaacaacatgggcatcgtgggcggcttcacccagatgatcagagagggcggcgccagaagcctgtggagaggcaacggcatcaacgtgctgaagatcgcccccgagagcgccatcaagttcatggcctacgagcagatcaagagactggtgggcagcgaccaggagaccctgagaatccacgagagactggtggccggcagcctggccggcgccatcgcccagagcagcatctaccccatggaggtgctgaagaccagaatggccctgagaaagaccggccagtacagcggcatgctggactgcgccagaagaatcctggccagagagggcgtggccgccttctacaagggctacgtgcccaacatgctgggcatcatcccctacgccggcatcgacctggccgtgtacgagaccctgaagaacgcctggctgcagcactacgccgtgaacagcgccgaccccggcgtgttcgtgctgctggcctgcggcaccatgagcagcacctgcggccagctggccagctaccccctggccctggtgagaaccagaatgcaggcccaggccagcatcgagggcgcccccgaggtgaccatgagcagcctgttcaagcacatcctgagaaccgagggcgccttcggcctgtacagaggcctggcccccaacttcatgaaggtgatccccgccgtgagcatcagctacgtggtgtacgagaacctgaagatcaccctgggcgtgcagagcagatag

SEQ ID NO: 271140 - DNA, 1548 bp, Artificial Sequence
  derived and/or modified sequence
atggtgagctcagtgctgtgcagatgcgtcgccagccccccacccgacgccgcggcaactgccgcctcctcttcggcatccagtccagcctctgtgggggatccttgtgggggcgccatctgcggaggccccgatcataggctgagactgtggcgccttttccagaccttggacgtcaatcgagatggcgggttgtgtgtcaatgatctcgcagtcggattgaggcgactgggactgcacaggacggaaggggaactgcaaaaaatcgttcaagcaggcgataaggatctggatggacaacttgactttgaagagtttgttcactacctgcaggatcacgagaaaaaactcaggctggtgtttaagtctttggataagaaaaacgacggtagaatagacgctcaagaaattatgcaatccttgcgcgaccttggtgtcaagatcagtgagcagcaggccgagaagatcttaaaacggattaggactggacatttctggggacctgttacgtacatggacaagaatggaacaatgactatcgattggaatgagtggcgtgactaccatctcttgcatccggtggagaacattccagaaattatcctttattggaagcactcaaccatttttgacgttggtgagaatctcactgttcctgatgaattcactgtggaggagaggcagacggggatgtggtggagacatctggtggcaggtggcggcgcaggagccgtaagtagaacgtgcaccgcgcccctggacaggttaaaggtcctgatgcaggtgcacgcctcacggtcaaacaatatggggattgtcggcggcttcacccagatgatcagggaagggggggccaggagtctgtggaggggcaacggaattaacgtactcaagatagcccccgagtccgctatcaaattcatggcctacgagcagatcaagcggttggtgggctctgaccaagaaaccctgaggatccatgagcggcttgttgcagggagtctggccggcgccattgcccagtcaagcatttacccgatggaggtactcaaaaccaggatggctctgcgaaagacggggcagtacagcgggatgcttgattgcgcgcgccggatcctcgctagagaaggcgtggccgctttttacaagggctacgtgcccaacatgcttggaatcattccatacgctgggattgacttagctgtctacgagaccctgaaaaacgcctggctgcaacactacgcagtgaactccgcagaccctggagtcttcgtcctgctagcctgcggtacaatgagctctacgtgcgggcagctagcctcctatcccctggccctcgtgaggactaggatgcaagctcaagcttcaatcgaaggggccccagaagtgactatgtcaagtttgtttaaacacattctgcggactgagggagcctttggcctttatcgtggcctggcacctaatttcatgaaagtgatcccagcggtgagtatctcatatgtggtttatgagaacctgaaaattaccctcggagttcagagtagatag

SEQ ID NO: 271141 - DNA, 1548 bp, Artificial Sequence
  derived and/or modified sequence
atggtgtcctctgtgctgtgccgctgtgtggccagccccccaccagatgctgctgccacagctgccagcagcagcgccagcagccctgcctctgtgggggacccctgtggcggggccatctgtggcggccctgaccaccggctgcggctgtggaggctcttccagaccctggatgtgaacagagatggcggcctgtgtgtgaatgacctggccgtgggcctgcggcggctgggcctgcacaggacagaaggagagctgcagaagatcgtgcaggccggggacaaggacctggatggccagctggactttgaggagtttgtgcactacctgcaggaccacgagaagaagctgcggctggtgttcaagagcctggacaagaagaatgatggaagaattgatgcccaggagatcatgcagagcctgcgggacctgggcgtgaagatcagcgagcagcaggccgagaagatcctgaagaggatcagaacaggccacttctggggccctgtgacctacatggacaagaatggcaccatgaccatcgactggaatgagtggagggactaccacctgctgcaccctgtggagaacatccctgagatcatcctgtactggaagcacagcaccatctttgatgtgggggagaacctgactgtgcctgatgagttcaccgtggaggagcggcagacaggcatgtggtggaggcacctggtggccggcggcggggccggggctgtgtccaggacctgcacagcccccctggaccggctgaaggtgctgatgcaggtgcacgccagccgcagcaacaacatgggcatcgtgggcggcttcacccagatgatccgggagggcggggcccggagcctgtggagaggaaatggcatcaacgtgctgaagatcgcccctgagagcgccatcaagttcatggcctatgagcagatcaagaggctggtgggcagtgaccaggagaccctgcgcatccacgagcggctggtggccggcagcctggccggggccatcgcccagagcagcatctaccccatggaggtgctgaagaccaggatggccctgaggaagacaggccagtacagcggcatgctggactgtgcccggcgcatcctggcccgggagggcgtggccgccttctacaagggctacgtgcccaacatgctgggcatcatcccctatgccggcatcgacctggccgtgtatgagaccctgaagaatgcctggctgcagcactatgctgtgaacagcgctgaccccggggtgtttgtgctgctggcctgtggcaccatgagcagcacctgtggccagctggccagctaccccctggccctggtgaggaccaggatgcaggcccaggccagcattgaaggagcccctgaggtgaccatgagcagcctcttcaagcacatcctgaggacagaaggagccttcggcctgtaccggggcctggcccccaacttcatgaaggtgatcccagctgtgtccatctcctatgtggtgtatgagaacctgaagatcaccctgggcgtgcagagcaggtag

SEQ ID NO: 271142 - DNA, 1548 bp, Artificial Sequence
  derived and/or modified sequence
atggtgagcagcgtgctgtgccggtgcgtggccagccccccccccgacgccgcagcgacagcggcctcctcatcagcatctagtcccgcaagcgtcggagatccttgtggcggggctatctgcgggggccctgatcatagattgagattgtggaggctgttccagactctggacgtgaacagggacggcggcctctgtgtgaatgatctagctgtaggtttaagacggctgggactgcaccgaaccgaaggcgagcttcaaaagatcgttcaggcaggtgacaaggacctggacgggcaattggatttcgaggagttcgtgcattatctgcaggatcacgagaaaaagctgagattggtttttaagagcctcgataaaaaaaatgacggacgcatcgacgcccaagaaatcatgcaaagtctgcgcgacctgggagtgaagattagtgaacaacaggcagaaaagatactgaaaagaattagaactggccacttttggggacccgtcacttacatggacaaaaacggcactatgaccatagattggaacgagtggcgagattatcatctgttgcaccccgtggagaacattccagagattatcctctattggaaacactccaccatttttgatgttggggagaacctgactgtaccagacgagtttacagtggaagagcgtcaaaccggtatgtggtggagacacctagtcgctgggggaggcgcaggcgccgtatcccgcacatgtaccgcacccctcgatcgcctgaaggttctcatgcaggttcatgcctctcggagcaataatatggggatcgttggcggctttacccaaatgattcgcgagggaggtgcgcgctctctgtggaggggcaatggtataaatgtccttaagatagcccctgagagcgcaatcaagttcatggcttatgagcagatcaagagactggtgggatctgatcaggaaactctgagaattcatgagagactggtggctggatcgcttgcgggagctatcgctcagagcagtatatatccgatggaggtcctcaaaacgagaatggctctaagaaaaactgggcagtactctggaatgctggattgcgccaggcggatcttggctcgagagggtgtggcagcgttttacaaaggatatgtccctaatatgctgggcataatcccctatgctgggatcgatctggcagtgtatgagacgctgaagaacgcttggctgcaacactacgcagtcaactcggccgaccccggcgttttcgtgcttttggcctgtggaacaatgtcatccacatgcggtcagctcgctagctacccgttggccttagtgagaactaggatgcaggcacaggcttcaatcgagggcgctcctgaggtaacaatgtcatcattatttaagcacattctccggactgagggagcctttgggctctatcgcggactggcacccaactttatgaaagtgatccccgcagttagcatttcatacgtggtatacgagaatctcaaaatcactctgggagtccaaagtagatag

SEQ ID NO: 271143 - DNA, 1548 bp, Artificial Sequence
  derived and/or modified sequence
atggtaagcagcgtgctgtgtcgatgtgtggcatctcctccacctgatgccgctgccactgctgcctcaagcagcgcgtcttctcctgccagcgtcggtgatccgtgcggcggagctatctgtggcggaccagatcaccggctgcggctctggagactgttccagaccctcgacgtgaaccgggacggtggcttgtgcgttaacgaccttgctgtaggactgaggcgtttagggttgcatcgcactgagggcgaactgcagaagatcgtgcaggcaggagacaaagatctggacggtcagctggattttgaagaatttgtccactatctccaggaccacgaaaagaaactccgcctggtgttcaagtccttagataaaaaaaacgacggcagaattgacgctcaagaaataatgcagtcactgagggacttgggcgtgaagatctccgagcagcaggccgagaagatcctcaagaggatacgtaccgggcacttctggggtccagtgacttatatggataagaacggcaccatgaccatcgactggaacgagtggcgcgattatcacctccttcaccccgtggagaatattccagaaattatactgtactggaaacacagcacaatttttgatgtcggagagaacttgacggtgcctgatgagttcacggtggaggagaggcagaccgggatgtggtggcgccatctggttgccggtggcggtgccggtgctgtttcccgtacgtgtaccgccccacttgaccgcctcaaggtgctcatgcaggtgcatgcaagccggtccaacaacatgggcatcgtcgggggttttacccaaatgatacgggaggggggagccagaagcctgtggcgcggaaatggcattaacgtgctcaagatcgcaccagagtcagccatcaagttcatggcctacgaacagattaagagactggtaggctccgatcaggaaacactacgtattcacgagcgtctggtggcgggaagtttagccggagctattgcacagagcagtatctaccccatggaagtattgaagacacgcatggcgctaagaaaaactggacagtactccgggatgctggactgcgcgaggcggatcctggcaagagaaggcgtagccgcattttataagggttatgtacctaacatgctggggatcatcccttatgccggaatcgacttagcggtttatgaaacactgaaaaatgcttggctgcagcactacgctgtgaactcagcggatcccggtgtgtttgtgctcctggcgtgcggtaccatgagcagcacttgcggccaactggcctcgtaccccctggcattagtcaggacgcgcatgcaggctcaagcctccatcgagggtgccccagaggtgacaatgtcctccctgtttaaacatattctgaggaccgaaggtgctttcgggttgtacagagggctagctcctaattttatgaaggtgatcccggctgtgtccatttcttacgtggtgtacgaaaacttgaaaatcacactcggagttcagtcccgctag

SEQ ID NO: 271144 - DNA, 3376 bp, Artificial Sequence
  derived and/or modified sequence
gcgcccggagcccctgcctcgcgcccgatggtgagcagtgtgttgtgccgctgtgtggcctccccgccgccggacgccgccgccaccgccgcctcttcgtctgcctcatcgccggcgtccgtgggggacccctgcggcggcgctatctgcgggggcccggaccaccggctgcgcctgtggagactctttcagacgctcgacgtcaaccgggacggcggcctgtgtgtcaacgacctggcggtggggctgcggcgcctgggactgcaccgcaccgagggcgagctccagaaaattgtacaagctggagataaggaccttgatgggcagctagactttgaagaatttgtccattatctccaagatcatgagaagaagctgaggctggtgtttaagagtttggacaaaaagaatgatggacgcattgacgcgcaggagatcatgcagtccctgcgggacttgggagtcaagatatctgaacagcaggcagaaaaaattctcaagagaatacgaacgggccatttctggggccctgtcacctacatggataaaaacggcacgatgaccattgactggaacgagtggagagactaccacctcctccaccccgtggaaaacatccccgagatcatcctctactggaagcattccacgatctttgatgtgggtgagaatctaacggtcccggatgagttcacagtggaggagaggcagacggggatgtggtggagacacctggtggcaggaggtggggcaggggccgtatccagaacctgcacggcccccctggacaggctcaaggtgctcatgcaggtccatgcctcccgcagcaacaacatgggcatcgttggtggcttcactcagatgattcgagaaggaggggccaggtcactctggcggggcaatggcatcaacgtcctcaaaattgcccccgaatcagccatcaaattcatggcctatgagcagatcaagcgccttgttggtagtgaccaggagactctgaggattcacgagaggcttgtggcagggtccttggcaggggccatcgcccagagcagcatctacccaatggaggtcctgaagacccggatggcgctgcggaagacaggccagtactcaggaatgctggactgcgccaggaggatcctggccagagagggggtggccgccttctacaaaggctatgtccccaacatgctgggcatcatcccctatgccggcatcgaccttgcagtctacgagacgctcaagaatgcctggctgcagcactatgcagtgaacagcgcggaccccggcgtgtttgtgctcctggcctgtggcaccatgtccagtacctgtggccagctggccagctaccccctggccctagtcaggacccggatgcaggcgcaagcctctattgagggcgctccggaggtgaccatgagcagcctcttcaaacatatcctgcggaccgagggggccttcgggctgtacagggggctggcccccaacttcatgaaggtcatcccagctgtgagcatcagctacgtggtctacgagaacctgaagatcaccctgggcgtgcagtcgcggtgacggggggagggccgcccggcagtggactcgctgatcctgggccgcagcctggggtgtgcagccatctcattctgtgaatgtgccaacactaagctgtctcgagccaagctgtgaaaaccctagacgcacccgcagggagggtggggagagctggcaggcccagggcttgtcctgctgaccccagcagaccctcctgttggttccagcgaagaccacaggcattccttagggtccagggtcagcaggctccgggctcacatgtgtaaggacaggacattttctgcagtgcctgccaatagcgagcttggagcctggaggccggcttagttcttccatttcacccttgcagccagctgttggccacggcccctgccctctggtctgccgtgcatctccctgtgccctcttgctgcctgcctgtctgctgaggtaaggtgggaggagggctacagcccacatcccaccccctcgtccaatcccataatccatgatgaaaggtgaggtcacgtggcctcccaggcctgacttcccaacctacagcattgacgccaacttggctgtgaaggaagaggaaaggatctggccttgtggtcactggcatctgagccctgctgatggctggggctctcgggcatgcttgggagtgcagggggctcgggctgcctggcctggctgcacagaaggcaagtgctggggctcatggtgctctgagctggcctggaccctgtcaggatgggccccacctcagaaccaaactcactgtccccactgtggcatgagggcagtggagcaccatgtttgagggcgaagggcagagcgtttgtgtgttctggggagggaaggaaaaggtgttggaggccttaattatggactgttgggaaaagggttttgtccagaaggacaagccggacaaatgagcgacttctgtgcttccagaggaagacgagggagcaggagcttggctgactgctcagagtctgttctgacgccctgggggttcctgtccaaccccagcaggggcgcagcgggaccagccccacattccacttgtgtcactgcttggaacctatttattttgtatttatttgaacagagttatgtcctaactatttttatagatttgtttaattaatagcttgtcattttcaagttcattttttattcatatttatgttcatggttgattgtaccttcccaagcccgcccagtgggatgggaggaggaggagaaggggggccttgggccgctgcagtcacatctgtccagagaaattccttttgggactggaggcagaaaagcggccagaaggcagcagccctggctcctttcctttggcaggttggggaagggcttgcccccagccttaggatttcagggtttgactgggggcgtggagagagagggaggaacctcaataaccttgaaggtggaatccagttatttcctgcgctgcgagggtttctttatttcactcttttctgaatgtcaaggcagtgaggtgcctctcactgtgaatttgtggtgggcgggggctggaggagagggtgggggactggctccgtccctcccagccttctgctgcccttgcttaacaatgccggccaactggcgacctcacggttgcacttccattccaccagaatgacctgatgaggaaatcttcaataggatgcaaagatcaatgcaaaaattgttatatatgaacatataactggagtcgtcaaaaagcaaattaagaaagaattggacgttagaagttgtcatttaaagcagccttctaataaagttgtttcaaagctga

SEQ ID NO: 271145 - DNA, 1101 bp, Artificial Sequence
  derived and/or modified sequence
atgcagagcctgagagacctgggcgtgaagatcagcgagcagcaggccgagaagatcctgaagagcatggacaagaacggcaccatgaccatcgactggaacgagtggagagactaccacctgctgcaccccgtggagaacatccccgagatcatcctgtactggaagcacagcaccatcttcgacgtgggcgagaacctgaccgtgcccgacgagttcaccgtggaggagagacagaccggcatgtggtggagacacctggtggccggcggcggcgccggcgccgtgagcagaacctgcaccgcccccctggacagactgaaggtgctgatgcaggtgcacgccagcagaagcaacaacatgggcatcgtgggcggcttcacccagatgatcagagagggcggcgccagaagcctgtggagaggcaacggcatcaacgtgctgaagatcgcccccgagagcgccatcaagttcatggcctacgagcagatcaagagactggtgggcagcgaccaggagaccctgagaatccacgagagactggtggccggcagcctggccggcgccatcgcccagagcagcatctaccccatggaggtgctgaagaccagaatggccctgagaaagaccggccagtacagcggcatgctggactgcgccagaagaatcctggccagagagggcgtggccgccttctacaagggctacgtgcccaacatgctgggcatcatcccctacgccggcatcgacctggccgtgtacgagaccctgaagaacgcctggctgcagcactacgccgtgaacagcgccgaccccggcgtgttcgtgctgctggcctgcggcaccatgagcagcacctgcggccagctggccagctaccccctggccctggtgagaaccagaatgcaggcccaggccagcatcgagggcgcccccgaggtgaccatgagcagcctgttcaagcacatcctgagaaccgagggcgccttcggcctgtacagaggcctggcccccaacttcatgaaggtgatccccgccgtgagcatcagctacgtggtgtacgagaacctgaagatcaccctgggcgtgcagagcagatag

SEQ ID NO: 271146 - DNA, 1101 bp, Artificial Sequence
  derived and/or modified sequence
atgcagtccctcagggatttgggagtgaagattagcgagcagcaggccgaaaaaatcctgaagtctatggacaagaacggcactatgacgatagattggaatgaatggagagactatcatctactgcatcctgtagaaaatatccctgagatcattctgtattggaaacactctacaattttcgatgtgggagagaacctgactgttccggacgaatttactgtggaagagcggcaaacagggatgtggtggaggcacctcgtagcgggcggaggagccggagccgtgtcacggacctgcactgcaccgctcgacagactgaaggtattaatgcaggttcatgctagccgcagcaataatatggggattgttggcgggttcactcaaatgataagagaaggcggtgctaggtccctatggaggggaaacggcatcaacgtactaaagatcgctcctgagtctgctatcaagtttatggcatacgagcagattaaacgactcgtgggctctgatcaagagacactccggatccatgagcggcttgtcgccggctctttagctggcgccatcgcccagtcaagtatttatcccatggaggtacttaaaacgagaatggccctgagaaaaacaggacaatattcaggcatgctggattgcgcacggagaatattggctcgcgagggagtcgcagccttttacaaggggtacgtacctaacatgttggggattataccctacgcgggcattgatctcgccgtgtatgagaccctgaagaatgcttggctccagcactatgctgtgaactcagcagaccccggggtgttcgtgctgctggcctgtggtactatgtcttccacatgcgggcagctcgcctcttaccctcttgccctcgtgaggacacggatgcaggctcaggccagcatagagggggcgcccgaagtaaccatgagctccctctttaaacacatcctcaggactgaaggcgcgtttggcctgtatcgaggacttgcacccaatttcatgaaggtgatccccgccgtgtccatcagctacgtcgtgtatgaaaatttaaaaattaccttgggagtccagtcccggtag

SEQ ID NO: 271147 - DNA, 1101 bp, Artificial Sequence
  derived and/or modified sequence
atgcagagcctgcgggacctgggcgtgaagatcagcgagcagcaggccgagaagatcctgaagtccatggacaagaatggcaccatgaccatcgactggaatgagtggagggactaccacctgctgcaccctgtggagaacatccctgagatcatcctgtactggaagcacagcaccatctttgatgtgggggagaacctgactgtgcctgatgagttcaccgtggaggagcggcagacaggcatgtggtggaggcacctggtggccggcggcggggccggggctgtgtccaggacctgcacagcccccctggaccggctgaaggtgctgatgcaggtgcacgccagccgcagcaacaacatgggcatcgtgggcggcttcacccagatgatccgggagggcggggcccggagcctgtggagaggaaatggcatcaacgtgctgaagatcgcccctgagagcgccatcaagttcatggcctatgagcagatcaagaggctggtgggcagtgaccaggagaccctgcgcatccacgagcggctggtggccggcagcctggccggggccatcgcccagagcagcatctaccccatggaggtgctgaagaccaggatggccctgaggaagacaggccagtacagcggcatgctggactgtgcccggcgcatcctggcccgggagggcgtggccgccttctacaagggctacgtgcccaacatgctgggcatcatcccctatgccggcatcgacctggccgtgtatgagaccctgaagaatgcctggctgcagcactatgctgtgaacagcgctgaccccggggtgtttgtgctgctggcctgtggcaccatgagcagcacctgtggccagctggccagctaccccctggccctggtgaggaccaggatgcaggcccaggccagcattgagggcgcccctgaggtgaccatgagcagcctcttcaagcacatcctgaggacagagggcgccttcggcctgtaccggggcctggcccccaacttcatgaaggtgatcccagctgtgtccatctcctatgtggtgtatgagaacctgaagatcaccctgggcgtgcagagcaggtag

SEQ ID NO: 271148 - DNA, 1101 bp, Artificial Sequence
  derived and/or modified sequence
atgcagagcctgcgggacctgggcgtgaagatcagcgagcagcaggccgagaaaatcttgaagtcaatggataagaacggaacaatgacaatcgattggaatgagtggcgcgattatcacctgctccaccccgtggaaaacatcccagaaattattttgtattggaagcatagtacaatcttcgacgttggcgagaacttgaccgtcccggatgagtttacagtggaggagaggcagacgggcatgtggtggcgccatcttgtagctggagggggggcaggggccgttagtcgaacatgcactgccccacttgatagactgaaggttctcatgcaagtgcacgcttctagatcaaataatatgggcattgttgggggctttactcagatgatccgtgagggcggcgccaggtcattgtggaggggcaatggtattaatgtcttgaagattgccccggaatcagcgattaagtttatggcatacgaacagatcaagcggttagtcggatccgatcaggaaactctacgcatccatgagcggctggtggctggaagtcttgcaggcgctatcgcacagtcgagcatttaccccatggaagtactgaaaacaagaatggctctgaggaagactggccagtattcgggcatgcttgattgtgccaggaggatcctagcccgggaaggagtcgccgctttctacaagggctacgtcccgaacatgctgggcatcataccgtatgctggcattgacctggctgtctatgaaacgctgaagaatgcctggctccaacactatgccgtaaactctgctgatcccggcgtatttgttctgctcgcgtgcgggaccatgagctcaacatgcgggcagctcgcatcctacccactggcccttgttaggaccagaatgcaggcgcaggcctcaatcgagggcgcccccgaagtaacaatgtcttctcttttcaagcacattctgaggacagaaggggccttcggcctgtacagaggccttgcacccaacttcatgaaagtaattcctgccgtctcaatcagctacgtggtctatgagaatcttaagattacattaggtgtgcaatcacgatag

SEQ ID NO: 271149 - DNA, 1101 bp, Artificial Sequence
  derived and/or modified sequence
atgcagtccctccgggacttgggcgttaagattagcgagcagcaggcagagaaaattctgaaaagcatggataagaatggcacaatgaccatcgactggaacgaatggcgagactaccacttgctacaccctgtggagaacattccggaaatcatcttatactggaagcacagtactatctttgatgtcggggagaacttgaccgttccagatgaatttaccgtggaagaaaggcaaaccggcatgtggtggcggcacctggttgcaggaggcggagccggagccgtgtctcgaacctgcaccgctccgcttgaccgccttaaagttctgatgcaggtgcatgcgtccagatccaataacatgggcatcgtggggggattcacccaaatgattagggaaggaggagcccgaagcctttggcggggaaatggcattaacgtcctgaaaatcgcgcctgaatctgccataaaattcatggcatatgagcaaattaaacgtctggtcgggagcgaccaggagacactgaggattcacgaacggttagtagctgggtctctggctggcgcaatcgctcaaagttccatttaccctatggaggtgttaaaaaccagaatggctctgcggaaaactggtcagtacagtggtatgctcgactgcgcccgtcgcatcctggccagggagggcgtggccgctttctacaaggggtacgtccccaatatgcttggaatcattccatatgctggaatcgacctggctgtctatgagactttaaagaacgcctggctgcagcattatgccgtgaacagcgcggatcccggtgtcttcgtgctgctggcgtgtggaaccatgtcctccacttgcgggcagctagcgagttatcctctcgccctcgtcaggactaggatgcaggcgcaggctagcatcgagggggctccggaggtgaccatgagcagcctttttaagcacatcctgagaactgaaggcgcattcggtctgtataggggtctggcccctaactttatgaaggtgattcccgcagtgtctatctcatacgtcgtttacgaaaatctgaaaatcactcttggagtacaatcccgatag

SEQ ID NO: 271150 - protein, 333 aa, Artificial Sequence [sequence omitted]

SEQ ID NO: 271151 - protein, 39 aa, Artificial Sequence
  derived and/or modified sequence
MNPTLILAAFCLGIASATLTFDHSLEAQWTKWKAMHNRL

SEQ ID NO: 271152 - DNA, 1002 bp, Artificial Sequence
  derived and/or modified sequence
atgaacccaactctgattctggccgctttttgtctgggcatcgcttcggcaactttaacctttgaccatagtttggaagctcagtggacaaagtggaaggccatgcataacaggctgtatggaatgaacgaagagggatggcggcgtgccgtttgggagaaaaatatgaagatgatagaactgcacaatcaggaatatagagagggtaaacactctttcaccatggcaatgaacgctttcggggatatgacctccgaagaattccgacaggtgatgaacggttttcagaatcggaaaccaagaaaaggcaaggtctttcaggaacctctgttctacgaggccccccgaagtgtggattggcgagagaagggctacgtcaccccagttaaaaaccaaggtcagtgtggcagctgttgggcctttagcgcgacaggagcccttgaaggccagatgtttaggaaaaccgggagactaatctctctgtccgagcagaacttggttgattgttctgggccccagggaaacgagggatgtaacggcgggttaatggactatgcattccagtatgtgcaagacaacggcggcctggactctgaagagtcatatccatatgaggctacagaagaaagttgtaaatacaaccccaaatactctgtggctaacgataccggctttgtcgacatccctaagcaagagaaggcgctgatgaaggcggtagctacagttgggccaattagtgtcgccatcgacgccgggcatgagagcttcttattctacaaagaggggatttattttgaacccgactgttctagcgaggatatggaccacggggtgttggtcgtcggatacgggttcgaatccacggaatctgacaataataaatactggctggtcaagaatagttggggcgaagagtggggtatggggggttatgtcaaaatggcaaaagaccggagaaatcattgcggaattgccagtgcggcttcttaccccacggtttag

SEQ ID NO: 271153 - DNA, 1002 bp, Artificial Sequence
  derived and/or modified sequence
atgaaccctaccctcattttggccgccttctgcctgggcatcgcctccgctacactcacttttgaccatagtctggaggcacagtggaccaagtggaaggcgatgcacaataggttatatggcatgaacgaggaaggatggagacgggccgtatgggagaaaaatatgaagatgatagagctccacaaccaggagtaccgagaaggcaagcattcattcaccatggctatgaatgcttttggggacatgacatctgaggaattcagacaggtaatgaatggcttccagaaccgtaaaccgaggaaaggcaaggtatttcaagagcccctgttctatgaggccccaagatccgtggactggagagagaagggttatgttacaccggtcaaaaaccaagggcagtgcggaagttgctgggccttttcggctaccggtgccctggagggccagatgttccggaaaacggggcggctgatctcactctcagagcagaatctcgtggactgctcaggcccacagggcaacgagggatgcaacggcgggctaatggattacgctttccaatacgttcaagataacggaggtttggattctgaagaatcttatccatatgaggcaacggaggaaagctgtaaatataaccccaaatacagtgtcgccaacgacacaggtttcgtcgatatcccaaaacaggaaaaggccctcatgaaggccgtggcgaccgtcggaccgatcagcgtggcaatcgacgcaggacacgagtccttcctgttctacaaggagggaatctacttcgaaccagattgtagctcagaagatatggaccatggtgttctggtggtaggttacgggtttgagtctaccgaatcggacaacaataagtactggctcgtgaagaattcctggggagaggaatggggcatggggggctacgtaaagatggctaaggaccgacggaaccattgtggaattgcgagcgcagcttcttaccctacagtctag

SEQ ID NO: 271154 - DNA, 1002 bp, Artificial Sequence
  derived and/or modified sequence
atgaaccccaccctcatcctggccgccttctgcctgggcatcgccagcgccaccctgacctttgaccacagcctggaggcccagtggaccaagtggaaggccatgcacaaccggctgtatggcatgaatgaggagggctggaggagagctgtgtgggagaagaacatgaagatgattgagctgcacaaccaggagtaccgggagggcaagcacagcttcaccatggccatgaatgccttcggggacatgaccagcgaggagttccggcaggtgatgaatggcttccagaacaggaagcccaggaagggcaaggtgttccaggagcccctcttctatgaggcccccaggtctgtggactggagggagaagggctacgtgacccctgtgaagaaccagggccagtgtggcagctgctgggccttcagcgccaccggggccctggagggccagatgttcaggaagacaggccgcctcatcagcctgtctgagcagaacctggtggactgcagcggcccccagggcaatgaaggctgcaatggaggcctgatggactatgccttccagtatgtgcaggacaatggaggcctggacagcgaggagagctacccctatgaggccacagaggagagctgcaagtacaaccccaagtacagcgtggccaatgacaccggctttgtggacatccccaagcaggagaaggccctgatgaaggctgtggccaccgtgggccccatctctgtggccattgatgctggccacgagagcttcctgttctacaaggagggcatctactttgagccagactgcagcagcgaggacatggaccacggcgtgctggtggtgggctacggctttgagagcacagaaagtgacaacaacaagtactggctggtgaagaacagctggggcgaggagtggggcatgggcggctacgtgaagatggccaaggacagaagaaaccactgcggcatcgccagcgctgccagctaccccaccgtgtag

SEQ ID NO: 271155 - DNA, 1002 bp, Artificial Sequence
  derived and/or modified sequence
atgaaccccaccctgatcctggccgccttctgcctgggcatcgccagcgccacactcacatttgatcactcgcttgaggcccagtggaccaaatggaaagcaatgcacaaccggctatatgggatgaacgaggaggggtggcgcagggcagtctgggaaaaaaacatgaagatgattgaactgcacaaccaggagtatcgagagggcaaacacagctttaccatggccatgaatgccttcggggacatgaccagcgaggaatttcggcaggtgatgaatgggttccaaaacaggaagccccgaaaagggaaggtttttcaagagccgctgttttatgaagctccccggtccgtcgattggagagaaaagggttatgttaccccggttaagaatcaggggcagtgtggcagctgttgggcgttcagcgccacaggggctctggagggccagatgttcaggaagacagggcggctcatatcactgagcgaacagaacctagttgactgctctggtccgcaggggaacgaaggttgcaatgggggtctgatggactatgcgtttcaatatgtgcaggataacggcggtctggatagcgaggaaagctacccatatgaagctacagaagagtcatgcaaatacaatccaaagtactcggtcgctaacgacactggattcgtggatatcccaaaacaggaaaaggctctgatgaaagccgtggccacagtcggtcccattagtgtggctatcgatgctggtcacgaaagtttcttgttctacaaggaagggatctactttgaaccagattgttcatccgaagacatggaccacggcgtgctggttgttggatatggcttcgaatcgactgaaagcgataacaataaatattggctggtcaaaaattcctggggagaggagtggggcatgggtggatacgttaaaatggctaaagaccgccggaatcactgcggcatcgcgagcgcggccagctacccaaccgtgtag

SEQ ID NO: 271156 - DNA, 1002 bp, Artificial Sequence
  derived and/or modified sequence
atgaaccccaccctgatcctggccgccttctgcctgggcatcgccagtgcgacactgacattcgatcactctctcgaagctcaatggaccaagtggaaggccatgcacaaccggctgtatgggatgaacgaggaaggctggaggagggcggtgtgggaaaaaaatatgaagatgatcgagctgcacaaccaggagtaccgggaaggaaagcacagttttacaatggcgatgaacgcttttggagatatgactagcgaggagttccggcaggtcatgaatgggtttcagaatagaaagccacgcaagggaaaggtgttccaagagcctctgttctatgaagctcccagatccgtcgattggagagagaagggatatgtcacaccagtgaagaaccaaggacagtgcggatcctgttgggctttcagtgccacaggtgcattggagggacagatgttcaggaagacgggaagactgattagtttaagtgaacagaatctcgtcgactgcagcggcccacaagggaacgagggttgcaatgggggactgatggactacgcctttcagtacgttcaggataatggaggccttgattccgaggaatcatacccctatgaggccacagaggaatcatgcaagtacaacccaaagtattcggtggcaaatgacactggatttgtagacatccccaaacaggagaaggctttaatgaaggctgtcgcaactgtgggacccatatcagttgcgattgacgccggtcatgaaagctttctattctataaggagggcatctacttcgaacccgactgttcaagtgaggacatggatcacggcgtcctcgtggttggctacggatttgaatctaccgaaagtgataataacaaatactggctcgtaaagaattcatggggcgaggaatggggaatgggtgggtacgttaagatggctaaagaccggcgtaatcactgcggaatcgcaagtgccgcaagctacccgaccgtgtag

SEQ ID NO: 271157 - DNA, 1002 bp, Artificial Sequence
  derived and/or modified sequence
atgaatcctacgctgattctcgccgctttttgccttggcatcgcctccgcaaccctgacgttcgatcactcgctggaggcgcagtggaccaaatggaaagccatgcataatcgactctacggaatgaatgaggaaggatggaggagggctgtgtgggagaagaatatgaagatgattgaacttcacaatcaggaatacagagagggaaagcatagtttcacaatggcaatgaatgcctttggcgacatgacatcagaggagtttagacaggtaatgaacggtttccaaaatagaaagccgagaaaaggaaaagtgtttcaggaaccactcttttatgaagcgccacgctctgtcgactggagagaaaagggttacgtgactcctgtgaaaaatcagggccagtgtggctcttgctgggccttcagtgctaccggggctctcgaagggcagatgttccgaaagacaggcagactgatctctctttccgaacaaaacctggtcgattgttcaggtccacagggaaacgagggttgtaatggcggacttatggattatgcttttcagtatgtgcaagataatggcggattggactcagaagaatcttatccttacgaggctacagaggaaagttgtaaatataaccctaagtattctgtagccaacgatactggatttgtcgacatcccgaagcaagagaaggcactcatgaaggctgtggccactgttggacccattagtgtcgctattgatgccggacacgaaagctttttgttctacaaagagggaatctatttcgagccagactgcagttccgaggatatggatcacggcgtgctcgtggtcgggtacggattcgagagtactgagtcagacaataacaagtactggctggtaaaaaacagctggggcgaagaatggggaatgggcggatatgtcaagatggctaaggacagacgcaatcactgtggcattgcgtctgcagctagctatcccacagtatag

SEQ ID NO: 271158 - DNA, 1002 bp, Artificial Sequence
  derived and/or modified sequence
atgaatccaacattaatccttgctgcattttgcctgggtatcgcctctgccacactgaccttcgaccactcacttgaagcccagtggaccaagtggaaggcaatgcacaacagactgtatggtatgaacgaggagggctggaggagagcagtgtgggaaaagaacatgaaaatgattgagcttcataaccaggaataccgggagggcaagcactcctttaccatggctatgaacgcctttggcgatatgacatctgaggagtttcgacaggtgatgaatggcttccagaatcggaagccaagaaagggaaaggtgttccaggagccactgttctacgaggccccaagatccgtagactggcgtgaaaaggggtatgtcacgcccgtcaaaaaccaggggcagtgcggctcttgctgggctttctcagcaacaggggctcttgaagggcagatgtttcgcaagaccgggaggctaatcagcctcagtgagcaaaatttggttgactgcagcgggcctcagggaaatgagggctgcaatgggggactaatggactatgcctttcagtatgttcaggataatgggggtctggattcggaggagtcttatccatacgaggcaactgaggagtcatgcaaatacaacccaaagtacagcgtggctaatgacacaggatttgtggatattcctaagcaagagaaggcattgatgaaggctgtcgccacagtgggccctatctccgtggctattgatgctggccacgagtctttcctgttttacaaagaagggatatacttcgagccagactgttcttcagaggatatggaccatggcgtgttggtggtgggctatgggtttgaatccacagaaagtgacaataacaagtactggcttgtgaaaaattcctggggagaggaatggggaatggggggttacgtcaagatggccaaggaccgcaggaatcattgcgggatcgctagcgctgccagctaccctactgtatag

SEQ ID NO: 271159 - DNA, 1002 bp, Artificial Sequence
  derived and/or modified sequence
atgaaccctactctgattctagccgctttctgtcttggcatagcttctgcaacactgacgttcgaccacagtcttgaggcccaatggactaaatggaaggctatgcataacaggctctatggaatgaacgaggaagggtggcgccgcgccgtttgggagaagaacatgaagatgatcgaacttcacaaccaggaatacagagagggaaagcactcttttactatggcaatgaacgcatttggggatatgacaagcgaggaattccgacaggtgatgaacggcttccagaacagaaaaccccgcaagggaaaggtgtttcaggaacctttgttctacgaagcccctcgatcagtagactggcgcgaaaaaggttacgtcacacccgtgaagaatcaggggcagtgtgggtcttgttgggcttttagcgccacaggcgccctggaaggccagatgtttaggaaaactggaagactgatttcacttagtgagcaaaatctcgtggattgctccggcccacaggggaatgaaggctgtaacgggggcctgatggactacgcttttcaatatgtccaagacaatggggggcttgattccgaggaatcatacccctatgaagctactgaggagtcctgtaagtacaaccctaagtattccgttgctaacgacaccggctttgtggacatccctaagcaagaaaaggcattaatgaaagctgtggcaactgttggcccaatatccgtggccatcgacgctggccacgaatcttttctattctacaaggaagggatctacttcgagccagactgttcaagtgaagacatggatcacggtgtgctggtcgtggggtatggatttgagtccaccgagtccgataataataagtattggttggtcaagaactcctggggagaggagtggggcatgggggggtacgtgaaaatggcgaaggataggcggaatcattgtggcatagcatcagcagcctcctacccaacggtctag

SEQ ID NO: 271160 - DNA, 1002 bp, Artificial Sequence
  derived and/or modified sequence
atgaatccgaccctcatcctcgcagccttttgtttaggtatcgcaagcgccaccctaacctttgaccactctctagaggcacagtggacgaaatggaaagctatgcataacaggttatatggaatgaacgaggaaggttggcgccgcgcggtgtgggagaagaatatgaagatgatcgagctgcacaatcaggagtacagggaaggcaagcactcctttacaatggcaatgaatgcatttggagatatgacttccgaagaattccgccaggtcatgaacggatttcaaaaccgcaaaccccgaaaaggcaaggttttccaggagccacttttttacgaagctcctagatctgttgattggcgcgagaaaggctacgtgaccccagtaaaaaaccagggacagtgtggaagttgttgggcattttccgccacgggagctctcgaaggacaaatgtttagaaagactggccgcttaatttctttaagtgaacaaaacctcgtcgattgctccggtcctcagggcaatgaaggatgcaatggtggactcatggactatgcatttcagtacgtccaggacaatgggggactcgacagcgaggagagctatccatatgaggccaccgaagagtcatgtaaatataatcctaaatacagcgtggctaacgacaccggattcgttgacattccaaaacaggagaaagccctcatgaaggctgtggccactgtgggcccaatcagcgtcgcaatagatgctgggcatgaatcttttctcttctacaaggaaggcatttatttcgaacctgactgcagctccgaggacatggatcatggcgtgttggtagtcgggtatgggtttgagtcaacagagtctgacaacaacaaatattggttggttaaaaactcatggggggaggagtggggtatggggggctatgtgaaaatggccaaagatagaaggaaccattgtgggatcgctagcgcggcctcgtacccaactgtttag

SEQ ID NO: 271161 - DNA, 1002 bp, Artificial Sequence
  derived and/or modified sequence
atgaatccaactctgatcctggctgctttttgcttaggaatcgcctccgctacactcaccttcgatcacagcttggaagcacagtggactaaatggaaagcaatgcacaatagactctatgggatgaacgaagaaggctggaggagagctgtctgggagaaaaacatgaaaatgatcgagcttcacaaccaagaatacagggaaggtaagcacagtttcactatggcaatgaacgcttttggcgatatgactagcgaggaatttcggcaggttatgaacggattccagaacaggaagcccaggaagggcaaggtgttccaagagccactgttttacgaagcacctagaagcgtggactggagagagaaaggttacgttacaccagtgaagaatcaaggacagtgcggcagttgttgggcattttctgctactggcgccctcgaagggcagatgtttagaaaaactggtcgattaatcagtttgagcgaacaaaacctggttgattgcagcggacctcagggcaatgaaggatgtaatggaggacttatggactatgccttccagtatgtgcaagataacgggggcttagattctgaggagtcttatccttacgaggccacagaagaaagttgcaagtacaatccaaagtatagtgtagcaaatgacaccgggtttgtggatatcccaaaacaggaaaaggcattaatgaaagcggtggcaacggtcgggccaatatctgtagccatagacgccgggcacgaatcattcctcttttataaggaaggcatctatttcgaacctgattgttcatccgaagatatggatcacggtgtccttgtggtggggtacggctttgagagcacggagtcggataacaataaatactggctagttaaaaatagctggggagaggagtgggggatgggagggtacgtgaaaatggccaaagataggaggaaccattgtggcatcgccagtgcagcaagttatccaactgtttag

SEQ ID NO: 271162 - DNA, 1002 bp, Artificial Sequence
  derived and/or modified sequence
atgaaccctactctgatactcgccgccttttgcttagggattgccagcgctacactcacctttgaccactctctcgaagcacagtggactaagtggaaagcaatgcacaatagactgtatgggatgaatgaagagggatggcgtcgggctgtctgggagaaaaacatgaagatgatcgagcttcacaaccaggaatatagagagggcaagcatagctttactatggctatgaacgcattcggcgatatgaccagcgaagaattcagacaggttatgaacggtttccagaatcgcaagcccaggaaggggaaggtgttccaggaaccccttttttatgaggcacctagaagcgtggactggagggaaaaaggctatgtgaccccagttaaaaatcaggggcaatgcgggtcatgttgggcattctccgcaactggggcgctcgaggggcaaatgtttcgcaaaaccgggcgcttaatctcactctctgagcaaaaccttgtagattgctcgggacctcaggggaatgaagggtgcaacggcggactgatggactacgcctttcagtatgtgcaggataacgggggactcgacagcgaggagtcctacccatatgaggctactgaagaaagctgcaagtataacccaaaatatagcgtggccaatgacacaggcttcgttgatatccccaagcaggaaaaagcgctaatgaaggccgtggctactgttggacctatctctgttgccattgatgctggtcacgaaagcttcctattttacaaagaggggatctactttgaacccgattgttcttctgaagacatggatcacggtgtcctggtggtcgggtacgggttcgagagcaccgagagcgacaacaataaatattggttggtgaagaatagttggggtgaagaatggggcatgggtggatatgttaagatggcaaaggaccgaaggaatcattgcggcatagcttctgcagcaagctatcctactgtgtag

SEQ ID NO: 271163 - DNA, 1436 bp, Artificial Sequence
  derived and/or modified sequence
aagctgggccagaaccgcgacctccgcaaccttgagcggcatccgtggagtgcgcctgcgcagctacgaccgcagcaggaaagcgccgccggccaggcccagctgtggccggacagggactggaagagaggacgcggtcgagtaggttttaaaacatgaatcctacactcatccttgctgccttttgcctgggaattgcctcagctactctaacatttgatcacagtttagaggcacagtggaccaagtggaaggcgatgcacaacagattatacggcatgaatgaagaaggatggaggagagcagtgtgggagaagaacatgaagatgattgaactgcacaatcaggaatacagggaagggaaacacagcttcacaatggccatgaacgcctttggagacatgaccagtgaagaattcaggcaggtgatgaatggctttcaaaaccgtaagcccaggaaggggaaagtgttccaggaacctctgttttatgaggcccccagatctgtggattggagagagaaaggctacgtgactcctgtgaagaatcagggtcagtgtggttcttgttgggcttttagtgctactggtgctcttgaaggacagatgttccggaaaactgggaggcttatctcactgagtgagcagaatctggtagactgctctgggcctcaaggcaatgaaggctgcaatggtggcctaatggattatgctttccagtatgttcaggataatggaggcctggactctgaggaatcctatccatatgaggcaacagaagaatcctgtaagtacaatcccaagtattctgttgctaatgacaccggctttgtggacatccctaagcaggagaaggccctgatgaaggcagttgcaactgtggggcccatttctgttgctattgatgcaggtcatgagtccttcctgttctataaagaaggcatttattttgagccagactgtagcagtgaagacatggatcatggtgtgctggtggttggctacggatttgaaagcacagaatcagataacaataaatattggctggtgaagaacagctggggtgaagaatggggcatgggtggctacgtaaagatggccaaagaccggagaaaccattgtggaattgcctcagcagccagctaccccactgtgtgagctggtggacggtgatgaggaaggacttgactggggatggcgcatgcatgggaggaattcatcttcagtctaccagcccccgctgtgtcggatacacactcgaatcattgaagatccgagtgtgatttgaattctgtgatattttcacactggtaaatgttacctctattttaattactgctataaataggtttatattattgattcacttactgactttgcattttcgtttttaaaaggatgtataaatttttacctgtttaaataaaatttaatttc

SEQ ID NO: 271164 - DNA, 2177 bp, Artificial Sequence
  derived and/or modified sequence
agccagtctcctccctcctagggtctggtcttgacgatagcatctcgtgttttggggatgcctttccttaccagattcttctaaagcccagctgcacccacccttaagtgggagataaggcttctgcccgcgggctctgcgttcgtccacccggccccacgtttgctgtggactaaacaggagccactggactagagtacacttgactctcggctctgcggaccaaaaattccaggactaaggaatagcaaggttaggctgaaacagtccacacagggcttgcggtaaacgtcttttcaggagccactcgcccagtgcagtaagtcgtgtacttagttgactcgagcgctccagggagacgcccgaccctactctgcgccgccccggggcaccagctctgcttcctccaggtccactgaggcaggcacgcccagctctgggacagtcagtaaacaagccacgaaccgcgccagggatcagagcacccagagtccccgcccagctgccggcacagccaatcgcagcgcagccaggcggcggggcggtgccggccgaacccagacccgaggttttagaagcagagtcaggcgaagctgggccagaaccgcgacctccgcaaccttgagcggcatccgtggagtgcgcctgcgcagctacgaccgcagcaggaaagcgccgccggccaggcccagctgtggccggacagggactggaagagaggacgcggtcgagtaggtgtgcaccagccctggcaacgagagcgtctaccccgaactctgctggccttgaggtggggaagccggggagggcagttgaggaccccgcggaggcgcgtgactggttgagcgggcaggccagcctccgagccgggtggacacaggttttaaaacatgaatcctacactcatccttgctgccttttgcctgggaattgcctcagctactctaacatttgatcacagtttagaggcacagtggaccaagtggaaggcgatgcacaacagattatacggcatgaatgaagaaggatggaggagagcagtgtgggagaagaacatgaagatgattgaactgcacaatcaggaatacagggaagggaaacacagcttcacaatggccatgaacgcctttggagacatgaccagtgaagaattcaggcaggtgatgaatggctttcaaaaccgtaagcccaggaaggggaaagtgttccaggaacctctgttttatgaggcccccagatctgtggattggagagagaaaggctacgtgactcctgtgaagaatcagggtcagtgtggttcttgttgggcttttagtgctactggtgctcttgaaggacagatgttccggaaaactgggaggcttatctcactgagtgagcagaatctggtagactgctctgggcctcaaggcaatgaaggctgcaatggtggcctaatggattatgctttccagtatgttcaggataatggaggcctggactctgaggaatcctatccatatgaggcaacagaagaatcctgtaagtacaatcccaagtattctgttgctaatgacaccggctttgtggacatccctaagcaggagaaggccctgatgaaggcagttgcaactgtggggcccatttctgttgctattgatgcaggtcatgagtccttcctgttctataaagaaggcatttattttgagccagactgtagcagtgaagacatggatcatggtgtgctggtggttggctacggatttgaaagcacagaatcagataacaataaatattggctggtgaagaacagctggggtgaagaatggggcatgggtggctacgtaaagatggccaaagaccggagaaaccattgtggaattgcctcagcagccagctaccccactgtgtgagctggtggacggtgatgaggaaggacttgactggggatggcgcatgcatgggaggaattcatcttcagtctaccagcccccgctgtgtcggatacacactcgaatcattgaagatccgagtgtgatttgaattctgtgatattttcacactggtaaatgttacctctattttaattactgctataaataggtttatattattgattcacttactgactttgcattttcgtttttaaaaggatgtataaatttttacctgtttaaataaaatttaatttcaaatgt

SEQ ID NO: 271165 - DNA, 1002 bp, Artificial Sequence
  derived and/or modified sequence
atgaaccccaccctgatcctggccgccttctgcctgggcatcgccagcgccaccctgaccttcgaccacagcctggaggcccagtggaccaagtggaaggccatgcacaacagactgtacggcatgaacgaggagggctggagaagagccgtgtgggagaagaacatgaagatgatcgagctgcacaaccaggagtacagagagggcaagcacagcttcaccatggccatgaacgccttcggcgacatgaccagcgaggagttcagacaggtgatgaacggcttccagaacagaaagcccagaaagggcaaggtgttccaggagcccctgttctacgaggcccccagaagcgtggactggagagagaagggctacgtgacccccgtgaagaaccagggccagtgcggcagctgctgggccttcagcgccaccggcgccctggagggccagatgttcagaaagaccggcagactgatcagcctgagcgagcagaacctggtggactgcagcggcccccagggcaacgagggctgcaacggcggcctgatggactacgccttccagtacgtgcaggacaacggcggcctggacagcgaggagagctacccctacgaggccaccgaggagagctgcaagtacaaccccaagtacagcgtggccaacgacaccggcttcgtggacatccccaagcaggagaaggccctgatgaaggccgtggccaccgtgggccccatcagcgtggccatcgacgccggccacgagagcttcctgttctacaaggagggcatctacttcgagcccgactgcagcagcgaggacatggaccacggcgtgctggtggtgggctacggcttcgagagcaccgagagcgacaacaacaagtactggctggtgaagaacagctggggcgaggagtggggcatgggcggctacgtgaagatggccaaggacagaagaaaccactgcggcatcgccagcgccgccagctaccccaccgtgtag

SEQ ID NO: 271166 - RNA, 1002 nt, Artificial Sequence
  derived and/or modified sequence
augaacccuacucugauucuagccgcuuucugucuuggcauagcuucugcaacacugacguucgaccacagucuugaggcccaauggacuaaauggaaggcuaugcauaacaggcucuauggaaugaacgaggaaggguggcgccgcgccguuugggagaagaacaugaagaugaucgaacuucacaaccaggaauacagagagggaaagcacucuuuuacuauggcaaugaacgcauuuggggauaugacaagcgaggaauuccgacaggugaugaacggcuuccagaacagaaaaccccgcaagggaaagguguuucaggaaccuuuguucuacgaagccccucgaucaguagacuggcgcgaaaaagguuacgucacacccgugaagaaucaggggcagugugggucuuguugggcuuuuagcgccacaggcgcccuggaaggccagauguuuaggaaaacuggaagacugauuucacuuagugagcaaaaucucguggauugcuccggcccacaggggaaugaaggcuguaacgggggccugauggacuacgcuuuucaauauguccaagacaauggggggcuugauuccgaggaaucauaccccuaugaagcuacugaggaguccuguaaguacaacccuaaguauuccguugcuaacgacaccggcuuuguggacaucccuaagcaagaaaaggcauuaaugaaagcuguggcaacuguuggcccaauauccguggccaucgacgcuggccacgaaucuuuucuauucuacaaggaagggaucuacuucgagccagacuguucaagugaagacauggaucacggugugcuggucgugggguauggauuugaguccaccgaguccgauaauaauaaguauugguuggucaagaacuccuggggagaggaguggggcauggggggguacgugaaaauggcgaaggauaggcggaaucauuguggcauagcaucagcagccuccuacccaacggucuag

SEQ ID NO: 271167 - RNA, 1002 nt, Artificial Sequence
  derived and/or modified sequence
augaauccgacccucauccucgcagccuuuuguuuagguaucgcaagcgccacccuaaccuuugaccacucucuagaggcacaguggacgaaauggaaagcuaugcauaacagguuauauggaaugaacgaggaagguuggcgccgcgcggugugggagaagaauaugaagaugaucgagcugcacaaucaggaguacagggaaggcaagcacuccuuuacaauggcaaugaaugcauuuggagauaugacuuccgaagaauuccgccaggucaugaacggauuucaaaaccgcaaaccccgaaaaggcaagguuuuccaggagccacuuuuuuacgaagcuccuagaucuguugauuggcgcgagaaaggcuacgugaccccaguaaaaaaccagggacaguguggaaguuguugggcauuuuccgccacgggagcucucgaaggacaaauguuuagaaagacuggccgcuuaauuucuuuaagugaacaaaaccucgucgauugcuccgguccucagggcaaugaaggaugcaaugguggacucauggacuaugcauuucaguacguccaggacaaugggggacucgacagcgaggagagcuauccauaugaggccaccgaagagucauguaaauauaauccuaaauacagcguggcuaacgacaccggauucguugacauuccaaaacaggagaaagcccucaugaaggcuguggccacugugggcccaaucagcgucgcaauagaugcugggcaugaaucuuuucucuucuacaaggaaggcauuuauuucgaaccugacugcagcuccgaggacauggaucauggcguguugguagucggguauggguuugagucaacagagucugacaacaacaaauauugguugguuaaaaacucauggggggaggagugggguauggggggcuaugugaaaauggccaaagauagaaggaaccauugugggaucgcuagcgcggccucguacccaacuguuuag

SEQ ID NO: 271168 - RNA, 1002 nt, Artificial Sequence
  derived and/or modified sequence
augaauccaacucugauccuggcugcuuuuugcuuaggaaucgccuccgcuacacucaccuucgaucacagcuuggaagcacaguggacuaaauggaaagcaaugcacaauagacucuaugggaugaacgaagaaggcuggaggagagcugucugggagaaaaacaugaaaaugaucgagcuucacaaccaagaauacagggaagguaagcacaguuucacuauggcaaugaacgcuuuuggcgauaugacuagcgaggaauuucggcagguuaugaacggauuccagaacaggaagcccaggaagggcaagguguuccaagagccacuguuuuacgaagcaccuagaagcguggacuggagagagaaagguuacguuacaccagugaagaaucaaggacagugcggcaguuguugggcauuuucugcuacuggcgcccucgaagggcagauguuuagaaaaacuggucgauuaaucaguuugagcgaacaaaaccugguugauugcagcggaccucagggcaaugaaggauguaauggaggacuuauggacuaugccuuccaguaugugcaagauaacgggggcuuagauucugaggagucuuauccuuacgaggccacagaagaaaguugcaaguacaauccaaaguauaguguagcaaaugacaccggguuuguggauaucccaaaacaggaaaaggcauuaaugaaagcgguggcaacggucgggccaauaucuguagccauagacgccgggcacgaaucauuccucuuuuauaaggaaggcaucuauuucgaaccugauuguucauccgaagauauggaucacgguguccuuguggugggguacggcuuugagagcacggagucggauaacaauaaauacuggcuaguuaaaaauagcuggggagaggagugggggaugggaggguacgugaaaauggccaaagauaggaggaaccauuguggcaucgccagugcagcaaguuauccaacuguuuag

SEQ ID NO: 271169 - RNA, 1002 nt, Artificial Sequence
  derived and/or modified sequence
augaacccuacucugauacucgccgccuuuugcuuagggauugccagcgcuacacucaccuuugaccacucucucgaagcacaguggacuaaguggaaagcaaugcacaauagacuguaugggaugaaugaagagggauggcgucgggcugucugggagaaaaacaugaagaugaucgagcuucacaaccaggaauauagagagggcaagcauagcuuuacuauggcuaugaacgcauucggcgauaugaccagcgaagaauucagacagguuaugaacgguuuccagaaucgcaagcccaggaaggggaagguguuccaggaaccccuuuuuuaugaggcaccuagaagcguggacuggagggaaaaaggcuaugugaccccaguuaaaaaucaggggcaaugcgggucauguugggcauucuccgcaacuggggcgcucgaggggcaaauguuucgcaaaaccgggcgcuuaaucucacucucugagcaaaaccuuguagauugcucgggaccucaggggaaugaagggugcaacggcggacugauggacuacgccuuucaguaugugcaggauaacgggggacucgacagcgaggaguccuacccauaugaggcuacugaagaaagcugcaaguauaacccaaaauauagcguggccaaugacacaggcuucguugauauccccaagcaggaaaaagcgcuaaugaaggccguggcuacuguuggaccuaucucuguugccauugaugcuggucacgaaagcuuccuauuuuacaaagaggggaucuacuuugaacccgauuguucuucugaagacauggaucacgguguccugguggucggguacggguucgagagcaccgagagcgacaacaauaaauauugguuggugaagaauaguuggggugaagaauggggcauggguggauauguuaagauggcaaaggaccgaaggaaucauugcggcauagcuucugcagcaagcuauccuacuguguag

SEQ ID NO: 271170 - protein, 1189 aa, Artificial Sequence
  derived and/or modified sequence
MSAGGSARKSTGRSSYYYRLLRRPRLQRQRSRSRSRTRPARESPQERPGSRRSLPGSLSEKSPSMEPSAATPFRVTGFLSRRLKGSIKRTKSQPKLDRNHSFRHILPGFRSAAAAAADNERSHLMPRLKESRSHESLLSPSSAVEALDLSMEEEVVIKPVHSSILGQDYCFEVTTSSGSKCFSCRSAAERDKWMENLRRAVHPNKDNSRRVEHILKLWVIEAKDLPAKKKYLCELCLDDVLYARTTGKLKTDNVFWGEHFEFHNLPPLRTVTVHLYRETDKKKKKERNSYLGLVSLPAASVAGRQFVEKWYPVVTPNPKGGKGPGPMIRIKARYQTITILPMEMYKEFAEHITNHYLGLCAALEPILSAKTKEEMASALVHILQSTGKVKDFLTDLMMSEVDRCGDNEHLIFRENTLATKAIEEYLKLVGQKYLQDALGEFIKALYESDENCEVDPSKCSAADLPEHQGNLKMCCELAFCKIINSYCVFPRELKEVFASWRQECSSRGRPDISERLISASLFLRFLCPAIMSPSLFNLLQEYPDDRTARTLTLIAKVTQNLANFAKFGSKEEYMSFMNQFLEHEWTNMQRFLLEISNPETLSNTAGFEGYIDLGRELSSLHSLLWEAVSQLEQSIVSKLGPLPRILRDVHTALSTPGSGQLPGTNDLASTPGSGSSSISAGLQKMVIENDLSGLIDFTRLPSPTPENKDLFFVTRSSGVQPSPARSSSYSEANEPDLQMANGGKSLSMVDLQDARTLDGEAGSPAGPDVLPTDGQAAAAQLVAGWPARATPVNLAGLATVRRAGQTPTTPGTSEGAPGRPQLLAPLSFQNPVYQMAAGLPLSPRGLGDSGSEGHSSLSSHSNSEELAAAAKLGSFSTAAEELARRPGELARRQMSLTEKGGQPTVPRQNSAGPQRRIDQPPPPPPPPPPAPRGRTPPNLLSTLQYPRPSSGTLASASPDWVGPSTRLRQQSSSSKGDSPELKPRAVHKQGPSPVSPNALDRTAAWLLTMNAQLLEDEGLGPDPPHRDRLRSKDELSQAEKDLAVLQDKLRISTKKLEEYETLFKCQEETTQKLVLEYQARLEEGEERLRRQQEDKDIQMKGIISRLMSVEEELKKDHAEMQAAVDSKQKIIDAQEKRIASLDAANARLMSALTQLKERYSMQARNGISPTNPTKLQITENGEFRNSSNC

SEQ ID NO: 271171 - protein, 229 aa, Artificial Sequence
  derived and/or modified sequence
MPRLKESRSHESLLSPSSAVEALDLSMEEEVVIKPVHSSILGQDYCFEVTTSSGSKCFSCRSAAERDKWMENLRRAVHPNKDNSRRVEHILKLWVIEAKDLPAKKKYLCELCLDDVLYARTTGKLKTDNVFWGEHFEFHNLPPLRTVTVHLYRETDKKKKKERNSYLGLVSLPAASVAGRQFVEKWYPVVTPNPKGGKGPGPMIRIKARYQTITILPMEMYKEFAEHIT

SEQ ID NO: 271172 - DNA, 3570 bp, Artificial Sequence
  derived and/or modified sequence
atgagcgccggcggcagcgccagaaagagcaccggcagaagcagctactactacagactgctgagaagacccagactgcagagacagagaagcagaagcagaagcagaaccagacccgccagagagagcccccaggagagacccggcagcagaagaagcctgcccggcagcctgagcgagaagagccccagcatggagcccagcgccgccacccccttcagagtgaccggcttcctgagcagaagactgaagggcagcatcaagagaaccaagagccagcccaagctggacagaaaccacagcttcagacacatcctgcccggcttcagaagcgccgccgccgccgccgccgacaacgagagaagccacctgatgcccagactgaaggagagcagaagccacgagagcctgctgagccccagcagcgccgtggaggccctggacctgagcatggaggaggaggtggtgatcaagcccgtgcacagcagcatcctgggccaggactactgcttcgaggtgaccaccagcagcggcagcaagtgcttcagctgcagaagcgccgccgagagagacaagtggatggagaacctgagaagagccgtgcaccccaacaaggacaacagcagaagagtggagcacatcctgaagctgtgggtgatcgaggccaaggacctgcccgccaagaagaagtacctgtgcgagctgtgcctggacgacgtgctgtacgccagaaccaccggcaagctgaagaccgacaacgtgttctggggcgagcacttcgagttccacaacctgccccccctgagaaccgtgaccgtgcacctgtacagagagaccgacaagaagaagaagaaggagagaaacagctacctgggcctggtgagcctgcccgccgccagcgtggccggcagacagttcgtggagaagtggtaccccgtggtgacccccaaccccaagggcggcaagggccccggccccatgatcagaatcaaggccagataccagaccatcaccatcctgcccatggagatgtacaaggagttcgccgagcacatcaccaaccactacctgggcctgtgcgccgccctggagcccatcctgagcgccaagaccaaggaggagatggccagcgccctggtgcacatcctgcagagcaccggcaaggtgaaggacttcctgaccgacctgatgatgagcgaggtggacagatgcggcgacaacgagcacctgatcttcagagagaacaccctggccaccaaggccatcgaggagtacctgaagctggtgggccagaagtacctgcaggacgccctgggcgagttcatcaaggccctgtacgagagcgacgagaactgcgaggtggaccccagcaagtgcagcgccgccgacctgcccgagcaccagggcaacctgaagatgtgctgcgagctggccttctgcaagatcatcaacagctactgcgtgttccccagagagctgaaggaggtgttcgccagctggagacaggagtgcagcagcagaggcagacccgacatcagcgagagactgatcagcgccagcctgttcctgagattcctgtgccccgccatcatgagccccagcctgttcaacctgctgcaggagtaccccgacgacagaaccgccagaaccctgaccctgatcgccaaggtgacccagaacctggccaacttcgccaagttcggcagcaaggaggagtacatgagcttcatgaaccagttcctggagcacgagtggaccaacatgcagagattcctgctggagatcagcaaccccgagaccctgagcaacaccgccggcttcgagggctacatcgacctgggcagagagctgagcagcctgcacagcctgctgtgggaggccgtgagccagctggagcagagcatcgtgagcaagctgggccccctgcccagaatcctgagagacgtgcacaccgccctgagcacccccggcagcggccagctgcccggcaccaacgacctggccagcacccccggcagcggcagcagcagcatcagcgccggcctgcagaagatggtgatcgagaacgacctgagcggcctgatcgacttcaccagactgcccagccccacccccgagaacaaggacctgttcttcgtgaccagaagcagcggcgtgcagcccagccccgccagaagcagcagctacagcgaggccaacgagcccgacctgcagatggccaacggcggcaagagcctgagcatggtggacctgcaggacgccagaaccctggacggcgaggccggcagccccgccggccccgacgtgctgcccaccgacggccaggccgccgccgcccagctggtggccggctggcccgccagagccacccccgtgaacctggccggcctggccaccgtgagaagagccggccagacccccaccacccccggcaccagcgagggcgcccccggcagaccccagctgctggcccccctgagcttccagaaccccgtgtaccagatggccgccggcctgcccctgagccccagaggcctgggcgacagcggcagcgagggccacagcagcctgagcagccacagcaacagcgaggagctggccgccgccgccaagctgggcagcttcagcaccgccgccgaggagctggccagaagacccggcgagctggccagaagacagatgagcctgaccgagaagggcggccagcccaccgtgcccagacagaacagcgccggcccccagagaagaatcgaccagccccccccccccccccccccccccccccccgcccccagaggcagaaccccccccaacctgctgagcaccctgcagtaccccagacccagcagcggcaccctggccagcgccagccccgactgggtgggccccagcaccagactgagacagcagagcagcagcagcaagggcgacagccccgagctgaagcccagagccgtgcacaagcagggccccagccccgtgagccccaacgccctggacagaaccgccgcctggctgctgaccatgaacgcccagctgctggaggacgagggcctgggccccgaccccccccacagagacagactgagaagcaaggacgagctgagccaggccgagaaggacctggccgtgctgcaggacaagctgagaatcagcaccaagaagctggaggagtacgagaccctgttcaagtgccaggaggagaccacccagaagctggtgctggagtaccaggccagactggaggagggcgaggagagactgagaagacagcaggaggacaaggacatccagatgaagggcatcatcagcagactgatgagcgtggaggaggagctgaagaaggaccacgccgagatgcaggccgccgtggacagcaagcagaagatcatcgacgcccaggagaagagaatcgccagcctggacgccgccaacgccagactgatgagcgccctgacccagctgaaggagagatacagcatgcaggccagaaacggcatcagccccaccaaccccaccaagctgcagatcaccgagaacggcgagttcagaaacagcagcaactgctag

SEQ ID NO: 271173 - DNA, 3570 bp, Artificial Sequence
  derived and/or modified sequence
atgtctgctggcggaagcgcgagaaaaagcacaggccggtccagttattattaccgcctgctgcgtagacctcgcctccagaggcaaaggtctcgttcccggtccagaacaaggcccgctagagagagccctcaggagcgacccggcagccgaagaagtttgcctggttctctgagtgaaaaatcaccatctatggaaccctccgcggccaccccttttcgcgtgactgggttcctttccagaaggctaaaaggaagcattaaaaggacaaagagtcaaccaaagctcgatcgcaatcattcgtttagacacattcttccaggatttaggtcagcagctgccgcggccgctgacaatgaacggagtcatctaatgccgagactcaaggagagtaggtcccacgaaagtctgttatccccttccagcgccgtagaggcgctggacttatcgatggaggaggaagtcgtgattaaacctgttcacagttccatactggggcaggattactgttttgaggtgaccactagttcaggatccaaatgcttttcatgtagatccgctgccgaacgcgataagtggatggagaacttacgacgcgcagtccacccgaataaggacaacagtcggcgggtagaacacatattaaagctctgggtgattgaggctaaggacctgcccgccaagaagaagtacctatgtgagctttgtctcgacgacgtgctgtacgcaaggaccacaggtaagctgaagacagacaatgtgttctggggggagcattttgagttccacaatctgccaccactgaggaccgtcactgtacacctgtaccgagaaacggacaagaagaaaaagaaggagcggaacagctaccttgggctggtctcccttcccgccgcatccgtggcaggtagacagtttgtggaaaaatggtacccggtggtcacccccaacccaaaaggggggaagggccctggccctatgatcagaattaaagcacggtaccagacaattacaatactccctatggaaatgtataaggaattcgcggaacatattactaaccattatctgggcctctgcgccgcgctcgaacccatactttccgcaaagactaaagaagagatggcctccgccttagttcacatcctgcagtcaaccggcaaggtcaaggatttcctgacagacctgatgatgagcgaagtagatcgctgcggtgataacgagcatctcatcttcagggaaaacactctggctaccaaagccattgaggagtacctcaaactcgtagggcaaaagtatctacaagacgcactgggagaattcataaaggccctttacgagagcgacgagaactgcgaagtggatcccagcaaatgcagtgcagcggatttgcctgagcaccagggaaatctcaagatgtgctgcgagctggctttttgcaagatcatcaatagttactgcgtattccctcgggaattaaaagaggtgttcgccagttggcggcaggaatgttctagccgcggaaggccagacatttccgaaaggctgatctcagcgtccctctttctgcggtttctgtgcccagccatcatgtctccctcgttgttcaatctgctgcaggaatatcccgacgacaggacagcgagaacgttaacactcatcgcgaaagttacacagaatctcgcaaactttgccaaatttggcagcaaggaagagtacatgtccttcatgaatcagtttctagaacacgagtggactaacatgcagcggttcctgctcgagattagcaatcctgagacactgtcaaatacagccggattcgaggggtacattgatttaggccgggaactgagtagcctacatagtctcctgtgggaagcagtgtcccaactggagcagtctattgtgtcaaagcttggacccctacccagaattctgcgagatgtacacacggcgctgagtacccccggatccggccagctgcctggtacgaatgacctcgccagtacccccggttccggctcatcctcaatatccgctggcttacagaagatggtgatagaaaacgacctatctggactcatcgattttaccaggctcccctcccccacacctgagaataaagatctgttcttcgtgactaggtcatctggcgtgcagccctccccagctcggtcttcttcttatagtgaagctaatgagcccgatctccagatggccaacggtggcaagagcctctccatggtggatcttcaggatgcccgcactttggatggcgaggccggcagtccagctggccctgacgttctgcctaccgacgggcaggcagcggcagcccagctggtggctggatggccagcccgagcaacaccagtaaatttggccgggctggctacagtgcggcgcgcgggccagacaccaaccaccccaggcacctctgagggagccccagggagaccgcagctactggcccccctgtcttttcaaaaccccgtttatcaaatggccgctggtctgccgctgagcccaaggggcttaggggactccggctcagaggggcactcgtctctgagtagtcactcaaacagcgaagagctggcggccgccgcaaagctgggcagcttcagtacagctgctgaggaactcgcccggaggcccggggagctggccagaagacagatgagcctgacggaaaagggtgggcagcctactgtaccccgccagaattctgctgggccccagaggcgaattgaccagccccctccgccacctccaccgcctcctccagcgccccgcggacgcaccccacccaacctgctgagcaccctgcaatatcctagaccttcttcggggacgctcgcgtcagcttctccggactgggtcggccccagtaccagactgcgtcaacagtcgagttcaagtaagggcgactcccccgagttgaagcctcgagctgtgcacaaacaggggcctagtcccgtgtccccaaatgcgcttgatagaacggccgcctggttgctcacgatgaatgcccagctactagaggacgagggactgggtcctgatccaccacaccgggacagattgagaagcaaggatgagctcagtcaggctgagaaagacctcgccgtgcttcaggacaagttgaggatatctactaagaaactggaggaatacgaaacattgtttaaatgtcaggaagagactactcagaaacttgtactggaatatcaagcgcggttggaggagggggaagaacggctgcggcgccagcaggaggacaaggatatccaaatgaagggcatcattagtcgtctaatgtcagtggaagaggagcttaagaaggaccacgccgagatgcaggctgccgtcgactcaaagcagaagatcatcgacgctcaggagaaacgcatcgcctccctcgatgcagccaacgcccggttgatgtccgctctgactcagttgaaagagcggtactccatgcaggccaggaatggcatctctccaacaaatcccactaagcttcaaattactgaaaatggagaattcaggaatagcagtaattgctag

SEQ ID NO: 271174 - DNA, 3570 bp, Artificial Sequence
  derived and/or modified sequence
atgtctgctgggggcagcgccaggaagagcacaggccgcagcagctactactaccgcctgctgcggcggccccggctgcagaggcagaggagccgcagccgcagcaggaccaggcctgcccgggagagcccccaggagcggcccggcagcagaagaagcctgcccggcagcctgtctgagaagagccccagcatggagcccagcgctgccacccccttccgggtgacaggcttcctgagccggcggctgaagggcagcatcaagaggaccaagagccagcccaagctggacaggaaccacagcttccgccacatcctgcccggcttccgctctgctgctgctgctgctgctgacaatgaaagaagccacctgatgccccggctgaaggagagccgcagccatgagagcctgctgagccccagcagcgctgtggaggccctggacctgtccatggaggaggaggtggtgatcaagcctgtgcacagcagcatcctgggccaggactactgctttgaggtgaccaccagcagcggcagcaagtgcttcagctgccgctctgctgctgagcgggacaagtggatggagaacctgcggcgggctgtgcaccccaacaaggacaacagcagaagagtggagcacatcctgaagctgtgggtgattgaggccaaggacctgcctgccaagaagaagtacctgtgtgagctgtgcctggatgatgtgctgtatgcccggaccaccgggaagctgaagacagacaacgtgttctggggcgagcactttgagttccacaacctgccccccctgaggacagtgacagtgcacctgtaccgggagacagacaagaagaagaagaaggagagaaattcctacctgggcctggtgtccctgcctgctgcctctgtggccggccggcagtttgtggagaagtggtaccctgtggtgacccccaaccccaagggcggcaagggccctggccccatgatccgcatcaaggcccgctaccagaccatcaccatcctgcccatggagatgtacaaggagtttgctgagcacatcaccaaccactacctgggcctgtgtgccgccctggagcccatcctgagcgccaagaccaaggaggagatggccagcgccctggtgcacatcctgcagagcacaggcaaggtgaaggacttcctgacagacctgatgatgtctgaggtggacagatgtggggacaatgagcacctgatcttccgggagaacaccctggccaccaaggccatcgaggagtacctgaagctggtgggccagaagtacctgcaggatgccctgggggagttcatcaaggccctgtatgaaagtgatgagaactgtgaggtggaccccagcaagtgcagcgctgctgacctgcctgagcaccagggcaacctgaagatgtgctgtgagctggccttctgcaagatcatcaacagctactgtgtgttcccccgggagctgaaggaggtgtttgcctcctggaggcaggagtgcagcagccggggccgcccagacatcagcgagcggctcatcagcgccagcctcttcctgcgcttcctgtgcccagccatcatgagccccagcctcttcaacctgctgcaggagtacccagatgacagaacagcccggaccctgaccctcatcgccaaggtgacccagaacctggccaactttgccaagtttggcagcaaggaggagtacatgtccttcatgaaccagttcctggagcacgagtggaccaacatgcagcgcttcctgctggagatcagcaaccctgagaccctgagcaacacagctggctttgagggctacatcgacctgggccgggagctgagcagcctgcacagcctgctgtgggaggccgtgtcccagctggagcagagcatcgtgtccaagctgggccccctgccccgcatcctgagagatgtgcacacagccctgagcaccccaggcagcggccagctgcccggcaccaatgacctggccagcaccccaggcagcggcagcagcagcatctctgctggcctgcagaagatggtgattgaaaatgacctgagcggcctgattgacttcacccggctgcccagccccaccccagagaacaaggacctcttctttgtgaccaggagcagtggagtgcagcccagccctgcccggagcagcagctacagcgaggccaatgaaccagacctgcagatggccaatggaggcaagagcctgtccatggtggacctgcaggatgcccggaccctggatggagaggccggcagccctgctggcccagatgtgctgcccacagatggccaggccgccgccgcccagctggtggccggctggccagcccgggccacccctgtgaacctggccggcctggccaccgtgagaagagctggccagacccccaccaccccaggcaccagcgagggcgcccctggccggccccagctgctggcccccctgtccttccagaaccctgtgtaccagatggctgctggcctgcccctgagcccccggggcctgggggacagcggcagcgagggccacagcagcctgagcagccacagcaacagcgaggagctggccgctgctgccaagctgggcagcttcagcacagctgctgaggagctggcccggcggcctggagagctggcccggcggcagatgagcctgacagagaagggcggccagcccaccgtgccccggcagaacagcgctggcccccagaggagaattgaccagcccccacctcctcctcctcctcctcctccagccccccggggccgcaccccacccaacctgctgagcaccctgcagtacccccggcccagcagcggcaccctggccagcgccagcccagactgggtgggccccagcacccggctgcggcagcagagcagcagcagcaaaggagacagccctgagctgaagcccagggctgtgcacaagcagggccccagccctgtgagccccaatgccctggacagaacagctgcctggctgctgaccatgaatgcccagctgctggaggatgagggcctgggccctgaccccccccaccgggaccggctgcggagcaaggatgagctgagccaggccgagaaggacctggccgtgctgcaggacaagctgcgcatcagcaccaagaagctggaggagtatgagaccctcttcaagtgccaggaggagaccacccagaagctggtgctggagtaccaggcccggctggaggagggggaggagcggctgcggcggcagcaggaggacaaggacatccagatgaagggcatcatcagccggctgatgtctgtggaggaggagctgaagaaggaccacgccgagatgcaggccgctgtggacagcaagcagaagatcattgatgcccaggagaagagaattgccagcctggatgctgccaatgcccggctgatgtctgccctgacccagctgaaggagcgctacagcatgcaggccagaaatggcatcagccccaccaaccccaccaagctgcagatcacagaaaatggagagttcaggaacagcagcaactgctag

SEQ ID NO: 271175 - DNA, 3570 bp, Artificial Sequence
  derived and/or modified sequence
atgagcgccggcggcagcgcccggaagagcaccggccggagcagctattactaccgcctactgcgcagaccgcgtctccagcggcaacgcagccggagccgttcccgcacacgcccagccagagagtctccccaggagaggccaggaagcaggagaagcctccccggaagtctgtcagaaaaatccccgagcatggaaccttccgccgcaaccccattcagagttacagggttcctctccagaaggctcaaagggtccattaagcggacgaagagccagcctaagctcgatcgaaatcattcctttcgccatattctgccagggtttcgctcagctgcggccgccgccgcagataacgagcgtagccatttgatgcctcgactaaaggaatctcggtcccacgagtcgctcctcagcccctcctcagccgtggaggcgttggatttgagcatggaagaagaggttgtgataaagccagtgcacagcagcattctgggccaagactactgctttgaggtcactaccagctccggcagtaagtgtttctcttgccgttcagcagctgagcgcgacaagtggatggagaatctgagacgtgctgtccacccaaataaagacaactcacgcagggtggaacatattctgaagttatgggtcatcgaagccaaagatctgccagcaaagaagaagtatttgtgtgaactctgcctggatgatgtgctgtacgcccgaactacaggaaagctcaagacggataacgttttctggggagagcacttcgagtttcacaacctcccgccgctccggaccgtcacagtgcatctgtatagggaaacagacaagaaaaaaaaaaaggaacggaatagctacctgggtctcgtttctctgcctgcggcgagcgtggccggacgacaattcgtggagaaatggtaccccgtggtgactccaaaccctaagggcgggaaaggccccggtcctatgatcagaatcaaggcccggtatcagactatcactattctccctatggagatgtacaaggagttcgccgagcatattaccaaccattacttgggtctatgcgccgcgcttgaaccaattttatccgctaagactaaggaagagatggcctccgctttagttcacatcctgcagagcacggggaaggtgaaagatttcctgacagacctcatgatgtccgaagttgaccggtgcggtgataatgagcacctaatttttcgcgagaacacattggctactaaagctatagaagagtacctgaagctcgtgggacaaaagtacctccaagacgcactgggcgagttcataaaagccctgtacgagagtgatgaaaactgcgaagtcgatccctctaaatgctcggcagcagatcttcctgagcaccaggggaaccttaagatgtgttgtgagctcgcattttgtaagatcattaactcctactgtgtgttcccacgcgaactgaaagaggtcttcgccagctggcggcaggagtgctcttcccgagggcggcctgatatatcagagcgactcattagcgcaagtctgtttctgagattcttatgcccagcaatcatgagcccttccctctttaatcttctgcaggagtaccccgatgacaggacagcacgcactctcaccctcattgccaaagttacacagaatctcgccaattttgccaaattcggatccaaggaggaatacatgtcttttatgaatcagttccttgagcatgaatggactaacatgcagcgcttccttctagagatctcgaaccctgaaacgttgagcaataccgctgggtttgaggggtatattgacctgggcagagagctctcgtcgcttcactccctgctttgggaggctgtgtcacaactggagcagtcaatcgtgagcaagttgggcccgctgccccgaattctgagggatgtgcataccgctctgtctacaccggggtcaggccagttacccggcaccaacgacctggcttccacaccaggcagcggatcctctagcatcagtgcaggcttgcagaaaatggtcatcgagaatgatctgtccggtctaatagatttcactagactgccaagcccaacgcccgaaaacaaggatctgttttttgtgactagaagtagtggcgtacaaccatcacctgccaggtccagctcatactccgaggcgaatgaaccagatctccagatggcaaatggaggaaaatctctgagcatggtagatctgcaggacgctcgcaccctggatggagaggccgggtccccagccggccctgatgtgcttcccaccgatgggcaggccgctgccgcacaactggttgccggctggccagccagagctactccagtgaatttggccggcctggctactgtaagaagggctggccaaaccccgaccacccctggtactagcgaaggcgctccaggtcgtccacagttgctggcccctttgtcgtttcaaaaccctgtttatcagatggcagccggactgcctctctcccctcggggactgggcgatagtggatctgaaggccattcaagcctcagctcccattccaacagcgaggaattggcagccgccgccaaattagggtcattttccacagctgctgaggaacttgcccgtagacctggcgaactggctcgcagacaaatgagcctgacagagaagggaggacagcccacagtcccccggcagaattccgctggtcctcagcgcagaatagaccaacctcctcctccccccccccccccccctccagcacctcggggacgcacgcctcctaacttgctgagtaccttgcagtaccccagaccgagtagtggtacccttgccagtgcttctcccgattgggtagggcccagtacaaggcttaggcaacaatcgagctcgagcaagggggatagcccagagctaaaaccacgggccgtgcacaaacagggtcctagtccggtctcacctaacgcactggatcggaccgctgcttggctattaaccatgaatgcacagttgttagaggacgaaggccttgggcctgaccccccgcaccgggatcgcctgagaagcaaggatgagctgtcacaagccgaaaaggatttggctgtcttacaagacaaactccgcatctccactaagaagctggaagagtatgaaactttgttcaagtgtcaagaggaaactacacagaaactggtgttagagtatcaagccagactcgaagagggagaagagaggcttcggcggcagcaggaggataaagacatacagatgaagggcatcatttcacgactgatgagcgtggaggaggaactcaagaaagaccatgcagaaatgcaagccgcagtggacagtaagcagaagatcattgacgcccaagagaaaaggattgccagcttggatgccgcgaatgccaggcttatgagcgcactgacacaactcaaagagaggtattctatgcaagcacgcaatggtattagtcctactaaccccaccaagttgcaaatcacagagaacggcgagttcagaaactccagcaattgctag

SEQ ID NO: 271176 - DNA, 3570 bp, Artificial Sequence
  derived and/or modified sequence
atgtcggcgggaggtagcgcaaggaagagtactggcagaagttcttattattatcggctactgaggcggccaagactgcagcgccagcgcagtaggtctagatcacggaccaggcctgcacgtgagtctccacaagagcgtccaggatcacgtaggagtttgcctggatccctctccgagaagtcccctagcatggagccttctgcggctacgccattccgggtgaccgggtttctgagccgtcgcctgaaaggctctatcaaaaggaccaagtcgcagcctaagctcgatagaaaccattcattcaggcatattcttccagggtttcgctctgctgccgctgccgctgcggataatgaacgatcccacttgatgcctaggctcaaagagagccggagccacgaatctttactgagtccctcttctgcagtcgaggctctggacctgtcaatggaggaggaagtggttataaagccagttcactcgagcatcctcggacaggattactgcttcgaagtcactacctcaagcggctccaagtgcttttcatgccgcagtgcggctgagcgagacaagtggatggagaacctgaggagggcagtacaccccaacaaagataattcccggagggtggaacacatcttgaaactgtgggtgattgaagctaaggatttgcccgcaaagaaaaaatacctgtgcgagctctgcctcgacgatgtgctttacgccagaaccactggtaagctcaagaccgataatgttttttggggcgaacacttcgaattccacaacctgccccctttacggaccgttacagttcacctgtatagggagacagataagaaaaagaaaaaggaacgcaattcctacttgggactggtcagcctgcctgccgcaagcgtcgccggtaggcagttcgttgagaagtggtatccggtcgtcactcctaacccaaaggggggtaaaggcccaggtcctatgatccggatcaaagccaggtaccagaccattaccattttgcccatggaaatgtataaagaatttgccgaacatatcacaaaccattacctgggcctgtgtgccgctctggaaccaatcctcagcgccaaaactaaggaagaaatggcttccgctctggtgcacattctgcagtcaaccggaaaggtgaaggacttcctgactgacctcatgatgtcagaggtggatcgctgtggtgataacgagcacctaatcttccgcgagaacacactcgctactaaagccatcgaggaatatctgaaactggtagggcagaagtatcttcaggatgcattaggggagtttattaaggctctctatgaatctgacgagaactgtgaggtggatcctagcaaatgtagtgctgcagatttgccagagcaccagggcaatctaaagatgtgctgtgagctcgcattctgcaaaataatcaattcttattgcgtgttcccacgggagctaaaagaggtctttgcgagttggagacaggaatgttcatcccgcggacgcccagatatcagcgaacgcctgatcagcgcatcgttgtttttaaggtttctatgcccagcaatcatgagtccatctctgttcaacctcttacaggagtatccagacgatcggacagccagaacactcaccctgatcgcaaaggttacccagaatttagccaatttcgccaagttcggcagtaaagaagagtacatgtctttcatgaaccagtttcttgaacatgagtggaccaacatgcagagattcctgctggagatctcaaaccccgagacgctgtccaacaccgccggatttgagggctatatagatctgggacgggaactgagtagcctacactcccttctgtgggaagctgtctcccagctcgagcagagcattgtttcgaaactcggacccctgcctcgaatcctccgggacgtgcacaccgcactttcaaccccaggaagtggccagctgcccggtactaacgatctggctagcacacctggatctgggagttccagcatctctgctggtttgcaaaaaatggttattgaaaacgatctaagcgggctgattgattttacacgactgcccagtcctacaccagagaataaggacctattcttcgttacgaggtcttccggtgtgcagccctcgccagctaggtcatctagctactcagaagctaatgagcctgatctgcagatggctaatggcggtaagtccctgagcatggtcgacttgcaggatgctaggaccctggacggtgaggccggaagtcctgcgggacccgatgttcttcctaccgatgggcaggcggcagcggcacaattggtggcagggtggcccgcaagggctacccccgtgaatctggctggattggccacagtgcgcagagccggacagaccccaacgacccccggtaccagtgaaggggcaccagggaggcctcagctgcttgcccctctgtctttccagaatcccgtctaccaaatggccgctgggctccccctgtcccctcgcggtctgggtgactcgggctcagagggacactcctccctcagctctcacagtaatagcgaagagctcgccgctgcagccaaactgggctcattttcaacagccgctgaagagctggctcgcagacctggggagcttgccagacggcagatgtcactcacagagaaaggcggtcaacctaccgtgcccaggcagaattcagctgggcctcagagacgcattgatcagcctccaccacccccaccccctcccccaccagccccaagagggcgaactccaccaaacctgctgtcaacactccagtatcccagaccctccagcggaacgttagctagtgcctcccccgattgggtcggaccctccaccagattacggcaacagtccagctcaagcaagggggacagtcccgaactcaaacctagggccgtgcacaagcaggggccaagccccgtaagccccaatgctctcgatagaacagctgcatggttgctgaccatgaacgcgcaactgctcgaggacgagggactggggcctgatcctccccatcgagatagactacgatctaaagacgagctgagtcaggccgagaaggacctggccgtcctgcaggataaactgcggattagcacaaagaagctggaagagtatgagaccctcttcaagtgccaggaggagacgacacagaaactggttctcgagtaccaagcgcgactggaagagggcgaggagcgcctgcggagacaacaggaggacaaggacatacagatgaaagggattatctccagactgatgtcagttgaggaggagctgaaaaaggatcatgcagaaatgcaggcagcggtcgatagcaagcagaaaattattgacgcgcaggagaagaggattgccagcttagatgcagctaatgcgcgactgatgagcgccctgacccaactcaaagaaagatactccatgcaggccaggaatgggatctccccgaccaacccaaccaagcttcagatcactgaaaatggggaattccgcaactcatccaactgctag

SEQ ID NO: 271177 - protein, 1065 aa, Artificial Sequence
  derived and/or modified sequence
MPRLKESRSHESLLSPSSAVEALDLSMEEEVVIKPVHSSILGQDYCFEVTTSSGSKCFSCRSAAERDKWMENLRRAVHPNKDNSRRVEHILKLWVIEAKDLPAKKKYLCELCLDDVLYARTTGKLKTDNVFWGEHFEFHNLPPLRTVTVHLYRETDKKKKKERNSYLGLVSLPAASVAGRQFVEKWYPVVTPNPKGGKGPGPMIRIKARYQTITILPMEMYKEFAEHITNHYLGLCAALEPILSAKTKEEMASALVHILQSTGKVKDFLTDLMMSEVDRCGDNEHLIFRENTLATKAIEEYLKLVGQKYLQDALGEFIKALYESDENCEVDPSKCSAADLPEHQGNLKMCCELAFCKIINSYCVFPRELKEVFASWRQECSSRGRPDISERLISASLFLRFLCPAIMSPSLFNLLQEYPDDRTARTLTLIAKVTQNLANFAKFGSKEEYMSFMNQFLEHEWTNMQRFLLEISNPETLSNTAGFEGYIDLGRELSSLHSLLWEAVSQLEQSIVSKLGPLPRILRDVHTALSTPGSGQLPGTNDLASTPGSGSSSISAGLQKMVIENDLSGLIDFTRLPSPTPENKDLFFVTRSSGVQPSPARSSSYSEANEPDLQMANGGKSLSMVDLQDARTLDGEAGSPAGPDVLPTDGQAAAAQLVAGWPARATPVNLAGLATVRRAGQTPTTPGTSEGAPGRPQLLAPLSFQNPVYQMAAGLPLSPRGLGDSGSEGHSSLSSHSNSEELAAAAKLGSFSTAAEELARRPGELARRQMSLTEKGGQPTVPRQNSAGPQRRIDQPPPPPPPPPPAPRGRTPPNLLSTLQYPRPSSGTLASASPDWVGPSTRLRQQSSSSKGDSPELKPRAVHKQGPSPVSPNALDRTAAWLLTMNAQLLEDEGLGPDPPHRDRLRSKDELSQAEKDLAVLQDKLRISTKKLEEYETLFKCQEETTQKLVLEYQARLEEGEERLRRQQEDKDIQMKGIISRLMSVEEELKKDHAEMQAAVDSKQKIIDAQEKRIASLDAANARLMSALTQLKERYSMQARNGISPTNPTKLQITENGEFRNSSNC

SEQ ID NO: 271178 - protein, 291 aa, Artificial Sequence
  derived and/or modified sequence
MEPDSLLDQDDSYESPQERPGSRRSLPGSLSEKSPSMEPSAATPFRVTGFLSRRLKGSIKRTKSQPKLDRNHSFRHILPGFRSAAAAAADNERSHLMPRLKESRSHESLLSPSSAVEALDLSMEEEVVIKPVHSSILGQDYCFEVTTSSGSKCFSCRSAAERDKWMENLRRAVHPNKDNSRRVEHILKLWVIEAKDLPAKKKYLCELCLDDVLYARTTGKLKTDNVFWGEHFEFHNLPPLRTVTVHLYRETDKKKKKERNSYLGLVSLPAASVAGRQFVEKWYPVVTPNPK

SEQ ID NO: 271179 - DNA, 3500 bp, Artificial Sequence
  derived and/or modified sequence
tgttcctcttctttcgtgttgtgtcagaagccatgatttccagtcttctcatctggaagatgaaggaaaagatagacccgaccccacagggttctgaggctcaaactgaaagcctggtggtggggcacctgtgacaggtcccatctgatgccgaggctgaaggagtctcgctcccacgagtccctgctcagccccagcagtgcggtggaggcgctggacctcagcatggaggaagaggtggtcatcaagcccgtgcacagcagcatccttggccaggactactgcttcgaggtgacgacgtcatcaggaagcaagtgcttttcctgccggtctgcagctgagcgggataagtggatggagaacctccggcgagcggtgcatcccaacaaggacaacagccggcgtgtggagcacatcctgaagctgtgggtgatcgaggccaaggacctgccagccaagaagaagtacctgtgcgagctgtgcctggacgatgtgctctatgcccgcaccacgggcaagctcaagacggacaatgttttctggggcgagcacttcgagttccacaacttgccgcctctgcgcacggtcactgtccacctgtaccgggagaccgacaagaagaagaagaaggagcgcaacagttacctgggcctggtgagcctacctgctgcctcggtggccgggcggcagttcgtggagaagtggtacccggtggtgacgcccaaccccaagggcggcaagggccctggacccatgatccgcatcaaggcgcgctaccaaaccatcaccatcctgcccatggagatgtacaaagagttcgctgagcacatcaccaaccactacctggggctgtgtgcagccctcgagcccatcctcagtgccaagaccaaggaggagatggcatctgccctggtgcacatcctgcagagcacgggcaaggtgaaggacttcctgacagacctgatgatgtcagaggtggaccgctgcggggacaacgagcacctcatcttccgggagaacacactggccaccaaggccattgaggagtacctcaagctagtgggccagaagtacctgcaggacgccctaggtgagttcatcaaagcgctgtatgagtcagatgagaactgcgaagtggatcccagcaagtgctcggccgctgacctcccagagcaccagggcaacctcaagatgtgctgcgagctggccttctgcaagatcatcaactcctactgtgtcttcccacgggagttgaaagaggtgtttgcctcgtggaggcaggagtgcagcagtcgcggccgcccggacatcagtgagcggctcatcagcgcctccctcttcctgcgcttcctctgcccagccatcatgtcgccctcactcttcaacctgctgcaggagtaccctgatgaccgcactgcccgcaccctcaccctcatcgccaaggtcacccagaacctggccaactttgccaaatttggcagcaaggaggaatacatgtccttcatgaaccagttcctagagcatgagtggaccaacatgcagcgcttcctgctggagatctccaaccccgagaccctctccaatacagccggcttcgagggctacatcgacctgggccgcgagctctccagcctgcactcactgctctgggaggccgtcagccagctggagcagagcatagtatccaaactgggacccctgcctcggatcctgagggacgtccacacagcactgagcaccccaggtagcgggcagctcccagggaccaatgacctggcctccacaccgggctctggcagcagcagcatctcagctgggctgcagaagatggtgattgagaacgatctttccggtctgatagatttcacccggttaccgtctccaacccccgaaaacaaggacttgttttttgtcacaaggtcctccggggtccagccctcacctgcccgcagctcgagttactcggaagccaacgagcctgatcttcagatggccaacggtggcaagagcctctccatggtggacctccaggacgcccgcacgctggatggggaggcaggctccccggcgggccccgacgtcctccccacagatgggcaggccgctgcagctcagctggtggccgggtggccggcccgggcaaccccagtgaacctggcagggctggccacggtgcggcgggcaggccagacaccaaccacaccaggcacctccgagggcgcgccaggccggccccagctgttggcaccgctctccttccagaaccctgtgtaccagatggcggctggcctgccgctgtcaccccgtggccttggcgactcaggctctgagggccacagctccctgagctcacacagcaacagcgaggagttggcggctgctgccaagctgggaagtttcagcactgccgcggaggagctggctcggcggcccggtgagctggcacggcgacagatgtcactgactgaaaaaggcgggcagcccacggtgccacggcagaacagtgctggcccccagaggaggatcgaccagcctccgcccccacccccgccgccacctcctgccccccgcggccggacgccccccaacctgctgagcaccctgcagtacccaagaccctcaagcggaaccctggcgtcggcctcacctgattgggtgggccccagtacccgcctgaggcagcagtcctcttcctccaagggggacagcccagaactgaagccacgggcagtgcacaagcagggcccttcacctgtgagccccaatgccctggaccgcacagccgcttggctcttgaccatgaacgcgcagttgttagaagacgagggcctgggcccagaccccccccacagggataggctaaggagtaaggacgagctcagccaagcagaaaaggacctggcggtgctgcaggacaagctgcgaatctccaccaagaagctggaggagtatgagaccctgttcaagtgccaggaggagacgacgcagaagctggtgctggagtaccaggcacggctggaggagggcgaggagcggctgcggcggcagcaggaggacaaggacatccagatgaagggcatcatcagcaggttgatgtccgtggaggaagaactgaagaaggaccacgcagagatgcaagcggctgtggactccaaacagaagatcattgatgcccaggagaagcgcattgcctcgttggatgccgccaatgcccgcctcatgagtgccctgacccagctgaaagagaggtacagcatgcaagcccgtaacggcatctcccccaccaaccccaccaaattgcagattactgagaacggcgagttcagaaacagcagcaattgttaacctgcctgaggagggaggaagctacccaaggagagggggactatggtggccaagggcagggtctcggcctggggaggcacccacggttgcagccccagcgcgggtgtcaggaggccgagcctcccctccctgccgctgtccaggaggcggccgca

SEQ ID NO: 271180 - DNA, 6784 bp, Artificial Sequence
  derived and/or modified sequence
gggagcgggagggggcaggaggcggaggaggagtttgagcgactttgtggggcagccagggcctcggcggccgctcgggcgagcgcgggagaacgcgtgggcgcccgccgggctgtccggagcggccgatggggcccgtgtgagcgcgcccaggcccggcccggtgcccggcgggcggcagcatgtccgcgggcggcagcgccaggaagagcaccgggaggtcctcctactactaccggctgctgaggcggccccggctgcagcgacagaggagccgctcccgcagccggacccggcctgccagggagtcgcctcaagaaaggccgggctctcggcgcagcctgcctggcagcctttccgagaagagccccagcatggagccctcggccgccacgccgttccgggtcacgggcttcctcagccgccgcctcaagggctccatcaagcgcaccaagagccagcccaagctggaccgcaaccacagcttccgccacatcctgccggggttccggagcgccgccgccgccgccgcggacaatgagaggtcccatctgatgccgaggctgaaggagtctcgctcccacgagtccctgctcagccccagcagtgcggtggaggcgctggacctcagcatggaggaagaggtggtcatcaagcccgtgcacagcagcatccttggccaggactactgcttcgaggtgacgacgtcatcaggaagcaagtgcttttcctgccggtctgcagctgagcgggataagtggatggagaacctccggcgagcggtgcatcccaacaaggacaacagccggcgtgtggagcacatcctgaagctgtgggtgatcgaggccaaggacctgccagccaagaagaagtacctgtgcgagctgtgcctggacgatgtgctctatgcccgcaccacgggcaagctcaagacggacaatgttttctggggcgagcacttcgagttccacaacttgccgcctctgcgcacggtcactgtccacctgtaccgggagaccgacaagaagaagaagaaggagcgcaacagttacctgggcctggtgagcctacctgctgcctcggtggccgggcggcagttcgtggagaagtggtacccggtggtgacgcccaaccccaagggcggcaagggccctggacccatgatccgcatcaaggcgcgctaccaaaccatcaccatcctgcccatggagatgtacaaagagttcgctgagcacatcaccaaccactacctggggctgtgtgcagccctcgagcccatcctcagtgccaagaccaaggaggagatggcatctgccctggtgcacatcctgcagagcacgggcaaggtgaaggacttcctgacagacctgatgatgtcagaggtggaccgctgcggggacaacgagcacctcatcttccgggagaacacactggccaccaaggccattgaggagtacctcaagctagtgggccagaagtacctgcaggacgccctaggtgagttcatcaaagcgctgtatgagtcagatgagaactgcgaagtggatcccagcaagtgctcggccgctgacctcccagagcaccagggcaacctcaagatgtgctgcgagctggccttctgcaagatcatcaactcctactgtgtcttcccacgggagttgaaagaggtgtttgcctcgtggaggcaggagtgcagcagtcgcggccgcccggacatcagtgagcggctcatcagcgcctccctcttcctgcgcttcctctgcccagccatcatgtcgccctcactcttcaacctgctgcaggagtaccctgatgaccgcactgcccgcaccctcaccctcatcgccaaggtcacccagaacctggccaactttgccaaatttggcagcaaggaggaatacatgtccttcatgaaccagttcctagagcatgagtggaccaacatgcagcgcttcctgctggagatctccaaccccgagaccctctccaatacagccggcttcgagggctacatcgacctgggccgcgagctctccagcctgcactcactgctctgggaggccgtcagccagctggagcagagcatagtatccaaactgggacccctgcctcggatcctgagggacgtccacacagcactgagcaccccaggtagcgggcagctcccagggaccaatgacctggcctccacaccgggctctggcagcagcagcatctcagctgggctgcagaagatggtgattgagaacgatctttccggtctgatagatttcacccggttaccgtctccaacccccgaaaacaaggacttgttttttgtcacaaggtcctccggggtccagccctcacctgcccgcagctcgagttactcggaagccaacgagcctgatcttcagatggccaacggtggcaagagcctctccatggtggacctccaggacgcccgcacgctggatggggaggcaggctccccggcgggccccgacgtcctccccacagatgggcaggccgctgcagctcagctggtggccgggtggccggcccgggcaaccccagtgaacctggcagggctggccacggtgcggcgggcaggccagacaccaaccacaccaggcacctccgagggcgcgccaggccggccccagctgttggcaccgctctccttccagaaccctgtgtaccagatggcggctggcctgccgctgtcaccccgtggccttggcgactcaggctctgagggccacagctccctgagctcacacagcaacagcgaggagttggcggctgctgccaagctgggaagtttcagcactgccgcggaggagctggctcggcggcccggtgagctggcacggcgacagatgtcactgactgaaaaaggcgggcagcccacggtgccacggcagaacagtgctggcccccagaggaggatcgaccagcctccgcccccacccccgccgccacctcctgccccccgcggccggacgccccccaacctgctgagcaccctgcagtacccaagaccctcaagcggaaccctggcgtcggcctcacctgattgggtgggccccagtacccgcctgaggcagcagtcctcttcctccaagggggacagcccagaactgaagccacgggcagtgcacaagcagggcccttcacctgtgagccccaatgccctggaccgcacagccgcttggctcttgaccatgaacgcgcagttgttagaagacgagggcctgggcccagaccccccccacagggataggctaaggagtaaggacgagctcagccaagcagaaaaggacctggcggtgctgcaggacaagctgcgaatctccaccaagaagctggaggagtatgagaccctgttcaagtgccaggaggagacgacgcagaagctggtgctggagtaccaggcacggctggaggagggcgaggagcggctgcggcggcagcaggaggacaaggacatccagatgaagggcatcatcagcaggttgatgtccgtggaggaagaactgaagaaggaccacgcagagatgcaagcggctgtggactccaaacagaagatcattgatgcccaggagaagcgcattgcctcgttggatgccgccaatgcccgcctcatgagtgccctgacccagctgaaagagaggtacagcatgcaagcccgtaacggcatctcccccaccaaccccaccaaattgcagattactgagaacggcgagttcagaaacagcagcaattgttaacctgcctgaggagggaggaagctacccaaggagagggggactatggtggccaagggcagggtctcggcctggggaggcacccacggttgcagccccagcgcgggtgtcaggaggccgagcctcccctccctgccgctgtccaggaggcggccgcagagggagccaccagagactgaagcagcgtgaggcgaggtcaccagccgctccctgtggggtgcgggcagaagagactgcacgctggggagtggggacagcctgatggggcagggggcctgccaaaaatatgtctgttggttcctgaatgtggtgtgtccttgtcctcctggatctggccgagtgcatgtgtccccccacacctgtgccagggagggggcttcctggaggggggattcaagggctaggggcctacacctgtggcttcccctcgcctccttggggggcccgggactccctggcagccaggccctgtcatgtgggacctggcacttggcagatcagttggcaggcaggaagataggaggacacagagcaggaggtcagtgtcccctgcctgtctccatccgaagcacctgccactgcatgcagcctgttgggaccttcctggctgtgaggaactgaggattcctacccacccaccccctctgaacctgtccccagagcaccacctgctaccttcttccctgccttagttgtattgccagatagacccagtgagggccatggctttttcttgtgagctcttgtccctgtggggaggacccacagcttcccacacctcccacacaggcccaggctgatgctctagggctcccagaagccagagatctgggcggatctggccagatggctctgagcactgtatctgccttctcctggggcccagcacacccagggcacagtggtcctgtagggagtgccacctggtgctcaccctgaaagaaaaggtgatccttcctctgagtgatggtttaaaaaaagattctaacgcctgcaggccctgagaaggtggataactgtgattttttttcctttcacagtatgcattagaaacaaaagcccgcttgctcgcttgctggaacacaggggccttttaagttgagcgtgcgcactgcatgggaaatagcggccctggaggatgttagacttgctccctctccaagacagcagcagcctgcacctgccccgtgtgtgtggccggcctcctcctcacccttcccggcccccggccaaggacccaggcgctgcatacaggggaggggcgcaccccacagctggggccggttttcctcagctctaggctgttctgtagcttatctgcccctcccccactttcaagacagatgagcaggagcttgggtctctctcggcccctgtctgttcccagcccctgcagattctgagcaaaggccctgggtaagaagggtgggagtggggcctttgccagcagagccagggcagggcgagctgcaggaatcacccctctgcccctgcagctggaatgtgccacagaggccccacctgaagggtggatgtgctggaggggtggcccagagccatactgcgtccaccctgagctcggggacaggtgacagtggctgctctgggaaggggcttttagatgtaacctacaattcagttaggctagagacagatgctggtggaggaagggctgggccaccagggatcacagaccacaggaagatgggaggtggaagcagaggccctgcccccaccccttcctgtctcactcttctgtcttgtccccacccatgcgccttcgtgcctgagaccagggtggccacacaggcagggcctggctccagtctcatcctcccattgcccagtgagccctgctcttctctccccagccccctcccaccgctgcctcgtagagtgacctcggacagagcccccctagcaatacagggaggctcccggggcctggacaggcgggctcggaggctacccgctgtggccggtgccagctgcccttgcagggtgggtgagctctcaggccgagagccttatttacctagtgcaaaaactgtaaaagtgtacagactcttcacagatttttatcttaattgcaagtctgccgattttgtaaatgttcttggtgtttgactgtaatgtaactatctcacctaatggttgtacatatcctttggtcctggtgctgccgagggctggccgggactgctgctctcccaagggttttattttatttctgaatctagagaacagtattgggcaggaggaaaaggcttggtgtctgcggggggtgtcttccctgcctgtggcatttgtgtgttggctttgcagctgctgtctgagtagtggccactggggtgccttcactgggccagtcaacggggggctcctgcccaggccacagagaacctgagttcccgggagctgggccctgcctgcagccagggctggggttgccagaggccctggagggaaggacagtccctgctggggaagaacagccccggggccccctggtcaccgagactcagcctctgctggagaaagccacgccctccctgctagcacagaggcctgactgacttttttgcttaacttccatgttctgggtgatggaaactgccaaacctcctgtcagtgaggactctttccgactgcccagaaagtgggggtggaggaccgaggctacagctccacacgccccggtcccccagagcatctgccccaggtacacctccccctgcgccccgcacgactgcgggagccagactgtccagggaaacagcctctctcttttctacacactcagccacaaagccccccagctcccacaccgcgtcccagctcccctcttttgtaagtatgtgaaaaggaaaaaatgcaaacgttggagtttgggctggagctcctccctccagctgcgacttttaactatgtaataatgtacagaggaagctgttggtgttctaagactctgtgtggctgtgcaatttctgtacatttgcaattagaaatattaaagatttatttagctattttaa

SEQ ID NO: 271181 - DNA, 928 bp, Artificial Sequence
  derived and/or modified sequence
ggaatacaaaaggaggaacccagacgctcatggagacagcctcggttcataaatcaggtggggccaggggctgggggcccacacgccatggagcccgactcccttctggaccaagacgactcctacgagtcgcctcaagaaaggccgggctctcggcgcagcctgcctggcagcctttccgagaagagccccagcatggagccctcggccgccacgccgttccgggtcacggtcccatctgatgccgaggctgaaggagtctcgctcccacgagtccctgctcagccccagcagtgcggtggaggcgctggacctcagcatggaggaagaggtggtcatcaagcccgtgcacagcagcatccttggccaggactactgcttcgaggtgacgacgtcatcaggaagcaagtgcttttcctgccggtctgcagctgagcgggataagtggatggagaacctccggcgagcggtgcatcccaacaaggacaacagccggcgtgtggagcacatcctgaagctgtgggtgatcgaggccaaggacctgccagccaagaagaagtacctgtgcgagctgtgcctggacgatgtgctctatgcccgcaccacgggcaagctcaagacggacaatgttttctggggcgagcacttcgagttccacaacttgccgcctctgcgcacggtcactgtccacctgtaccgggagaccgacaagaagaagaagaaggagcgcaacagttacctgggcctggtgagcctacctgctgcctcggtggccgggcggcagttcgtggagaagtggtacccggtggtgacgcccaaccccaagggcggcaagggccctggacccatgatccgcatcaaggcgcgctaccaaaccatcaccatcctgcccatggagatgtacaaagagttcgctgagcacatcacc

SEQ ID NO: 271182 - protein, 451 aa, Artificial Sequence
  derived and/or modified sequence
MTEMVRKITLSRAVRTMQNLFPEEYICKPLLIDKLKFDIRLYVLLKSLDPLEIYIAKDGLSRFCTEPYQEPTPKNLHRIFMHLTNYSLNIHSGNFIHSDSASTGSKRTFSSILCRLSSKGVDIKKVWSDIISVVIKTVIALTPELKVFYQSDIPTGRPGPTCFQILGFDILLMKNLKPILLEVNANPSMRIEHEHELSPGVFENVPSLVDEEVKVAVIRDTLRLMDPLKKKRENQSQQLEKPFAGKEDALDGELTSAPDCNANPEAHLPSICLKQVFPKYAKQFNYLRLVDRMANLFIRFLGIKGTMKLGPTGFRTFIRSCKLSSSSLSMAAVDILYIDITRRWNSMTLDQRDSGMCLQAFVEAFFFLAQRKFKMLPLHEQVASLIDLCEYHLSLLDEKRLVCGRGVPSGGRPPHRGPPQEPSPSAQPAGDNPPPRTSCANKLSHPRHTLS

SEQ ID NO: 271183 - DNA, 1356 bp, Artificial Sequence
  derived and/or modified sequence
atgaccgagatggtgagaaagatcaccctgagcagagccgtgagaaccatgcagaacctgttccccgaggagtacatctgcaagcccctgctgatcgacaagctgaagttcgacatcagactgtacgtgctgctgaagagcctggaccccctggagatctacatcgccaaggacggcctgagcagattctgcaccgagccctaccaggagcccacccccaagaacctgcacagaatcttcatgcacctgaccaactacagcctgaacatccacagcggcaacttcatccacagcgacagcgccagcaccggcagcaagagaaccttcagcagcatcctgtgcagactgagcagcaagggcgtggacatcaagaaggtgtggagcgacatcatcagcgtggtgatcaagaccgtgatcgccctgacccccgagctgaaggtgttctaccagagcgacatccccaccggcagacccggccccacctgcttccagatcctgggcttcgacatcctgctgatgaagaacctgaagcccatcctgctggaggtgaacgccaaccccagcatgagaatcgagcacgagcacgagctgagccccggcgtgttcgagaacgtgcccagcctggtggacgaggaggtgaaggtggccgtgatcagagacaccctgagactgatggaccccctgaagaagaagagagagaaccagagccagcagctggagaagcccttcgccggcaaggaggacgccctggacggcgagctgaccagcgcccccgactgcaacgccaaccccgaggcccacctgcccagcatctgcctgaagcaggtgttccccaagtacgccaagcagttcaactacctgagactggtggacagaatggccaacctgttcatcagattcctgggcatcaagggcaccatgaagctgggccccaccggcttcagaaccttcatcagaagctgcaagctgagcagcagcagcctgagcatggccgccgtggacatcctgtacatcgacatcaccagaagatggaacagcatgaccctggaccagagagacagcggcatgtgcctgcaggccttcgtggaggccttcttcttcctggcccagagaaagttcaagatgctgcccctgcacgagcaggtggccagcctgatcgacctgtgcgagtaccacctgagcctgctggacgagaagagactggtgtgcggcagaggcgtgcccagcggcggcagacccccccacagaggccccccccaggagcccagccccagcgcccagcccgccggcgacaaccccccccccagaaccagctgcgccaacaagctgagccaccccagacacaccctgagctag

SEQ ID NO: 271184 - DNA, 1356 bp, Artificial Sequence
  derived and/or modified sequence
atgacggaaatggtgcgtaagatcactctttccagagctgtccgcactatgcagaacttgttcccagaagagtacatttgtaaacccctgctgatcgacaagcttaaatttgatatccggctgtacgttctgttaaaaagtctggaccctctggagatctatatcgccaaagacgggctgtcccggttctgtacagagccataccaggaacctacgcccaagaatctgcacaggatctttatgcacttaaccaactactctctgaatatccattccggaaattttatccattctgatagtgcttccaccggctccaagcgcaccttctcaagcattctgtgtcgcttgtctagcaagggggtggacataaagaaagtctggtcagacatcatctctgtggtgattaagaccgttatcgctctaacccctgaactgaaagtattctaccagagtgacatcccaaccgggcgtcctggccctacttgttttcaaatcctgggattcgatatcttgctcatgaagaatctaaagccgatactgctagaagttaatgcaaatccctcaatgcgaatcgagcacgagcatgagctgtctcccggcgtgtttgagaacgtgccttcgctcgtggatgaagaagtgaaggttgcggttattagagatactctccggcttatggatcccttaaagaagaagagggagaaccagagccagcagttagaaaagccgtttgcagggaaggaggatgccctggacggggagctgacatcggctcctgactgtaatgccaatcctgaagcacatttgccctccatttgccttaagcaggtctttccgaagtacgctaaacaattcaactatcttcggctcgtggataggatggccaatttgttcatcaggtttctgggcattaagggcactatgaagctgggacccaccggatttcgcacttttattcgctcctgtaagctttctagctcttcgctgtccatggccgcagttgatatattgtatattgacatcactaggcgttggaactcaatgactctggatcagcgagattcagggatgtgtctacaggccttcgtcgaagcctttttttttctggcccaacgcaaatttaagatgttgcctttacacgagcaggtagccagcctgatcgacctctgcgaataccatctgtccctgcttgatgagaagagactcgtctgcggccggggcgtccccagtggcggaagaccgccccatagaggtcctccacaggagccttccccgtctgctcagcctgctggtgataatcccccccctcgcactagttgtgcaaataagctctcccatcccagacacacattgtcctag

SEQ ID NO: 271185 - DNA, 2193 bp, Artificial Sequence
  derived and/or modified sequence
ggagctcgggccacggttccggcgagaacggctcccagcggccggtcaccgtggacagctccaaggccaggacctccctggatgccctgaagatcagcatccgccagctcaagtggaaggagttcccatttggccggcgcttgccttgtgacatctactggcatggagtttcatttcacgacaatgacatattctccggtcaagtgaacaagtttccaggcatgacggagatggtgcgtaaaattactctgagcagagcagtgagaaccatgcagaatctctttcctgaggagtacatctgcaaacctctccttatcgacaagctcaagtttgatattcgtctgtatgtcttactcaagtccttagaccccttagagatttatatagccaaagacggactctctaggttttgtaccgagccatatcaggagcccacccccaaaaacctgcaccgcatctttatgcacttaaccaactattcactgaacatccacagcggcaacttcatccactcggacagtgctagcactggcagcaaaaggactttttccagcatcctttgtagactgtcttccaaaggcgttgacatcaagaaggtctggtctgacatcatctccgtggtgattaagacggtcatcgcgctgactccagagctcaaagtcttctaccagtcagacatccccacggggaggccgggccccacgtgcttccagattttaggctttgacattcttctaatgaaaaatctgaagcctatactacttgaagtaaatgcaaatcccagtatgagaatcgaacatgagcacgaactttctccaggggtgtttgaaaatgtccccagcctcgttgatgaagaagtgaaagtggctgtgatcagagacactctgcgcctcatggacccacttaagaagaaaagagagaatcagtctcagcagcttgaaaaaccattcgctggaaaggaagatgctttggacggcgagctgaccagtgctccagactgcaacgccaaccccgaagcccacctgccttccatttgcctcaagcaggtgttccccaagtacgcaaaacagttcaactacctgcgcctggtggacaggatggcaaatttgtttatccggttcctgggcatcaaggggacaatgaagttggggccaacaggctttcgtaccttcataaggagctgcaaactcagcagcagcagcctgtccatggctgccgtggacatcctctacattgacatcacacggaggtggaactccatgaccctggaccagcgggactcagggatgtgtctgcaggccttcgtagaagctttctttttcctggctcagaggaagttcaagatgctgccacttcatgagcaggtggcctcactgattgacctttgcgagtaccacctgtccctgctggatgaaaaacgcctggtgtgtggccggggcgtcccgtcggggggccggcccccacaccgtggccctccccaggagccctccccctcggcccagccagcaggggacaaccccccaccccgcaccagctgtgccaataagctctcccatcccagacataccctgtcctgagggccactctgtcctcctggaaaacggaagacgagagcagctttcagggctggagcgccccaggcattctgcctgcagaggaatggcaggcaggctgccgaggggcccagctgaggtccccacgaactgtctctgtgtgcggctgagctgtgcttcaccaggctggctggttctcacctgccttcctcctcacacctcctggtgatacaccctgtttctgagtcatcagtcatcggacatatgacatctaaaacgtgacagatggcaccttctattctgggctcacaggaagcaccaactggggcaaatctgttgtatttggggcacaggacacaatcgatcccaaggcccggagctgtggagaggaagccgagtgttaggatctgctgccggggcctccacgcgcccaccgggaaaagcctgagaacatcgtgtttatttcctgccgcccgttccgagagaaggaagtggaaatatcaagtaggcatctgcgaatctcccatcccagtcatgtgctacatgggtgtagtgaacagattaacctcatttagttcattagcttgcctgttgctgcaatatttggtttgttattaattaagaaaaaattaattaagaa

SEQ ID NO: 271186 - DNA, 1356 bp, Artificial Sequence
  derived and/or modified sequence
atgacagagatggtgaggaagatcaccctgagcagagctgtgaggaccatgcagaacctcttccctgaggagtacatctgcaagcccctgctgattgacaagctgaagtttgacatccggctgtatgtgctgctgaagagcctggaccccctggagatctacatcgccaaggatggcctgagccgcttctgcacagagccctaccaggagcccacccccaagaacctgcaccgcatcttcatgcacctgaccaactacagcctgaacatccacagcggcaacttcatccacagcgacagcgccagcacaggcagcaagaggaccttcagcagcatcctgtgccgcctgagcagcaaaggagtggacatcaagaaggtgtggagcgacatcatctctgtggtgatcaagacagtgattgccctgaccccagagctgaaggtgttctaccagagcgacatccccaccggccggcccggccccacctgcttccagatcctgggctttgacatcctgctgatgaagaacctgaagcccatcctgctggaggtgaatgccaaccccagcatgagaattgaacatgaacatgagctgagccctggggtgtttgaaaatgtgcccagcctggtggatgaggaggtgaaggtggccgtcatccgggacaccctgcggctgatggaccccctgaagaagaagcgggagaaccagagccagcagctggagaagccctttgctgggaaggaggatgccctggatggagagctgaccagcgccccagactgcaatgccaaccctgaggcccacctgcccagcatctgcctgaagcaggtgttccccaagtatgccaagcagttcaactacctgcggctggtggacaggatggccaacctcttcatccgcttcctgggcatcaagggcaccatgaagctgggccccaccggcttccgcaccttcatccgcagctgcaagctgagcagcagcagcctgtccatggctgctgtggacatcctgtacatcgacatcacccggcgctggaacagcatgaccctggaccagagggacagcggcatgtgcctgcaggcctttgtggaggccttcttcttcctggcccagaggaagttcaagatgctgcccctgcacgagcaggtggccagcctgattgacctgtgtgagtaccacctgagcctgctggatgagaagaggctggtgtgtggccggggcgtgcccagcggcggccggcccccccaccggggccccccccaggagcccagccccagcgcccagcctgctggggacaaccccccacccaggaccagctgtgccaacaagctgagccaccccaggcacaccctgtcctag

SEQ ID NO: 271187 - DNA, 1356 bp, Artificial Sequence
  derived and/or modified sequence
atgaccgagatggtgcggaagatcaccctgagccgggccgtgcggaccatgcaaaatctctttcctgaggaatatatatgtaagcccctgctgattgataaattgaaattcgatatccgtttgtatgtgctgctaaaaagcttagaccctttggagatttatattgcgaaagatggcctgagcaggttttgtacagagccttatcaggaacctacaccaaagaatctacatcgcatctttatgcatctcaccaactattctttgaatatacattctggcaactttattcactctgacagtgcctcaaccgggtctaaacggaccttttctagtatcctatgccggctctcttcaaagggggtggacattaaaaaggtatggagcgacataatctctgttgtgattaaaacagtcattgcccttactccggaactgaaagttttctaccagtctgacattcctactgggcggcccggtcctacctgttttcagatattagggttcgatattctgctgatgaagaatctgaaacccattttgcttgaggtaaacgccaatcccagcatgcgaatagaacacgaacacgaactgtcgcctggcgtattcgagaacgtgccaagtttggtggatgaagaggtgaaagttgcggtgattagggacaccctgagactcatggatcctctgaaaaagaagagggagaaccagagccagcaattggaaaaacccttcgcaggaaaagaagatgccctcgatggcgaactgacatcagcgccagactgcaatgccaatcccgaagcacacctcccatctatctgtctgaaacaagtattccctaagtatgccaagcagttcaactaccttcgcctcgtcgatcggatggcaaatctttttattcgcttcttggggataaaggggaccatgaagctgggcccgactggctttaggacgtttatcaggtcctgcaaactcagcagctcctccctgagcatggctgctgttgatattctctatatcgacattacccgtagatggaatagtatgacactggaccagagggactcaggcatgtgcctgcaggcattcgtggaagccttcttcttcctggcacagcgcaaattcaagatgctccccttgcacgagcaggttgcgtctctcatcgatctgtgcgagtatcatctttccctgctcgacgaaaaaagattggtctgtggccgtggagtgcccagtggcgggaggccgccccaccgggggcctccgcaggagccaagtccaagcgctcagcctgccggcgacaaccctcctccacgcactagttgtgcaaataaactgagccacccacgccataccctatcctag

SEQ ID NO: 271188 - DNA, 1356 bp, Artificial Sequence
  derived and/or modified sequence
atgacagagatggtgcggaagattacgctgtcgcgggctgtccggaccatgcagaacctttttcccgaggagtatatttgtaagccactgcttattgacaagttgaaatttgatattagactctatgttttgctgaaatccttagacccgttggagatttatattgctaaggacggcctatctcggttttgcaccgaaccgtaccaggaacccacccccaaaaacctgcatcggatatttatgcaccttacgaattacagcctgaacattcattctggtaatttcattcacagcgattccgccagcaccggttccaagcgcacctttagttctatcctctgtcggcttagctctaagggggttgatattaaaaaggtctggagcgacattatctcagtggtgataaagactgtgattgcgctgaccccggagcttaaagtcttctatcagtctgatattccaaccgggaggcctggccctacctgcttccagatcctggggttcgacatactgctgatgaagaacttgaaacctattcttttggaggttaatgccaacccatccatgagaatcgaacatgaacatgaattgagtcctggtgtttttgagaatgtaccctcccttgtggacgaggaggttaaagttgcagttatccgcgatacacttcggctgatggaccctctgaagaaaaaaagagaaaatcagtcccaacagcttgagaaaccttttgctggaaaagaggacgctttagacggtgagcttacatccgccccagattgtaatgcgaatccggaggcccacttgccttccatttgtttaaaacaggtgttccccaagtacgctaaacaatttaattacctcagactggtggatcgcatggcaaacctgtttattaggttcctcggcattaagggaaccatgaagctcggacccactgggttccggactttcattcgcagttgcaagctcagctcatcttctcttagtatggccgctgtcgacatcctgtacatagacatcaccagacgctggaattctatgacgttggaccagagggattctggaatgtgcctgcaagcctttgttgaagcattcttctttttggctcagcgaaagttcaagatgttgccactgcacgagcaggtggcctccttgatcgatctgtgtgaatatcacttgtcgctcctggacgaaaagagattggtgtgtggccgaggggttccatcgggaggcaggccacctcaccgaggacccccacaggaaccatctccgtcagcccagccggcaggcgacaacccccctccccgaacatcttgtgccaacaaactgtctcatccaagacatacactgtcatag

SEQ ID NO: 271189 - DNA, 168 bp, Artificial Sequence
  derived and/or modified sequence
atgaaaatgtcatttgagcgctgtacggctagaaataaaatgtttgtgaactctgcgtttacaaaggtcgacaattactgcacattcctgatggagaaggttctctttaaggtactgtttctggtggagtattaccagaagggtaaaaagaatgatcttaatttctag

SEQ ID NO: 271190 - DNA, 570 bp, Artificial Sequence
  derived and/or modified sequence
atggaggccgacggcgacggcgaggagctggccagactgagaagcgtgttcgccgcctgcgacgccaacagaagcggcagactggagagagaggagttcagagccctgtgcaccgagctgagagtgagacccgccgacgccgaggccgtgttccagagactggacgccgacagagacggcgccatcaccttccaggagttcgccagaggcttcctgggcagcctgagaggcggcagaagaagagactggggccccctggaccccgcccccgccgtgagcgaggccggccccgagacccacgacagcgaggaggacgagggcgacgaggacgccgccgccgccctggccaccagctgcggccccgccagccccggcagagcctggcaggacttccaggccagactgggcgacgaggccaagttcatccccagattcggctacaccatcagcaagcccgccttcgtgttcgtgagacacctgatcaccctgtgcgccctgagctgggccaagaaggagggcagagagaccctgtggaccatcgaggagggcggcgccaagatggccgagtag

SEQ ID NO: 271191 - DNA, 1765 bp, Artificial Sequence
  derived and/or modified sequence
aaagtggcgagagccacctcggcgcttgggcgctcagtcgcaggaggcgctccttggcggtgcctggagcccgggcgcaccccaccgctcccgggacctgttgggggctggcccgaaccgtcgtcgaagggagccgctcggccacccccgacgttcctcgccccgcccgacgttccctcaagtggccgaaccagccggacgagccaaactcgccgggcctcccggcggcagcaggtggccccgtccttccagggagggccctgcgccccgcggcgctccggagccctctcggccgcccccgccaggcgggatggaggcggatggggacggagaggagctggcccggctgcgctcagtcttcgccgcctgcgacgcgaaccgctcggggcgcctggagcgcgaggagttccgggcactgtgcacggagctgcgggtgcggccggccgacgccgaggcagtattccagcggctggacgccgaccgtgacggcgccatcaccttccaggagttcgcgcgtggcttcctcgggtccctccgcggggggcggcgccgggactggggtcctctggatcccgcgcccgccgtgtctgaggcggggccggagacacacgacagcgaggaggacgaaggcgacgaggacgcggcggcggcgctggccacctcgtgcggcccggcgagtcccggccgggcttggcaggatttccaggcgcgacttggggacgaagccaagttcattcccagatttggctacacaatttcaaaacctgcatttgtgttcgtgaggcatctcataacactgtgtgcattgtcatgggctaaaaaggaaggcagagaaacactttggacaatcgaggagggaggagccaagatggccgaataggaacagctccggtctacagctcccagcgtgagcgacgcagaagacgggtgatttctgcatttccatctgaggtaccgggttcatctcactacggagtgcgagacagtgggcgcaggccagtgtgtgcgcgcaccgtgcgcgagccgaagcagggcgaggcattgcctcacctgggaagcgcaaggggtcagggagttccctttccgagtcaaagaaaggggtgacggacgcacctggaaaatcgggtcactcccacccgaatattgcgcttttcagaccggcttaagaaacggcgcaccacaagactatatcccacacctggctcagagggtcctacgcccacggaatctcgctgattgctagcacagcagtctgagatcaaactgcaaggcggcaacgaggctgggggaggggcgcccgccattgcccaggcttgcttaggtaaacaaagcagcctggaagctcgaactgggtggagcccaccacagctcaaggaggcctgcctgcctctgtaggctccacctctgggggcagggcacagacaaacaaaaagacagcagtaacctctgcagacttaagtgtccctgtctgacagctttgaagagagcagtggttctcccagcacgcagatggagatctgagaacgggcagactgcctcctcaagtgggtccctgacccctgacccccaagcagcctaactgggaggcaccccccaacaggggcacactgacacctcacacggcagggtattccaacagacctgcagctgagggtcctgtctgttagaaggaaaactaacaaccagaaaggacatctacaccgaaaacccatctgtacatcaccatcatcaaagaccaaaagtagataaaaccacaaagatgggg

SEQ ID NO: 271192 - DNA, 570 bp, Artificial Sequence
  derived and/or modified sequence
atggaggctgatggggatggcgaggaactggcccgcctgaggtcagtgttcgcagcgtgtgacgcaaatagaagcggcagactggaaagagaggaattcagagcactgtgcaccgagctcagagttcggccagccgacgccgaggccgtgttccagcggttggatgcagatagagacggcgctatcaccttccaggagttcgcccgagggttcctcggtagtcttcggggtggtcgcagacgcgattggggacctctggatcctgctccagccgtcagcgaagccggcccagaaacgcatgattccgaggaggatgagggcgacgaggacgccgccgcggccctggctactagctgcggaccggctagtccaggccgcgcctggcaggatttccaggcccgattaggagatgaggcaaagtttataccaaggttcggatatacaatctccaaaccagcctttgtgttcgtgcggcatctcatcaccttgtgcgccctcagctgggcaaagaaagagggcagagagacattgtggacgatagaggagggaggcgccaagatggcagagtag

SEQ ID NO: 271193 - DNA, 570 bp, Artificial Sequence
  derived and/or modified sequence
atggaggctgatggagatggagaggagctggcccggctgcggtctgtgtttgctgcctgtgatgccaacagaagtggccgcctggagcgggaggagttccgggccctgtgcacagagctgcgggtgcggccagcagatgctgaggccgtgttccagaggctggatgctgacagagatggagccatcaccttccaggagtttgcccggggcttcctgggcagcctgcggggcggcagaagaagagactggggccccctggaccctgccccagctgtgtctgaggccggccctgagacccatgacagcgaggaggatgaaggagatgaagatgctgctgctgccctggccaccagctgtggccctgccagccctggccgggcctggcaggacttccaggcccggctgggagatgaggccaagttcatccccaggtttggctacaccatcagcaagccagcctttgtgtttgtgcgccacctgatcaccctgtgtgccctgtcctgggccaagaaggagggccgggagaccctgtggaccatcgaggagggcggggccaagatggccgagtag

SEQ ID NO: 271194 - DNA, 570 bp, Artificial Sequence
  derived and/or modified sequence
atggaggccgacggcgacggcgaggagctggcccggctgcggagcgtgtttgccgcctgtgacgcgaataggagcggccggctggagagggaggaattccgagccctgtgtaccgaactaagggtccggcccgctgatgctgaggccgtttttcagcgcctggatgcagatcgggacggggcgattacgtttcaagagtttgcgcgggggttcctggggagtttaagggggggccgcagaagggattggggcccactggaccctgctcctgctgtaagcgaggctggccccgagacacatgactccgaagaagacgagggtgatgaggatgcggccgcggccctggccacctcttgcgggcctgccagccccggccgcgcctggcaggattttcaggctcggcttggcgatgaggccaagttcattccacggttcggatatacaatttctaaacctgctttcgtgttcgtgcgacacttgattacactgtgcgccttaagttgggccaaaaaggaaggtagagaaactctttggaccatagaagaaggaggggcgaagatggccgaatag

SEQ ID NO: 271195 - DNA, 570 bp, Artificial Sequence
  derived and/or modified sequence
atggaggcagacggcgacggcgaggaattggccagattacgctcagtctttgccgcatgtgacgctaaccggagcggtcggctagaaagagaggaattccgggcattatgcacggagctgcgtgtgagacccgcagacgcggaggcagtttttcaacggctggatgcagacagggacggtgcaatcactttccaggaattcgccagagggttcctgggttcattacgtggcggtagacggagggactggggaccacttgaccccgcaccagctgtttccgaagctggacctgagacacacgacagtgaggaggacgagggcgatgaggatgccgcagctgccctggccacaagctgcggaccagcctcacctgggcgagcctggcaggatttccaggccaggttgggagacgaggctaagttcattccccgatttgggtacactattagtaaaccagcctttgtatttgtccgacaccttatcactctctgtgccctgagttgggctaaaaaggaggggagggagactctctggaccatcgaagaaggaggcgctaaaatggccgagtag

SEQ ID NO: 271196 - protein, 260 aa, Artificial Sequence
  derived and/or modified sequence
IDINVDELDTPDEADSFEYTGHDPTANKDSGQESESIPEYTAEEEREDNRLWRTVVIGEQEQRIDMKVIEPYRRVISHGGDSGYYGDGLNAIIVFAACFLPDSSRADYHYVMENLFLYVISTLELMVAEDYMIVYLNGATPRRRMPGLGWMKKCYQMIDRRLRKNLKSFIIVHPSWFIRTILAVTRPFISSKFSSKIKYVNSLSELSGLIPMDCIHIPESIIKYDEERSYKRSVRTSCLYNDPEMSSMEKDIDLKLKEKP

SEQ ID NO: 271197 - protein, 308 aa, Artificial Sequence
  derived and/or modified sequence
MRPEPPNSLDLNDTHPRRIKLTAPNINLSLDQSEGSILSDDNLDSPDEIDINVDELDTPDEADSFEYTGHDPTANKDSGQESESIPEYTAEEEREDNRLWRTVVIGEQEQRIDMKVIEPYRRVISHGGKLRYYGDGLNAIIVFAACFLPDSSRADYHYVMENLFLYVISTLELMVAEDYMIVYLNGATPRRRMPGLGWMKKCYQMIDRRLRKNLKSFIIVHPSWFIRTILAVTRPFISSKFSSKIKYVNSLSELSGLIPMDCIHIPESIIKYDEERSYKRSVRTSCLYNDPEMSSMEKDIDLKLKEKP

SEQ ID NO: 271198 - DNA, 5674 bp, Artificial Sequence
  derived and/or modified sequence
gctttgtttgatggtgatccacatttatccacagagaatcctgccttggttcctgatgctttgctagcctcagacacttgtctggatataagcgaagctgcctttgaccacagtttcagcgatgcctcaggtctcaacacatccacgggaacaatagatgacatgagtaaactgacattatccgaaggccatccggaaacgccagttgatggggacctagggaagcaagatatctgctcatctgaagcctcgtggggtgattttgaatatgatgtaatgggccagaatatcgatgaagatttactgagagagcctgaacacttcctgtatggtggtgaccctcctttggaggaagattctctgaagcagtcgctggcaccgtacacacctccctttgatttgtcttatctcacagaacctgcccagagtgctgaaacaatagaggaagctgggtctccagaggatgaatctctgggatgcagagcagcagagatagtgctttctgcacttcctgatcgaagaagtgagggaaaccaggctgagaccaaaaacagactgcctggatcccagctggctgtgctgcatattcgtgaagaccctgagtccgtttatttgccggtaggagcaggctccaacattttgtctccatcaaacgttgactgggaagtagaaacagataattctgatttaccagcaggtggagacataggaccaccaaatggtgccagcaaggaaatatcagaattggaagaagaaaaaacaattcctaccaaagagcctgagcagataaaatcagaatacaaggaagaaagatgtacagagaagaatgaagatcgtcatgcactacacatggattacatacttgtaaaccgtgaagaaaattcacactcaaagccagagacctgtgaagaaagagaaagcatagctgaattagaattgtatgtaggttccaaagaaacagggctgcagggaactcagttagcaagcttcccagacacatgtcagccagcctccttaaatgaaagaaaaggtctctctgcagagaaaatgtcttctaaaagcgatacgagatcatcttttgaaagccctgcacaagaccagagttggatgttcttgggccatagtgaggttggtgatccatcactggatgccagggactcagggcctgggtggtctggcaagactgtggagccgttctctgaactcggcttgggtgagggtccccagctgcagattctggaagaaatgaagcctctagaatctttggcactagaggaagcctctggtccagtcagccaatcacagaagagtaagagccgaggcagggctggcccggatgcagttacgttgcaggctgtcacccatgacaatgaatgggaaatgctttcaccacagcctgttcagaaaaacatgatccctgacacggaaatggaggaggagacagagttccttgagctcggaaccaggatatcaagaccaaatggactactgtcagaggatgtaggaatggacatcccctttgaagagggcgtgctgagtcccagtgctgcagacatgaggcctgaacctcctaattctctggatcttaatgacactcatcctcggagaatcaagctcacagccccaaatatcaatctttctctggaccaaagtgaaggatctattctctctgatgataacttggacagtccagatgaaattgacatcaatgtggatgaacttgatacccccgatgaagcagattcttttgagtacactggccatgatcccacagccaacaaagattctggccaagagtcagagtctattccagaatatacggccgaagaggaacgggaggacaaccggctttggaggacagtggtcattggagaacaagagcagcgcattgacatgaaggtcatcgagccctacaggagagtcatttctcacggaggtaagctaagatactatggggacggtctaaatgccatcattgtgtttgccgcctgttttctgccagacagcagtcgggcggattaccactatgtcatggaaaatcttttcctatatgtaataagtactttagagttgatggtagctgaagactatatgattgtgtacttgaatggtgcaaccccaagaaggaggatgccagggctaggctggatgaagaaatgctaccagatgattgacagacggttgaggaagaatttgaaatcattcatcattgttcatccatcttggttcatcagaacaatccttgctgtgacacgaccttttataagttcaaaattcagcagtaaaattaaatatgtcaatagcttatcagaactcagtgggctgatcccaatggattgcatccacattccagagagcatcatcaagtacgatgaagagagatcttataagagaagtgtgagaactagctgcctttacaatgatccagaaatgtcttctatggagaaggatattgacttgaagctgaaagaaaagccttagttggccatgctggaagaagaggatgcttttctggttcatggttctgttgaaacatatctacctgaaagagacagggctgatgttacctttttccactttgcactacctggtgccattctaaatttctaaggggaaaaatagaaagtttgtttactcttaagatattttatgaaattgtgtgtactttcctattttgccaattatgtgcctcaaagattttagttgagccttagcaagaaagtaggaccttccatttcaatacttcattaacacggtgtagtgatactttgtcccttagactggtgtttaccagtaagatacctttaatccactgttaagtatgagtggatttgtttccatagattagctggatttccttttggtgattgcattaggtttaaagtacacaggtctcaactctccccaggaaagtttcccctgtttgactccacctttaaaatcctaagcctgactaggacagccacaaaccacacaaggtgtaaaaccatcatcagctaagtgcccgttttgttcttgtttaccagaatctcctttaacttctcaaagggaagccgggctttctaatccacgtcaactttattttagttgtcaaattgggcattatattttatgtaaattggtcttttaacatcattttcctgatgaatgttggtgaccaccacattgtgaaatttaagaatccgtgttgcatgtttggtagctctctgagtttcaggccataaactcagctccagaggttaccttttaagtgccaagaactcaagtgcaaggtggcctactcaaaaatcatttggtagcattcagttattcatgaattcctctctcgcatgcattataaaaagtgatctgctttaaaacaccgtaatctgatcataggcttaaaattaaatatgagtattactttcatgtacaaaatatttcctttatagtcttcatatgccctttaaaatgccaacaagatttcaagtctgtaggcctctagtgaggtggggtggcaaaccacagctaagtctcgctcaccactgcaagctaagaatggtttttacattttgggttggaaaaattttttttgaatatttcatgacacatgaaaattattcaaatgttagtgccgataaataaagtggtactgaaacacagccacacaaacttgtttttgtactgtctacagctactttcacactacagccgcagagctgagcagttcagcagaccgtatgtcccacaatgcctaaaacattgactatgtttacagaaaaagtttgctgacccctgctctagcaaacgcatcctttcctactccaccccaatttgtatttagatagtttctctaacagaacggacaaatgaggctgcaaactaatttatttttgtcaaaaatcaatgttttgacatccacagacagtgaaataaaagaaatggcttgctgaaaaacatgaggagtcctagccacaaaatcactgcttaggttgcaattgccaaaatgaagccttcttagaagcacttctttagtatatacaggtgttggctgaagtccgtgcctcactctgggaaccattcttagtctccagtgtctcctattacaaagaagctggcagaaataaaaatgaaggggtgagagcggttccaccctagtctcatggtggaaaattcattggggagagctgtccaggatatttggagtcctgggtagaaggagcttgtaactactttaaagtcgacatctttgcacaggtgattgagtttctctgacctcattgcttcacctctgtctcctcccgtccttccgcacgtgcccacacacacgcagttcagccctctttcctccataagcctccatcgttttctcttttctcctcttgatcctttcaagcgagtatcttgttgaattgtatgttctgttggatctcctccttcataacatctggcttgttggacagaaaaaccctacagcccaccccctcccacagcccacctccacttttgaaagcccaaattacacctctcccagaacacagtgttgacgtaaatacagttacccaatattcctgtttgttcacctatttgctactttcactcagtagcatcccattttgtaaaatgaattccatggtcaccctgtcacaggaagtaatgaaaaatccagtgttcagtgtagtggtgcaaacctgagggcatagagctgttcatagagggctcttgttatagccaaacagacacagcaacaatctcaccatttatatatatatttttaacttgtccagctcatctatggaaaactactcaggtggtatgctgtttgaagcctcatcttcctacatgaaaattatgggcatttgtcccaatgattttgtttcagctgttctgtaggctgcataaccactctgatatttaggtatctgctattttattatcttaaaagacaaattaatttaattgcatgtgctagggaaaagctaccatgtacattcaccccaagtaaatagaatcctagatgaatcctagaaaaataatccctaagcagataggtagacagaggtaaacattcacatgatttagctctctagctcttgcactctgaacattcttgctttggttctgacttctgggaactgctttgcatttctcctatagatctgtagttaagggaaccaaggggtcattggggcaaaagcattgtttctcaaagctccttgattaagagaaagaacagaaatttgcacagaagatagtgtcaaggagtgagaaagtttgtttgagggcagtagctcagtgtggaagaaaatcctgaagtttctgttgaagccatacaatgttctatggggttactctctaagacattctctgaggtgtgtgaggaagtcactactcctagcctttgttaagatgtaattttaaatattcagttatggtactatgtttgcaactctcgtcttatcacaatgcctcagtagtttgttcccttagaaacatttagatgtgcacaaattaatcttttatatatctaaaggtttttctatcatgcattggattgctcagaataaagtgtctgttagacttcgttttggtaaataaattctccataatgtagattaataatataaaagtctttaatgacacaatatatctatatagcctcactgtataattcagaaataaaaattgattctgc

SEQ ID NO: 271199 - protein, 1364 aa, Artificial Sequence
  derived and/or modified sequence
MTVFRQENVDDYYDTGEELGSGQFAVVKKCREKSTGLQYAAKFIKKRRTKSSRRGVSREDIEREVSILKEIQHPNVITLHEVYENKTDVILILELVAGGELFDFLAEKESLTEEEATEFLKQILNGVYYLHSLQIAHFDLKPENIMLLDRNVPKPRIKIIDFGLAHKIDFGNEFKNIFGTPEFVAPEIVNYEPLGLEADMWSIGVITYILLSGASPFLGDTKQETLANVSAVNYEFEDEYFSNTSALAKDFIRRLLVKDPKKRMTIQDSLQHPWIKPKDTQQALSRKASAVNMEKFKKFAARKKWKQSVRLISLCQRLSRSFLSRSNMSVARSDDTLDEEDSFVMKAIIHAINDDNVPGLQHLLGSLSNYDVNQPNKHGTPPLLIAAGCGNIQILQLLIKRGSRIDVQDKGGSNAVYWAARHGHVDTLKFLSENKCPLDVKDKSGEMALHVAARYGHADVAQLLCSFGSNPNIQDKEEETPLHCAAWHGYYSVAKALCEAGCNVNIKNREGETPLLTASARGYHDIVECLAEHGADLNACDKDGHIALHLAVRRCQMEVIKTLLSQGCFVDYQDRHGNTPLHVACKDGNMPIVVALCEANCNLDISNKYGRTPLHLAANNGILDVVRYLCLMGASVEALTTDGKTAEDLARSEQHEHVAGLLARLRKDTHRGLFIQQLRPTQNLQPRIKLKLFGHSGSGKTTLVESLKCGLLRSFFRRRRPRLSSTNSSRFPPSPLASKPTVSVSINNLYPGCENVSVRSRSMMFEPGLTKGMLEVFVAPTHHPHCSADDQSTKAIDIQNAYLNAFGGKLKNPLQVVLVATHADIMNVPRPAGGEFGYDKDTSLLKEIRNRFGNDLHISNKLFVLDAGASGSKDMKVLRNHLQEIRSQIVSVCPPMTHLCEKIISTLPSWRKLNGPNQLMSLQQFVYDVQDQLNPLASEEDLRRIAQQLHSTGEINIMQSETVQDVLLLDPRWLCTNVLGKLLSVETPRALHHYRGRYTVEDIQRLVPDSDVEELLQILDAMDICARDLSSGTMVDVPALIKTDNLHRSWADEEDEVMVYGGVRIVPVEHLTPFPCGIFHKVQVNLCRWIHQQSTEGDADIRLWVNGCKLANRGAELLVLLVNHGQGIEVQVRGLETEKIKCCLLLDSVCSTIENVMATTLPGLLTVKHYLSPQQLREHHEPVMIYQPRDFFRAQTLKETSLTNTMGGYKESFSSIMCFGCHDVYSQASLGMDIHASDLNLLTRRKLSRLLDPPDPLGKDWCLLAMNLGLPDLVAKYNTSNGAPKDFLPSPLHALLREWTTYPESTVGTLMSKLRELGRRDAADFLLKASSVFKINLDGNGQEAYASSCNSGTSYNSISSVVSR

SEQ ID NO: 271200 - protein, 662 aa, Artificial Sequence
  derived and/or modified sequence
MEDLIPLVNRLQDAFSAIGQNADLDLPQIAVVGGQSAGKSSVLENFVGRDFLPRGSGIVTRRPLVLQLVNATTEYAEFLHCKGKKFTDFEEVRLEIEAETDRVTGTNKGISPVPINLRVYSPHVLNLTLVDLPGMTKVPVGDQPPDIEFQIRDMLMQFVTKENCLILAVSPANSDLANSDALKVAKEVDPQGQRTIGVITKLDLMDEGTDARDVLENKLLPLRRGYIGVVNRSQKDIDGKKDITAALAAERKFFLSHPSYRHLADRMGTPYLQKVLNQQLTNHIRDTLPGLRNKLQSQLLSIEKEVEEYKNFRPDDPARKTKALLQMVQQFAVDFEKRIEGSGDQIDTYELSGGARINRIFHERFPFELVKMEFDEKELRREISYAIKNIHGIRTGLFTPDMAFETIVKKQVKKIREPCLKCVDMVISELISTVRQCTKKLQQYPRLREEMERIVTTHIREREGRTKEQVMLLIDIELAYMNTNHEDFIGFANAQQRSNQMNKKKTSGNQITLQVIRKGWLTINNIGIMKGGSKEYWFVLTAENLSWYKDDEEKEKKYMLSVDNLKLRDVEKGFMSSKHIFALFNTEQRNVYKDYRQLELACETQEEVDSWKASFLRAGVYPERVGDKEKVSVPFSCLLPGICSLAPAPARFSSKGPGDVLF

SEQ ID NO: 271201 - protein, 123 aa, Artificial Sequence
  derived and/or modified sequence
MPSAGTLPWVQGIICNANNPCFRYPTPGEAPGVVGNFNKSIVARLFSDARRLLLYSQKDTSMKDMRKVLRTLQQIKKSSSNLKLQDFLVDNETFSGFLYHNLSLPKSTVDKMLRADVILHKVS

SEQ ID NO: 271202 - protein, 364 aa, Artificial Sequence
  derived and/or modified sequence
MAAISTSIPVISQPQFTAMNEPQCFYNESIAFFYNRSGKHLATEWNTVSKLVMGLGITVCIFIMLANLLVMVAIYVNRRFHFPIYYLMANLAAADFFAGLAYFYLMFNTGPNTRRLTVSTWLLRQGLIDTSLTASVANLLAIAIERHITVFRMQLHTRMSNRRVVVVIVVIWTMAIVMGAIPSVGWNCICDIENCSNMAPLYSDSYLVFWAIFNLVTFVVMVVLYAHIFGYVRQRTMRMSRHSSGPRRNRDTMMSLLKTVVIVLGAFIICWTPGLVLLLLDVCCPQCDVLAYEKFFLLLAEFNSAMNPIIYSYRDKEMSATFRQILCCQRSENPTGPTEGSDRSASSLNHTILAGVHSNDHSVV

SEQ ID NO: 271203 - protein, 182 aa, Artificial Sequence
  derived and/or modified sequence
MAAISTSIPVISQPQFTAMNEPQCFYNESIAFFYNRSGKHLATEWNTVSKLVMGLGITVCIFIMLANLLVMVAIYVNRRFHFPIYYLMANLAAADFFAGLAYFYLMFNTGPNTRRLTVSTWLLRQGLIDTSLTASVANLLAIAIERHITVFRMQLHTRMSNRRVVVVIVVIWTMAIVMGAIP

SEQ ID NO: 271204 - protein, 346 aa, Artificial Sequence
  derived and/or modified sequence
MNEPQCFYNESIAFFYNRSGKHLATEWNTVSKLVMGLGITVCIFIMLANLLVMVAIYVNRRFHFPIYYLMANLAAADFFAGLAYFYLMFNTGPNTRRLTVSTWLLRQGLIDTSLTASVANLLAIAIERHITVFRMQLHTRMSNRRVVVVIVVIWTMAIVMGAIPSVGWNCICDIENCSNMAPLYSDSYLVFWAIFNLVTFVVMVVLYAHIFGYVRQRTMRMSRHSSGPRRNRDTMMSLLKTVVIVLGAFIICWTPGLVLLLLDVCCPQCDVLAYEKFFLLLAEFNSAMNPIIYSYRDKEMSATFRQILCCQRSENPTGPTEGSDRSASSLNHTILAGVHSNDHSVV

SEQ ID NO: 271205 - protein, 365 aa, Artificial Sequence
  derived and/or modified sequence
MEEGAQRSGALGAPHQFTAMNEPQCFYNESIAFFYNRSGKHLATEWNTVSKLVMGLGITVCIFIMLANLLVMVAIYVNRRFHFPIYYLMANLAAADFFAGLAYFYLMFNTGPNTRRLTVSTWLLRQGLIDTSLTASVANLLAIAIERHITVFRMQLHTRMSNRRVVVVIVVIWTMAIVMGAIPSVGWNCICDIENCSNMAPLYSDSYLVFWAIFNLVTFVVMVVLYAHIFGYVRQRTMRMSRHSSGPRRNRDTMMSLLKTVVIVLGAFIICWTPGLVLLLLDVCCPQCDVLAYEKFFLLLAEFNSAMNPIIYSYRDKEMSATFRQILCCQRSENPTGPTEGSDRSASSLNHTILAGVHSNDHSVV

SEQ ID NO: 271206 - protein, 365 aa, Artificial Sequence
  derived and/or modified sequence
MLLLLIPAHSSVLENEFTAMNEPQCFYNESIAFFYNRSGKHLATEWNTVSKLVMGLGITVCIFIMLANLLVMVAIYVNRRFHFPIYYLMANLAAADFFAGLAYFYLMFNTGPNTRRLTVSTWLLRQGLIDTSLTASVANLLAIAIERHITVFRMQLHTRMSNRRVVVVIVVIWTMAIVMGAIPSVGWNCICDIENCSNMAPLYSDSYLVFWAIFNLVTFVVMVVLYAHIFGYVRQRTMRMSRHSSGPRRNRDTMMSLLKTVVIVLGAFIICWTPGLVLLLLDVCCPQCDVLAYEKFFLLLAEFNSAMNPIIYSYRDKEMSATFRQILCCQRSENPTGPTEGSDRSASSLNHTILAGVHSNDHSVV

SEQ ID NO: 271207 - DNA, 1095 bp, Artificial Sequence
  derived and/or modified sequence
atggccgctatatcgacatcaatccccgtgatatctcagcctcagttcaccgctatgaatgaaccccaatgtttctacaatgagagtattgcctttttctataatcgcagcggaaaacatctggctacagaatggaacactgtgagcaagctggtcatggggctcgggatcacagtttgcatcttcattatgttggccaatttacttgtgatggtcgccatctatgtcaatcgacggtttcacttccccatttactatctgatggctaatcttgcggccgctgacttttttgcgggccttgcctatttctacctgatgtttaatactgggcctaatacccggcgtctcaccgtgagtacctggctcctgcgtcaaggactgattgatacatcactgactgcttccgtagccaatctgctggcaatcgcaatcgagagacacataactgtctttagaatgcagttgcacacccgaatgagcaatcgcagggttgtggtcgtcattgtggttatctggactatggccattgtgatgggtgcaatcccatcagtcggctggaactgtatctgcgacatcgaaaactgcagtaatatggctccactgtactccgacagttatctcgtgttctgggcgatcttcaatctggtgaccttcgttgtgatggtggtgctgtacgcccatatcttcggctatgttaggcagagaaccatgagaatgagcagacactcttcgggccccaggaggaaccgcgacaccatgatgagccttctcaagactgtggttatcgtcctgggagcttttattatttgttggacacctgggctcgtactgttgcttctcgacgtgtgctgcccacaatgcgatgtcctggcttacgagaaattttttctgttactggcggaattcaacagcgccatgaatcctatcatctattcctacagagacaaagaaatgtcggccactttccggcagatactttgctgtcagagatcagaaaatcctaccgggcctacagaaggttcggataggagcgcatcatcactaaatcacacaatcttagccggcgtgcatagtaatgatcattctgttgtctag

SEQ ID NO: 271208 - DNA, 1095 bp, Artificial Sequence
  derived and/or modified sequence
atggccgctatctcgaccagcatcccagtgatcagccagccacaattcaccgcaatgaatgagccgcaatgtttctacaacgagagcatcgcgtttttctacaatagaagtggcaagcaccttgccacagagtggaataccgtttccaagcttgtgatggggctgggaattactgtgtgcatctttatcatgctggccaatctgctggtgatggttgccatctatgtgaacagaaggttccatttccccatttactatctgatggctaatctcgccgccgccgatttcttcgcaggcctggcctatttctatctaatgttcaacaccgggccgaatacacgtcggctcacagtgagcacctggctcttgcggcagggactgatcgatacatccctgaccgcttccgtcgccaatctgctggccatcgcgattgaacgacacatcacagttttcaggatgcagctgcacactaggatgagtaaccgtcgggtggtggtggtgatcgtggtgatctggactatggccatcgtgatgggggccatcccatcggtgggttggaattgcatatgcgacattgagaactgctccaacatggccccactatatagcgactcctacctagtcttctgggcgatttttaacctcgtcacatttgtagtcatggtcgtactgtacgcccacatattcgggtacgtgcggcaacggacgatgagaatgagccgacacagttccggccctcggcgtaatcgggacacaatgatgtcgctgctgaagaccgtcgtcattgtccttggcgcatttatcatctgctggactccaggccttgtgctgttgctgctcgatgtctgttgcccgcagtgcgacgtattggcatatgaaaaatttttcctactgctcgctgagtttaattctgctatgaatcccattatatacagttatcgagataaggagatgagtgcaacgtttcgccaaattctttgttgtcagagatccgaaaatccaactgggcctacagagggatcagataggtctgccagcagccttaaccacaccatactcgcgggggtgcactcgaacgatcatagcgtagtatag

SEQ ID NO: 271209 - DNA, 1095 bp, Artificial Sequence
  derived and/or modified sequence
atggccgccatctccacaagcattccagtcataagccaacctcaattcaccgcgatgaacgagccacagtgtttctataatgagtccattgcattcttttataacagaagcggaaaacatctggcaacggaatggaacaccgtgagcaagctggtgatgggcctggggatcacggtatgtattttcattatgctggccaacctcttggttatggttgctatctatgtgaatcgccgtttccactttccaatttactatcttatggccaatcttgcagccgctgacttctttgctggcttagcttatttttacctgatgtttaatacaggaccaaatactcggcgactgacagtaagtacctggttacttcgtcaggggcttatcgacacatccttgacagccagcgtggctaacctgttggcgattgcgattgagaggcatattactgtgtttaggatgcagctacatacaagaatgtctaatcgcagagtagtggtcgtaattgtggttatctggaccatggcaatcgttatgggagccatcccatccgttgggtggaattgcatctgcgacattgaaaattgttcaaacatggctccactatactcagactcgtacttggtgttttgggccatctttaatctcgtgacatttgtcgtgatggtggtgctctacgcccacattttcggctatgtccgccagcgtaccatgagaatgagccgccattccagcggacctcgcaggaatagggacaccatgatgagcttgcttaaaaccgttgtcatcgtcctcggagccttcataatctgttggacaccagggctcgtcctgctgctcctggacgtgtgctgtccacagtgcgacgttctagcctacgagaaatttttcctgcttctcgcggaattcaattcagcaatgaacccaattatatactcttaccgtgataaggaaatgtctgcaacttttagacagatcctgtgctgccagcggtccgagaacccaactgggccaacagagggtagcgaccgcagcgcatctagcctgaaccataccatcttggccggggtgcactctaacgaccattccgtggtatag

SEQ ID NO: 271210 - DNA, 549 bp, Artificial Sequence
  derived and/or modified sequence
atggcagctataagtacaagcattcctgtgatctcacagccgcaatttacagccatgaacgagccacaatgcttttataacgagagtatcgcatttttttacaatagaagcgggaaacacctggccactgagtggaacaccgtgtcaaagcttgtgatgggactaggcataacagtgtgcatcttcattatgctggccaaccttctggtcatggttgcaatatacgtaaaccgtcgcttccatttccccatttattacctcatggctaatctagccgcagccgacttttttgccggtctggcatacttttacttgatgtttaataccgggcccaacacacgccgcctcaccgtgagtacctggctccttagacaaggtctcattgacactagtctgaccgctagtgtggcaaatctcctagcaattgccatcgagagacacatcactgtgttccggatgcagctacacactcgcatgtccaaccggcgcgtcgttgtcgtgatagtggtgatctggactatggcaatcgtcatgggcgctattccctag

SEQ ID NO: 271211 - DNA, 1041 bp, Artificial Sequence
  derived and/or modified sequence
atgaatgagcctcagtgcttttacaacgaaagtatcgcattcttttacaatcggtcagggaagcatttggcgaccgaatggaataccgtctccaagttggtgatgggcctagggattaccgtgtgcatctttattatgctggccaacctgttagtgatggtggctatctacgtaaatcgtcgttttcactttccaatttactatttaatggccaatttggcggcagccgacttcttcgccggactggcctacttttacttaatgtttaacaccggtccaaacacccgcagactcaccgttagcacctggcttctgaggcagggcctgatagacacaagcctgaccgcctccgtagctaacctgctggcgattgccatcgaaagacacattaccgttttcagaatgcaactacatacaaggatgtccaatcgacgggttgtggtggttatcgtggttatatggacaatggcaatcgtaatgggcgcaataccatctgtgggatggaattgtatctgcgatatcgaaaattgtagcaatatggcacccttgtacagcgatagttacctcgttttttgggctatattcaacctcgtcaccttcgttgttatggtggtcctctacgcccacatctttggttatgttcggcagagaactatgagaatgagcaggcacagttcaggccctcgacggaacagggacactatgatgagcctgttgaaaaccgtggtcatcgtgctcggggctttcatcatttgttggacaccaggcctcgtcctgttactgctggacgtctgttgccctcagtgtgatgtgctagcctacgagaaattcttcctcctgcttgccgagtttaatagtgcaatgaaccctatcatttatagctaccgtgacaaggagatgtcagccacattcaggcagattttgtgctgccaacgaagtgagaatcccactggaccaactgaaggctctgatagatctgcttccagtctgaatcacactatcctggcaggggtgcacagcaatgaccatagcgtggtctag

SEQ ID NO: 271212 - DNA, 1098 bp, Artificial Sequence
  derived and/or modified sequence
atggaggagggcgcccagcgctctggagccctgggcgctccacatcaatttaccgccatgaacgagccacagtgcttttataacgaaagcatcgcttttttctacaacaggtcaggaaaacacctggcaactgagtggaatacagtgtctaagctcgtgatgggactgggaatcactgtatgcatcttcattatgctcgccaacctcctggttatggtggccatctacgtgaacaggcgcttccacttcccaatttactatctgatggctaaccttgctgctgcagacttctttgccggattggcatacttctacctgatgttcaacaccggaccgaacacacggaggcttacggtctcaacgtggctgctgcggcaaggtctgattgatacaagtttgacagccagcgtggccaacctgctggccattgcaatcgagaggcacatcacggtgtttaggatgcaactccatacacggatgtccaacaggcgggtggttgtagtcattgtagtaatttggacgatggcaatagttatgggtgcaataccttctgtcggttggaattgcatctgtgacatcgagaactgctctaacatggcaccgttatactctgattcctatttagtattctgggcaatttttaaccttgtcactttcgtggtcatggtggttctgtacgcccacatcttcggctatgtacgccagagaacaatgcgaatgtctcgccactcctcaggacccaggaggaatagagatactatgatgtcactgttgaagaccgtggttatcgtgctcggggcgttcattatatgttggacgcccggactcgtgctgctgttgcttgacgtttgctgcccacaatgtgatgtgctcgcctacgaaaaattctttctgttgctggccgaattcaacagtgctatgaaccctatcatctattcttatagggataaagaaatgtcggccacgttccgccaaattctgtgttgccagaggtctgagaatccaacaggacccacagaggggagcgacaggtccgcttcttcactcaatcataccatcctggccggagtgcatagtaacgaccattcggtggtttag

SEQ ID NO: 271213 - DNA, 1098 bp, Artificial Sequence
  derived and/or modified sequence
atgctgctcctgctgatccctgcacacagtagcgtgttagaaaatgagttcactgccatgaacgaaccccagtgtttctacaacgagagtatcgcctttttttataaccgttctggcaaacacctggcgaccgaatggaatactgtgtctaagttggtcatgggactgggtatcactgtgtgcattttcataatgctcgcaaacctgctggtcatggtggctatctacgttaataggcgatttcattttccaatttattatctcatggccaacctcgccgctgccgatttctttgccggcctggcttatttttatctgatgtttaacactggtcctaatacacgcagactcacagtttcgacgtggctcctccgccaaggactaatagacaccagcttaacagccagtgtggccaatctgctggccatcgcaatcgaacgccacatcacggtgtttcgaatgcaattgcacacccgaatgagtaatcggcgcgtcgtcgtggtgatcgtcgtgatctggaccatggccattgtgatgggggcaataccttctgtaggctggaactgcatatgcgacatcgagaattgcagcaacatggcccctttgtatagcgacagttacctagttttctgggccattttcaatctggtcaccttcgtggttatggtggtgctgtacgcccatatcttcggctacgtgcgccagaggacaatgcgaatgagtcggcactcctctggacctcggaggaatagagatacgatgatgagtctcctcaaaacggttgtcatcgtgctcggggcgtttataatatgttggactccggggctagtacttcttctactggatgtgtgttgccctcaatgcgacgtgcttgcttacgaaaagtttttcctgctactcgcagaattcaactcagctatgaatccgattatctactcctatagggataaggaaatgtccgccacctttcgtcagatcttgtgttgtcagagatcggaaaacccaacagggcctaccgaagggagtgaccggtccgctagctccctcaatcatacaattttggccggagttcatagcaatgatcacagtgttgtgtag

SEQ ID NO: 271214 - DNA, 1095 bp, Artificial Sequence
  derived and/or modified sequence
atggccgccatcagcaccagcatccctgtgatcagccagccccagttcaccgccatgaatgagccccagtgcttctacaatgaaagcatcgccttcttctacaacagaagtggcaagcacctggccacagagtggaacacagtgtccaagctggtgatgggcctgggcatcaccgtgtgcatcttcatcatgctggccaacctgctggtgatggtggccatctacgtgaacagacgcttccacttccccatctactacctgatggccaacctggccgctgctgacttctttgctggcctggcctacttctacctgatgttcaacacaggccccaacacccggcggctgactgtgtccacctggctgctgcggcagggcctgattgacaccagcctgacagcctctgtggccaacctgctggccatcgccatcgagcggcacatcaccgtcttcaggatgcagctgcacaccaggatgagcaacagaagagtggtggtggtgattgtggtgatctggaccatggccatcgtgatgggcgccatccccagcgtgggctggaactgcatctgtgacatcgagaactgcagcaacatggcccccctgtacagcgacagctacctggtgttctgggccatcttcaacctggtgacctttgtggtgatggtggtgctgtatgcccacatcttcggctacgtgcggcagaggaccatgaggatgagccgccacagcagcggccccaggaggaacagagacaccatgatgagcctgctgaagacagtggtgattgtgctgggcgccttcatcatctgctggaccccaggcctggtgctgctgctgctggatgtgtgctgcccccagtgtgatgtgctggcctatgagaagttcttcctgctgctggccgagttcaacagcgccatgaaccccatcatctacagctacagagacaaggagatgtctgccaccttccggcagatcctgtgctgccagaggtctgagaaccccaccggccccacagagggcagtgacagaagtgccagcagcctgaaccacaccatcctggccggcgtgcacagcaatgaccacagcgtggtgtag

SEQ ID NO: 271215 - DNA, 549 bp, Artificial Sequence
  derived and/or modified sequence
atggccgccatcagcaccagcatccctgtgatcagccagccccagttcaccgccatgaatgagccccagtgcttctacaatgaaagcatcgccttcttctacaacagaagtggcaagcacctggccacagagtggaacacagtgtccaagctggtgatgggcctgggcatcaccgtgtgcatcttcatcatgctggccaacctgctggtgatggtggccatctacgtgaacagacgcttccacttccccatctactacctgatggccaacctggccgctgctgacttctttgctggcctggcctacttctacctgatgttcaacacaggccccaacacccggcggctgactgtgtccacctggctgctgcggcagggcctgattgacaccagcctgacagcctctgtggccaacctgctggccatcgccatcgagcggcacatcaccgtcttcaggatgcagctgcacaccaggatgagcaacagaagagtggtggtggtgattgtggtgatctggaccatggccatcgtgatgggcgccatcccctag

SEQ ID NO: 271216 - DNA, 1041 bp, Artificial Sequence
  derived and/or modified sequence
atgaatgagccccagtgcttctacaatgaaagcatcgccttcttctacaacagaagtggcaagcacctggccacagagtggaacacagtgtccaagctggtgatgggcctgggcatcaccgtgtgcatcttcatcatgctggccaacctgctggtgatggtggccatctacgtgaacagacgcttccacttccccatctactacctgatggccaacctggccgctgctgacttctttgctggcctggcctacttctacctgatgttcaacacaggccccaacacccggcggctgactgtgtccacctggctgctgcggcagggcctgattgacaccagcctgacagcctctgtggccaacctgctggccatcgccatcgagcggcacatcaccgtcttcaggatgcagctgcacaccaggatgagcaacagaagagtggtggtggtgattgtggtgatctggaccatggccatcgtgatgggcgccatccccagcgtgggctggaactgcatctgtgacatcgagaactgcagcaacatggcccccctgtacagcgacagctacctggtgttctgggccatcttcaacctggtgacctttgtggtgatggtggtgctgtatgcccacatcttcggctacgtgcggcagaggaccatgaggatgagccgccacagcagcggccccaggaggaacagagacaccatgatgagcctgctgaagacagtggtgattgtgctgggcgccttcatcatctgctggaccccaggcctggtgctgctgctgctggatgtgtgctgcccccagtgtgatgtgctggcctatgagaagttcttcctgctgctggccgagttcaacagcgccatgaaccccatcatctacagctacagagacaaggagatgtctgccaccttccggcagatcctgtgctgccagaggtctgagaaccccaccggccccacagagggcagtgacagaagtgccagcagcctgaaccacaccatcctggccggcgtgcacagcaatgaccacagcgtggtgtag

SEQ ID NO: 271217 - DNA, 1098 bp, Artificial Sequence
  derived and/or modified sequence
atggaggagggcgcccagaggtctggggccctgggcgccccccaccagttcaccgccatgaatgagccccagtgcttctacaatgaaagcatcgccttcttctacaacagaagtggcaagcacctggccacagagtggaacacagtgtccaagctggtgatgggcctgggcatcaccgtgtgcatcttcatcatgctggccaacctgctggtgatggtggccatctacgtgaacagacgcttccacttccccatctactacctgatggccaacctggccgctgctgacttctttgctggcctggcctacttctacctgatgttcaacacaggccccaacacccggcggctgactgtgtccacctggctgctgcggcagggcctgattgacaccagcctgacagcctctgtggccaacctgctggccatcgccatcgagcggcacatcaccgtcttcaggatgcagctgcacaccaggatgagcaacagaagagtggtggtggtgattgtggtgatctggaccatggccatcgtgatgggcgccatccccagcgtgggctggaactgcatctgtgacatcgagaactgcagcaacatggcccccctgtacagcgacagctacctggtgttctgggccatcttcaacctggtgacctttgtggtgatggtggtgctgtatgcccacatcttcggctacgtgcggcagaggaccatgaggatgagccgccacagcagcggccccaggaggaacagagacaccatgatgagcctgctgaagacagtggtgattgtgctgggcgccttcatcatctgctggaccccaggcctggtgctgctgctgctggatgtgtgctgcccccagtgtgatgtgctggcctatgagaagttcttcctgctgctggccgagttcaacagcgccatgaaccccatcatctacagctacagagacaaggagatgtctgccaccttccggcagatcctgtgctgccagaggtctgagaaccccaccggccccacagagggcagtgacagaagtgccagcagcctgaaccacaccatcctggccggcgtgcacagcaatgaccacagcgtggtgtag

SEQ ID NO: 271218 - DNA, 1098 bp, Artificial Sequence
  derived and/or modified sequence
atgctgctgctgctgatcccagcccacagctctgtgctggagaatgagttcaccgccatgaatgagccccagtgcttctacaatgaaagcatcgccttcttctacaacagaagtggcaagcacctggccacagagtggaacacagtgtccaagctggtgatgggcctgggcatcaccgtgtgcatcttcatcatgctggccaacctgctggtgatggtggccatctacgtgaacagacgcttccacttccccatctactacctgatggccaacctggccgctgctgacttctttgctggcctggcctacttctacctgatgttcaacacaggccccaacacccggcggctgactgtgtccacctggctgctgcggcagggcctgattgacaccagcctgacagcctctgtggccaacctgctggccatcgccatcgagcggcacatcaccgtcttcaggatgcagctgcacaccaggatgagcaacagaagagtggtggtggtgattgtggtgatctggaccatggccatcgtgatgggcgccatccccagcgtgggctggaactgcatctgtgacatcgagaactgcagcaacatggcccccctgtacagcgacagctacctggtgttctgggccatcttcaacctggtgacctttgtggtgatggtggtgctgtatgcccacatcttcggctacgtgcggcagaggaccatgaggatgagccgccacagcagcggccccaggaggaacagagacaccatgatgagcctgctgaagacagtggtgattgtgctgggcgccttcatcatctgctggaccccaggcctggtgctgctgctgctggatgtgtgctgcccccagtgtgatgtgctggcctatgagaagttcttcctgctgctggccgagttcaacagcgccatgaaccccatcatctacagctacagagacaaggagatgtctgccaccttccggcagatcctgtgctgccagaggtctgagaaccccaccggccccacagagggcagtgacagaagtgccagcagcctgaaccacaccatcctggccggcgtgcacagcaatgaccacagcgtggtgtag

SEQ ID NO: 271219 - DNA, 2687 bp, Artificial Sequence
  derived and/or modified sequence
acggcgcgctgggctcacactgtcccgccgcggacgggctttgtggttgggggcgcgcgtgcgagtgccagtgagagtgtgggtgcgcgctgtgggccgcggcgcgggtgggtggccgtgcgttcttgcgagccggcctgcaggaggcgaggctcccctggcctcccgcacccagcggcggaccgagcccctggagggaagttgccgcagccgcccgggccgccggccctcctgtcccgcgccaggtacacagcttctcctagcatgacttcgatctgatcagcaaacaagaaaatttgtctcccgtagttctggggcgtgttcaccacctacaaccacagagctgtcatggctgccatctctacttccatccctgtaatttcacagccccagttcacagccatgaatgaaccacagtgcttctacaacgagtccattgccttcttttataaccgaagtggaaagcatcttgccacagaatggaacacagtcagcaagctggtgatgggacttggaatcactgtttgtatcttcatcatgttggccaacctattggtcatggtggcaatctatgtcaaccgccgcttccattttcctatttattacctaatggctaatctggctgctgcagacttctttgctgggttggcctacttctatctcatgttcaacacaggacccaatactcggagactgactgttagcacatggctccttcgtcagggcctcattgacaccagcctgacggcatctgtggccaacttactggctattgcaatcgagaggcacattacggttttccgcatgcagctccacacacggatgagcaaccggcgggtagtggtggtcattgtggtcatctggactatggccatcgttatgggtgctatacccagtgtgggctggaactgtatctgtgatattgaaaattgttccaacatggcacccctctacagtgactcttacttagtcttctgggccattttcaacttggtgacctttgtggtaatggtggttctctatgctcacatctttggctatgttcgccagaggactatgagaatgtctcggcatagttctggaccccggcggaatcgggataccatgatgagtcttctgaagactgtggtcattgtgcttggggcctttatcatctgctggactcctggattggttttgttacttctagacgtgtgctgtccacagtgcgacgtgctggcctatgagaaattcttccttctccttgctgaattcaactctgccatgaaccccatcatttactcctaccgcgacaaagaaatgagcgccacctttaggcagatcctctgctgccagcgcagtgagaaccccaccggccccacagaaggctcagaccgctcggcttcctccctcaaccacaccatcttggctggagttcacagcaatgaccactctgtggtttagaacggaaactgagatgaggaaccagccgtcctctcttggaggataaacagcctccccctacccaattgccagggcaaggtggggtgtgagagaggagaaaagtcaactcatgtacttaaacactaaccaatgacagtatttgttcctggaccccacaagacttgatatatattgaaaattagcttatgtgacaaccctcatcttgatccccatcccttctgaaagtaggaagttggagctcttgcaatggaattcaagaacagactctggagtgtccatttagactacactaactagacttttaaaagattttgtgtggtttggtgcaagtcagaataaattctggctagttgaatccacaacttcatttatatacaggcttcccttttttatttttaaaggatacgtttcacttaataaacacgtttatgcctatcagcatgtttgtgatggatgagactatggactgcttttaaactaccataattccattttttcccttacataggaaaactgtaagttggaattatcttttgtttagaaagcatgcatgtaatgtatgtatgcagtatgccttacttaaaaagattaaaaggatactaatgttaaatcttctaggaaatagaacctagacttcaaagccagtatttgtttaggtcatgaagcaaacaatgctctaatcacaatattaactgtttaattaaaatgttgtaacaagtataaaacagggaatgtaagtttattaccaaagtgatatgtattccaaaaaagtcatagaagatgaagcactataatattgttcccatatatttaaaatacccaagtacattctaattaccagtatatcagaggaaaattttcgtagtctttgtaaaataatatactcatcatagaaaacttgaaaaatgcagaaatgtataaaaaagcaaaaatgattactgataatatcacaacccagaagtaaccacctttaaaaagcaacccccatgtatgcctatatgtgtattgtatactttttttacataattggagtcatactgtaaacagttttataagtagatctttttcattgcaaaattgccacattttcttatggcattaaaaattttacaaaaacataattttaatggctatattatattccatttaatggatgcaactcagtttatttaaccattcccatgttgttaactatttaggttgtttctaattttcattattataaagttgcagaaatttggtgt

SEQ ID NO: 271220 - DNA, 2995 bp, Artificial Sequence
  derived and/or modified sequence
agaaagcagggctgcatggtgtggggatgctgctgctactcattcctgctcattccagtgttctggaaaatgaggtgtggacgtctgatttatgaagctccccatccacctatctgagtacctgacttctcaggactgacacctacagcatcaggtacacagcttctcctagcatgacttcgatctgatcagcaaacaagaaaatttgtctcccgtagttctggggcgtgttcaccacctacaaccacagagctgtcatggctgccatctctacttccatccctgtaatttcacagccccagttcacagccatgaatgaaccacagtgcttctacaacgagtccattgccttcttttataaccgaagtggaaagcatcttgccacagaatggaacacagtcagcaagctggtgatgggacttggaatcactgtttgtatcttcatcatgttggccaacctattggtcatggtggcaatctatgtcaaccgccgcttccattttcctatttattacctaatggctaatctggctgctgcagacttctttgctgggttggcctacttctatctcatgttcaacacaggacccaatactcggagactgactgttagcacatggctccttcgtcagggcctcattgacaccagcctgacggcatctgtggccaacttactggctattgcaatcgagaggcacattacggttttccgcatgcagctccacacacggatgagcaaccggcgggtagtggtggtcattgtggtcatctggactatggccatcgttatgggtgctatacccagtgtgggctggaactgtatctgtgatattgaaaattgttccaacatggcacccctctacagtgactcttacttagtcttctgggccattttcaacttggtgacctttgtggtaatggtggttctctatgctcacatctttggctatgttcgccagaggactatgagaatgtctcggcatagttctggaccccggcggaatcgggataccatgatgagtcttctgaagactgtggtcattgtgcttggggcctttatcatctgctggactcctggattggttttgttacttctagacgtgtgctgtccacagtgcgacgtgctggcctatgagaaattcttccttctccttgctgaattcaactctgccatgaaccccatcatttactcctaccgcgacaaagaaatgagcgccacctttaggcagatcctctgctgccagcgcagtgagaaccccaccggccccacagaaggctcagaccgctcggcttcctccctcaaccacaccatcttggctggagttcacagcaatgaccactctgtggtttagaacggaaactgagatgaggaaccagccgtcctctcttggaggataaacagcctccccctacccaattgccagggcaaggtggggtgtgagagaggagaaaagtcaactcatgtacttaaacactaaccaatgacagtatttgttcctggaccccacaagacttgatatatattgaaaattagcttatgtgacaaccctcatcttgatccccatcccttctgaaagtaggaagttggagctcttgcaatggaattcaagaacagactctggagtgtccatttagactacactaactagacttttaaaagattttgtgtggtttggtgcaagtcagaataaattctggctagttgaatccacaacttcatttatatacaggcttcccttttttatttttaaaggatacgtttcacttaataaacacgtttatgcctatcagcatgtttgtgatggatgagactatggactgcttttaaactaccataattccattttttcccttacataggaaaactgtaagttggaattatcttttgtttagaaagcatgcatgtaatgtatgtatgcagtatgccttacttaaaaagattaaaaggatactaatgttaaatcttctaggaaatagaacctagacttcaaagccagtatttgtttaggtcatgaagcaaacaatgctctaatcacaatattaactgtttaattaaaatgttgtaacaagtataaaacagggaatgtaagtttattaccaaagtgatatgtattccaaaaaagtcatagaagatgaagcactataatattgttcccatatatttaaaatacccaagtacattctaattaccagtatatcagaggaaaattttcgtagtctttgtaaaataatatactcatcatagaaaacttgaaaaatgcagaaatgtataaaaaagcaaaaatgattactgataatatcacaacccagaagtaaccacctttaaaaagcaacccccatgtatgcctatatgtgtattgtatactttttttacataattggagtcatactgtaaacagttttataagtagatctttttcattgcaaaattgccacattttcttatggcattaaaaattttacaaaaacataattttaatggctatattatattccatttaatggatgcaactcagtttatttaaccattcccatgttgttaactatttaggttgtttctaattttcattattataaagttgcagaaatttggtgtacataaaactgtctccatataattgattattaggatatattcccatgaaggattctttttttaaaaaaatgtgaaatgtcatcttgtacttacacctttcatgaaaagggatttcctgcttttgtactgcatgggtggcagttgtgaggaaaagccagtcaaatgacctttttacaaaagaaatgcagtggtcacttcagttgagagtgactttttaatacaacaagatcaactagaagaattcaactgtctcaagaatcaaggtaccccaatatatctcgcaattccaaactttgtttgagggactcgttatccagctcttggtagccacacctgcaatgtaaaatggaagaaaatgcaaagaaaccaaatgtgccgagtgaataaaggattgtcata

SEQ ID NO: 271221 - DNA, 3637 bp, Artificial Sequence
  derived and/or modified sequence
gtggttgggggcgcgcgtgcgagtgccagtgagagtgtgggtgcgcgctgtgggccgcggcgcgggtgggtggccgtgcgttcttgcgagccggcctgcaggaggcgaggctcccctggcctcccgcacccagcggcggaccgagcccctggagggaagttgccgcagccgcccgggccgccggccctcctgtcccgcgccaggtggacgtctgatttatgaagctccccatccacctatctgagtacctgacttctcaggactgacacctacagcatcaggtacacagcttctcctagcatgacttcgatctgatcagcaaacaagaaaatttgtctcccgtagttctggggcgtgttcaccacctacaaccacagagctgtcatggctgccatctctacttccatccctgtaatttcacagccccagttcacagccatgaatgaaccacagtgcttctacaacgagtccattgccttcttttataaccgaagtggaaagcatcttgccacagaatggaacacagtcagcaagctggtgatgggacttggaatcactgtttgtatcttcatcatgttggccaacctattggtcatggtggcaatctatgtcaaccgccgcttccattttcctatttattacctaatggctaatctggctgctgcagacttctttgctgggttggcctacttctatctcatgttcaacacaggacccaatactcggagactgactgttagcacatggctccttcgtcagggcctcattgacaccagcctgacggcatctgtggccaacttactggctattgcaatcgagaggcacattacggttttccgcatgcagctccacacacggatgagcaaccggcgggtagtggtggtcattgtggtcatctggactatggccatcgttatgggtgctatacccagtgtgggctggaactgtatctgtgatattgaaaattgttccaacatggcacccctctacagtgactcttacttagtcttctgggccattttcaacttggtgacctttgtggtaatggtggttctctatgctcacatctttggctatgttcgccagaggactatgagaatgtctcggcatagttctggaccccggcggaatcgggataccatgatgagtcttctgaagactgtggtcattgtgcttggggcctttatcatctgctggactcctggattggttttgttacttctagacgtgtgctgtccacagtgcgacgtgctggcctatgagaaattcttccttctccttgctgaattcaactctgccatgaaccccatcatttactcctaccgcgacaaagaaatgagcgccacctttaggcagatcctctgctgccagcgcagtgagaaccccaccggccccacagaaggctcagaccgctcggcttcctccctcaaccacaccatcttggctggagttcacagcaatgaccactctgtggtttagaacggaaactgagatgaggaaccagccgtcctctcttggaggataaacagcctccccctacccaattgccagggcaaggtggggtgtgagagaggagaaaagtcaactcatgtacttaaacactaaccaatgacagtatttgttcctggaccccacaagacttgatatatattgaaaattagcttatgtgacaaccctcatcttgatccccatcccttctgaaagtaggaagttggagctcttgcaatggaattcaagaacagactctggagtgtccatttagactacactaactagacttttaaaagattttgtgtggtttggtgcaagtcagaataaattctggctagttgaatccacaacttcatttatatacaggcttcccttttttatttttaaaggatacgtttcacttaataaacacgtttatgcctatcagcatgtttgtgatggatgagactatggactgcttttaaactaccataattccattttttcccttacataggaaaactgtaagttggaattatcttttgtttagaaagcatgcatgtaatgtatgtatgcagtatgccttacttaaaaagattaaaaggatactaatgttaaatcttctaggaaatagaacctagacttcaaagccagtatttgtttaggtcatgaagcaaacaatgctctaatcacaatattaactgtttaattaaaatgttgtaacaagtataaaacagggaatgtaagtttattaccaaagtgatatgtattccaaaaaagtcatagaagatgaagcactataatattgttcccatatatttaaaatacccaagtacattctaattaccagtatatcagaggaaaattttcgtagtctttgtaaaataatatactcatcatagaaaacttgaaaaatgcagaaatgtataaaaaagcaaaaatgattactgataatatcacaacccagaagtaaccacctttaaaaagcaacccccatgtatgcctatatgtgtattgtatactttttttacataattggagtcatactgtaaacagttttataagtagatctttttcattgcaaaattgccacattttcttatggcattaaaaattttacaaaaacataattttaatggctatattatattccatttaatggatgcaactcagtttatttaaccattcccatgttgttaactatttaggttgtttctaattttcattattataaagttgcagaaatttggtgtacataaaactgtctccatataattgattattaggatatattcccatgaaggattctttttttaaaaaaatgtgaaatgtcatcttgtacttacacctttcatgaaaagggatttcctgcttttgtactgcatgggtggcagttgtgaggaaaagccagtcaaatgacctttttacaaaagaaatgcagtggtcacttcagttgagagtgactttttaatacaacaagatcaactagaagaattcaactgtctcaagaatcaaggtaccccaatatatctcgcaattccaaactttgtttgagggactcgttatccagctcttggtagccacacctgcaatgtaaaatggaagaaaatgcaaagaaaccaaatgtgccgagtgaataaaggattgtcatatcaattagtgtgggtccatctgtagcaaatgggttgagtgtgtcagtatgtggttggttactgtgtattcgccaggaatcaccccgataggctgccaccctattaggtgatacctgtttaatatgttgtccaggtagactagtagttgcatcagtttgctgtaacaagtaaccagtgaggtaacacagtggtgaagcaggtcaggggaggtcaggaggatgtctgagagaaagaagtccgggagatgaatggctgtctaggaaggaggatgtcagtgcacggttagtgtttgagcagagggcagacttgtaaagtacctgtagtgaaaagaatgtggggacccgattagcagaaaggtgtttgcacgtactttatacaaaatacagaatactttatattggaagtgaaagaaatgaacgtggacttttacacatgtgcatatttttctggaggctatatggattatttgaaatgaaaagcatactaattggactttaataaatcattttcaatca

SEQ ID NO: 271222 - DNA, 1019 bp, Artificial Sequence
  derived and/or modified sequence
ctggcggctgacgctccctgagtggcgactccgtctccagccccgctgcggagcgcgggccggatctggggcggccagggcccggagccgcggagccctccccgccgcccggccgagcacgggaccccggcggggtgggcgcagggggcggccccgctctgggcgactgccgaggggcgggcggagggccgggctcggctggcggtggggcgggggccgccgggactgggcgcgcggcctgaagccagcccgggggcggcaggagagggacgcgcggcggcagcgagcgcaggtggacgtctgatttatgaagctccccatccacctatctgagtacctgacttctcaggactgacacctacagcatcaggtacacagcttctcctagcatgacttcgatctgatcagcaaacaagaaaatttgtctcccgtagttctggggcgtgttcaccacctacaaccacagagctgtcatggctgccatctctacttccatccctgtaatttcacagccccagttcacagccatgaatgaaccacagtgcttctacaacgagtccattgccttcttttataaccgaagtggaaagcatcttgccacagaatggaacacagtcagcaagctggtgatgggacttggaatcactgtttgtatcttcatcatgttggccaacctattggtcatggtggcaatctatgtcaaccgccgcttccattttcctatttattacctaatggctaatctggctgctgcagacttctttgctgggttggcctacttctatctcatgttcaacacaggacccaatactcggagactgactgttagcacatggctccttcgtcagggcctcattgacaccagcctgacggcatctgtggccaacttactggctattgcaatcgagaggcacattacggttttccgcatgcagctccacacacggatgagcaaccggcgggtagtggtggtcattgtggtcatctggactatggccatcgttatgggtgctataccc

SEQ ID NO: 271223 - DNA, 2490 bp, Artificial Sequence
  derived and/or modified sequence
ctcaagggaacagctcctgcccaggtctgtgggcactcagcatggatttcagtctccctgtgagtgatgggaaagaactaacagaggtggacgtctgatttatgaagctccccatccacctatctgagtacctgacttctcaggactgacacctacagcatcaggtacacagcttctcctagcatgacttcgatctgatcagcaaacaagaaaatttgtctcccgtagttctggggcgtgttcaccacctacaaccacagagctgtcatggctgccatctctacttccatccctgtaatttcacagccccagtgggaggtgatttcttctttggcgagagttcacagccatgaatgaaccacagtgcttctacaacgagtccattgccttcttttataaccgaagtggaaagcatcttgccacagaatggaacacagtcagcaagctggtgatgggacttggaatcactgtttgtatcttcatcatgttggccaacctattggtcatggtggcaatctatgtcaaccgccgcttccattttcctatttattacctaatggctaatctggctgctgcagacttctttgctgggttggcctacttctatctcatgttcaacacaggacccaatactcggagactgactgttagcacatggctccttcgtcagggcctcattgacaccagcctgacggcatctgtggccaacttactggctattgcaatcgagaggcacattacggttttccgcatgcagctccacacacggatgagcaaccggcgggtagtggtggtcattgtggtcatctggactatggccatcgttatgggtgctatacccagtgtgggctggaactgtatctgtgatattgaaaattgttccaacatggcacccctctacagtgactcttacttagtcttctgggccattttcaacttggtgacctttgtggtaatggtggttctctatgctcacatctttggctatgttcgccagaggactatgagaatgtctcggcatagttctggaccccggcggaatcgggataccatgatgagtcttctgaagactgtggtcattgtgcttggggcctttatcatctgctggactcctggattggttttgttacttctagacgtgtgctgtccacagtgcgacgtgctggcctatgagaaattcttccttctccttgctgaattcaactctgccatgaaccccatcatttactcctaccgcgacaaagaaatgagcgccacctttaggcagatcctctgctgccagcgcagtgagaaccccaccggccccacagaaggctcagaccgctcggcttcctccctcaaccacaccatcttggctggagttcacagcaatgaccactctgtggtttagaacggaaactgagatgaggaaccagccgtcctctcttggaggataaacagcctccccctacccaattgccagggcaaggtggggtgtgagagaggagaaaagtcaactcatgtacttaaacactaaccaatgacagtatttgttcctggaccccacaagacttgatatatattgaaaattagcttatgtgacaaccctcatcttgatccccatcccttctgaaagtaggaagttggagctcttgcaatggaattcaagaacagactctggagtgtccatttagactacactaactagacttttaaaagattttgtgtggtttggtgcaagtcagaataaattctggctagttgaatccacaacttcatttatatacaggcttcccttttttatttttaaaggatacgtttcacttaataaacacgtttatgcctatcagcatgtttgtgatggatgagactatggactgcttttaaactaccataattccattttttcccttacataggaaaactgtaagttggaattatcttttgtttagaaagcatgcatgtaatgtatgtatgcagtatgccttacttaaaaagattaaaaggatactaatgttaaatcttctaggaaatagaacctagacttcaaagccagtatttgtttaggtcatgaagcaaacaatgctctaatcacaatattaactgtttaattaaaatgttgtaacaagtataaaacagggaatgtaagtttattaccaaagtgatatgtattccaaaaaagtcatagaagatgaagcactataatattgttcccatatatttaaaatacccaagtacattctaattaccagtatatcagaggaaaattttcgtagtctttgtaaaataatatactcatcatagaaaacttgaaaaatgcagaaatgtataaaaaagcaaaaatgattactgataatatcacaacccagaagtaaccacctttaaaaagcaacccccatgtatgcctatatgtgtattgtatactttttttacataattggagtcatactgtaaacagttttataagtagatctttttcattgcaaaattgccacattttcttatggcatt

SEQ ID NO: 271224 - DNA, 1345 bp, Artificial Sequence
  derived and/or modified sequence
gaatggaggagggggcgcagaggtcaggggcgctgggggcgccacaccagttcacagccatgaatgaaccacagtgcttctacaacgagtccattgccttcttttataaccgaagtggaaagcatcttgccacagaatggaacacagtcagcaagctggtgatgggacttggaatcactgtttgtatcttcatcatgttggccaacctattggtcatggtggcaatctatgtcaaccgccgcttccattttcctatttattacctaatggctaatctggctgctgcagacttctttgctgggttggcctacttctatctcatgttcaacacaggacccaatactcggagactgactgttagcacatggctccttcgtcagggcctcattgacaccagcctgacggcatctgtggccaacttactggctattgcaatcgagaggcacattacggttttccgcatgcagctccacacacggatgagcaaccggcgggtagtggtggtcattgtggtcatctggactatggccatcgttatgggtgctatacccagtgtgggctggaactgtatctgtgatattgaaaattgttccaacatggcacccctctacagtgactcttacttagtcttctgggccattttcaacttggtgacctttgtggtaatggtggttctctatgctcacatctttggctatgttcgccagaggactatgagaatgtctcggcatagttctggaccccggcggaatcgggataccatgatgagtcttctgaagactgtggtcattgtgcttggggcctttatcatctgctggactcctggattggttttgttacttctagacgtgtgctgtccacagtgcgacgtgctggcctatgagaaattcttccttctccttgctgaattcaactctgccatgaaccccatcatttactcctaccgcgacaaagaaatgagcgccacctttaggcagatcctctgctgccagcgcagtgagaaccccaccggccccacagaaggctcagaccgctcggcttcctccctcaaccacaccatcttggctggagttcacagcaatgaccactctgtggtttagaacggaaactgagatgaggaaccagccgtcctctcttggaggataaacagcctccccctacccaattgccagggcaaggtggggtgtgagagaggagaaaagtcaactcatgtacttaaacactaaccaatgacagtatttgttcctggaccccacaagacttgatatatattgaaaattagcttatgtgacaaccctcatcttgatccccatcccttctgaaagtaggaagttggagctcttgc

SEQ ID NO: 271225 - DNA, 3255 bp, Artificial Sequence
  derived and/or modified sequence
atgctgctgctactcattcctgctcattccagtgttctggaaaatgagttcacagccatgaatgaaccacagtgcttctacaacgagtccattgccttcttttataaccgaagtggaaagcatcttgccacagaatggaacacagtcagcaagctggtgatgggacttggaatcactgtttgtatcttcatcatgttggccaacctattggtcatggtggcaatctatgtcaaccgccgcttccattttcctatttattacctaatggctaatctggctgctgcagacttctttgctgggttggcctacttctatctcatgttcaacacaggacccaatactcggagactgactgttagcacatggctccttcgtcagggcctcattgacaccagcctgacggcatctgtggccaacttactggctattgcaatcgagaggcacattacggttttccgcatgcagctccacacacggatgagcaaccggcgggtagtggtggtcattgtggtcatctggactatggccatcgttatgggtgctatacccagtgtgggctggaactgtatctgtgatattgaaaattgttccaacatggcacccctctacagtgactcttacttagtcttctgggccattttcaacttggtgacctttgtggtaatggtggttctctatgctcacatctttggctatgttcgccagaggactatgagaatgtctcggcatagttctggaccccggcggaatcgggataccatgatgagtcttctgaagactgtggtcattgtgcttggggcctttatcatctgctggactcctggattggttttgttacttctagacgtgtgctgtccacagtgcgacgtgctggcctatgagaaattcttccttctccttgctgaattcaactctgccatgaaccccatcatttactcctaccgcgacaaagaaatgagcgccacctttaggcagatcctctgctgccagcgcagtgagaaccccaccggccccacagaaggctcagaccgctcggcttcctccctcaaccacaccatcttggctggagttcacagcaatgaccactctgtggtttagaacggaaactgagatgaggaaccagccgtcctctcttggaggataaacagcctccccctacccaattgccagggcaaggtggggtgtgagagaggagaaaagtcaactcatgtacttaaacactaaccaatgacagtatttgttcctggaccccacaagacttgatatatattgaaaattagcttatgtgacaaccctcatcttgatccccatcccttctgaaagtaggaagttggagctcttgcaatggaattcaagaacagactctggagtgtccatttagactacactaactagacttttaaaagattttgtgtggtttggtgcaagtcagaataaattctggctagttgaatccacaacttcatttatatacaggcttcccttttttatttttaaaggatacgtttcacttaataaacacgtttatgcctatcagcatgtttgtgatggatgagactatggactgcttttaaactaccataattccattttttcccttacataggaaaactgtaagttggaattatcttttgtttagaaagcatgcatgtaatgtatgtatgcagtatgccttacttaaaaagattaaaaggatactaatgttaaatcttctaggaaatagaacctagacttcaaagccagtatttgtttaggtcatgaagcaaacaatgctctaatcacaatattaactgtttaattaaaatgttgtaacaagtataaaacagggaatgtaagtttattaccaaagtgatatgtattccaaaaaagtcatagaagatgaagcactataatattgttcccatatatttaaaatacccaagtacattctaattaccagtatatcagaggaaaattttcgtagtctttgtaaaataatatactcatcatagaaaacttgaaaaatgcagaaatgtataaaaaagcaaaaatgattactgataatatcacaacccagaagtaaccacctttaaaaagcaacccccatgtatgcctatatgtgtattgtatactttttttacataattggagtcatactgtaaacagttttataagtagatctttttcattgcaaaattgccacattttcttatggcattaaaaattttacaaaaacataattttaatggctatattatattccatttaatggatgcaactcagtttatttaaccattcccatgttgttaactatttaggttgtttctaattttcattattataaagttgcagaaatttggtgtacataaaactgtctccatataattgattattaggatatattcccatgaaggattctttttttaaaaaaatgtgaaatgtcatcttgtacttacacctttcatgaaaagggatttcctgcttttgtactgcatgggtggcagttgtgaggaaaagccagtcaaatgacctttttacaaaagaaatgcagtggtcacttcagttgagagtgactttttaatacaacaagatcaactagaagaattcaactgtctcaagaatcaaggtaccccaatatatctcgcaattccaaactttgtttgagggactcgttatccagctcttggtagccacacctgcaatgtaaaatggaagaaaatgcaaagaaaccaaatgtgccgagtgaataaaggattgtcatatcaattagtgtgggtccatctgtagcaaatgggttgagtgtgtcagtatgtggttggttactgtgtattcgccaggaatcaccccgataggctgccaccctattaggtgatacctgtttaatatgttgtccaggtagactagtagttgcatcagtttgctgtaacaagtaaccagtgaggtaacacagtggtgaagcaggtcaggggaggtcaggaggatgtctgagagaaagaagtccgggagatgaatggctgtctaggaaggaggatgtcagtgcacggttagtgtttgagcagagggcagacttgtaaagtacctgtagtgaaaagaatgtggggacccgattagcagaaaggtgtttgcacgtactttatacaaaatacagaatactttatattggaagtgaaagaaatgaacgtggacttttacacatgtgcatatttttctggaggctatatggattatttgaaatgaaaagcatactaattggactttaataaatcattttcaatc

SEQ ID NO: 271226 - DNA, 1095 bp, Artificial Sequence
  derived and/or modified sequence
atggccgccatcagcaccagcatccccgtgatcagccagccccagtttaccgctatgaacgagccacagtgcttttacaacgagtcaatcgcattcttttataacagaagtggcaagcacctggcaactgaatggaacaccgtgagtaagctggtaatggggctagggattaccgtatgcatcttcatcatgctcgcaaatttattggtcatggttgccatttatgtgaataggcgcttccattttcccatttactatctcatggcaaacttagctgccgcggatttttttgcggggctggcttacttttatctcatgttcaacaccggccccaacacccgacgactcacggtgtcaacatggctattgagacagggccttattgatacaagcctgaccgcctctgtggctaatctgctcgctattgcgattgagagacacatcacagtttttcgtatgcagctgcacacccgcatgagcaacagacgcgttgtggtggtgatagtggtcatttggactatggctatcgtcatgggagccataccctcagtcgggtggaattgtatctgtgacatcgagaactgtagcaatatggcaccactgtactctgactcctaccttgtgttttgggcaattttcaacctcgtgacctttgtggtaatggtggtgttgtacgctcacatcttcggttacgtgcgtcagcgcactatgcggatgagccgccattcctccggaccaaggcggaatcgtgatactatgatgtcactactcaaaacagtggtcatcgttttgggtgcctttattatctgctggaccccagggttggtcttgctgctccttgatgtgtgttgccctcagtgtgatgtgctggcatacgagaagttcttcctcctgctcgcggaatttaactctgccatgaaccccattatttactcctacagagataaagaaatgagcgctactttccgacaaatattgtgctgccagcgctcagaaaacccaactggcccgactgagggcagcgatcgctcggcatctagcctgaaccacactattctggctggtgtgcacagtaatgaccactctgtcgtctag

SEQ ID NO: 271227 - DNA, 1095 bp, Artificial Sequence
  derived and/or modified sequence
atggccgccatcagcaccagcatccccgtgatcagccagccccagtttactgccatgaatgagcctcagtgtttttataatgagagtattgcctttttttacaaccgatctgggaagcacctggctacggaatggaacaccgtgagtaagttggtcatgggtcttggtataactgtgtgcatcttcataatgttggccaatcttctcgtcatggtagctatctacgtgaatcggaggttccattttcccatttattatctgatggctaacctggctgcagccgatttctttgcaggcctggcctatttctacctgatgttcaacaccggtcccaatacacgcaggctgaccgtcagcacatggctgctgcgccagggcttaatcgacaccagtctaacagctagcgtcgcaaacctgctagctatagccatcgaaagacatattaccgtgtttcgcatgcagctgcacactcggatgtcgaatcggagagtggtcgtcgtgattgtcgtgatttggaccatggcaatagtgatgggagccatcccctcggttgggtggaattgcatctgcgacatcgaaaattgcagtaacatggccccactttattctgactcgtacctggtgttttgggcaatctttaatctggtgaccttcgtcgtaatggttgtgctctatgctcatatatttggctacgtgaggcagagaactatgcgcatgagccggcacagttctggtcctcgtcgaaatagagacaccatgatgtccctgctgaagactgttgtgatcgtcctgggagcttttattatttgctggactcccggcttagtcctcctgctgctcgatgtctgctgtccacagtgtgacgtactagcttacgagaagttcttcctcctgcttgccgaatttaacagtgctatgaaccctattatatactcatatagggataaggagatgagcgctacctttcgccagattctgtgctgtcagaggtcagaaaatccaacaggccctacggaagggagcgaccgtagtgctagcagtttgaaccacaccattttagccggcgtccacagcaacgaccacagcgtagtgtag

SEQ ID NO: 271228 - DNA, 1095 bp, Artificial Sequence
  derived and/or modified sequence
atggccgccatcagcaccagcatccccgtgatcagccagccccagtttacggcaatgaacgagccacagtgtttttacaacgagagcatcgccttcttttataaccgatccggaaagcatctggcgaccgaatggaacaccgtctcgaaactggttatgggactgggaatcaccgtttgcatttttataatgctggcaaatctgttagttatggtggctatctatgttaatcggcggttccactttccaatttactatctgatggccaatctggccgccgcagatttttttgcaggactcgcctacttctatttgatgttcaataccggaccaaacactcgtagactgacagtgagcacttggcttctccggcagggtcttatagatacctctttgactgccagtgtggccaacttgctcgcaattgcgattgagaggcatattacagtcttccgcatgcaacttcacaccaggatgtctaaccggcgtgtggttgtcgtgattgtggtcatttggaccatggctattgtcatgggagccatcccgagtgttggttggaactgtatttgtgacatcgaaaattgtagcaatatggcccccttgtacagtgattcctatctcgtgttttgggcaattttcaatctcgtgacattcgttgtgatggtggttctctatgctcacatcttcggatatgtacggcagcgtaccatgcgcatgtcccgacattcatctgggccacgaaggaaccgcgatacgatgatgtccttgctgaaaacagtcgtcatagttctaggtgcatttattatctgctggacccctggcttagtgctgctactcctggacgtgtgctgcccacagtgtgatgtgcttgcatacgagaaattttttctccttctagccgagttcaatagtgctatgaatcctattatctacagctatcgcgataaagagatgtccgctacttttaggcagattctctgttgccagcgtagcgagaaccccaccgggccaactgaggggtcagatagatctgcatcaagcttgaatcacactatcctggcaggagtgcattcaaacgaccactcggtagtatag

SEQ ID NO: 271229 - DNA, 549 bp, Artificial Sequence
  derived and/or modified sequence
atggccgccatcagcaccagcatccccgtgatcagccagccccagttcactgctatgaatgagccgcagtgcttctataacgagagcattgcctttttttataataggtcaggcaagcacctggccacagaatggaacacagtgtccaaactggtcatgggacttggcattactgtctgcatttttataatgttggccaacttgctggtcatggtggcaatctacgtgaacagaaggtttcattttccaatctactacctaatggctaacctggccgcagcggactttttcgccggcttagcttacttttacctcatgttcaacacaggcccaaacacccgcaggctgactgtgtcaacgtggctcctgaggcagggcctcatagacacttccttaaccgcttccgtggccaacttgctggctatcgcaatagaaagacatataacagtgtttcgtatgcaactgcatacgcgcatgtctaatcgtagggtggtcgttgtgatcgtggtgatctggacgatggcgatcgtgatgggcgctattccatag

SEQ ID NO: 271230 - DNA, 1041 bp, Artificial Sequence
  derived and/or modified sequence
atgaacgagccccagtgcttctacaacgagagcatcgccttcttctacaaccgtagtgggaagcacctcgctaccgagtggaacacagtctccaagctcgtcatggggctggggattactgtttgtatcttcatcatgctagccaacctgctggttatggtagctatttatgtcaacaggagattccactttcccatatattacctcatggctaatctggccgcggccgatttcttcgccggcctcgcctacttttacctaatgtttaatacagggccgaacacccgaagactgactgtctctacctggttgctccggcaaggtctgatagatacgtccttgactgcgagtgtggccaatttgctcgccattgcaatagaaaggcacataactgtatttagaatgcagctgcacacccggatgtcgaacagaagggtggtggtggttatcgtggtcatttggacaatggcgatcgtgatgggggcaatcccctctgtggggtggaattgcatctgcgatattgagaattgttctaacatggctccgctttattcagacagctacctcgtcttttgggcaattttcaacctggtgacctttgtagtgatggtggtgctctatgctcacatctttgggtacgtgcgacagcgtacgatgaggatgtcccgtcactccagcggtcctcgccgaaatcgggatacaatgatgtcactgcttaaaaccgtggtgatcgtgctgggagcgtttattatatgctggacacctgggttggtgctgctcctgctcgatgtatgctgcccccagtgcgacgtcctcgcctacgaaaagttctttttactgctggcggaattcaattcagcgatgaaccccatcatttactcataccgggacaaagaaatgtcagccacttttcgacagatactgtgttgccagcggtcagagaaccccactggacctaccgaaggatctgacagatctgcctccagtctgaaccataccatcttggctggtgttcactctaacgaccattccgtggtttag

SEQ ID NO: 271231 - DNA, 1098 bp, Artificial Sequence
  derived and/or modified sequence
atggaggagggcgcccagcggagcggcgccctgggcgccccccaccagttcaccgccatgaatgaaccccagtgcttttacaacgagtctatcgctttcttttataaccggagcggaaagcacttagccactgaatggaatacagtgagcaagcttgtgatgggcttgggaatcaccgtatgcatcttcattatgcttgcgaatttactggtgatggtggcgatctacgtgaacagacggttccacttccccatctactatctaatggctaacctagccgcagccgattttttcgctggcttggcatatttctacctgatgttcaacacgggacctaacacacggaggctaacagtgtcaacctggctgctgaggcagggactgatcgataccagtttgaccgcttccgtggcgaatctgcttgctatcgctatagaaagacacataaccgttttcaggatgcagctccacactcgcatgtcaaaccgccgggtggtggtggtgattgtagtgatttggacgatggcaattgttatgggcgccatccccagcgttggctggaactgtatctgcgacatcgaaaactgcagcaacatggctcctctttacagtgattcctacttggtattttgggcgatctttaatctagtgacatttgtggtgatggtggttctctacgcacatatctttggctatgtccgtcagaggactatgcgcatgagtcgacattcctccggccccagacgcaacagggacaccatgatgagcctgctgaagacagtagttattgtgttaggagcctttattatttgttggacacctggcctggttctgctgctcctggacgtgtgttgcccgcagtgtgatgtactcgcttatgagaagttcttcctcttgcttgccgagttcaatagcgctatgaatcccattatctattcctatagagataaggaaatgtcagccacttttcggcagattctgtgttgccaacggagtgagaatcctactggaccgaccgagggctctgaccgcagtgcatcgtcactgaaccatacgatattagcaggagttcattctaatgatcactccgttgtgtag

SEQ ID NO: 271232 - DNA, 1098 bp, Artificial Sequence
  derived and/or modified sequence
atgctgctgctgctgatccccgcccacagcagcgtgctggagaacgaattcacagccatgaatgaaccccaatgcttctataatgagagcattgcatttttttacaacaggtcaggcaagcacttggcaactgagtggaataccgtttctaagctcgtgatggggctaggcatcacggtttgtatcttcatcatgttggctaacctcttggtaatggtggccatctatgtgaaccgccgcttccattttcccatttactatctgatggcaaatcttgctgccgccgatttcttcgcagggcttgcctatttctatcttatgtttaataccggacctaacacgaggcgcctcaccgtgtccacatggctgctaaggcaaggattaatagacaccagccttacggccagcgtggccaaccttctcgcaattgctatagagcgccacattactgtttttaggatgcaactgcacacgcgaatgtcgaaccggagagtggtggttgttatagtggtgatatggactatggcaattgtgatgggagctatcccaagtgtcggttggaactgtatatgcgacatcgaaaattgtagtaacatggcaccactgtactccgatagctaccttgtgttttgggctatatttaacctggttacttttgttgttatggtagttctgtatgcacacattttcgggtacgtccgtcagagaacaatgcgcatgtcaagacacagttcgggcccgcgaagaaaccgggatacgatgatgtctctgctgaaaaccgtggtcatcgtgctcggcgcgttcattatatgctggacccccggactggtgcttctgctgcttgacgtatgttgcccccagtgcgatgtcctcgcgtacgaaaagttctttcttcttctcgcagaattcaacagtgctatgaatcccattatctactcttacagagacaaggagatgtccgcaaccttcagacaaatattgtgttgtcagcgatctgagaaccctaccggccctacagaggggtcagatagaagcgcatcatcattgaatcacactatcctggccggcgtgcattcaaatgaccatagcgtggtttag

SEQ ID NO: 271233 - DNA, 1095 bp, Artificial Sequence
  derived and/or modified sequence
atggctgcaatctctacctctattccggtgatctctcagccacaatttactgccatgaacgagccccagtgcttttacaatgaaagcatagctttcttctataacagaagtggaaagcacttggcaacagaatggaacaccgtcagcaagctggtgatggggctgggaataaccgtctgcattttcataatgctcgctaatttactagtgatggtcgccatctatgtgaacagacggtttcatttccccatctattacttaatggccaacctggctgcggcagatttcttcgcagggctcgcctacttttacctgatgtttaacacaggcccaaataccagaagactcactgtgagcacatggcttttgcggcaaggccttatcgacacgtctctcactgccagtgtggccaacctgctggccattgccatcgaaaggcacataactgtgttccgcatgcagcttcacacacgcatgtccaaccgcagagttgtcgtggtaatcgtggtgatttggaccatggccattgtgatgggagccattcctagcgtgggctggaattgcatatgtgacatcgagaattgctcgaacatggcacccctgtactcagactcatacttagtgttctgggccatttttaacctcgtgacctttgtggttatggtcgttctgtatgctcacatctttggatacgtcagacagaggaccatgagaatgtctcgtcacagctctggacccaggaggaatcgtgataccatgatgtctttactcaaaacagtagtgatcgtgctgggcgcttttattatctgctggacccccggtttggtactgctcttactggatgtgtgctgtccacagtgcgacgtcctcgcatacgagaagttcttccttctgttagctgagttcaactccgcaatgaaccctataatttactcgtatcgcgacaaggagatgtccgccacatttagacagattctatgttgccagcgttcggagaatcccaccggtcccacggaagggtccgacagaagcgccagctcattaaaccatactatactggccggtgtgcatagcaacgaccactcagttgtttag

SEQ ID NO: 271234 - DNA, 1095 bp, Artificial Sequence
  derived and/or modified sequence
atggcagcgatttccacctctatccccgtgattagtcaaccccagtttaccgcgatgaacgagcctcagtgtttttacaacgaatcgatagccttcttttataatcggtcgggcaagcatttagcaacagagtggaacaccgtgagtaagttggtgatgggcctggggataaccgtctgcattttcattatgctagctaacctgcttgtgatggtggctatttacgtcaatagacgatttcactttcctatctattatctgatggccaacctggcagctgccgacttcttcgccggtctggcctacttctacctgatgttcaacactggccctaatacaaggaggttgactgtgagcacttggttacttcggcagggccttatcgacaccagcctgacagcgtccgttgctaacttgctcgctattgcaatcgaacggcacattaccgtcttccggatgcagctgcatactcggatgtcaaatcgcagagtcgtggttgtcatagtggttatctggactatggctattgtaatgggtgctattcccagtgtcggttggaactgcatctgcgacattgagaactgctcgaatatggcccctttgtacagtgatagttatctggtattctgggccatcttcaacttagtgactttcgtcgtcatggttgtcttgtatgcacacattttcggatacgtgagacagagaactatgcggatgagccggcattcctctggacccagacgaaatagggatacgatgatgtccctgctgaaaacagtggttattgtcctcggggcatttatcatctgttggactcctggactcgtgctcttgctgttggacgtgtgttgcccacaatgcgacgtactcgcttacgagaagtttttcctgctgctggccgagttcaattctgctatgaacccgatcatctattcatatagggataaagagatgtcggcaactttcagacaaatcctgtgctgccagcgctcagaaaatcctaccggcccaaccgaaggatcagatcggtccgcaagttctttaaatcacactatcctcgcgggagtccactccaacgatcactcagtggtctag

SEQ ID NO: 271235 - DNA, 1095 bp, Artificial Sequence
  derived and/or modified sequence
atggccgcaatttctacatctatccccgtcatctcacagcctcagttcaccgccatgaatgagcctcagtgcttttacaacgagagtattgcctttttctacaatagaagtggaaagcatctggcaacggagtggaacacggtgagcaaactcgttatggggctcgggattacagtgtgcatttttatcatgcttgcgaatcttctcgtaatggtggccatctacgtgaacaggaggttccactttcccatttattatcttatggcgaatcttgccgcagctgacttttttgccggtctggcctacttctacctgatgtttaatacaggcccaaatactaggcgcctgaccgtctccacctggttactacgccagggactgattgacaccagcctaacagctagcgttgccaatctgctcgccatcgcaatagagcgccacatcaccgtcttccgcatgcagctgcacacaagaatgagcaaccggagggtggtggtggtgattgtcgtgatctggaccatggccatcgtgatgggtgccattcccagcgtaggctggaactgcatctgcgatatcgaaaattgctcaaatatggcgcctctgtatagtgactcatatcttgttttctgggcaatttttaacttggtcacattcgtggtgatggttgtgctgtacgcccacatattcggatatgtgagacagagaacaatgcggatgtcccggcactcatctgggccacgacgaaaccgtgacaccatgatgtcgctccttaaaaccgttgtgatcgtcctgggcgcatttatcatttgctggacccctgggctagtgcttttactgttagacgtctgctgtccgcagtgtgatgttttggcttatgaaaagttttttctcctgctggccgaattcaactctgctatgaatcccattatatatagctaccgagacaaagagatgtctgcaacttttagacagatcttatgttgccagagaagcgagaatccgacggggcctaccgaggggtccgataggagcgccagcagcctcaaccacactatcttggctggagtccacagtaacgaccattcggtagtctag

SEQ ID NO: 271236 - DNA, 549 bp, Artificial Sequence
  derived and/or modified sequence
atggccgctatatctacctctataccagtcatctctcagccgcagttcacagcaatgaatgaacctcagtgcttctacaacgagtcaatagcattcttctacaacagatctggaaagcatctagccaccgagtggaatactgtgtccaagctggtcatggggctcggaattactgtctgtatctttattatgctggccaacctgttagttatggtggccatttacgtgaaccgcaggttccactttcccatatactatctcatggctaacctcgcagcagctgatttctttgctgggcttgcgtacttttatctaatgttcaatacggggccaaatacacgccgtcttaccgtatctacctggctcctcaggcaagggctgatagataccagtctgacggccagcgtagccaacctgctagcaattgccattgaaaggcatattactgtattccgaatgcagcttcataccaggatgagtaaccgacgcgtggtcgtggtgattgtagtgatttggactatggcgattgtaatgggtgctattccgtag

SEQ ID NO: 271237 - DNA, 1041 bp, Artificial Sequence
  derived and/or modified sequence
atgaatgagccacagtgcttttataatgaatctatcgccttcttttataatcggtctgggaaacatctggccactgaatggaacaccgtgtctaaactggttatggggcttggaattaccgtgtgtattttcattatgctggctaacctgttagtgatggtggcaatctacgtgaacaggcgttttcattttcccatttactatctcatggctaatctcgccgctgctgattttttcgcgggtttggcttatttctatctgatgttcaatacggggcctaacacaaggcggcttactgtttctacatggttactaagacagggcctgatcgacaccagtttgacggcctccgtcgcaaacttgctcgccatcgccatcgaacgccacatcaccgtgttcagaatgcaactacatacacgaatgtcaaatcggagagttgtggtcgtgatcgtggtcatatggacaatggctatagtcatgggtgccattcctagcgtggggtggaattgcatttgcgacattgagaattgtagcaacatggccccactttactctgatagctatctagtcttttgggctatcttcaatctggttacgtttgtcgtcatggttgtgctgtatgcacacattttcgggtacgttaggcaaaggaccatgcgcatgagtagacactcttcaggaccacgtagaaaccgggatactatgatgagcttactcaagacagtggtcatcgtgctgggcgcattcatcatctgctggacccctgggctcgtgcttttgctactggacgtatgctgcccacagtgcgacgtgctcgcgtatgagaaattttttttgctgttggctgagttcaacagtgccatgaaccctatcatttatagttaccgagacaaagaaatgagcgccacgttcagacaaattctctgttgccagagatccgaaaacccaaccggaccaactgaaggctctgaccgctcagctagcagcctaaatcatactattttagccggagtccatagtaacgatcatagtgtagtctag

SEQ ID NO: 271238 - DNA, 1098 bp, Artificial Sequence
  derived and/or modified sequence
atggaggagggagcccagcggtccggagctctgggagccccacaccagttcacagctatgaatgagcctcagtgcttttacaacgagtccatcgcatttttttataatcgttctgggaaacatctcgccaccgaatggaatactgtgtctaagctcgtgatgggtctggggatcaccgtttgcatattcatcatgctggctaacttgctagtcatggtggctatttacgttaatagaaggttccatttcccgatctactatctgatggctaacttggccgcagctgatttttttgcgggacttgcctatttctatcttatgtttaatacgggaccgaacacgaggagactgactgtcagtacctggctgctgcgacagggactgatcgacacatctctgacagcctccgtggcaaacctccttgccatcgcaatagagcgacatatcaccgtgttcagaatgcagctgcacacacggatgagcaaccggagagtggtggtggtcatcgtggtcatctggacaatggccatcgtcatgggtgcgatacctagtgtgggatggaactgcatctgtgatatcgaaaactgttcaaacatggcgccactatactcagactcatacctcgtgttctgggctatctttaatctggttacatttgtagtgatggtggttctgtacgcccatattttcggctacgtccgacagagaacaatgcgtatgtcacggcattcctcgggaccccgacgcaatagggataccatgatgtccctgctgaagaccgtcgtaatcgtgctcggagcttttatcatctgttggacccctggcctagtgctgctcctccttgatgtatgttgcccccagtgcgatgttctggcatacgagaaattttttttgcttttggccgagtttaacagcgcaatgaaccctatcatctattcctatagagataaagaaatgtcagctacctttcgccagatcttgtgttgccagcggtctgagaatcctactgggccaacagagggaagtgatcgaagcgcctcttccctgaatcatacaatcctcgctggggtgcactccaacgatcactccgttgtttag

SEQ ID NO: 271239 - DNA, 1098 bp, Artificial Sequence
  derived and/or modified sequence
atgcttctgctgctgatccctgctcactctagtgttctagagaatgaatttaccgctatgaacgagccgcagtgtttctacaatgaatccatcgcttttttttataatcgctctggcaagcacctggctactgagtggaatacggtctctaagctggtgatgggactgggcatcacggtctgcatatttatcatgcttgcaaacctcttggtgatggttgctatttacgtcaaccggaggttccattttcccatttactacttgatggcaaatctcgctgccgctgacttctttgcagggctggcttacttctatttgatgtttaacacaggacccaacacccggcgactgaccgtttcgacatggctccttcgccagggtcttatcgacaccagtctcaccgcatctgtggccaacttgctggcaatagccattgagcggcatatcacagttttccgcatgcagttgcatactaggatgagtaaccgcagagtggtggttgtgatcgtcgtgatctggactatggctatagtgatgggggcaatccctagcgtgggctggaactgtatttgcgacattgagaattgttccaacatggcccctctatattctgatagttatctggttttttgggccatcttcaatctagtgactttcgttgtgatggtggtcttgtacgctcacatattcggatacgtcagacagagaacaatgcggatgtcccgccatagctctggaccaaggaggaatagggatactatgatgtccctgctgaaaaccgtcgtcatcgtcctaggtgcatttataatatgctggacgcccggtctggttttgctcctgctggacgtgtgctgtccacagtgcgacgtgctggcctatgagaaattcttcctgctgctggccgagttcaatagcgctatgaaccctataatatactcttaccgcgacaaggaaatgagcgctacttttcggcagatcctgtgttgccagcgctctgaaaaccctacgggacctacagaaggatcggatcggtccgcttcatctttgaatcatactattcttgccggagtccacagtaatgaccatagcgtggtgtag

SEQ ID NO: 271240 - DNA, 1095 bp, Artificial Sequence
  derived and/or modified sequence
atggccgccatcagcaccagcatccccgtgatcagccagccccagttcaccgccatgaacgagccccagtgcttctacaacgagagcatcgccttcttctacaacagaagcggcaagcacctggccaccgagtggaacaccgtgagcaagctggtgatgggcctgggcatcaccgtgtgcatcttcatcatgctggccaacctgctggtgatggtggccatctacgtgaacagaagattccacttccccatctactacctgatggccaacctggccgccgccgacttcttcgccggcctggcctacttctacctgatgttcaacaccggccccaacaccagaagactgaccgtgagcacctggctgctgagacagggcctgatcgacaccagcctgaccgccagcgtggccaacctgctggccatcgccatcgagagacacatcaccgtgttcagaatgcagctgcacaccagaatgagcaacagaagagtggtggtggtgatcgtggtgatctggaccatggccatcgtgatgggcgccatccccagcgtgggctggaactgcatctgcgacatcgagaactgcagcaacatggcccccctgtacagcgacagctacctggtgttctgggccatcttcaacctggtgaccttcgtggtgatggtggtgctgtacgcccacatcttcggctacgtgagacagagaaccatgagaatgagcagacacagcagcggccccagaagaaacagagacaccatgatgagcctgctgaagaccgtggtgatcgtgctgggcgccttcatcatctgctggacccccggcctggtgctgctgctgctggacgtgtgctgcccccagtgcgacgtgctggcctacgagaagttcttcctgctgctggccgagttcaacagcgccatgaaccccatcatctacagctacagagacaaggagatgagcgccaccttcagacagatcctgtgctgccagagaagcgagaaccccaccggccccaccgagggcagcgacagaagcgccagcagcctgaaccacaccatcctggccggcgtgcacagcaacgaccacagcgtggtgtag

SEQ ID NO: 271241 - DNA, 549 bp, Artificial Sequence
  derived and/or modified sequence
atggccgccatcagcaccagcatccccgtgatcagccagccccagttcaccgccatgaacgagccccagtgcttctacaacgagagcatcgccttcttctacaacagaagcggcaagcacctggccaccgagtggaacaccgtgagcaagctggtgatgggcctgggcatcaccgtgtgcatcttcatcatgctggccaacctgctggtgatggtggccatctacgtgaacagaagattccacttccccatctactacctgatggccaacctggccgccgccgacttcttcgccggcctggcctacttctacctgatgttcaacaccggccccaacaccagaagactgaccgtgagcacctggctgctgagacagggcctgatcgacaccagcctgaccgccagcgtggccaacctgctggccatcgccatcgagagacacatcaccgtgttcagaatgcagctgcacaccagaatgagcaacagaagagtggtggtggtgatcgtggtgatctggaccatggccatcgtgatgggcgccatcccctag

SEQ ID NO: 271242 - DNA, 1041 bp, Artificial Sequence
  derived and/or modified sequence
atgaacgagccccagtgcttctacaacgagagcatcgccttcttctacaacagaagcggcaagcacctggccaccgagtggaacaccgtgagcaagctggtgatgggcctgggcatcaccgtgtgcatcttcatcatgctggccaacctgctggtgatggtggccatctacgtgaacagaagattccacttccccatctactacctgatggccaacctggccgccgccgacttcttcgccggcctggcctacttctacctgatgttcaacaccggccccaacaccagaagactgaccgtgagcacctggctgctgagacagggcctgatcgacaccagcctgaccgccagcgtggccaacctgctggccatcgccatcgagagacacatcaccgtgttcagaatgcagctgcacaccagaatgagcaacagaagagtggtggtggtgatcgtggtgatctggaccatggccatcgtgatgggcgccatccccagcgtgggctggaactgcatctgcgacatcgagaactgcagcaacatggcccccctgtacagcgacagctacctggtgttctgggccatcttcaacctggtgaccttcgtggtgatggtggtgctgtacgcccacatcttcggctacgtgagacagagaaccatgagaatgagcagacacagcagcggccccagaagaaacagagacaccatgatgagcctgctgaagaccgtggtgatcgtgctgggcgccttcatcatctgctggacccccggcctggtgctgctgctgctggacgtgtgctgcccccagtgcgacgtgctggcctacgagaagttcttcctgctgctggccgagttcaacagcgccatgaaccccatcatctacagctacagagacaaggagatgagcgccaccttcagacagatcctgtgctgccagagaagcgagaaccccaccggccccaccgagggcagcgacagaagcgccagcagcctgaaccacaccatcctggccggcgtgcacagcaacgaccacagcgtggtgtag

SEQ ID NO: 271243 - DNA, 1098 bp, Artificial Sequence
  derived and/or modified sequence
atggaggagggcgcccagagaagcggcgccctgggcgccccccaccagttcaccgccatgaacgagccccagtgcttctacaacgagagcatcgccttcttctacaacagaagcggcaagcacctggccaccgagtggaacaccgtgagcaagctggtgatgggcctgggcatcaccgtgtgcatcttcatcatgctggccaacctgctggtgatggtggccatctacgtgaacagaagattccacttccccatctactacctgatggccaacctggccgccgccgacttcttcgccggcctggcctacttctacctgatgttcaacaccggccccaacaccagaagactgaccgtgagcacctggctgctgagacagggcctgatcgacaccagcctgaccgccagcgtggccaacctgctggccatcgccatcgagagacacatcaccgtgttcagaatgcagctgcacaccagaatgagcaacagaagagtggtggtggtgatcgtggtgatctggaccatggccatcgtgatgggcgccatccccagcgtgggctggaactgcatctgcgacatcgagaactgcagcaacatggcccccctgtacagcgacagctacctggtgttctgggccatcttcaacctggtgaccttcgtggtgatggtggtgctgtacgcccacatcttcggctacgtgagacagagaaccatgagaatgagcagacacagcagcggccccagaagaaacagagacaccatgatgagcctgctgaagaccgtggtgatcgtgctgggcgccttcatcatctgctggacccccggcctggtgctgctgctgctggacgtgtgctgcccccagtgcgacgtgctggcctacgagaagttcttcctgctgctggccgagttcaacagcgccatgaaccccatcatctacagctacagagacaaggagatgagcgccaccttcagacagatcctgtgctgccagagaagcgagaaccccaccggccccaccgagggcagcgacagaagcgccagcagcctgaaccacaccatcctggccggcgtgcacagcaacgaccacagcgtggtgtag

SEQ ID NO: 271244 - DNA, 1098 bp, Artificial Sequence
  derived and/or modified sequence
atgctgctgctgctgatccccgcccacagcagcgtgctggagaacgagttcaccgccatgaacgagccccagtgcttctacaacgagagcatcgccttcttctacaacagaagcggcaagcacctggccaccgagtggaacaccgtgagcaagctggtgatgggcctgggcatcaccgtgtgcatcttcatcatgctggccaacctgctggtgatggtggccatctacgtgaacagaagattccacttccccatctactacctgatggccaacctggccgccgccgacttcttcgccggcctggcctacttctacctgatgttcaacaccggccccaacaccagaagactgaccgtgagcacctggctgctgagacagggcctgatcgacaccagcctgaccgccagcgtggccaacctgctggccatcgccatcgagagacacatcaccgtgttcagaatgcagctgcacaccagaatgagcaacagaagagtggtggtggtgatcgtggtgatctggaccatggccatcgtgatgggcgccatccccagcgtgggctggaactgcatctgcgacatcgagaactgcagcaacatggcccccctgtacagcgacagctacctggtgttctgggccatcttcaacctggtgaccttcgtggtgatggtggtgctgtacgcccacatcttcggctacgtgagacagagaaccatgagaatgagcagacacagcagcggccccagaagaaacagagacaccatgatgagcctgctgaagaccgtggtgatcgtgctgggcgccttcatcatctgctggacccccggcctggtgctgctgctgctggacgtgtgctgcccccagtgcgacgtgctggcctacgagaagttcttcctgctgctggccgagttcaacagcgccatgaaccccatcatctacagctacagagacaaggagatgagcgccaccttcagacagatcctgtgctgccagagaagcgagaaccccaccggccccaccgagggcagcgacagaagcgccagcagcctgaaccacaccatcctggccggcgtgcacagcaacgaccacagcgtggtgtag

SEQ ID NO: 271245 - DNA, 927 bp, Artificial Sequence
  derived and/or modified sequence
atgaaaggtgccctgggatctccagtggccgcagccggagccgctatgcaggaatcctttggttgtgttgtcgctaaccgcttccatcagctactggacgacgaatccgacccgtttgatatcctgcgcgaagccgagaggcggaggcagcaacagttgcagcgcaagcggcgtgacgaagcagccgctgccgcaggggctgggcctcggggtgggaggtctccagccggagcttctggacatcgcgctggagccggaggaagaagggaaagccagaaagagagaaaatccctgccagctcctgttgcccagagacccgatagcccaggcggtgggctgcaggccccaggccagaaacgcaccccgcgaaggggtgaacagcagggttggaacgattcccggggtcctgaggggatgttagagagggccgagcgccgatcctatagggaataccgtccttacgagacagagcgccaggcagatttcaccgcagagaagttccccgatgagaaggtgccagagctggaagtcgaggaggaaacccaggttcaggagatgaccctcgacgaatggaagaaccttcaggagcagactagacctaagcccgagttcaatatacgcaagcccgagtcgaccgttcctagcaaggcagtcgttatccacaaatcaaagtatagagatgatatggtgaaggacgactatgaggatgactcccacgtgtttagaaaaccggcaaacgacattacctctcagctggagatcaactttggcaatctccctagaccaggaagaggagccagaggcggaactcggggtggtcggggaaggataagacgggctgaaaactacggacctcgcgcagaggttgtcatgcaggatgttgcgccaaacccagacgatcccgaagattttcccgctctttcgtag

SEQ ID NO: 271246 - DNA, 927 bp, Artificial Sequence
  derived and/or modified sequence
atgaaaggcgctcttggctctcccgtggcggccgcaggtgccgctatgcaagaatcatttggatgtgtcgtggcaaatagattccatcaactactggacgatgaaagtgatccttttgatatcttgcgtgaagccgagcgccgtcgccagcagcaactccaacgaaagaggcgcgatgaagccgcggctgcagccggcgcaggacccagaggtggcaggtcgcctgccggagcctcggggcaccgggctggggcaggcggcagacgtgagtctcaaaaggaacgcaagtccctgccggccccagtggctcaaagacccgactctcctggaggaggccttcaagcgccaggccagaagagaactccaaggagaggagaacagcaaggatggaatgacagtagaggacccgaaggaatgttagagcgagcggaacgcaggtcatatagagaatacagaccttatgaaaccgagagacaggctgatttcactgccgaaaaattcccagatgagaaagttccggaattggaagttgaggaggaaacacaggttcaggagatgactttggacgaatggaaaaatctgcaggagcagacgcgcccaaaacctgagtttaacatccgcaaaccagaatcaaccgtgccttctaaggccgtggtgatccataaatcaaagtatcgggatgacatggtgaaagatgattacgaggatgactcccatgtgttcagaaaacctgcgaacgatataacatcacagctagaaatcaattttgggaatttgccgaggcctggcagaggcgctcggggcggcactcgcggaggtcgtgggcgcattaggagggctgaaaattacggacctcgagctgaagtggtgatgcaggacgtagcccccaatcccgatgatccggaggactttcctgccctaagctag

SEQ ID NO: 271247 - DNA, 927 bp, Artificial Sequence
  derived and/or modified sequence
atgaaaggtgcactcgggtctccagtagctgcagccggcgccgcaatgcaggaatccttcggatgcgtggtggccaatagatttcaccagttgctggacgacgagtcagatccattcgatattctgagagaggcggagagaagaagacagcagcagctgcagagaaagcgcagagatgaagccgcagcggccgcgggcgcaggaccacgcggggggcgatctccagccggggcatccggccaccgtgccggcgccggtggccggcgtgagtctcaaaaagaaagaaaaagccttccagccccagtggctcaaagacccgactctcctggaggaggccttcaagcgccaggccagaagagaactccaaggagaggagaacagcaaggatggaatgacagtagaggacccgaaggaatgttagagcgagcggaacgcaggtcatatagagaatacagaccttatgaaaccgagagacaggctgatttcactgccgaaaaattcccagatgagaaagttccggaattggaagttgaggaggaaacacaggttcaggagatgactttggacgaatggaaaaatctgcaggagcagacgcgcccaaagccagaatttaacattagaaaacccgaatcaacggttccaagcaaagctgtggttattcataaatccaagtatcgcgatgatatggtgaaagatgactatgaggatgatagccacgtgttccggaaacctgccaatgatatcacgtcccagttggagattaatttcggtaacctgccgcgcccagggaggggcgcacggggaggtacaagaggcggcagaggtagaatcagacgagccgagaactacggaccaagggcagaagtggtcatgcaggatgtggctcccaacccagatgatcctgaagattttccagccctgagttag

SEQ ID NO: 271248 - DNA, 927 bp, Artificial Sequence
  derived and/or modified sequence
atgaagggcgccctgggcagccccgtggccgccgccggcgccgccatgcaggagagcttcggctgcgtggtggccaacagattccaccagctgctggacgacgagagcgaccccttcgacatcctgagagaggccgagagaagaagacagcagcagctgcagagaaagagaagagacgaggccgccgccgccgccggcgccggccccagaggcggcagaagccccgccggcgccagcggccacagagccggcgccggcggcagaagagagagccagaaggagagaaagagcctgcccgcccccgtggcccagagacccgacagccccggcggcggcctgcaggcccccggccagaagagaacccccagaagaggcgagcagcagggctggaacgacagcagaggccccgagggcatgctggagagagccgagagaagaagctacagagagtacagaccctacgagaccgagagacaggccgacttcaccgccgagaagttccccgacgagaaggtgcccgagctggaggtggaggaggagacccaggtgcaggagatgaccctggacgagtggaagaacctgcaggagcagaccagacccaagcccgagttcaacatcagaaagcccgagagcaccgtgcccagcaaggccgtggtgatccacaagagcaagtacagagacgacatggtgaaggacgactacgaggacgacagccacgtgttcagaaagcccgccaacgacatcaccagccagctggagatcaacttcggcaacctgcccagacccggcagaggcgccagaggcggcaccagaggcggcagaggcagaatcagaagagccgagaactacggccccagagccgaggtggtgatgcaggacgtggcccccaaccccgacgaccccgaggacttccccgccctgagctag

SEQ ID NO: 271249 - DNA, 927 bp, Artificial Sequence
  derived and/or modified sequence
atgaagggagccctgggcagtccagttgccgcagctggagcagctatgcaggagtcgttcgggtgcgtcgtcgccaataggttccaccagcttctcgacgacgagagcgatccgttcgacattttacgggaggccgagcgccgacgacagcagcagctccaacggaagaggagagacgaagctgccgccgctgccggcgcaggcccaagagggggcagatcaccagctggtgcctctgggcaccgagccggggcaggtgggcgacgggaaagtcagaaggagcgaaaatcattacccgcccctgtcgcacagaggccagactcaccaggtggaggtcttcaggctcccgggcagaaacgcacgcctagacgcggggagcagcagggttggaacgattcacgcggccctgagggtatgttggaaagggccgagcgtcgatcctacagggaatatagaccatatgaaactgaaagacaggccgacttcaccgctgaaaaatttccagacgagaaggtgccggagctggaggttgaagaggaaacacaggtacaagagatgactctggacgaatggaagaacctgcaggagcaaacacgccctaagcctgagtttaatatcagaaagcccgaatccaccgtgccctctaaggccgtagtgattcataaatcaaagtaccgagacgacatggtgaaagacgattatgaagacgactctcacgtgtttcggaaacctgcaaacgatattacatctcagttggagataaacttcggaaacttaccacgtcctggccgtggggcgcggggaggaaccaggggaggcagagggcggatacgccgagccgagaactatgggcctcgagctgaagtggtcatgcaggatgtggcacccaatccggatgacccagaagacttccccgccttgtcatag

SEQ ID NO: 271250 - DNA, 927 bp, Artificial Sequence
  derived and/or modified sequence
atgaagggggccctgggcagccctgtggccgccgccggggccgccatgcaggagagctttggctgtgtggtggccaaccgcttccaccagctgctggatgatgaaagtgacccctttgacatcctgcgggaggccgagcggcggcggcagcagcagctgcagaggaagagaagagatgaagctgctgctgctgctggagctggcccccggggcggccgcagccctgctggggccagcggccacagagctggagctgggggccggcgggagagccagaaggagaggaagagcctgcctgcccctgtggcccagaggccagacagccctgggggcggcctgcaggcccctggccagaagaggaccccaagaagaggagagcagcagggctggaatgacagccggggccctgagggcatgctggagagagctgagaggaggagctaccgggagtaccggccctatgaaacagagcggcaggccgacttcaccgctgagaagttcccagatgagaaggtgcctgagctggaggtggaggaggagacccaggtgcaggagatgaccctggatgagtggaagaacctgcaggagcagacccggcccaagccagagttcaacatcaggaagccagagagcacagtgcccagcaaggctgtggtgatccacaagagcaagtacagagatgacatggtgaaggatgattatgaagatgacagccacgtgttcaggaagccagccaatgacatcaccagccagctggagatcaactttggaaacctgccccggcccggccgcggggcccggggcggcacccggggcggccggggccgcatccggcgggcagaaaattatggccccagggctgaggtggtgatgcaggatgtggcccccaacccagatgatcctgaggacttccctgccctgtcctag

SEQ ID NO: 271251 - DNA, 2304 bp, Artificial Sequence
  derived and/or modified sequence
ggcatgggtcctggccgccggcttcgctgagacgcgctcgcgtgggctgccctcccgggcccgcagtggtcgcggcggcatgaagggcgctctggggagtcccgtggctgccgctggcgccgcgatgcaggagagtttcggctgcgtggtggccaaccgcttccatcagctgctggacgacgagtcggacccgttcgacatcctgcgcgaggccgagcgccggcgccagcagcagctgcagcgcaagaggcgcgacgaggcggcggcggcggccggggccggtccccgcggcggcaggagcccagccggggcctcgggccacagagccggcgcgggcggccggagggagtcgcagaaggagcgcaagagcctcccggcgcccgtcgctcagcggcccgatagccccgggggcggcctgcaggcgccgggccagaagcggactcctagaagaggggagcagcaaggatggaatgacagccgtgggccggaggggatgctcgaaagagctgagcggagatcctacagggaataccgaccctatgagacagagaggcaggcagacttcacagctgagaagtttccagatgaaaaagttcctgagttggaggtagaagaagaaacccaagttcaagagatgactttagatgagtggaaaaatcttcaagaacagaccagaccaaagcctgagtttaacatccggaaaccagaatccactgttccttccaaagccgtggtgattcacaagtcaaaatacagagatgatatggtaaaagatgactatgaggacgattcccatgttttccggaaacccgccaatgacatcacatcccagctggagattaattttggtaacctccctcgtcctgggcgtggagccagaggaggcacccggggaggccggggaaggatcaggagggcagagaactatggacccagagcagaagtggtgatgcaagatgttgcccccaacccagatgacccggaagatttccctgcgctgtcttgaaagagccctgtttcccagcaccgcggagctgcactgcacacctgtggggagacttttccagctgggccaagggagtcagactctaagaacaatagatgttgcttttcccgtgtcatgtaaatttgttgcacttttttgggctgagctgttagaggggcttctccagaggctcgagagcaggccatttcccaagaagatgaagaatggtgactgtgtttttattgaaggaatttcaaatgaagaataatgtttaaaatgtgtatatagagatagtatagactcctccgcggaagcatggagggaaaggaggttgtaaaatagactccatggagactcttaggaagcagtagattcccgggggctgtgcctttagcgttagaggaaacacatagagctggaactgttaatggaaagcagtcacagctgagttttcggagaccaagaaattaaaatacaattgcacttactgtttacttgtaaatgttatcttctctcctggaatattttgagttctggttttcacttaaccaatcatttaaaaatcgctattgtgtagccactggccaccactctgtgacacagaatcagagaaagcgttgatttttaatggtgatttaaactacctcgtggtttctgtgtgtgtgcacacacacatctagtgtttgggtggtttttaggaagaatattaagtatgtgacttcaaaaaccatgttatttaacctgccaatcaaatggaaagggatcatggcaaaagcaaataccgcatccttttcttccgcagaactagagtcagagttcggcagctgcgtacaaaggcctctgccctcggcttgagcaaaagttgtaaataactagtatttattaagcacttataagcagtttttctcacttagtcctggctccagttctagagttcctctttattgcttttggtgaaagtttggggttgggggtacacctcagaggttcagtaattcacctggagtcccaccctgaacagagctggacccagagccacacacgcccgggaacacacactgtgctggggaggaagtgggcctaggagggcctgcaggtccaggcagctgtagagctgctagaagctggggtgttgctctccccgctttctcatagacacagaggtactgtctgcctgttgtcacacagttcatatgctcgcttgagatggaatctgaaccttggtcccaggatctgtgctttttcccactttgccacactgtctaaggtggctttgaactggaacccaagtgcaaataaaggttggtattcgctcctga

SEQ ID NO: 271252 - DNA, 927 bp, Artificial Sequence
  derived and/or modified sequence
atgaagggcgccctgggcagccccgtggccgccgccggcgccgccatgcaggaatcatttggctgcgtggtcgccaaccggttccatcagctgctggacgatgagtcagatccttttgatatcctgagggaagctgagagacggagacagcagcagctgcagcgtaaacgaagggatgaagccgccgccgctgccggagccggcccccgggggggacgctctcctgctggggcctccggacatcgcgctggcgcgggcggcaggcgggagagccagaaggagcgtaagtccctaccagcaccggtggcacaaaggccagactcacccgggggcgggctccaggccccagggcagaagcgaactccccgccgaggtgagcaacagggttggaacgattctagaggcccagaaggcatgctggagcgcgctgagagacgcagctaccgggagtatagaccatacgaaaccgaacgacaggccgactttacagctgagaagttccccgacgagaaggtgcctgagttagaagtggaggaggagactcaggtccaagaaatgactctcgatgagtggaaaaatctgcaagagcagacgcgaccaaaacccgaatttaacattcgcaaaccagagtctaccgttcccagtaaagcggtggtcatccataagtcaaaataccgtgacgacatggtgaaggacgactacgaggacgactcccacgttttcaggaagcccgcaaatgacatcactagccagcttgaaattaattttggcaatctcccacgcccggggagaggggccagaggtggcacacggggaggtagaggcaggatcaggcgagccgagaactacggcccccgtgctgaggtggttatgcaggatgtcgcacccaacccagatgatcccgaggactttcccgcgctcagctag

SEQ ID NO: 271253 - RNA, 927 nt, Artificial Sequence
  derived and/or modified sequence
augaaaggcgcucuuggcucucccguggcggccgcaggugccgcuaugcaagaaucauuuggaugugucguggcaaauagauuccaucaacuacuggacgaugaaagugauccuuuugauaucuugcgugaagccgagcgccgucgccagcagcaacuccaacgaaagaggcgcgaugaagccgcggcugcagccggcgcaggacccagagguggcaggucgccugccggagccucggggcaccgggcuggggcaggcggcagacgugagucucaaaaggaacgcaagucccugccggccccaguggcucaaagacccgacucuccuggaggaggccuucaagcgccaggccagaagagaacuccaaggagaggagaacagcaaggauggaaugacaguagaggacccgaaggaauguuagagcgagcggaacgcaggucauauagagaauacagaccuuaugaaaccgagagacaggcugauuucacugccgaaaaauucccagaugagaaaguuccggaauuggaaguugaggaggaaacacagguucaggagaugacuuuggacgaauggaaaaaucugcaggagcagacgcgcccaaaaccugaguuuaacauccgcaaaccagaaucaaccgugccuucuaaggccguggugauccauaaaucaaaguaucgggaugacauggugaaagaugauuacgaggaugacucccauguguucagaaaaccugcgaacgauauaacaucacagcuagaaaucaauuuugggaauuugccgaggccuggcagaggcgcucggggcggcacucgcggaggucgugggcgcauuaggagggcugaaaauuacggaccucgagcugaaguggugaugcaggacguagcccccaaucccgaugauccggaggacuuuccugcccuaagcuag

SEQ ID NO: 271254 - RNA, 927 nt, Artificial Sequence
  derived and/or modified sequence
augaaaggugcacucgggucuccaguagcugcagccggcgccgcaaugcaggaauccuucggaugcgugguggccaauagauuucaccaguugcuggacgacgagucagauccauucgauauucugagagaggcggagagaagaagacagcagcagcugcagagaaagcgcagagaugaagccgcagcggccgcgggcgcaggaccacgcggggggcgaucuccagccggggcauccggccaccgugccggcgccgguggccggcgugagucucaaaaagaaagaaaaagccuuccagccccaguggcucaaagacccgacucuccuggaggaggccuucaagcgccaggccagaagagaacuccaaggagaggagaacagcaaggauggaaugacaguagaggacccgaaggaauguuagagcgagcggaacgcaggucauauagagaauacagaccuuaugaaaccgagagacaggcugauuucacugccgaaaaauucccagaugagaaaguuccggaauuggaaguugaggaggaaacacagguucaggagaugacuuuggacgaauggaaaaaucugcaggagcagacgcgcccaaagccagaauuuaacauuagaaaacccgaaucaacgguuccaagcaaagcugugguuauucauaaauccaaguaucgcgaugauauggugaaagaugacuaugaggaugauagccacguguuccggaaaccugccaaugauaucacgucccaguuggagauuaauuucgguaaccugccgcgcccagggaggggcgcacggggagguacaagaggcggcagagguagaaucagacgagccgagaacuacggaccaagggcagaaguggucaugcaggauguggcucccaacccagaugauccugaagauuuuccagcccugaguuag

SEQ ID NO: 271255 - protein, 573 aa, Artificial Sequence
  derived and/or modified sequence
  misc_feature (1)..(1): Xaa can be any naturally occurring amino acid
XLSYAKQLRNLSKKYQPKKNSKEEEEYKYTSCKAFISNLNEMNDYAGQHEVISENMASQIIVDLARYVQELKQERKSNFHDGRKAQQHIETCWKQLESSKRRFERDCKEADRAQQYFEKMDADINVTKADVEKARQQAQIRHQMAEDSKADYSSILQKFNHEQHEYYHTHIPNIFQKIQEMEERRIVRMGESMKTYAEVDRQVIPIIGKCLDGIVKAAESIDQKNDSQLVIEAYKSGFEPPGDIEFEDYTQPMKRTVSDNSLSNSRGEGKPDLKFGGKSKGKLWPFIKKNKPPPPPPASASPSAVPNGPQSPKQQKEPLSHRFNEFMTSKPKIHCFRSLKRGHSLLKGATPEDFSNLPPEQRRKKLQQKVDELNKEIQKEMDQRDAITKMKDVYLKNPQMGDPASLDHKLAEVSQNIEKLRVETQKFEAWLAEVEGRLPARSEQARRQSGLYDSQNPPTVNNCAQDRESPDGSYTEEQSQESEMKVLATDFDDEFDDEEPLPAIGTCKALYTFEGQNEGTISVVEGETLYVIEEDKGDGWTRIRRNEDEEGYVPTSYVEVCLDKNAKGAKTYI

SEQ ID NO: 271256 - DNA, 2271 bp, Artificial Sequence
  derived and/or modified sequence
aactcagctatgcaaagcaactcaggaatctttcaaagaagtaccaacctaaaaagaactcgaaggaggaagaagaatacaagtatacgtcatgtaaagctttcatttccaacctgaacgaaatgaatgattacgcagggcagcatgaagttatctccgagaacatggcatcacagatcattgtggacttggcacgctatgttcaggaactgaaacaggagaggaaatcaaactttcacgatggccgtaaagcacagcagcacatcgagacttgctggaagcagcttgaatctagtaaaaggcgatttgaacgcgattgcaaagaggcggacagggcgcagcagtactttgagaaaatggacgctgacatcaatgtcacaaaagcggatgttgaaaaggcccgacaacaagctcaaatacgtcaccaaatggcagaggacagcaaagcagattactcatccattctccagaaattcaaccatgagcagcatgaatattaccatactcacatccccaacatcttccagaaaatacaagagatggaggaaaggaggattgtgagaatgggagagtccatgaagacatatgcagaggttgatcggcaggtgatcccaatcattgggaagtgcctggatggaatagtaaaagcagccgaatcaattgatcagaaaaatgattcacagctggtaatagaagcttataaatcagggtttgagcctcctggagacattgaatttgaggattacactcagccaatgaagcgcactgtgtcagataacagcctttcaaattccagaggagaaggcaaaccagacctcaaatttggtggcaaatccaaaggaaagttatggccgttcatcaaaaaaaataagcctccccctccccctcctgcctctgcctcaccctctgctgttcccaacggcccccagtctcccaagcagcaaaaggaacccctctcccatcgcttcaacgagttcatgacctccaaacccaaaatccactgcttcaggagcctaaagcgtgggcatagtcttctcaaaggtgcaacaccggaggatttcagcaacctcccacctgaacaaagaaggaaaaagctgcagcagaaagtcgatgagttaaataaagaaattcagaaggagatggatcaaagagatgccataacaaaaatgaaagatgtctacctaaagaatcctcagatgggagacccagccagtttggatcacaaattagcagaagtcagccaaaatatagagaaactgcgagtagagacccagaaatttgaggcctggctggctgaggttgaaggccggctcccagcacgcagcgagcaggcgcgccggcagagcggactgtacgacagccagaacccacccacagtcaacaactgcgcccaggaccgtgagagcccagatggcagttacacagaggagcagagtcaggagagtgagatgaaggtgctggccacggattttgacgacgagtttgatgatgaggagcccctccctgccatagggacgtgcaaagctctctacacatttgaaggtcagaatgaaggaacgatttccgtagttgaaggagaaacattgtatgtcatagaggaagacaaaggcgatggctggacccgcattcggagaaatgaagatgaagagggttatgtccccacttcatatgtcgaagtctgtttggacaaaaatgccaaaggtgctaagacttatatttaataccataaaaaaaaaaaacttaaaaaaaatggagttgtttctccccacaaccatgactgttacaggcagttcctcaagagactggctggcaagcaccataatgcacgttctcctgtagtctcacgtggacttcagggtctgggcacctgaattgccttgtctagtttgggctgtaatcaagtttcacttgctgatgaaattttatgtggaaagctgccaaccgccaacttacagctatgtcattcaaaatctgataaacatttcttcttttggcggtatctgtagattaaaaaaaaagttgcattgtagcttctcatctttctgaatttaaaagccggcacgcatcatgcaggtgccaaagacttccctactcttgtttatatctagtatccaccatacactgagctacattaggtggttacagattgtaacttaataaactgaactgtgttagtttgttaaattgtatactcattcacttgggaggaagtcacaagtgaaataacatctccttcttgactaaagcagtaaataagattcttatattggc

SEQ ID NO: 271257 - DNA, 1722 bp, Artificial Sequence
  derived and/or modified sequence
tgactgtcttacgcaaaacaactgagaaatctgtcaaagaaatatcagccgaaaaagaacagtaaagaagaagaggagtataaatatacatcatgcaaggccttcatctccaaccttaatgagatgaatgactatgccggccagcacgaggtgatctccgagaatatggcgtcacaaatcattgttgacctcgcacgctacgtacaggagctgaagcaggaacggaagagtaacttccacgatgggcggaaagcccaacaacacatcgaaacctgctggaagcagctggaaagcagcaaaagacgttttgagagggactgtaaggaagcagatagagcacagcaatactttgaaaaaatggatgccgacatcaacgtcacgaaagccgatgtggaaaaagcccggcagcaggcacagatccgacaccagatggcggaagactctaaggcggattactcaagcatccttcaaaaattcaatcacgaacagcatgaatattaccatacacacattcctaatatcttccaaaaaatccaagaaatggaggagcggaggatagttcgcatgggagagagcatgaagacctatgcagaggttgatagacaggtcatacccatcatcggaaaatgtcttgacggcatagtgaaggctgcggaatctatcgatcagaaaaatgatagccagttggtaattgaagcatataagagtgggttcgaacctcccggcgacattgagtttgaagactacactcagccgatgaaacgcaccgtatcggacaacagcctgagcaactcgcgaggcgaagggaagcctgatctgaaattcggtggaaagagtaagggtaaactctggcccttcataaagaagaacaaaccccctcctcccccacctgcctcagcttcccctagtgccgtgcctaatggaccccagagcccaaagcagcagaaggagcctttgagccacagatttaacgaatttatgaccagtaaaccaaagatccattgttttcgttcccttaagcgcgggcattccctgctgaaaggcgccaccccggaggattttagcaacttgccccccgagcaacgcagaaaaaagctgcagcagaaggtggacgagctgaataaggagattcagaaagagatggatcagcgcgacgcaattactaagatgaaagacgtctatctcaagaaccctcaaatgggcgatccagcctctctggaccataaattagccgaggtgagtcagaacatcgaaaagttacgagtggaaacacagaaatttgaagcgtggctggcagaggtggaaggtcggctgcctgcccgatctgagcaagcgcgccggcaaagcggtctgtatgacagccagaaccctcccaccgtcaacaattgtgctcaggatcgcgagtctcccgatgggagctatacagaagaacagagccaggagtccgaaatgaaggtgcttgccacagacttcgacgatgaattcgatgatgaggagcccctccctgctataggaacctgtaaagccctttatacgttcgaggggcaaaatgaaggtactatttcagtggttgaaggtgagaccctgtatgtgatagaagaggacaagggggacggttggactagaatcaggcgaaacgaagatgaggaggggtacgtgcctacctcctacgtggaggtgtgcctagataaaaacgctaagggggctaaaacatacatctag

SEQ ID NO: 271258 - DNA, 1722 bp, Artificial Sequence
  derived and/or modified sequence
tgactgtcctatgccaagcagctgaggaacctgagcaagaagtaccagcccaagaagaacagcaaggaggaggaggagtacaagtacaccagctgcaaggccttcatcagcaacctgaatgagatgaatgactatgccggccagcatgaagtcatcagcgagaacatggccagccagatcatcgtggacctggcccgctacgtgcaggagctgaagcaggagaggaagagcaacttccatgatggcaggaaggcccagcagcacatcgagacctgctggaagcagctggagagcagcaagagaagatttgagcgggactgcaaggaggccgaccgggcccagcagtactttgagaagatggatgctgacatcaacgtgaccaaggcagatgtggagaaggcccggcagcaggcccagatccgccaccagatggccgaggacagcaaggctgactacagcagcatcctgcagaagttcaaccacgagcagcacgagtactaccacacccacatccccaacatcttccagaagatccaggagatggaggagcggcgcatcgtgaggatgggagagagcatgaagacctatgcagaggtggaccggcaggtgatccccatcatcggcaagtgcctggatggcatcgtgaaggctgctgagagcattgaccagaagaatgacagccagctggtgattgaggcctacaagagcggctttgagcccccaggggacatcgagtttgaggactacacccagcccatgaagaggacagtgtctgacaacagcctgagcaacagcagaggagagggcaagccagacctgaagtttggaggcaagagcaagggcaagctgtggcccttcatcaagaagaacaagcccccacctcctcctccagccagcgccagccccagcgctgtgcccaacggcccccagagccccaagcagcagaaggagcccctgagccaccgcttcaatgagttcatgaccagcaagcccaagatccactgcttccgcagcctgaagaggggccacagcctgctgaagggggccaccccagaggacttcagcaacctgcccccagagcagaggaggaagaagctgcagcagaaggtggatgagctgaacaaggagatccagaaggagatggaccagagagatgccatcaccaagatgaaggatgtgtacctgaagaacccccagatgggagaccctgccagcctggaccacaagctggccgaggtgtcccagaacatcgagaagctgcgggtggagacccagaagtttgaggcctggctggccgaggtggagggccgcctgcctgcccggtctgagcaggcccggcggcagagcggcctgtatgacagccagaaccccccaacagtgaacaactgtgcccaggaccgggagagcccagatggcagctacacagaggagcagagccaggagagcgagatgaaggtgctggccacagactttgatgatgaatttgatgatgaggagcccctgcctgccatcggcacctgcaaggccctgtacacctttgagggccagaatgaaggcaccatctctgtggtggagggggagaccctgtatgtgattgaggaggacaagggagatggctggacccgcatcagaagaaatgaagatgaggagggctacgtgcccaccagctatgtggaggtgtgcctggacaagaatgccaagggggccaagacctacatctag

SEQ ID NO: 271259 - DNA, 1722 bp, Artificial Sequence
  derived and/or modified sequence
tgactgagctacgccaagcagctgcggaacctgagcaagaagtaccaacccaagaagaactccaaagaagaggaagaatacaagtacacttcatgcaaggcattcatctccaatctgaacgagatgaacgactacgcagggcagcacgaggtgatcagcgaaaatatggcctcacagattattgtggacctggcccgatatgtgcaggaattgaaacaagagagaaagagcaattttcacgacggacgtaaagcacaacagcacatcgaaacctgttggaagcagctcgaatcctcgaagcgtcgtttcgagagagattgtaaagaggccgaccgggctcaacagtatttcgaaaaaatggacgcagatataaatgttacaaaggccgatgtagaaaaggccagacagcaggcccagatcaggcaccaaatggccgaagacagcaaggccgattacagcagtatactgcagaagttcaaccacgagcagcacgagtattatcacacacacatacccaacatatttcagaagattcaagagatggaggagaggcgtattgttcgaatgggggagtccatgaaaacctatgccgaggtagatcggcaggttatccctattattggtaaatgtctcgatggcattgtaaaggctgcagaatcaatcgaccagaagaacgacagccagctagtaatcgaggcatataagtccggttttgagccacccggcgacattgaattcgaggactacacccagcccatgaaaagaaccgtgtccgacaattctctgtccaactcccgaggcgaggggaaacccgaccttaagttcggcggcaagagcaaaggcaaactctggccctttattaagaaaaataaaccaccaccccctccccccgcgtccgccagtccttctgcagtcccgaacgggccgcagagccccaaacagcagaaggaacccctttcacacaggttcaatgagtttatgacaagcaagcctaagatccattgttttcgtagtctcaagagggggcactcgttgctgaagggagccacccctgaggacttctccaacctcccaccagagcaacgaagaaaaaaactgcagcagaaagtggacgagctcaataaagaaattcaaaaagaaatggatcaacgcgatgccataaccaaaatgaaagacgtctatctgaaaaatccgcaaatgggagaccctgcaagcctcgatcataaactcgccgaagtttctcagaacatcgagaagctccgtgtggagacccagaagttcgaagcatggctagctgaggtggagggcagactgccggcccgttcagaacaggctagacgccaaagcggactctatgactcacagaatcctccaacagttaacaattgcgcacaagatcgtgaatctcctgatggctcgtacacagaagaacaatcacaggaatcggagatgaaggtgcttgctactgactttgatgatgagttcgatgatgaagagcccctgccagcaattggaacttgcaaggccttatataccttcgagggccagaacgaggggacaatctcagtggtagagggggaaaccctgtatgtgattgaagaggataagggtgatggttggacccgcatcagacgtaacgaagatgaggaagggtatgtgccaacctcatatgtggaagtctgcctcgacaagaatgctaagggggctaaaacgtatatttag

SEQ ID NO: 271260 - DNA, 1722 bp, Artificial Sequence
  derived and/or modified sequence
taactcagttacgctaagcaactgcgcaacctcagtaaaaagtaccagcccaagaaaaattccaaggaagaggaagaatataagtacacaagttgtaaagcatttatcagcaacttgaatgagatgaacgactatgctgggcagcatgaagtcatttcagagaatatggcctcccagattatagttgatctggcacgatatgtgcaagagctgaagcaagagcgaaagtcgaatttccatgatggacgcaaagcccagcagcacatcgagacctgctggaaacagcttgaatcgtcaaaacgcagattcgagcgcgattgtaaggaggctgatagagcccagcagtacttcgaaaagatggacgcagacattaacgtgaccaaggcagatgtcgaaaaggccaggcagcaggctcaaatacgccatcagatggctgaagattccaaggccgactatagtagcatattgcagaaattcaatcatgagcagcacgaatattatcacacgcacattcccaatatattccaaaagattcaggagatggaggaacgcaggattgtgcggatgggtgaatctatgaaaacttatgccgaagtggatcggcaagtgatccctattatcggtaaatgcctcgacgggatcgtgaaagccgctgagtcgatcgatcagaaaaacgactcacagctcgtgatagaggcgtataaaagcggcttcgagccacctggagacattgaattcgaggattacacccaacctatgaagaggacagtctccgacaactcattgagcaatagccgtggcgaaggcaagccagacctgaaatttggagggaaatccaagggcaaactgtggcctttcattaagaaaaataaaccccctcctcctccccctgccagtgccagccctagtgctgtgcccaacggccctcagtctccaaagcaacagaaagagccattatcccacaggttcaatgagttcatgacctcaaaacccaaaatccactgttttcgtagcttgaaaaggggccacagcctgctgaaaggagcaactcccgaggacttcagcaatctgccgcctgaacaaaggagaaagaagttgcagcaaaaggtggatgagctcaataaggagatacagaaggaaatggatcagagggatgctatcaccaaaatgaaggacgtttatctaaaaaatcctcagatgggtgatcctgcctctttagatcacaaactggccgaggtgtctcagaacatcgagaagctgagggtcgagactcagaagttcgaagcttggctcgccgaagtcgagggacgacttcccgctagatctgaacaggccaggcgccaaagcggtctgtacgatagccagaatcctcccaccgtgaataattgtgctcaggacagagaaagcccagatggcagttatacagaggagcaaagccaggagagcgaaatgaaagttcttgctacagattttgatgacgagtttgacgatgaagagcctctccctgctattggcacttgcaaggcgttgtatacgttcgagggacaaaacgaaggtactatttcagtagtcgagggggaaactctctatgtcatagaggaagacaaaggagatggttggactcgtattaggagaaatgaggatgaagaaggatacgtgccaacaagctatgtggaagtgtgtctagacaaaaatgcaaagggcgcaaaaacgtatatctag

SEQ ID NO: 271261 - DNA, 1722 bp, Artificial Sequence
  derived and/or modified sequence
tgactgagctacgccaagcagctgagaaacctgagcaagaagtaccagcccaagaagaacagcaaggaggaggaggagtacaagtacaccagctgcaaggccttcatcagcaacctgaacgagatgaacgactacgccggccagcacgaggtgatcagcgagaacatggccagccagatcatcgtggacctggccagatacgtgcaggagctgaagcaggagagaaagagcaacttccacgacggcagaaaggcccagcagcacatcgagacctgctggaagcagctggagagcagcaagagaagattcgagagagactgcaaggaggccgacagagcccagcagtacttcgagaagatggacgccgacatcaacgtgaccaaggccgacgtggagaaggccagacagcaggcccagatcagacaccagatggccgaggacagcaaggccgactacagcagcatcctgcagaagttcaaccacgagcagcacgagtactaccacacccacatccccaacatcttccagaagatccaggagatggaggagagaagaatcgtgagaatgggcgagagcatgaagacctacgccgaggtggacagacaggtgatccccatcatcggcaagtgcctggacggcatcgtgaaggccgccgagagcatcgaccagaagaacgacagccagctggtgatcgaggcctacaagagcggcttcgagccccccggcgacatcgagttcgaggactacacccagcccatgaagagaaccgtgagcgacaacagcctgagcaacagcagaggcgagggcaagcccgacctgaagttcggcggcaagagcaagggcaagctgtggcccttcatcaagaagaacaagccccccccccccccccccgccagcgccagccccagcgccgtgcccaacggcccccagagccccaagcagcagaaggagcccctgagccacagattcaacgagttcatgaccagcaagcccaagatccactgcttcagaagcctgaagagaggccacagcctgctgaagggcgccacccccgaggacttcagcaacctgccccccgagcagagaagaaagaagctgcagcagaaggtggacgagctgaacaaggagatccagaaggagatggaccagagagacgccatcaccaagatgaaggacgtgtacctgaagaacccccagatgggcgaccccgccagcctggaccacaagctggccgaggtgagccagaacatcgagaagctgagagtggagacccagaagttcgaggcctggctggccgaggtggagggcagactgcccgccagaagcgagcaggccagaagacagagcggcctgtacgacagccagaacccccccaccgtgaacaactgcgcccaggacagagagagccccgacggcagctacaccgaggagcagagccaggagagcgagatgaaggtgctggccaccgacttcgacgacgagttcgacgacgaggagcccctgcccgccatcggcacctgcaaggccctgtacaccttcgagggccagaacgagggcaccatcagcgtggtggagggcgagaccctgtacgtgatcgaggaggacaagggcgacggctggaccagaatcagaagaaacgaggacgaggagggctacgtgcccaccagctacgtggaggtgtgcctggacaagaacgccaagggcgccaagacctacatctag

SEQ ID NO: 271262 - protein, 608 aa, Artificial Sequence
  derived and/or modified sequence
MSWGTELWDQFDNLEKHTQWGIDILEKYIKFVKERTEIELSYAKQLRNLSKKYQPKKNSKEEEEYKYTSCKAFISNLNEMNDYAGQHEVISENMASQIIVDLARYVQELKQERKSNFHDGRKAQQHIETCWKQLESSKRRFERDCKEADRAQQYFEKMDADINVTKADVEKARQQAQIRHQMAEDSKADYSSILQKFNHEQHEYYHTHIPNIFQKIQEMEERRIVRMGESMKTYAEVDRQVIPIIGKCLDGIVKAAESIDQKNDSQLVIEAYKSGFEPPGDIEFEDYTQPMKRTVSDNSLSNSRGEGKPDLKFGGKSKGKLWPFIKKNKPPPPPPASASPSAVPNGPQSPKQQKEPLSHRFNEFMTSKPKIHCFRSLKRGHSLTLQGATPEDFSNLPPEQRRKKLQQKVDELNKEIQKEMDQRDAITKMKDVYLKNPQMGDPASLDHKLAEVSQNIEKLRVETQKFEAWLAEVEGRLPARSEQARRQSGLYDSQNPPTVNNCAQDRESPDGSYTEEQSQESEMKVLATDFDDEFDDEEPLPAIGTCKALYTFEGQNEGTISVVEGETLYVIEEDKGDGWTRIRRNEDEEGYVPTSYVEVCLDKNAKDS

SEQ ID NO: 271263 - DNA, 5398 bp, Artificial Sequence
  derived and/or modified sequence
cggccgcggctgctgcttcctcgggccattttgctgtggagcggcggggaggaggagccgccgaggagaccccgggcgaggagctgcgagccggaggaggccgcgcggactccgggctttccgccgtcgcggggatctcggggggcaaagggatcgccggggagggggaccagagagccgcgcccgccgcgcggagcgccccttcgcgtcccctgcaccatgagctggggcaccgagctctgggatcagtttgacaacttagaaaaacacacacagtggggaattgatattcttgagaaatatatcaagtttgtgaaagaaaggacagagattgaactcagctatgcaaagcaactcaggaatctttcaaagaagtaccaacctaaaaagaactcgaaggaggaagaagaatacaagtatacgtcatgtaaagctttcatttccaacctgaacgaaatgaatgattacgcagggcagcatgaagttatctccgagaacatggcatcacagatcattgtggacttggcacgctatgttcaggaactgaaacaggagaggaaatcaaactttcacgatggccgtaaagcacagcagcacatcgagacttgctggaagcagcttgaatctagtaaaaggcgatttgaacgcgattgcaaagaggcggacagggcgcagcagtactttgagaaaatggacgctgacatcaatgtcacaaaagcggatgttgaaaaggcccgacaacaagctcaaatacgtcaccaaatggcagaggacagcaaagcagattactcatccattctccagaaattcaaccatgagcagcatgaatattaccatactcacatccccaacatcttccagaaaatacaagagatggaggaaaggaggattgtgagaatgggagagtccatgaagacatatgcagaggttgatcggcaggtgatcccaatcattgggaagtgcctggatggaatagtaaaagcagccgaatcaattgatcagaaaaatgattcacagctggtaatagaagcttataaatcagggtttgagcctcctggagacattgaatttgaggattacactcagccaatgaagcgcactgtgtcagataacagcctttcaaattccagaggagaaggcaaaccagacctcaaatttggtggcaaatccaaaggaaagttatggccgttcatcaaaaaaaataagcctccccctccccctcctgcctctgcctcaccctctgctgttcccaacggcccccagtctcccaagcagcaaaaggaacccctctcccatcgcttcaacgagttcatgacctccaaacccaaaatccactgcttcaggagcctaaagcgtgggcatagcctcactctgcagggtgcaacaccggaggatttcagcaacctcccacctgaacaaagaaggaaaaagctgcagcagaaagtcgatgagttaaataaagaaattcagaaggagatggatcaaagagatgccataacaaaaatgaaagatgtctacctaaagaatcctcagatgggagacccagccagtttggatcacaaattagcagaagtcagccaaaatatagagaaactgcgagtagagacccagaaatttgaggcctggctggctgaggttgaaggccggctcccagcacgcagcgagcaggcgcgccggcagagcggactgtacgacagccagaacccacccacagtcaacaactgcgcccaggaccgtgagagcccagatggcagttacacagaggagcagagtcaggagagtgagatgaaggtgctggccacggattttgacgacgagtttgatgatgaggagcccctccctgccatagggacgtgcaaagctctctacacatttgaaggtcagaatgaaggaacgatttccgtagttgaaggagaaacattgtatgtcatagaggaagacaaaggcgatggctggacccgcattcggagaaatgaagatgaagagggttatgtccccacttcatatgtcgaagtctgtttggacaaaaatgccaaagattcctagaggggagtgcctgcgagcctcgggtgagccttcctggaggagcctccgtctgcttgttcccacaggcctccagcgccctgccctgtggacagcccacccctccgcagccccatccctgcggggcggtctctctctctctccagcatgctccctgcggccctgccctcccgcccagcccgggccacctcgtgggggacaagtctcgccagcgcccacccccatggctcgggtcagtcctcatcgctccccctccccaccccgcgcaggccactgagacggtgggacacacgcccctacctgctccttcctgggccctcagtccacccgggctcgtcctggcagcccttccgcgcttcacacagtgccttttgtgaaagtgtcatcacgggtcccctgaggagacaaggcaggtccagcgcacatcaggcggactgagcactcgatgtcatccgtgtcgatgtcatccgtgtgtcccagactgtctgctgtagaaaacacttcctcctctcctgagtctgtgaagtcctcagtggtcctttttggattctaggcttgcacctcatactaaacattgaccctttcactatgccctcaacctgggagcatctggcaggcaggggggcaggtacacacacacccacaggcacacccaccagtacacacgcgtgcgcatacacacattttggtttgacgccctgttttcagtggcctggggaggtccacactggaagtcgaattccagctcgccttgttgactcgcctgtgtccaccggccatgaggagcccacgcctgtcctccccatcactttcctgtccctgagaactgtagatcatgcgcttgtgagcgaggccctcccctctgcaccagctcattgcaaagcgaacatcctctcctttccaggagccccaggattagcatctgaaaagggtagcacttccttttttgttgttgttttttttttttttttgagacgggagtctcgctctattgttcagactggagtgcagtggcatgatctcggctcactacaacctccacctcctgggttccagcgattctcctgcctcagcctcccaaatagctgtgattacaggcgtgcaccaccacgcccggctaatgtttgtatttttagtagagacagggtttcaccgtgttggtcaggctggtctcaaactcctgacctcaggtgatccgcccgcctcagcctcccaaagtgctgagattacaggtgtgagctaccgcaccccgccgaggttagcactttcatcaccaaagaccccgtgcctctcgtggtcctttgagggatcccgccgccaccacccttgtattttatcacgtgctcttcagggcatgtggaattcgttgagtttgcttttagagccaagtttctttccctgtgtgggtttttgaggaaaacctgaggtcccctaatctgtggccaccaccccccccccccgccacgccttagagcagagcagcccctcctctcatttggtgcagaaacagtcaagaggaaccattggcctagagctcctgtgaccgagagcgccacggaagcctggggatgacgtcgggcagctttattctttgcttggctttggtaactaggtggtcccctcaagcatcctcagttcctcttgctgtttatgaatctaagacaaggaagtcctatagaagccaaagggacagggacggaaaggacaggtcccaagggatggggctgtctttacttgtggaaaccaggaaattgctcctctcagccaaccaaggttgaccacacaccacccttccggagcagctcagtcagccctcggggacgagaaaccacaagcgcagagacgctgaggcccaggcaggtgaagaggaagtggctttgggtttttaaagtaggtgagcgtgagcctctctgactgcttcttccccgggggggactgcaaaccgctcagggttgcggcagagccatggacttccggtccctgcaacgggtgacctaagcgtggtgcacccatcagtcacgcaggaggactgacttgacagacgaaagacaagcccggatgacacagggtgagaagagtcagggccgcacctctgtccctgcaaaccaacaggtgcatggtgagtgtggcagtccccacagctccacaatgggctcccccgccaacggggacgacagggatcttcaggaacttctgacctcaccaagtcaagtggaccactctccactccacgaggatgtgaaacggttctttaaaatgggattttagagcctcgggaatgcatgtgcgtcacatctttcatattatgggtcaggatagattcatttcttgcaacatagtggaaaagatataagctgcagtaatttgctctttgaatgaccgtcacccccagtataggatatgcttgtatccccccgtcactcctccgcctgttttttaaacttttccaccacctgcgtccaaaaagaatgttatagcgagtgctcttaaatgttgaacctgggtgttgcttccgggccagtctgcgtggctccatgaaaagctcactgctgccccagccgggcttcttagaggaggtcagttgtcctatgtatcatcatttactctgggaatcctactgtgaaatcatgtctgtatttttctggagcagttcacatagagtagaatgtggaatttcccgtgaacgtctccttcctcccccgtatctgccgcctgtcacttcgccaccgtgctagaatactgttgtgttgtaagatgactaattttaaaagaacctgccctgaaaagttcttagaaacgcagtgaaagggaggaacttgtcctttacccagtttttcctttgtaggatgggaaagtataaaaaggcacagaaggttgtcatgggctgttccttgggggtttttatcctgctcaccgtggagataagcctgcggcttgtctaaccagcgcagcgcaaaggtctcgatgccttttggtaacatccgtcattgcagaagaaagtttacacgacgtcaaaaagtgacgttcatgctaagtgtttttccagaaatattggtttcatgtttcttattggctctgcctcctgtgcttatatcatccaaaaactttttaaaaaggtccagaattctattttaacctgatgttgagcacctttaaaatgttcgtatgtgtgttgcactaattctaaactttggaggcattttgctgtgtgaggccgatcgccactgtaaaggtcctagagttgcctgtttgtctctggagatggaattaaaccaaataaagagcttccactggaggcttgtattgaccttgtaactatatgttaatctcgtgttaaaataaaatataacttgtg

SEQ ID NO: 271264 - DNA, 1827 bp, Artificial Sequence
  derived and/or modified sequence
atgagctggggaacggagctttgggatcagttcgacaaccttgagaagcacacccagtggggaatcgatatactagagaaatatattaagtttgtcaaggagcgcacagagatcgagctcagttatgctaagcagctgcggaatctgtcaaaaaagtaccagcctaagaaaaacagtaaagaagaagaggaatataaatatacgagctgtaaagcttttatctcgaatttaaacgagatgaatgattacgccggtcagcatgaggtaattagtgaaaacatggcctcccagattatcgtcgacctggctagatatgtgcaagaactgaagcaggaacgcaagagtaactttcacgacgggcggaaagcccagcaacacattgaaacatgctggaagcagcttgagtcctctaaaaggagattcgagcgagactgtaaggaagccgatcgggcacagcagtacttcgagaagatggatgcagatattaacgtgaccaaggccgatgtagaaaaagccagacagcaggcgcagattcgtcatcaaatggccgaagattccaaggcagattattcctccattctgcaaaagttcaaccacgagcagcatgagtactatcatacccacatcccaaatatttttcagaaaatccaggagatggaggaacggaggattgttaggatgggggaatccatgaagacctacgccgaggtggataggcaggtcatccctatcattgggaaatgtcttgacggaattgtcaaggcagcagagtcaatagaccagaagaacgacagccagctggtcatcgaggcctacaagtccgggtttgagcccccgggcgacatagagtttgaagattacacacagccgatgaagcgaaccgtgtcagacaacagcctgagtaattcccggggcgaaggtaaacctgatttaaagttcggtgggaaaagtaaaggcaagctttggcccttcattaagaagaacaagccccccccccctccgcccgcttccgcttccccttctgcagtgcctaatgggccccaatccccgaagcagcagaaagaaccactgtcccacaggttcaacgagtttatgacctccaaacccaaaatccactgctttcgttcactcaagagggggcatagtctcaccctccagggggctacccctgaggacttttcgaatctcccccctgagcagcgacggaagaagctgcaacagaaggtcgacgaacttaacaaagaaatccagaaggaaatggaccagcgggacgccattacaaagatgaaagacgtttacctgaaaaatccccaaatgggtgatccagccagtttggatcataaattggccgaggtctcccagaacattgagaagctcagagtagaaacccaaaagttcgaggcctggctagccgaagtggagggtagattgcccgcccgttctgagcaggccaggcgccagagcggcctctatgattcccagaaccctcctaccgtgaacaattgcgcacaggacagagaatcccctgacgggtcttacacagaagaacagtctcaagagtctgaaatgaaagttttagccaccgactttgatgacgaatttgacgacgaggagccactgcctgccataggaacttgcaaagcgctttataccttcgaggggcagaatgagggcaccatttctgtagtggaaggggagacactgtacgtcattgaggaggataagggagacggctggacgagaatcagaagaaacgaagatgaggagggctacgtgcctacaagttatgtcgaggtttgccttgacaagaacgctaaagacagttag

SEQ ID NO: 271265 - DNA, 1827 bp, Artificial Sequence
  derived and/or modified sequence
atgtcctggggcacagagctgtgggaccagtttgacaacctggagaagcacacccagtggggcatcgacatcctggagaagtacatcaagtttgtgaaggagaggacagaaattgagctgtcctatgccaagcagctgaggaacctgagcaagaagtaccagcccaagaagaacagcaaggaggaggaggagtacaagtacaccagctgcaaggccttcatcagcaacctgaatgagatgaatgactatgccggccagcatgaagtcatcagcgagaacatggccagccagatcatcgtggacctggcccgctacgtgcaggagctgaagcaggagaggaagagcaacttccatgatggcaggaaggcccagcagcacatcgagacctgctggaagcagctggagagcagcaagagaagatttgagcgggactgcaaggaggccgaccgggcccagcagtactttgagaagatggatgctgacatcaacgtgaccaaggcagatgtggagaaggcccggcagcaggcccagatccgccaccagatggccgaggacagcaaggctgactacagcagcatcctgcagaagttcaaccacgagcagcacgagtactaccacacccacatccccaacatcttccagaagatccaggagatggaggagcggcgcatcgtgaggatgggagagagcatgaagacctatgcagaggtggaccggcaggtgatccccatcatcggcaagtgcctggatggcatcgtgaaggctgctgagagcattgaccagaagaatgacagccagctggtgattgaggcctacaagagcggctttgagcccccaggggacatcgagtttgaggactacacccagcccatgaagaggacagtgtctgacaacagcctgagcaacagcagaggagagggcaagccagacctgaagtttggaggcaagagcaagggcaagctgtggcccttcatcaagaagaacaagcccccacctcctcctccagccagcgccagccccagcgctgtgcccaacggcccccagagccccaagcagcagaaggagcccctgagccaccgcttcaatgagttcatgaccagcaagcccaagatccactgcttccgcagcctgaagaggggccacagcctgaccctgcagggcgccaccccagaggacttcagcaacctgcccccagagcagaggaggaagaagctgcagcagaaggtggatgagctgaacaaggagatccagaaggagatggaccagagagatgccatcaccaagatgaaggatgtgtacctgaagaacccccagatgggagaccctgccagcctggaccacaagctggccgaggtgtcccagaacatcgagaagctgcgggtggagacccagaagtttgaggcctggctggccgaggtggagggccgcctgcctgcccggtctgagcaggcccggcggcagagcggcctgtatgacagccagaacccccccaccgtgaacaactgtgcccaggaccgggagagcccagatggcagctacacagaggagcagagccaggagagcgagatgaaggtgctggccacagactttgatgatgaatttgatgatgaggagcccctgcctgccatcggcacctgcaaggccctgtacacctttgagggccagaatgaaggcaccatctctgtggtggagggggagaccctgtatgtgattgaagaagataaaggagatggctggacccgcatcagaagaaatgaagatgaggagggctacgtgcccaccagctatgtggaggtgtgcctggacaagaatgccaaggacagctag

SEQ ID NO: 271266 - DNA, 1827 bp, Artificial Sequence
  derived and/or modified sequence
atgagctggggcaccgagctgtgggaccagttcgacaacctggagaagcatacccagtgggggattgacattcttgagaaatatatcaagttcgttaaagagaggactgaaattgagttgagctacgccaaacaactccgaaacctctctaaaaagtaccagcctaaaaaaaattctaaggaagaagaggagtacaaatatacctcttgcaaagcgttcatctcgaatttgaacgaaatgaacgattacgcaggacagcacgaggtgatatcggagaatatggctagccagattatcgttgaccttgcccgatacgttcaggaactgaagcaggagcgcaaaagtaacttccacgacgggcggaaagcacagcaacacatcgagacttgttggaaacagctggaaagtagcaagcggaggttcgagagggattgtaaggaggcggacagggcccagcagtacttcgagaaaatggatgctgatatcaacgtgacaaaggcagacgtcgagaaggcacgccagcaagctcagatccgacaccaaatggctgaggactccaaagcagactatagttccatccttcagaagttcaaccacgaacaacacgaatactaccatacacacatccctaatatttttcagaagatacaggaaatggaggaaagaagaattgtgcggatgggagaatctatgaagacctacgctgaggtagacaggcaggtcatacccataatcggcaaatgcttggacgggatagtaaaagccgcagagtcaatagaccagaagaatgattcccaattagtgatcgaggcatataagagtggcttcgagccccccggagacattgagtttgaagactacacccagcctatgaagagaacggtctcagataactctctgtccaattcccgcggtgaagggaaacccgatttaaagttcggaggtaaaagcaagggtaaactgtggccctttatcaaaaagaacaaacctcccccaccaccgccagcttcagcttcaccgtctgctgtgcccaacggccctcagagcccaaagcagcagaaggagccactgagccacagatttaacgaattcatgacatcaaagccaaaaattcattgtttcagaagcctgaagcgcggtcactctctgactctccagggcgccacccctgaagactttagcaatttgccacccgagcagaggaggaagaagctccagcaaaaagtcgatgaactgaacaaggagattcagaaagaaatggaccagcgggatgctatcaccaaaatgaaggacgtctatctcaagaatccacaaatgggtgaccccgcctccttagatcataaattagccgaagtctcacagaatatagaaaaacttcgagtggagacccagaagttcgaagcatggttggcggaggttgagggaagactgcctgccagatccgagcaggctcgccggcagagcgggttgtacgactcacaaaatccccctaccgtcaataattgtgcccaggaccgtgaaagtcctgacgggagttataccgaggaacagtcccaggagagcgaaatgaaagtgttggctaccgactttgatgacgaattcgacgatgaggagccactcccagctataggcacatgtaaggctctatatactttcgagggacagaacgagggtaccatctccgtggtggagggagaaaccctgtacgtcattgaggaggacaagggggatgggtggaccagaatcagacggaatgaagacgaagagggatatgtgcctacgtcctacgttgaggtgtgcctggacaagaatgcaaaagattcatag

SEQ ID NO: 271267 - DNA, 1827 bp, Artificial Sequence
  derived and/or modified sequence
atgtcctgggggacagagttatgggaccaattcgataacctggagaagcacactcagtggggcattgacattctggagaaatacatcaaattcgtgaaggaaaggacagaaattgaattgagctatgcaaagcaactccgtaacctgagtaagaaataccaacctaaaaagaacagcaaagaagaggaagaatacaagtatacgagttgcaaagctttcattagcaacctgaatgaaatgaacgattatgcgggtcagcacgaggtgatatccgaaaacatggcctcccagatcattgtggatctagcgcgatacgtccaggaactcaaacaggaacgtaaaagcaacttccacgacgggagaaaagcacaacagcacattgagacatgctggaagcaattggagtccagtaaaagaagattcgagcgcgactgtaaagaagccgaccgcgctcagcagtattttgagaagatggatgcagacattaacgtcactaaagccgacgtagagaaggctcgccagcaggcacaaattagacatcagatggccgaagacagcaaggctgactacagtagtatcttacagaaattcaatcacgaacagcatgaatattaccacactcatataccaaacatctttcaaaaaatccaggaaatggaggaacggaggatagtgcggatgggggaatctatgaagacatatgcggaggtcgacagacaagtaattccgattattggcaaatgcctggatggtattgtgaaggctgcagagagcatcgaccagaagaatgacagtcagctggtgatcgaggcctacaagtccggctttgagcctcccggtgatatagagtttgaagattacacacagcccatgaagagaacggtgagcgataacagtctctcaaactctaggggggaggggaaacccgacctgaaattcgggggtaaatccaagggaaagctttggccgttcatcaaaaagaacaagccaccaccgcctccgcctgccagtgctagcccatccgctgttccaaatgggccacagtctccaaagcagcagaaagaacccctgagccaccgctttaatgaattcatgacctccaaaccaaagattcattgcttccgatcactgaagcggggacatagcctcaccctgcaaggagctacccctgaggattttagtaatctgcccccagagcagcgacgcaagaaactgcagcagaaggtcgacgaattgaataaggagatccaaaaagaaatggaccagagggatgctatcactaagatgaaggatgtgtatctgaagaaccctcaaatgggcgatcccgctagtcttgatcataagttggccgaggtctctcaaaacatcgagaagttacgcgtagaaacccaaaagtttgaggcatggctcgcagaggtagaaggcaggttgccagcaaggagcgaacaggcgcgaaggcagtctggtttatatgattcgcaaaaccctcctaccgtgaataattgtgcacaggatagagaatcacccgacggcagctataccgaggaacagtcccaggaaagtgagatgaaggtattggccacagattttgacgacgagttcgatgatgaagaacccttgcctgcaattggtacatgcaaagcgctgtatacgtttgagggtcagaacgaagggacgataagcgttgtggaaggggagactctatacgttatagaggaagataaaggcgatggctggacccggattcgcaggaatgaagatgaagagggttacgtacctacttcctatgtggaagtgtgtctggataagaacgcgaaggacagttag

SEQ ID NO: 271268 - DNA, 1827 bp, Artificial Sequence
  derived and/or modified sequence
atgagctggggcaccgagctgtgggaccagttcgacaacctggagaagcacacccagtggggcatcgacatcctggagaagtacatcaagttcgtgaaggagagaaccgagatcgagctgagctacgccaagcagctgagaaacctgagcaagaagtaccagcccaagaagaacagcaaggaggaggaggagtacaagtacaccagctgcaaggccttcatcagcaacctgaacgagatgaacgactacgccggccagcacgaggtgatcagcgagaacatggccagccagatcatcgtggacctggccagatacgtgcaggagctgaagcaggagagaaagagcaacttccacgacggcagaaaggcccagcagcacatcgagacctgctggaagcagctggagagcagcaagagaagattcgagagagactgcaaggaggccgacagagcccagcagtacttcgagaagatggacgccgacatcaacgtgaccaaggccgacgtggagaaggccagacagcaggcccagatcagacaccagatggccgaggacagcaaggccgactacagcagcatcctgcagaagttcaaccacgagcagcacgagtactaccacacccacatccccaacatcttccagaagatccaggagatggaggagagaagaatcgtgagaatgggcgagagcatgaagacctacgccgaggtggacagacaggtgatccccatcatcggcaagtgcctggacggcatcgtgaaggccgccgagagcatcgaccagaagaacgacagccagctggtgatcgaggcctacaagagcggcttcgagccccccggcgacatcgagttcgaggactacacccagcccatgaagagaaccgtgagcgacaacagcctgagcaacagcagaggcgagggcaagcccgacctgaagttcggcggcaagagcaagggcaagctgtggcccttcatcaagaagaacaagccccccccccccccccccgccagcgccagccccagcgccgtgcccaacggcccccagagccccaagcagcagaaggagcccctgagccacagattcaacgagttcatgaccagcaagcccaagatccactgcttcagaagcctgaagagaggccacagcctgaccctgcagggcgccacccccgaggacttcagcaacctgccccccgagcagagaagaaagaagctgcagcagaaggtggacgagctgaacaaggagatccagaaggagatggaccagagagacgccatcaccaagatgaaggacgtgtacctgaagaacccccagatgggcgaccccgccagcctggaccacaagctggccgaggtgagccagaacatcgagaagctgagagtggagacccagaagttcgaggcctggctggccgaggtggagggcagactgcccgccagaagcgagcaggccagaagacagagcggcctgtacgacagccagaacccccccaccgtgaacaactgcgcccaggacagagagagccccgacggcagctacaccgaggagcagagccaggagagcgagatgaaggtgctggccaccgacttcgacgacgagttcgacgacgaggagcccctgcccgccatcggcacctgcaaggccctgtacaccttcgagggccagaacgagggcaccatcagcgtggtggagggcgagaccctgtacgtgatcgaggaggacaagggcgacggctggaccagaatcagaagaaacgaggacgaggagggctacgtgcccaccagctacgtggaggtgtgcctggacaagaacgccaaggacagctag

SEQ ID NO: 271269 - protein, 592 aa, Artificial Sequence
  derived and/or modified sequence
MSWGTELWDQFDNLEKHTQWGIDILEKYIKFVKERTEIELSYAKQLRNLSKKYQPKKNSKEEEEYKYTSCKAFISNLNEMNDYAGQHEVISENMASQIIVDLARYVQELKQERKSNFHDGRKAQQHIETCWKQLESSKRRFERDCKEADRAQQYFEKMDADINVTKADVEKARQQAQIRHQMAEDSKADYSSILQKFNHEQHEYYHTHIPNIFQKIQEMEERRIVRMGESMKTYAEVDRQVIPIIGKCLDGIVKAAESIDQKNDSQLVIEAYKSGFEPPGDIEFEDYTQPMKRTVSDNSLSNSRGEGKPDLKFGGKSKGKLWPFIKKNKSPKQQKEPLSHRFNEFMTSKPKIHCFRSLKRGHSLLKGATPEDFSNLPPEQRRKKLQQKVDELNKEIQKEMDQRDAITKMKDVYLKNPQMGDPASLDHKLAEVSQNIEKLRVETQKFEAWLAEVEGRLPARSEQARRQSGLYDSQNPPTVNNCAQDRESPDGSYTEEQSQESEMKVLATDFDDEFDDEEPLPAIGTCKALYTFEGQNEGTISVVEGETLYVIEEDKGDGWTRIRRNEDEEGYVPTSYVEVCLDKNAKGAKTYI

SEQ ID NO: 271270 - DNA, 1977 bp, Artificial Sequence
  derived and/or modified sequence
attttgctgtggagcggcggggaggaggagccgccgaggagaccccgggcgaggagctgcgagccggaggaggccgcgcggactccgggctttccgccgtcgcggggatctcggggggcaaagggatcgccggggagggggaccagagagccgcgcccgccgcgcggagcgccccttcgcgtcccctgcaccatgagctggggcaccgagctctgggatcagtttgacaacttagaaaaacacacacagtggggaattgatattcttgagaaatatatcaagtttgtgaaagaaaggacagagattgaactcagctatgcaaagcaactcaggaatctttcaaagaagtaccaacctaaaaagaactcgaaggaggaagaagaatacaagtatacgtcatgtaaagctttcatttccaacctgaacgaaatgaatgattacgcagggcagcatgaagttatctccgagaacatggcatcacagatcattgtggacttggcacgctatgttcaggaactgaaacaggagaggaaatcaaactttcacgatggccgtaaagcacagcagcacatcgagacttgctggaagcagcttgaatctagtaaaaggcgatttgaacgcgattgcaaagaggcggacagggcgcagcagtactttgagaaaatggacgctgacatcaatgtcacaaaagcggatgttgaaaaggcccgacaacaagctcaaatacgtcaccaaatggcagaggacagcaaagcagattactcatccattctccagaaattcaaccatgagcagcatgaatattaccatactcacatccccaacatcttccagaaaatacaagagatggaggaaaggaggattgtgagaatgggagagtccatgaagacatatgcagaggttgatcggcaggtgatcccaatcattgggaagtgcctggatggaatagtaaaagcagccgaatcaattgatcagaaaaatgattcacagctggtaatagaagcttataaatcagggtttgagcctcctggagacattgaatttgaggattacactcagccaatgaagcgcactgtgtcagataacagcctttcaaattccagaggagaaggcaaaccagacctcaaatttggtggcaaatccaaaggaaagttatggccgttcatcaaaaaaaataagtctcccaagcagcaaaaggaacccctctcccatcgcttcaacgagttcatgacctccaaacccaaaatccactgcttcaggagcctaaagcgtgggcatagtcttctcaaaggtgcaacaccggaggatttcagcaacctcccacctgaacaaagaaggaaaaagctgcagcagaaagtcgatgagttaaataaagaaattcagaaggagatggatcaaagagatgccataacaaaaatgaaagatgtctacctaaagaatcctcagatgggagacccagccagtttggatcacaaattagcagaagtcagccaaaatatagagaaactgcgagtagagacccagaaatttgaggcctggctggctgaggttgaaggccggctcccagcacgcagcgagcaggcgcgccggcagagcggactgtacgacagccagaacccacccacagtcaacaactgcgcccaggaccgtgagagcccagatggcagttacacagaggagcagagtcaggagagtgagatgaaggtgctggccacggattttgacgacgagtttgatgatgaggagcccctccctgccatagggacgtgcaaagctctctacacatttgaaggtcagaatgaaggaacgatttccgtagttgaaggagaaacattgtatgtcatagaggaagacaaaggcgatggctggacccgcattcggagaaatgaagatgaagagggttatgtccccacttcatatgtcgaagtctgtttggacaaaaatgccaaaggtgctaagacttatatttaataccat

SEQ ID NO: 271271 - DNA, 1779 bp, Artificial Sequence
  derived and/or modified sequence
atgagttggggcacagaactctgggaccagttcgacaacctggagaagcacacgcagtgggggatcgatatcttggagaagtatatcaagttcgttaaagaaagaaccgaaattgaactttcgtacgccaaacagcttagaaacctaagtaagaagtaccaacctaaaaaaaacagcaaggaagaagaagaatataaatatacttcttgtaaagccttcatcagcaaccttaacgaaatgaatgactacgcaggacaacatgaagtaatcagtgagaacatggccagccagataatagtggatttggcaagatacgttcaggaactcaagcaggagcgtaaatcaaatttccacgacggaaggaaggctcagcagcacatcgagacttgctggaaacagctggagagctccaaacggaggttcgagagagactgcaaggaagctgaccgcgctcaacagtactttgaaaagatggatgctgacatcaacgtgacaaaagcagacgttgaaaaagcgcgccaacaagcacaaattaggcaccagatggctgaggacagcaaagcagactacagttcaatcctgcagaagttcaaccacgaacagcatgaatattatcacactcatatacccaacatctttcagaaaattcaggaaatggaagagagaaggatcgtcagaatgggtgagtctatgaaaacttatgctgaagtagaccgtcaggtcatccccatcattggcaaatgtcttgatggaatagtcaaagccgcggagtccatcgaccagaaaaacgacagtcagttagtcatagaggcgtataagtccgggtttgagccaccgggagatatcgagtttgaagactatactcaacccatgaagcgcactgtctccgataatagcttatccaattcccgcggcgaggggaagcctgacctgaaattcggtgggaagtccaagggcaagttgtggccattcatcaagaagaataaaagtcccaagcagcagaaagaaccccttagtcatagatttaatgagttcatgacatccaaacctaagatccattgcttcaggagtctgaaaagagggcactctcttcttaagggtgcgactccagaggacttttctaatttgccccccgagcagagaaggaagaaactccaacagaaagtggacgagctgaacaaggaaattcagaaggaaatggaccagcgcgatgccattaccaaaatgaaggacgtgtatctgaaaaacccccagatgggggatcccgcttctcttgaccataaactagccgaagtatcacagaacattgaaaagttaagggtggagactcagaagttcgaagcttggctggcggaagttgaagggcgactaccagcccggagcgagcaggcaagacgacagtccggtctatacgatagccagaacccccccactgtaaacaattgtgctcaggaccgtgagagtcccgacgggtcctatactgaggagcaatcacaggagtctgagatgaaggtgctggccacggatttcgacgacgagtttgacgacgaggagcctctgccggcaattggaacctgcaaagccttgtatacatttgaggggcagaacgaaggaacaatctctgtggtggagggcgaaaccctttacgtgattgaggaagacaagggggacggatggaccaggatacggaggaatgaagatgaggagggatacgtccccacgtcctatgttgaggtttgccttgataagaatgcgaaaggcgccaaaacctatatctag

SEQ ID NO: 271272 - DNA, 1779 bp, Artificial Sequence
  derived and/or modified sequence
atgtcctggggcacagagctgtgggaccagtttgacaacctggagaagcacacccagtggggcatcgacatcctggagaagtacatcaagtttgtgaaggagaggacagaaattgagctgtcctatgccaagcagctgaggaacctgagcaagaagtaccagcccaagaagaacagcaaggaggaggaggagtacaagtacaccagctgcaaggccttcatcagcaacctgaatgagatgaatgactatgccggccagcatgaagtcatcagcgagaacatggccagccagatcatcgtggacctggcccgctacgtgcaggagctgaagcaggagaggaagagcaacttccatgatggcaggaaggcccagcagcacatcgagacctgctggaagcagctggagagcagcaagagaagatttgagcgggactgcaaggaggccgaccgggcccagcagtactttgagaagatggatgctgacatcaacgtgaccaaggcagatgtggagaaggcccggcagcaggcccagatccgccaccagatggccgaggacagcaaggctgactacagcagcatcctgcagaagttcaaccacgagcagcacgagtactaccacacccacatccccaacatcttccagaagatccaggagatggaggagcggcgcatcgtgaggatgggagagagcatgaagacctatgcagaggtggaccggcaggtgatccccatcatcggcaagtgcctggatggcatcgtgaaggctgctgagagcattgaccagaagaatgacagccagctggtgattgaggcctacaagagcggctttgagcccccaggggacatcgagtttgaggactacacccagcccatgaagaggacagtgtctgacaacagcctgagcaacagcagaggagagggcaagccagacctgaagtttggaggcaagagcaagggcaagctgtggcccttcatcaagaagaacaagagccccaagcagcagaaggagcccctgagccaccgcttcaatgagttcatgaccagcaagcccaagatccactgcttccgcagcctgaagaggggccacagcctgctgaagggggccaccccagaggacttcagcaacctgcccccagagcagaggaggaagaagctgcagcagaaggtggatgagctgaacaaggagatccagaaggagatggaccagagagatgccatcaccaagatgaaggatgtgtacctgaagaacccccagatgggagaccctgccagcctggaccacaagctggccgaggtgtcccagaacatcgagaagctgcgggtggagacccagaagtttgaggcctggctggccgaggtggagggccgcctgcctgcccggtctgagcaggcccggcggcagagcggcctgtatgacagccagaacccccccaccgtgaacaactgtgcccaggaccgggagagcccagatggcagctacacagaggagcagagccaggagagcgagatgaaggtgctggccacagactttgatgatgaatttgatgatgaggagcccctgcctgccatcggcacctgcaaggccctgtacacctttgagggccagaatgaaggcaccatctctgtggtggagggggagaccctgtatgtgattgaagaagataaaggagatggctggacccgcatcagaagaaatgaagatgaggagggctacgtgcccaccagctatgtggaggtgtgcctggacaagaatgccaagggggccaagacctacatctag

SEQ ID NO: 271273 - DNA, 1779 bp, Artificial Sequence
  derived and/or modified sequence
atgagctggggcaccgagctgtgggaccagttcgacaacctggagaagcacacacagtggggaatcgatatcctcgaaaagtatatcaagtttgtgaaggagcgcactgagattgagttgagctacgctaagcagctccgtaacctatcgaaaaaatatcagccaaaaaagaactccaaagaagaggaagagtataaatatacttcctgtaaagcctttatctctaatctgaatgagatgaatgactacgctggccagcatgaagtgatttcagaaaacatggcttcacagatcatcgttgatctagctagatatgtgcaggagctcaaacaggaacgcaagagcaattttcacgacggacgcaaggcacagcagcacattgagacttgctggaaacaactcgagtccagtaaaaggaggttcgagagagattgtaaagaagctgatcgagctcagcaatactttgagaagatggatgctgatatcaatgtcacgaaagcagatgtcgagaaggcccggcagcaggcccagatccgacaccaaatggctgaagactcaaaagccgactactcctcaattctccagaaattcaatcatgaacagcatgaatactatcacacgcacattcctaacatctttcagaagatccaagagatggaagagcggcgaatcgtgcgcatgggcgagtctatgaaaacatatgccgaggtggatcggcaggtgattccaatcatcgggaaatgtctggacgggatcgtcaaggcagcagaatctatcgatcagaagaatgattcccagctcgtcattgaggcttataagtctggctttgaaccacccggcgacatagagtttgaggattacacacagccgatgaaacggacagtttccgataactccctgtctaatagcagaggagaggggaaaccagacctgaagtttgggggaaaaagcaaagggaagctgtggccatttatcaagaagaataagagtcccaaacaacagaaggagccgttatctcatcgatttaatgaatttatgacctctaaacctaagattcactgttttcggtcccttaagcgtggccattcacttttgaagggcgccactcccgaggatttttccaatttgccacctgagcagcgccggaagaagctgcagcagaaagtagacgagctcaataaagaaattcaaaaggagatggatcagcgcgacgccattaccaagatgaaggacgtttatttaaagaatccccagatgggcgatcccgcttcattagatcataagctcgccgaggtctctcagaacatcgagaaactgagagtggagacccagaaatttgaggcttggctggcagaggtggaggggaggctcccagctcggtctgaacaagcccgaagacaatcggggctctatgactcacagaaccctcccacagtgaacaattgtgcccaggaccgggaaagtcctgatgggtcatacacagaggagcaatcccaggagagtgaaatgaaggtgctcgctaccgactttgacgacgaatttgacgacgaagaaccactgcccgccatcggcacctgcaaggccctctatacctttgagggtcagaatgaagggactatttccgtggtggagggagagaccctgtatgtaattgaggaggataaaggagatggctggactcgaatcaggagaaatgaggatgaagagggatacgtgccaacttcttatgtcgaagtgtgcctcgacaagaatgccaagggcgcgaaaacctacatctag

SEQ ID NO: 271274 - DNA, 1779 bp, Artificial Sequence
  derived and/or modified sequence
atgagctggggcacggagctgtgggaccagttcgataacttagaaaagcatacgcaatgggggatagatattctggaaaagtatatcaagtttgtcaaggagcggactgaaatcgagttgtcttatgccaaacagctcagaaacctgagcaaaaagtatcagccgaagaagaattccaaggaggaagaggagtataagtacacgtcatgcaaagctttcattagcaacctgaacgaaatgaacgactatgcagggcagcatgaggtcatctcagagaatatggccagtcagattattgtcgatctggctaggtatgtgcaggagctcaaacaggaaagaaaaagcaactttcacgatggaaggaaggcacagcagcatatcgagacatgttggaagcagctggagagctccaaacgaaggttcgaaagagattgtaaggaggcagaccgcgcacagcagtattttgagaagatggacgcggatattaatgtgaccaaagccgacgtggaaaaggcccgtcagcaggcccaaatcaggcaccagatggccgaggatagtaaagctgactatagctcgattctccaaaagtttaatcacgagcagcacgagtactaccacactcacatccccaatattttccagaagatccaagagatggaggagcgacgtatcgttcgcatgggcgaatcaatgaagacgtacgccgaggtcgaccgacaggttatccccatcatcggaaaatgtttggatgggatcgtgaaagctgcagaatctatcgaccaaaagaacgatagtcaactcgtgatagaagcttataaatccggcttcgagccccctggcgacattgagtttgaagattacacacagcctatgaaacgtacagtctctgataactcgttgagtaactcccgcggagaaggcaagcctgacctgaagtttggcggaaaatctaaaggaaaactctggccttttattaagaagaataaatctccaaagcagcagaaggagcctctttcccatcggtttaatgaatttatgacctccaagccaaaaattcattgcttcagaagtctgaaacgcggacactctcttttaaagggggctacccctgaagattttagtaacctgcccccagagcaaagaaggaagaagctccagcaaaaggttgatgagcttaacaaggagatccaaaaggagatggatcagcgcgatgctattaccaaaatgaaggacgtctatctgaagaatccccaaatgggcgaccctgctagtctcgaccataagctagcagaagttagccagaatatcgagaagttgcgagtagagacgcagaaatttgaagcctggctggcggaggtggaaggaagactccccgctcggtcggagcaggccaggcgccaaagcggcctgtatgactcccaaaatcctccaactgtgaacaactgtgctcaggaccgggaatccccagacgggagctacacagaggagcagtcccaagagtcagagatgaaagtgctcgcaaccgacttcgacgatgaatttgacgatgaggaacccctcccagccattgggacctgtaaagcattatatactttcgaggggcagaatgaaggaacaattagtgtcgtggaaggggagactctgtatgtgatcgaagaagataaaggcgacggatggacaagaataagacgaaacgaggacgaggagggctatgtgcccacctcttatgtggaggtttgtctggataaaaatgcaaagggggctaagacttacatatag

SEQ ID NO: 271275 - DNA, 1779 bp, Artificial Sequence
  derived and/or modified sequence
atgagctggggcaccgagctgtgggaccagttcgacaacctggagaagcacacccagtggggcatcgacatcctggagaagtacatcaagttcgtgaaggagagaaccgagatcgagctgagctacgccaagcagctgagaaacctgagcaagaagtaccagcccaagaagaacagcaaggaggaggaggagtacaagtacaccagctgcaaggccttcatcagcaacctgaacgagatgaacgactacgccggccagcacgaggtgatcagcgagaacatggccagccagatcatcgtggacctggccagatacgtgcaggagctgaagcaggagagaaagagcaacttccacgacggcagaaaggcccagcagcacatcgagacctgctggaagcagctggagagcagcaagagaagattcgagagagactgcaaggaggccgacagagcccagcagtacttcgagaagatggacgccgacatcaacgtgaccaaggccgacgtggagaaggccagacagcaggcccagatcagacaccagatggccgaggacagcaaggccgactacagcagcatcctgcagaagttcaaccacgagcagcacgagtactaccacacccacatccccaacatcttccagaagatccaggagatggaggagagaagaatcgtgagaatgggcgagagcatgaagacctacgccgaggtggacagacaggtgatccccatcatcggcaagtgcctggacggcatcgtgaaggccgccgagagcatcgaccagaagaacgacagccagctggtgatcgaggcctacaagagcggcttcgagccccccggcgacatcgagttcgaggactacacccagcccatgaagagaaccgtgagcgacaacagcctgagcaacagcagaggcgagggcaagcccgacctgaagttcggcggcaagagcaagggcaagctgtggcccttcatcaagaagaacaagagccccaagcagcagaaggagcccctgagccacagattcaacgagttcatgaccagcaagcccaagatccactgcttcagaagcctgaagagaggccacagcctgctgaagggcgccacccccgaggacttcagcaacctgccccccgagcagagaagaaagaagctgcagcagaaggtggacgagctgaacaaggagatccagaaggagatggaccagagagacgccatcaccaagatgaaggacgtgtacctgaagaacccccagatgggcgaccccgccagcctggaccacaagctggccgaggtgagccagaacatcgagaagctgagagtggagacccagaagttcgaggcctggctggccgaggtggagggcagactgcccgccagaagcgagcaggccagaagacagagcggcctgtacgacagccagaacccccccaccgtgaacaactgcgcccaggacagagagagccccgacggcagctacaccgaggagcagagccaggagagcgagatgaaggtgctggccaccgacttcgacgacgagttcgacgacgaggagcccctgcccgccatcggcacctgcaaggccctgtacaccttcgagggccagaacgagggcaccatcagcgtggtggagggcgagaccctgtacgtgatcgaggaggacaagggcgacggctggaccagaatcagaagaaacgaggacgaggagggctacgtgcccaccagctacgtggaggtgtgcctggacaagaacgccaagggcgccaagacctacatctag

SEQ ID NO: 271276 - protein, 1226 aa, Artificial Sequence
  derived and/or modified sequence
MSKLKVIPEKSLTNNSRIVGLLAQLEKINAEPSESDTARYVTSKILHLAQSQEKTRREMTAKGSTGMEILLSTLENTKDLQTTLNILSILVELVSAGGGRRVSFLVTKGGSQILLQLLMNASKESPPHEDLMVQIHSILAKIGPKDKKFGVKARINGALNITLNLVKQNLQNHRLVLPCLQLLRVYSANSVNSVSLGKNGVVELMFKIIGPFSKKNSSLIKVALDTLAALLKSKTNARRAVDRGYVQVLLTIYVDWHRHDNRHRNMLIRKGILQSLKSVTNIKLGRKAFIDANGMKILYNTSQECLAVRTLDPLVNTSSLIMRKCFPKNRLPLPTIKSSFHFQLPVIPVTGPVAQLYSLPPEVDDVVDESDDNDDIDVEAENETENEDDLDQNFKNDDIETDINKLKPQQEPGRTIEDLKMYEHLFPELVDDFQDYDLISKEPKPFVFEGKVRGPIVVPTAGEETSGNSGNLRKVVMKENISSKGDEGEKKSTFMDLAKEDIKDNDRTLQQQPGDQNRTISSVHGLNNDIVKALDRITLQNIPSQTAPGFTAEMKKDCSLPLTVLTCAKACPHMATCGNVLFEGRTVQLGKLCCTGVETEDDEDTESNSSVEQASVEVPDGPTLHDPDLYIEIVKNTKSVPEYSEVAYPDYFGHIPPPFKEPILERPYGVQRTKIAQDIERLIHQSDIIDRVVYDLDNPNYTIPEEGDILKFNSKFESGNLRKVIQIRKNEYDLILNSDINSNHYHQWFYFEVSGMRPGVAYRFNIINCEKSNSQFNYGMQPLMYSVQEALNARPWWIRMGTDICYYKNHFSRSSVAAGGQKGKSYYTITFTVNFPHKDDVCYFAYHYPYTYSTLQMHLQKLESAHNPQQIYFRKDVLCETLSGNSCPLVTITAMPESNYYEHICHFRNRPYVFLSARVHPGETNASWVMKGTLEYLMSNNPTAQSLRESYIFKIVPMLNPDGVINGNHRCSLSGEDLNRQWQSPSPDLHPTIYHAKGLLQYLAAVKRLPLVYCDYHGHSRKKNVFMYGCSIKETVWHTNDNATSCDVVEDTGYRTLPKILSHIAPAFCMSSCSFVVEKSKESTARVVVWREIGVQRSYTMESTLCGCDQGKYKGLQIGTRELEEMGAKFCVGLLRLKRLTSPLEYNLPSSLLDFENDLIESSCKVTSPTTYVLDEDEPRFLEEVDYSAESNDELDIELAENVGDYEPSAQEEVLSDSELSRTYLP

SEQ ID NO: 271277 - DNA, 3681 bp, Artificial Sequence
  derived and/or modified sequence
atgtcaaagttgaaggtgatccctgaaaagtcactgaccaataactcccggattgtgggtctgttggcccaactcgagaaaatcaacgccgagccttcagagagcgacactgctaggtacgtgacaagtaaaattttacatttggcgcagtctcaagagaagactcgtcgtgaaatgacagccaaggggtcgacaggcatggagattcttctcagcaccctcgaaaatacgaaggatctccagacaacactgaacattctgtccatcctggtcgagctggtgagcgctggcggaggaagacgcgtgtcttttctcgtcacaaaggggggaagtcagatcctgctccaactattaatgaacgcaagtaaagaaagcccaccccatgaagacctgatggtgcagatacattccatattggcaaaaatcggtccgaaggataaaaagttcggggtcaaggcccggatcaatggtgcactcaatattactctcaatttggttaaacagaacttgcaaaaccacagactcgtcctgccttgtttgcagctgttaagagtatactcagccaacagtgttaacagcgttagcctaggaaaaaatggcgttgtcgaactcatgtttaagataataggaccttttagtaaaaaaaattcttccctcataaaggttgccctggataccctggctgcgctgcttaagagtaagaccaacgcgaggcgtgcagtggatcggggctatgtccaggtccttttaacaatttacgtcgattggcatcgccacgacaatcgtcatcgtaacatgctgatcagaaagggcatactacagtccctgaaaagcgttaccaacataaagttggggcgtaaggcattcatcgatgccaacggaatgaagattctttataatacttcccaagagtgtttggctgtgaggaccttggaccccctcgtcaatacctcttcactaataatgcggaagtgcttcccaaagaacaggctccccttacccacaatcaaatcctcatttcactttcagctcccagtgatccccgtaactggaccagtggcacagctgtacagcctccctccagaggtggatgatgtcgtggatgagagcgatgataatgacgatatcgatgtggaggcagaaaatgagactgaaaatgaggatgatctcgaccagaacttcaaaaatgatgacattgagaccgatattaataagttgaaaccgcagcaggagcctggccgcactatcgaggatcttaaaatgtatgaacacttatttcccgaactggtcgacgactttcaggattacgatctgataagcaaggagccaaagcccttcgtatttgagggaaaggttcgtgggcctatcgtggtgccaacagcaggagaggaaacttcgggcaacagtggcaacctacgcaaggttgtgatgaaagagaatatcagcagcaaaggcgacgagggggagaagaagtctactttcatggatctggcaaaggaagatatcaaagacaacgacaggacactccagcaacagcccggcgaccagaatagaactatttcaagtgtgcatggacttaacaacgacattgttaaggccctagaccgcattacattacagaacataccctctcagactgcgcccgggttcactgctgaaatgaagaaagactgttcactgcctctgaccgtcctgacctgtgccaaggcatgtccccacatggcgacttgtggcaatgtgctgtttgagggacgcacggtgcaattgggaaaactctgctgtacaggtgtggaaaccgaagacgatgaagatactgagagcaatagctctgtagaacaggcttcagtggaggtgccagatggcccaacactgcacgatcccgatctgtatatcgaaattgttaagaacaccaagtctgtgcccgagtacagcgaggtggcttaccctgactactttgggcatatccctccaccgtttaaggagcctatcctcgaaagaccatacggtgtgcagcgcacaaaaatcgcacaggacatcgaacgcctcatccatcagagtgacattatagacagagttgtgtatgacctagacaacccgaattatactatccctgaggaaggcgacatccttaaatttaatagcaagtttgaatcaggcaatttgcgcaaagtgatccagattagaaaaaacgaatacgatctcattctcaactcagacattaatagcaaccattaccaccagtggttctactttgaagtgtcgggcatgagacccggggttgcataccgctttaatattatcaactgcgagaaatcgaattcccagtttaattacggcatgcagcccctgatgtactccgttcaagaagccctcaatgctcgcccttggtggatcagaatgggcactgacatctgctattacaaaaatcatttcagcaggtcctccgtggccgcaggaggacagaagggtaaaagttactacaccattaccttcactgtcaactttccccataaagacgatgtgtgttatttcgcttaccactacccttatacctactccacacttcagatgcacctacagaagttggagtctgctcacaacccacagcaaatctatttcagaaaggatgtactgtgtgaaaccctctccggcaattcctgtcctttagtcaccatcactgccatgccagaaagtaattattatgagcacatatgtcactttcggaaccgcccatacgtgttcctaagtgcacgggtccacccaggagagactaatgcctcttgggtcatgaaagggaccctcgaatacctgatgtcaaataatccaactgctcagagcctgcgggagagctatatattcaaaatcgtgccaatgcttaacccggatggtgtgattaacggcaatcaccggtgctccctgagcggcgaagatttgaaccgccagtggcaatctcccagtcccgacttgcatcctacgatctaccacgcaaagggtctgctccaatacctcgctgcagtgaaacgcttgccacttgtttattgcgattaccatgggcacagcagaaaaaaaaacgtcttcatgtacggctgtagcatcaaagaaaccgtgtggcacactaacgataatgctacgagttgcgacgtagtggaagacaccggatatagaacactgcctaagattctctcgcatatagcccctgccttctgtatgtctagctgcagcttcgttgtggaaaaaagcaaggaatccactgcacgcgtcgtggtgtggagggagatcggcgtgcaacgtagctacacaatggaatctacgttgtgtggttgtgatcagggcaagtataaaggccttcaaatcggaacccgggagcttgaagaaatgggggcaaaattttgtgtgggactgctgcggcttaagaggttaacgagcccactggagtataacctcccatctagcttactggactttgaaaacgacctgattgaatcatcatgcaaggttacttcccctaccacctacgtgctagacgaagatgaacctaggttcctggaggaggtggattatagcgcagagtctaatgatgaactggacatcgaactcgccgaaaatgtgggcgactacgagccctccgcccaggaggaagtgcttagtgattctgagctgtccagaacgtatctgccctag

SEQ ID NO: 271278 - DNA, 3681 bp, Artificial Sequence
  derived and/or modified sequence
atgagcaagctgaaggtgattcctgagaagagcctgaccaacaacagccgcatcgtgggcctgctggcccagctggagaagatcaatgctgagcccagcgagagtgacacagcccgctacgtgaccagcaagatcctgcacctggcccagagccaggagaagacccggcgggagatgacagccaagggcagcacaggcatggagatcctgctgagcaccctggagaacaccaaggacctgcagaccaccctgaacatcctgagcatcctggtggagctggtgtctgctgggggcggccggcgggtgtccttcctggtgaccaagggcggcagccagatcctgctgcagctgctgatgaatgccagcaaggagagcccccctcatgaggacctgatggtgcagatccacagcatcctggccaagattggccccaaggacaagaagtttggagtgaaggcccgcatcaacggggccctgaacatcaccctgaacctggtgaagcagaacctgcagaaccaccggctggtgctgccctgcctgcagctgctgcgggtgtacagcgccaacagcgtgaacagcgtgtccctgggcaagaatggagtggtggagctgatgttcaagatcatcggccccttcagcaagaagaacagcagcctcatcaaggtggccctggacaccctggccgccctgctgaagagcaagaccaatgcccggcgggctgtggaccggggctacgtgcaggtgctgctgaccatctacgtggactggcacagacatgacaacagacacaggaacatgctgatcaggaagggcatcctgcagagcctgaagtctgtgaccaacatcaagctgggcaggaaggccttcattgatgccaacggcatgaagatcctgtacaacaccagccaggagtgcctggccgtgaggaccctggaccccctggtgaacaccagcagcctcatcatgaggaagtgcttccccaagaaccggctgcccctgcccaccatcaagagcagcttccacttccagctgcctgtgattcctgtgacaggccctgtggcccagctgtacagcctgcccccagaggtggatgatgtggtggatgaaagtgatgacaatgatgacattgatgtggaggctgaaaatgaaacagaaaatgaagatgacctggaccagaacttcaagaatgatgacattgaaacagacatcaacaagctgaagccccagcaggagcccggccgcaccatcgaggacctgaagatgtatgagcacctgtttcctgagctggtggatgacttccaggactatgacctgatcagcaaggagcccaagccctttgtgtttgagggcaaggtgcggggccccatcgtggtgcccacagctggggaggagaccagcggcaacagcggcaacctgaggaaggtggtgatgaaggagaacatcagcagcaaaggagatgaaggagagaagaagagcaccttcatggacctggccaaggaggacatcaaggacaatgacaggaccctgcagcagcagcccggggaccagaacagaaccatcagctctgtgcacggcctgaacaatgacatcgtgaaggccctggaccgcatcaccctgcagaacatccccagccagacagcccctggcttcaccgctgagatgaagaaggactgcagcctgcccctgactgtgctgacctgtgccaaggcctgcccccacatggccacctgtggaaatgtgctgtttgagggccgcacagtgcagctgggcaagctgtgctgcacaggagtggagacagaagatgatgaggacacagagagcaacagctctgtggagcaggcctctgtggaggtgcctgatggccccaccctgcatgaccctgacctgtacattgaaattgtgaagaacaccaagtctgtgcctgagtacagcgaggtggcctacccagactacttcggccacatccccccacccttcaaggagcccatcctggagcggccctacggcgtgcagaggaccaagatcgcccaggacatcgagcggctcatccaccagagcgacatcatcgacagagtggtgtatgacctggacaaccccaactacaccatccctgaggagggggacatcctgaagttcaacagcaagtttgagagcggcaacctgaggaaggtgatccagatcaggaagaatgaatatgacctgatcctgaacagcgacatcaacagcaaccactaccaccagtggttctactttgaggtgtctggcatgaggcctggggtggcctaccgcttcaacatcatcaactgtgagaagagcaacagccagttcaactacggcatgcagcccctgatgtacagcgtgcaggaggccctgaatgcccggccctggtggatccgcatgggcacagacatctgctactacaagaaccacttcagccgcagctctgtggccgccggcggccagaagggcaagagctactacaccatcaccttcaccgtgaacttcccccacaaggatgatgtgtgctactttgcctaccactacccctacacctacagcaccctgcagatgcacctgcagaagctggagagcgcccacaacccccagcagatctacttcaggaaggatgtgctgtgtgagaccctgagcggcaacagctgccccctggtgaccatcacagccatgcctgagagcaactactatgagcacatctgccacttcaggaaccggccctacgtgttcctgagcgcccgggtgcaccctggagagaccaatgcctcctgggtgatgaagggcaccctggagtacctgatgagcaacaaccccacagcccagagcctgcgggagagctacatcttcaagatcgtgcccatgctgaacccagatggagtcatcaatggaaaccaccgctgcagcctgagcggggaggacctgaaccggcagtggcagagccccagcccagacctgcaccccaccatctaccacgccaagggcctgctgcagtacctggccgctgtgaagaggctgcccctggtgtactgtgactaccacggccacagcaggaagaagaatgtgttcatgtatggctgcagcatcaaggagaccgtgtggcacaccaatgacaatgccaccagctgtgatgtggtggaggacaccggctaccgcaccctgcccaagatcctgagccacatcgccccagccttctgcatgagcagctgcagctttgtggtggagaagagcaaggagagcacagcccgggtggtggtgtggagagaaattggagtgcagaggagctacaccatggagagcaccctgtgtggctgtgaccagggcaagtacaagggcctgcagatcggcacccgggagctggaggagatgggcgccaagttctgtgtgggcctgctgcggctgaagaggctgaccagccccctggagtacaacctgcccagcagcctgctggactttgaaaatgacctgattgagagcagctgcaaggtgaccagccccaccacctacgtgctggatgaagatgagccccgcttcctggaggaggtggactacagcgctgagagcaatgatgagctggacatcgagctggctgaaaatgtgggggactatgagcccagcgcccaggaggaggtgctgagtgacagcgagctgagcaggacctacctgccctag

SEQ ID NO: 271279 - DNA, 3681 bp, Artificial Sequence
  derived and/or modified sequence
atgagcaagctgaaggtgatccccgagaagagcctgaccaacaacagccgcattgtgggtttgcttgcacagctggagaagattaacgccgagccctctgaatcagatactgcccgttacgtgacctcaaagatcctacaccttgcccagagtcaggagaaaaccaggcgagagatgaccgcgaaaggctcaaccggcatggagatcctgctttccaccctggagaacacgaaagacctccagaccacccttaacatcctgtctatcctggtggagttggtgtccgccgggggtgggcggagagtgagctttttggttacgaaaggcgggtcccaaatcctgctgcagctccttatgaatgcaagtaaagaaagtccgccacacgaggacctgatggtccagatccactccattttggccaaaattggtccgaaagataagaaattcggggtcaaggccaggataaatggggcacttaacatcacactgaacttggtgaaacagaatcttcagaaccaccggctcgtgctcccctgtctccagctccttcgggtctactcagctaattctgttaactccgtgtctctcggtaagaatggcgtagtggaacttatgtttaagatcatcggtccattttccaagaaaaactcatcactgattaaggtcgccctggatactctggcagccctgttgaagtcgaaaacaaatgcaaggcgggcagtggacagagggtatgtccaagtccttctcacaatttacgtagactggcataggcatgataatcgacatcgaaatatgttgatccgcaagggaattcttcagtcacttaaatccgttaccaacattaaactgggtcgcaaagcatttatcgacgccaatgggatgaagattctttataacactagccaggagtgcctcgccgtgcggaccttggaccctcttgtcaatactagttctctcattatgcggaaatgtttccctaaaaatagacttccactccccacgattaagagcagttttcacttccagctgccagttattcccgtgactggacccgtagcgcaattgtatagcttgccgccagaggtggatgacgtggttgatgagtcagatgataacgatgatattgacgtggaagccgaaaacgagaccgaaaatgaagacgatttggatcaaaatttcaagaatgacgacattgagacagacatcaataaacttaaaccgcagcaggaaccaggccgcactatagaagacttgaagatgtacgagcacctgtttccagagcttgtggatgactttcaagattatgacctgatctcaaaagagccaaaacccttcgtgtttgagggcaaggtgcggggcccaattgttgttcccacagcaggtgaagagacttctgggaatagcggcaatcttcgtaaggtcgtaatgaaggagaacatatctagcaagggcgacgaaggggaaaagaaaagcacattcatggatttggccaaagaggacattaaggacaacgatcgaacgctgcaacaacagccaggcgaccagaatcgaacaatcagctcagtacacggacttaataacgacatcgttaaggctcttgacagaatcactcttcagaacatcccttcacaaacagctcccggatttacggctgaaatgaagaaagactgctcgctcccactgaccgtgcttacatgtgcgaaagcttgcccccacatggccacttgtggaaacgttcttttcgagggccggacagtccagttgggaaagctgtgttgcacgggcgttgagacagaggacgatgaggatacagaatcaaacagttctgttgaacaggcttccgttgaggtgcctgacggacccaccttgcacgaccctgacttgtatattgaaatagtgaagaacactaagagtgtgccagaatattcagaagtggcctaccccgactatttcggccacattccccccccgttcaaggagcccatcctggagaggccatatggcgtgcagagaactaaaattgctcaagacatcgaacgtctgattcaccagagtgatatcatcgaccgcgtggtgtacgacttagacaatcccaattacaccatccccgaggaaggggacattctgaaattcaacagcaagtttgagtccgggaatctccgcaaggtaatccagatccggaagaatgaatatgacctcatactgaactcagatataaattccaaccactaccatcagtggttctacttcgaagtcagtggaatgcggcccggcgtggcctaccggttcaatatcatcaactgcgagaagtctaacagccagtttaattatggaatgcagccgctaatgtatagtgtccaggaggctctcaacgcaaggccttggtggattcgtatgggaacagatatatgctattacaagaatcacttcagccgaagcagtgtggccgccggaggccagaaagggaagagctactacacaatcacattcaccgtgaactttccccacaaagacgacgtgtgctattttgcctaccattacccatacacatactccaccctgcaaatgcatttgcagaaattggagtcagcgcacaacccccagcagatctacttccgtaaagatgtgctgtgtgagaccctttcaggcaactcatgccccctcgtaacaattacggccatgccggaaagtaactattatgagcacatctgccatttcaggaatagaccttacgtgttcctgtccgcccgcgtgcatccaggcgaaacaaatgcatcttgggttatgaagggaacccttgaatacttaatgagcaacaatcccactgctcaatccctgcgtgagtcatacatctttaagatcgttccaatgctgaatccagatggggtcattaacggaaaccacagatgctcactgagtggagaagacctcaaccgacagtggcaaagtccgagccctgacctgcaccccaccatttaccatgccaagggtctgctacagtatctggcagccgttaaaaggctcccactcgtgtactgtgattaccatgggcatagccggaagaaaaacgtgtttatgtatggttgctcaatcaaagaaaccgtctggcacacgaacgataatgcaacctcttgcgatgtagtggaagatacaggctatcggacgctgcccaaaattctttcgcatatcgcacccgccttctgtatgagctcatgctcttttgtggtagagaaaagcaaggaatcaactgctcgtgttgtcgtgtggagggagatcggagttcagagatcttacacaatggagtccacactgtgcgggtgcgaccagggaaagtacaagggattgcagattggtactcgagagctcgaggagatgggggcgaagttctgtgttggtctgctcaggctcaagaggttgactagcccgcttgagtacaacctgccatctagcctgctggacttcgagaacgatctgatcgaaagttcttgcaaagtgacatcccccacaacctacgttctggatgaggatgaaccaaggttcctggaggaggtggactactctgccgaatcaaatgacgagctcgatatagaactggctgaaaacgttggagactatgagccaagcgctcaggaggaggttctttctgacagtgaactatcgcgtacctacctcccctag

SEQ ID NO: 271280 - DNA, 3681 bp, Artificial Sequence
  derived and/or modified sequence
atgtctaagctgaaggttattccggaaaaatctctgacaaataactctaggatcgtaggcttgcttgctcagctcgaaaagatcaatgccgaaccatcggagtctgatacagctcggtacgtcacctcaaagatactacacttggctcagtcgcaggagaaaacacggagagagatgaccgctaagggcagtacgggaatggagatattgctctccactctagagaacaccaaggatctccagactaccttgaacattctaagcatcctggtggaactcgtaagcgcgggaggaggtagaagagtctctttcttggttactaagggaggtagccagatcttactgcagttgcttatgaatgccagtaaggaatctccgccacacgaggatctaatggtacagatccacagcattctcgccaagattggacctaaagacaaaaagtttggggttaaagcccgtattaacggcgctctgaatatcaccctcaatctagtgaagcagaacctgcagaatcacaggctggtcctaccatgtctgcagctcctccgtgtgtactctgcaaactcagtaaattccgtgagtctaggcaagaacggcgttgttgagctgatgttcaagattatcggtccgtttagtaaaaagaacagtagtctgattaaagtggcactggacacacttgccgctttgctgaaaagtaagacaaacgcacggcgagccgttgatcgcggttatgtgcaggtcctcctgacaatttacgtagactggcataggcatgataaccggcacaggaatatgcttattcgtaaaggcattctccagagcttgaaaagcgtgacaaacatcaagctggggcgtaaagcctttattgacgctaacgggatgaaaatcctgtataacacatcccaggagtgtcttgcagtccgtaccttagacccactcgttaacacaagctccttgattatgaggaagtgtttccccaagaaccggctgcccctgcccaccatcaagtcaagcttccatttccagctccctgtaatccccgttaccggtccagtggctcagctttactcattaccacctgaggtagacgatgttgtggatgagagtgacgacaatgatgacattgatgtggaagccgagaacgagacagaaaatgaggacgaccttgaccaaaacttcaagaacgacgacatcgaaacagatattaataaactgaagccacagcaggaacctggtcgcaccattgaagacctgaaaatgtacgaacacctctttccagaactggtagacgattttcaggattatgatctcatcagtaaagaaccaaagccattcgtttttgaggggaaggttagaggtcccatcgtcgtgcctactgccggtgaagaaacatctggtaattctggtaacttgcgcaaggtcgtgatgaaggagaacattagctcaaaaggggatgagggggagaaaaaatcaacctttatggatctggctaaggaagatatcaaggataatgatcgtacactgcagcaacagcctggtgatcagaatcgtaccatatcttccgtgcacggcctgaacaatgacatcgtgaaggccctcgacaggatcacactgcagaacatacccagccagacggcgcctggattcacggcagagatgaaaaaggattgcagcctgccccttaccgtcctcacctgtgcgaaagcttgtccccacatggctacgtgtgggaatgttctgtttgagggcagaaccgttcagcttggcaagctgtgctgcacaggggtggagacagaagacgatgaagacactgaaagcaatagcagcgttgagcaggcttcagttgaagtgcctgatggaccaaccttgcacgatcccgacttgtatatcgaaattgtgaagaacacaaagtcagtgcccgaatattctgaagtggcctatcctgactatttcggacacatccctccccctttcaaggaacctattctagagaggccatacggagtacagcggaccaaaattgctcaagatattgagcgcctgattcaccagtccgacatcatagacagggtggtttacgatctggataatcctaattacacgatccctgaggagggagatatcctcaagtttaacagcaaattcgagtcaggtaacctgaggaaggttatccagatcaggaagaatgagtacgatctcatactcaatagtgacattaacagtaaccattatcaccagtggttttatttcgaggtgtctggcatgagaccaggggtggcctaccggtttaatatcatcaattgtgaaaagtccaatagccagttcaattacggaatgcagcctctcatgtatagtgtgcaggaggcccttaacgctagaccctggtggatccgaatgggcactgatatttgctactacaaaaatcatttctcacgatcttccgttgctgcgggtgggcaaaaaggcaaatcatattacacaatcacgttcacagtaaactttccccacaaggacgacgtgtgttactttgcctatcattatccctatacctactcgaccctgcagatgcacctgcagaaacttgaatccgcacacaacccacagcaaatatattttcgcaaggacgttttatgtgaaaccctgagtgggaactcgtgcccattggttacaattactgcgatgccagagagtaactattacgaacacatctgtcatttccgtaaccgaccttatgtttttttgagtgctcgtgtacatccaggagagaccaatgcctcttgggtgatgaaagggactctggagtatctgatgtccaacaatccaaccgcccagagcttacgggaaagctacatatttaagatcgtcccgatgcttaatcccgacggtgtaatcaatggcaatcatcgttgctccttaagcggggaggacctaaataggcagtggcagtctccatctccggacctgcaccctactatttaccacgctaaagggctgctgcagtacctggccgctgtgaaaaggttgccgctagtgtactgcgattaccacggacactctcgcaaaaagaatgttttcatgtacggctgtagcattaaagagactgtctggcacaccaacgacaatgcaacctcttgtgacgtggtggaggacactggatatcggacattgcccaaaatcttgagccacatcgccccagcattttgtatgtccagctgctctttcgtggtcgaaaagtctaaggaatctacagccagagtcgtggtgtggcgcgagatcggcgttcagcggtcctataccatggaaagtaccttatgtggatgtgatcaaggtaaatataagggcctgcagattggtacaagagagttggaggagatgggcgctaaattctgcgtgggactcctacggctgaagagactcacatctcccctggaatacaatttaccgagcagcttgctcgacttcgaaaatgatctgatagaaagcagctgtaaggttacttctccgactacctacgtattggatgaggatgagcctcgtttcctcgaggaagtggattattccgccgagtctaacgacgaactggatatcgagttagctgagaatgtcggcgactacgagccctctgctcaggaagaggtactcagcgactctgaactcagcaggacctatcttccttag

SEQ ID NO: 271281 - DNA, 4393 bp, Artificial Sequence
  derived and/or modified sequence
gggtttgtatgaaaacaccgggcggcgggcggcgagggatccgccgtgatccaggtgctgagccgggtgctgcggctctgcgcggtccccgccagcgccccatcctgagccgattatctgcaattatgaaatgaagtaactcaagatgagcaagttaaaagtgataccagaaaaaagccttaccaataattctaggatcgtaggactcctggctcaactggagaagatcaatgctgagccttcagaatcagacactgcccgatatgttacatcaaaaattcttcatctggctcagagtcaagaaaaaacaaggagagaaatgacagccaaaggttctacaggaatggaaattctgctgtcaacattagagaacacaaaagatcttcaaactacacttaatatcttaagcattcttgttgagctggtgtcagctggtggaggtcgaagagtgagtttcttagtcaccaaaggtggttcacaaatattgttgcagttacttatgaatgccagcaaagaatctcccccacatgaggacttaatggtacagattcattctattcttgcaaagattggaccaaaagataaaaaatttggagtaaaggctagaattaatggggctctgaatataaccctgaatttggtcaagcagaatttgcagaatcatcgcttggttctaccttgccttcagcttttacgagtatattctgccaactctgtgaattcagtatccttagggaaaaatggagttgtggaactgatgtttaaaatcattggaccatttagtaagaagaattccagtcttataaaggttgctttagacactcttgctgcattgctaaaatcaaaaacaaatgccaggagagctgtagacagaggatatgtccaagtgcttttaacaatttatgtagattggcaccgccatgataaccggcatagaaacatgctcattcggaaaggaattttacagagtttaaaaagtgttacaaacatcaagttgggaagaaaagcatttattgatgccaatgggatgaaaattctgtataatacttcgcaagaatgtctggcagtcaggactctggatcctcttgtcaatacctccagtctgataatgaggaagtgtttcccaaaaaatcgactgccactcccaacaattaaaagttcttttcatttccagttgcctgttattcctgtgactggtcctgtggctcagctctacagcttacctcctgaagtggatgacgtagtagatgaaagtgatgacaacgatgatattgatgtagaagctgaaaacgaaactgagaatgaagatgacctagatcaaaattttaagaatgatgatattgaaacagatattaacaaactaaaaccccagcaagaaccgggacgaacaatagaagatctaaaaatgtatgaacaccttttccctgagcttgttgatgattttcaggactatgatttaatctccaaagaaccaaagccttttgtatttgagggaaaagtacgtggtcctattgttgttcctacggcaggcgaggaaacatctgggaattctggcaatttaagaaaagttgtaatgaaggagaacatatcttctaaaggagatgaaggtgaaaagaagtctacctttatggatctagcaaaagaagatattaaagataatgatagaacattacaacagcagccaggtgatcaaaatagaactatttcatcagtccatggtttaaacaatgatattgtaaaggccttggaccgaattacattgcagaatattccttctcaaacagccccaggttttactgcagaaatgaagaaggactgcagtcttcctcttactgtccttacctgtgctaaagcatgtccacacatggctacttgtggaaatgttctgtttgagggaagaacagttcagctagggaagctttgctgcactggagttgaaactgaagatgatgaagatactgagtcaaattcatcggtagaacaagcatcggttgaagtacctgatggaccaacactccatgacccagacctctatattgagattgtgaaaaatacgaagtctgtcccagaatattcagaggtggcttatcccgattattttggtcacattccgcctccattcaaagagcctattttagaaaggccttatggtgtacaaaggacaaaaattgctcaagatattgaaaggctaatacatcagagtgatatcatagatcgtgtggtatatgacttggataacccaaattacaccattccagaagagggagatattttgaaatttaactccaaatttgagtctgggaatctgcgcaaagtaattcaaattagaaaaaatgaatatgatcttattctgaactcagacataaacagcaatcattatcatcagtggttttactttgaagtcagtggaatgcgaccaggtgttgcttacaggtttaacatcattaactgtgaaaagtccaacagtcagtttaattatggtatgcaaccactcatgtattcggttcaggaagcattaaatgccagaccatggtggattcgtatggggactgacatttgttactataaaaatcatttctcaagaagttcagttgctgcaggtgggcaaaagggaaaatcctactatacaattacatttactgtcaattttccacataaagatgatgtttgctactttgcttatcactatccatatacgtattcaactttacagatgcatcttcaaaaattggaatcagcacacaatcctcagcaaatctattttcggaaagatgtgttatgtgaaaccctgtctggaaacagctgccccttggtgactataacagcaatgccagagtctaattattatgaacatatctgccatttcagaaatcgcccttacgttttcttgtctgctcgggtacatcctggagaaactaatgcaagttgggttatgaaaggaacgttggaatatctcatgagcaataaccccactgctcagagcttacgagaatcttatatttttaaaattgtccctatgttaaatccagatggtgtcatcaatggaaatcatcgctgttctttaagtggagaggatttgaataggcagtggcaaagtccaagtccggatttacatcctacaatttaccatgctaaggggctgttgcaatacttggctgcagtgaagcgtttacccttggtttattgtgattatcatggccattcccgaaagaagaatgtatttatgtatggttgcagcatcaaagagacagtgtggcataccaatgataatgcaacttcatgtgatgttgtggaggatacgggatacaggacattgcctaagatactgagccatatcgccccagcattttgcatgagcagctgtagcttcgtagtggaaaaatctaaagaatccacagcacgtgttgtagtttggagggaaataggagtacaaagaagttataccatggagagtactttatgtggctgtgatcagggaaaatacaagggtttacagattggtacccgagaactggaagagatgggagcaaaattttgtgttggtcttttacgtttgaaaagactgacctctccattggagtataatctgccttccagcctgcttgactttgaaaatgatttaattgaatcaagctgcaaagtaactagccctaccacttatgtcttggatgaagatgaacctcgattccttgaagaagttgattacagtgcagaaagtaatgatgagttagatattgagttggctgaaaatgtaggagattatgaaccttctgctcaagaagaagtactttctgactctgaattatcaagaacatacctaccttgagcccgctgccatctcttgttaactgcaaagaataaatgaaatatcttggtttttatttcccaggaagcttgagagaaatgagtttatacagagctgactcaaaaagacaaaaagtaacttgggccagtttggtttcaagataataaatgtgttattaattaatgataaaattggcgcttgttttattttcgatattcaatgcactttatgtagcattgaatgatcaaatattggatttacctttaaaaaaaaaacctgagtatcattgcatgaatttttatctccctatggttatatcctgcatcaagtggataattttgaagtgtgttcagaatataaaattgaaattttagagttgttgaaaatcctgacttgttgaaaactaatatatatgtacatggatttctatagatgtgtttgtttagaagtgggtagatattgcagataagactgttcttcagaatcatgttaactattgggttgtgactgaagtagtccagggtttgccttgaaaccattacattctacatttaccaaattaaacaaataaaaactgtattaaatgtt

SEQ ID NO: 271282 - DNA, 3681 bp, Artificial Sequence
  derived and/or modified sequence
atgagcaagctgaaggtgatccccgagaagagcctgaccaacaacagcagaatcgtgggcctgctggcccagctggagaagatcaacgccgagcccagcgagagcgacaccgccagatacgtgaccagcaagatcctgcacctggcccagagccaggagaagaccagaagagagatgaccgccaagggcagcaccggcatggagatcctgctgagcaccctggagaacaccaaggacctgcagaccaccctgaacatcctgagcatcctggtggagctggtgagcgccggcggcggcagaagagtgagcttcctggtgaccaagggcggcagccagatcctgctgcagctgctgatgaacgccagcaaggagagccccccccacgaggacctgatggtgcagatccacagcatcctggccaagatcggccccaaggacaagaagttcggcgtgaaggccagaatcaacggcgccctgaacatcaccctgaacctggtgaagcagaacctgcagaaccacagactggtgctgccctgcctgcagctgctgagagtgtacagcgccaacagcgtgaacagcgtgagcctgggcaagaacggcgtggtggagctgatgttcaagatcatcggccccttcagcaagaagaacagcagcctgatcaaggtggccctggacaccctggccgccctgctgaagagcaagaccaacgccagaagagccgtggacagaggctacgtgcaggtgctgctgaccatctacgtggactggcacagacacgacaacagacacagaaacatgctgatcagaaagggcatcctgcagagcctgaagagcgtgaccaacatcaagctgggcagaaaggccttcatcgacgccaacggcatgaagatcctgtacaacaccagccaggagtgcctggccgtgagaaccctggaccccctggtgaacaccagcagcctgatcatgagaaagtgcttccccaagaacagactgcccctgcccaccatcaagagcagcttccacttccagctgcccgtgatccccgtgaccggccccgtggcccagctgtacagcctgccccccgaggtggacgacgtggtggacgagagcgacgacaacgacgacatcgacgtggaggccgagaacgagaccgagaacgaggacgacctggaccagaacttcaagaacgacgacatcgagaccgacatcaacaagctgaagccccagcaggagcccggcagaaccatcgaggacctgaagatgtacgagcacctgttccccgagctggtggacgacttccaggactacgacctgatcagcaaggagcccaagcccttcgtgttcgagggcaaggtgagaggccccatcgtggtgcccaccgccggcgaggagaccagcggcaacagcggcaacctgagaaaggtggtgatgaaggagaacatcagcagcaagggcgacgagggcgagaagaagagcaccttcatggacctggccaaggaggacatcaaggacaacgacagaaccctgcagcagcagcccggcgaccagaacagaaccatcagcagcgtgcacggcctgaacaacgacatcgtgaaggccctggacagaatcaccctgcagaacatccccagccagaccgcccccggcttcaccgccgagatgaagaaggactgcagcctgcccctgaccgtgctgacctgcgccaaggcctgcccccacatggccacctgcggcaacgtgctgttcgagggcagaaccgtgcagctgggcaagctgtgctgcaccggcgtggagaccgaggacgacgaggacaccgagagcaacagcagcgtggagcaggccagcgtggaggtgcccgacggccccaccctgcacgaccccgacctgtacatcgagatcgtgaagaacaccaagagcgtgcccgagtacagcgaggtggcctaccccgactacttcggccacatccccccccccttcaaggagcccatcctggagagaccctacggcgtgcagagaaccaagatcgcccaggacatcgagagactgatccaccagagcgacatcatcgacagagtggtgtacgacctggacaaccccaactacaccatccccgaggagggcgacatcctgaagttcaacagcaagttcgagagcggcaacctgagaaaggtgatccagatcagaaagaacgagtacgacctgatcctgaacagcgacatcaacagcaaccactaccaccagtggttctacttcgaggtgagcggcatgagacccggcgtggcctacagattcaacatcatcaactgcgagaagagcaacagccagttcaactacggcatgcagcccctgatgtacagcgtgcaggaggccctgaacgccagaccctggtggatcagaatgggcaccgacatctgctactacaagaaccacttcagcagaagcagcgtggccgccggcggccagaagggcaagagctactacaccatcaccttcaccgtgaacttcccccacaaggacgacgtgtgctacttcgcctaccactacccctacacctacagcaccctgcagatgcacctgcagaagctggagagcgcccacaacccccagcagatctacttcagaaaggacgtgctgtgcgagaccctgagcggcaacagctgccccctggtgaccatcaccgccatgcccgagagcaactactacgagcacatctgccacttcagaaacagaccctacgtgttcctgagcgccagagtgcaccccggcgagaccaacgccagctgggtgatgaagggcaccctggagtacctgatgagcaacaaccccaccgcccagagcctgagagagagctacatcttcaagatcgtgcccatgctgaaccccgacggcgtgatcaacggcaaccacagatgcagcctgagcggcgaggacctgaacagacagtggcagagccccagccccgacctgcaccccaccatctaccacgccaagggcctgctgcagtacctggccgccgtgaagagactgcccctggtgtactgcgactaccacggccacagcagaaagaagaacgtgttcatgtacggctgcagcatcaaggagaccgtgtggcacaccaacgacaacgccaccagctgcgacgtggtggaggacaccggctacagaaccctgcccaagatcctgagccacatcgcccccgccttctgcatgagcagctgcagcttcgtggtggagaagagcaaggagagcaccgccagagtggtggtgtggagagagatcggcgtgcagagaagctacaccatggagagcaccctgtgcggctgcgaccagggcaagtacaagggcctgcagatcggcaccagagagctggaggagatgggcgccaagttctgcgtgggcctgctgagactgaagagactgaccagccccctggagtacaacctgcccagcagcctgctggacttcgagaacgacctgatcgagagcagctgcaaggtgaccagccccaccacctacgtgctggacgaggacgagcccagattcctggaggaggtggactacagcgccgagagcaacgacgagctggacatcgagctggccgagaacgtgggcgactacgagcccagcgcccaggaggaggtgctgagcgacagcgagctgagcagaacctacctgccctag

SEQ ID NO: 271283 - DNA, 10511 bp, Artificial Sequence
  derived and/or modified sequence
agcagctgctgcagcaggagcagagcaggagacgcgtagccgccgtcgccgccgccgggggatgtggccggcgcctgcctctagccgcgccgcctcttgagtaccagccgccgctgcagccgccgccgccgcctagccgtgcggtgccaggccgcgccctccccgggcgcccgccggctcgcatgccgaggggctccggggcgtagctgcgcgcccggcgccgcctccgggctccttcggccccgccatgggctgctgcagctccgcctcctccgccgcgcagagctccaaacgagaatggaagccgctggaggaccgtagctgcacagacataccatggctgctgctcttcatcctcttctgcattgggatgggatttatttgtggcttttcaatagcaacaggtgcagcagcaagactagtgtcaggatacgacagctatggaaatatctgtgggcagaaaaatacaaagttggaagcaataccaaacagtggcatggaccacacccagcggaagtatgtattctttttggatccatgcaacctggacttgataaaccggaagattaagtctgtagcactgtgtgtagcagcgtgtccaaggcaagaactgaaaactctgagtgatgttcagaagtttgcagagataaatggttcagccctatgtagctacaacctaaagccttctgaatacactacatctccaaaatcttctgttctctgccccaaactaccagttccagcgagtgcacctattccattcttccatcgctgtgctcctgtgaacatttcctgctatgccaagtttgcagaggccctgatcacctttgtcagtgacaatagtgtcttacacaggctgattagtggagtaatgaccagcaaagaaattatattgggactttgcttgttatcactagttctatccatgattttgatggtgataatcaggtatatatcaagagtacttgtgtggatcttaacgattctggtcatactcggttcacttggaggcacaggtgtactatggtggctgtatgcaaagcaaagaaggtctcccaaagaaactgttactcctgagcagcttcagatagctgaagacaatcttcgggccctcctcatttatgccatttcagctacagtgttcacagtgatcttattcctgataatgttggttatgcgcaaacgtgttgctcttaccatcgccttgttccacgtagctggcaaggtcttcattcacttgccactgctagtcttccaacccttctggactttctttgctcttgtcttgttttgggtgtactggatcatgacacttctttttcttggcactaccggcagtcctgttcagaatgagcaaggctttgtggagttcaaaatttctgggcctctgcagtacatgtggtggtaccatgtggtgggcctgatttggatcagtgaatttattctagcatgtcagcagatgacagtggcaggagctgtggtaacatactattttactagggataaaaggaatttgccatttacacctattttggcatcagtaaatcgccttattcgttaccacctaggtacggtggcaaaaggatctttcattatcacattagtcaaaattccgcgaatgatccttatgtatattcacagtcagctcaaaggaaaggaaaatgcttgtgcacgatgtgtgctgaaatcttgcatttgttgcctttggtgtcttgaaaagtgcctaaattatttaaatcagaatgcatacacagccacagctatcaacagcaccaacttctgcacctcagcaaaggatgcctttgtcattctggtggagaatgctttgcgagtggctaccatcaacacagtaggagattttatgttattccttggcaaggtgctgatagtctgcagcacaggtttagctgggattatgctgctcaactaccagcaggactacacagtatgggtgctgcctctgatcatcgtctgcctctttgctttcctagtcgctcattgcttcctgtctatttatgaaatggtagtggatgtattattcttgtgttttgccattgatacaaaatacaatgatgggagccctggcagagaattctatatggataaagtgctgatggagtttgtggaaaacagtaggaaagcaatgaaagaagctggtaagggaggcgtcgctgattccagagagctaaagccgatggcttcgggagcaagttctgcttgaacctagccgacggttatggaaacccattgacattccaaaacaatatatacacataactatgtatttgtgtgtgtgggtgtgtgtatatatgtatatgtatgtgtgtatatatgtatatgtatatacacacacacacataaatcagccaaaatcagagaaaaggaacagggatttaataccttttttatgcttatttttgtcaaacatgtactcctttcatacgggtggcttttacaaggcaacttccgtcatttaatgttttcaactgtaattgtcttaatggaaatgttaaaattcatatctgattaacatttttaataacttagaggagattttaactttatttaaaaataggtaaaattattgtacctaattatgtctaaagtttattcaggggtaatttccctgatgtctgtataaaatcaagatcttattttactgatgcataagtcctagtgggtcaagactaggcatatgctttcagataaataaggaattactccaatcagttttccccaatcaaagaagccatgtcattttacttttagaaacatacaattgggcccaatatgggaattttcataatagttcatacatttgtcagccaacattaaaaggtaaccaactcctcaggtatttgtagtttaccctaacgcttctttaaaagaaagtaggtaaaaaaagaaaagggtagataatctttcgtatgcaaacttttcccttatattttgtctttctttcctttttgactttagtagcatcctccacacatttgtgtgcctgatttgaaaggaagctggggcacccagcgagtttagcctttaagtttctgtgtattgatttgcagattaagtaatgctgggaggaataaagaagggacagaaacatggaacataaagcattgaaaattccggtgcttgggcttcggcttcagagtaacgtcagtggcttagggttaaacggccattttattcaaatgcttgctatacaatctgaaaacacactggcaggtgctcctctccttggcaattcattgagtatccagagttctacgatgtttaactgaagaattggctaatgttttgatcctccagtgtgactgttgtttttgtttgggggtgggtttggggttttttgcttttttattcctgaagcttaccagatatgaatggctaatactccattgttctgcttgttgtaatggtgaatgctttaagaaaaaaaagtgtaatttgctaagaataattcatgatctgtttatgcgataactcctttttgttacaatttttttaaaaaaagctatttttgttaatgtaaagtaaatatttcagagcaaattttttaaacttattgcactaaatacaggctctgtacaaaaaaaaaaaaaaaaaaaaagcctcagcattttatcattccatggaaggagaatcttttgaaagaaagcattgcctcctaccagaactagacagtgaattagatcggtattatggaaatgcatacaagtaatgtcactagggcttaataagcagccgtttgctaatgtgcttcctttcaaagggttggacctttaaattgctgcaaaaggtaaattgtatttttttttaagtattggtgttctttactctagctaggctaaaatttgctaaatgccttggtttcttttaaaagttcatgtaatatttctgatttttcagaatatttgcaataagagtctggattttaaaaaacacatgcatacacacaattaagagctcatgtcttagcaagatctgggaaaccaacattgcgagagtagctattttgaaagaataattctccagaagttaacatctaatatctagtatcaccaaacagtatcgctgttctcttttattcatttgaaatgaatataattatataactaacaattgtccaaatagatgagagagcaaatcatgtgagaaaattcagaataccatctgtttcatagccgcacagattttggactttcacaaacattgggaactaaatttagaattggcaaaagtctagaagatgggtatcaaaacagaagacattccaggagctagcaattttaagaggtgtccctccaaagtgacctgatggaagtcctgaacttggaaattaggttctactcacttggacatccctgcatcatggactgttgctgctccctgttccatatgctcgcaatctcagctatttggaagctaccaggaatgctttctaattatcatttgcaactagaactgtaatcagaaagaaattttgtatttttgtataacttgattgtgtgccattttatataacaggtcctgttttacaaataaattttgttttactaacattgtgtttagaaattataatctatgtgtaaccatgtcatttgagttgcaaattaattgccaggctgttttccttaagtaaattcatgtgccgtgtagaaatatgcagatatgcattacacaggcacacacagagagatatttaatatgtggaatatcactctttcatgagctttattccttgattaatttgataaagcctcacagaggattttaagcaatatttaaatgtgttgaggttatgtttggatattcctgctgcctcttttcattcatttcaagtcattcttcagctagctatgggctgccttattgctattcgctcactgcttccatcttctgcccaagtgagaagaatagatgaagaacagaaatttctctgtgaaatgtggatacccgaataatttcataaatcattgattctatgtggtggtttttgtcttcttctgtggtgaatcttcaaaactgtattcaggactcatatttctagagttttaattggggtcctctattgtcaattgtagtagtgaccagagtatcgtggtttttgccatcagataattaaggctctggtgcataatttagactttctaagctcctgcctgaagaataaggtcttccataatatggaagagaaaagttatatttcagtgtaaatccaagagacccatcttctatgagaggcttaccagtgcattagtaataaaacattagcaatttagctagagcactgagattgtataatccttgcatggatgagcagagctcaaagccagttgttcctttaaagcatttaatgcaatggctaatgtttaggattaaagtttttattttatcctataagataattaagtcctaagtcactacaacttaagtagcttaactgtatgttggtacccaaactttttctataatggttaaggaggaggcacttactgagtttattttaaagttatgctagaaatgtttttcttttgtagagatgctctctctctctctctctttttttttttttttttttttttttttccgtgagggcattaggctgctgattgtaagttatttccaataccactgatcttggtatctgccaagggcttccttgccttccctgggcagttttaggatttcaccctagtagggggtatgaggcactgacccctttattctggacccaaactgctttagagcagagttaatacctctccctccctcttcaaaacagctacaggaactgcaggcaccacatatgtgtgaggccacatcactgcccctgaggcttcaactatttccaccatgcactattactagctactaacagccattttaagagatctcctagcctgcaaggtagaattctgggatcagttccaaaaccagaactgccagtaatggtgacttgaatattttatttgatttttggtcagtaaccttgtcatttaaattggactttccaatagccttaacatggcctctgagaagtttcctccagaaaggtctttaagctttcgcttttcaataagtaagttctttactgcttttctactgctactttaaaaaaaaaacaacaacaacaaataaaactctcagagtctggaggcttatcagtgcacctgccacagttaatttctgtattcttttcatacattccatctgacacatacgagtgcactataatggcttgcctagaactggtaagaagtggtctgtgaatgtatattgaaaaaatgtgggttcataagtaaaagcgtaacgcagatatttgtgtattctgtattcacagcgtaggctgccttttgctttaaatgcatattcatgtatctttgtgtgctaagaatgcatgttagcccttttgaaaagtaggcactattcatacacagtagcttcttggaattaactcatctttgttaacttagtggcacatagtccaaatttttaaaaagcaagacccttgaatatgccaagagaaaatctaaagctagcaaacttaaaaaacaaaacaaaaattacacgtcgtgtacagttatgaatttagaatagcacactttttccattcagatttcatacatttgagccaaattcttatactccatgttttaattttaaaaggataattttaatccaagatttaaatctttgaaaatatctttcttatagaaaactttaatgcagtttttaaacttactgatttctgtggaaaacctttcttttctatagaaatactgtagtgccctttcttcccatcttgattttgtacatgtaaagacaaatgatgattcagtttcaatattgcatgaacaattgccactttgtaaattatatggacagaatgtgttctaaggaaattcgttagtaaatttgtgaaaaacatgtgagattgttcgagacctattaggctattcttcagttttgatgctcagttttacaacttaaatgattttctccaggacacggagctcagaataataaagcttttattaatggtctagtgaagatctagttgaacatggaaacattgtaatttacaaatgtctcagaaatttctcacttttatttgctaagacctgaatttaatatttgatattcaaaaacaagttattttgaagagacaatgggtctctttgagcttaagaaagctatggactatctttccttcaaatgcacatcacatgtctgtgaacactcaaaatgctcatagaatttcagggccctcagacggccagcttccacccctgtaccccctcaggggctaatgaacccaagtcaaaaggctgctctaaagttgttctgataatgtgttttgaaatgaggaagtgattaggcctccactagagatacttttgagatgatgcttaccaccttctgacctggaatcatttttataacttaaagactttatgtaatttagtagcaggttagggaatagaaaccacactaatctgaaggaataacaagatgatcaacactgaatcttcatgacagtaagattttctttccttggaggtatgagggtgtgtatgtgtgtgtgtgtgtgtgtgtgtttgtgtgtgtgtgtgtgtgtcctggcggttatttgggggcaaggtaccagattatttgcagtgagccaaaaaaaaaaaaatatccaagaagaaataaatagggaatccttgtaattaatccatctaccaaaacacttgattctttttattgtagctcagctatgacattatgacattatgtggcttagtgttatcagtatactactgtcttaaaatatatttgtcaacatgtccagttccaacaacagttgaagatgatgataaattagcaaactcaagggtagtccatagttggcaaaaaataaatttggtagaaagttggaggagcagatgctgaaggtagaaatgcaaaagatgttttttcttcctgcataaatcacggaggtgtgttctgttttagtgttttccagtcacccactagagcagcttcagattcctctgccaatagaactccacccccagtcccttacctactctatcttctttagggaagcatgtggatttcttcacatctgcaccttactattaggtaagggtgctgcatctacatggaaggctccctgggcccttgaaaaagcaggcagaaactcatcaaggggtttgaagttcttgtgaaatttgatcccagtggctcatgacttatagtcaggcatcaaaccatttcctactttttcaggctgaagaaagtggaaatataactggctggtgaagaaaggagaaaagtcagccccctaccccaccccacactcctagaaaagtttgggggttttttttgtttgtttttggtgtttttttgagacggagtctcgctctatcgccagcttagagtgcagtggctcaatcttagctcactgcaacctccacctcccaggttcaagtgattctcctgcatcagcctcctgagtagctgggaccacaggcatgtgccaccacacccagctaatttttgtatttttagtagagacggggtttcaccacgttggccaggccaatctcgaactcctgacctcaggtgatccacccgcctcagcctcccaaagtgctgggattacaggcatgagccaccgcgcccggcctagaagagttttaatgaaccttccacagtagtaaatgcagagaccactggtggaaattcccatgttggatagaaaagggcgtaagtccagtctaagtatctaaatgtgatatgcccttttgtcacagaagtgtaagacttaaagggaatattctgaccttcgtgtatgaatctgatccacccatcctgtcagctaggattataatttgaactgtcgtttcaggagcatgtgttaaatcatatgagtaaaaaaaaagtagacattgaaaagaagacttgggaataattgggcagatagaatgggttccatggatcattctagttgccactagaaaatgtgagctccttcttcatttaccatgttgataatccggtggtgactttttttttttttttgtaaattgtattagataccccacaggaatgtgacaataataggatagctttgggggctggtgatttgaaacagggactattaagtagattttcccccatcctctaggttcctgtagtctgtgctcagaacttggtttttggcccctattgtttttgcctattttgattttcagagatgatcacatggggacagttaacttttcttctgctgtgttgccttaatgctactagattgtgttgtgttgttggagttttctgacttcttccctataaaaagatactgagagctccataatgaaagaagttgttatactttctcagaatattctggaccactgaatgcacttctaatagagctttaatctaaagaagttagttcagtggttattaactgattttattacaggagaaaaaaactttaacaaaaaggcagggagaaaagtgtgaagggcatcaagcaaaatgacaggggcttcaaaaaacaaccaaagacaaaaccctatcttctgaagaccaaaggtccaactttacttactggctggcacagcctttctgaactccttgagtttagaatagagctcctagaataataaggcggccaaatttaaagatcagtcaatacagtagggacctgctattgatctctcaggcactgagtcttcacatccagtgtcaagcccagcccagcatatggggtgatatgagcagaaaacacacatcggtgtgtcttgatttctcgcagctgtgtaatgtggcatgagaagtatgttttggtgccacatatttctcaatctgatgcctttttgtctttttttttttttgccatttgcatcctatttcatagtgccaaaatgaatttttgtatcttgtcttgtctttgtccattataaactggaggatcacagttaagccttccatgaattcatagtttggaatcatttaccttaccattattttggatttttttcttattacagtgtcactacactgtattcatgtgggggaacaaacatgtaggtgcttgaacatgccccacagacacagttgtagccctagtatttgtgacggtcattattgacacagtgcagactttgcagatggagcattatgctctcagaggactttaaaaatatgtatattaagcaattaactttctggagttggagttatcaaatcttgctgggaaattaacttccaagagctctgaattggatggaattccatctggcttcagagaacaatcagcctatatgaaacggagctttgaaatgtttttcttgtgcagaaatacgaactagaaagaaaagtgctgatctaatgctaagttttctctgtgtactgactcagttgccagaattataatgaaaactgtattttagtctaacaaatgtatagaattttttatgtaataaataaaattttataggaaagaa

SEQ ID NO: 271284 - DNA, 10433 bp, Artificial Sequence
  derived and/or modified sequence
agcagctgctgcagcaggagcagagcaggagacgcgtagccgccgtcgccgccgccgggggatgtggccggcgcctgcctctagccgcgccgcctcttgagtaccagccgccgctgcagccgccgccgccgcctagccgtgcggtgccaggccgcgccctccccgggcgcccgccggctcgcatgccgaggggctccggggcgtagctgcgcgcccggcgccgcctccgggctccttcggccccgccatgggctgctgcagctccgcctcctccgccgcgcagagctccaaacgagaatggaagccgctggaggaccgtagctgcacagacataccatggctgctgctcttcatcctcttctgcattgggatgggatttatttgtggcttttcaatagcaacaggtgcagcagcaagactagtgtcaggatacgacagctatggaaatatctgtgggcagaaaaatacaaagttggaagcaataccaaacagtggcatggaccacacccagcggaagtatgtattctttttggatccatgcaacctggacttgataaaccggaagattaagtctgtagcactgtgtgtagcagcgtgtccaaggcaagaactgaaaactctgagtgatgttcagaagtttgcagagataaatggttcagccctatgtagctacaacctaaagccttctgaatacactacatctccaaaatcttctgttctctgccccaaactaccagttccagcgagtgcacctattccattcttccatcgctgtgctcctgtgaacatttcctgctatgccaagtttgcagaggccctgatcacctttgtcagtgacaatagtgtcttacacaggctgattagtggagtaatgaccagcaaagaaattatattgggactttgcttgttatcactagttctatccatgattttgatggtgataatcaggtatatatcaagagtacttgtgtggatcttaacgattctggtcatactcggttcacttggaggcacaggtgtactatggtggctgtatgcaaagcaaagaaggtctcccaaagaaactgttactcctgagcagcttcagatagctgaagacaatcttcgggccctcctcatttatgccatttcagctacagtgttcacagtgatcttattcctgataatgttggttatgcgcaaacgtgttgctcttaccatcgccttgttccacgtagctggcaaggtcttcattcacttgccactgctagtcttccaacccttctggactttctttgctcttgtcttgttttgggtgtactggatcatgacacttctttttcttggcactaccggcagtcctgttcagaatgagcaaggctttgtggagttcaaaatttctgggcctctgcagtacatgtggtggtaccatgtggtgggcctgatttggatcagtgaatttattctagcatgtcagcagatgacagtggcaggagctgtggtaacatactattttactagggataaaaggaatttgccatttacacctattttggcatcagtaaatcgccttattcgttaccacctaggtacggtggcaaaaggatctttcattatcacattagtcaaaattccgcgaatgatccttatgtatattcacagtcagctcaaaggaaaggaaaatgcttgtgcacgatgtgtgctgaaatcttgcatttgttgcctttggtgtcttgaaaagtgcctaaattatttaaatcagaatgcatacacagccacagctatcaacagcaccaacttctgcacctcagcaaaggatgcctttgtcattctggtggagaatgctttgcgagtggctaccatcaacacagtaggagattttatgttattccttggcaaggtgctgatagtctgcagcacaggtttagctgggattatgctgctcaactaccagcaggactacacagtatgggtgctgcctctgatcatcgtctgcctctttgctttcctagtcgctcattgcttcctgtctatttatgaaatggtagtggatgtattattcttgtgttttgccattgatacaaaatacaatgatgggagccctggcagagaattctatatggataaagtgctgatggagtttgtggaaaacagtaggaaagcaatgaaagaagctggtaagggaggcgtcgctgattccagagagctaaagccgatggcttcgggagcaagttctgcttgaacctagccgacggttatggaaacccattgacattccaaaacaatatatacacacacacataaatcagccaaaatcagagaaaaggaacagggatttaataccttttttatgcttatttttgtcaaacatgtactcctttcatacgggtggcttttacaaggcaacttccgtcatttaatgttttcaactgtaattgtcttaatggaaatgttaaaattcatatctgattaacatttttaataacttagaggagattttaactttatttaaaaataggtaaaattattgtacctaattatgtctaaagtttattcaggggtaatttccctgatgtctgtataaaatcaagatcttattttactgatgcataagtcctagtgggtcaagactaggcatatgctttcagataaataaggaattactccaatcagttttccccaatcaaagaagccatgtcattttacttttagaaacatacaattgggcccaatatgggaattttcataatagttcatacatttgtcagccaacattaaaaggtaaccaactcctcaggtatttgtagtttaccctaacgcttctttaaaagaaagtaggtaaaaaaagaaaagggtagataatctttcgtatgcaaacttttcccttatattttgtctttctttcctttttgactttagtagcatcctccacacatttgtgtgcctgatttgaaaggaagctggggcacccagcgagtttagcctttaagtttctgtgtattgatttgcagattaagtaatgctgggaggaataaagaagggacagaaacatggaacataaagcattgaaaattccggtgcttgggcttcggcttcagagtaacgtcagtggcttagggttaaacggccattttattcaaatgcttgctatacaatctgaaaacacactggcaggtgctcctctccttggcaattcattgagtatccagagttctacgatgtttaactgaagaattggctaatgttttgatcctccagtgtgactgttgtttttgtttgggggtgggtttggggttttttgcttttttattcctgaagcttaccagatatgaatggctaatactccattgttctgcttgttgtaatggtgaatgctttaagaaaaaaaagtgtaatttgctaagaataattcatgatctgtttatgcgataactcctttttgttacaatttttttaaaaaaagctatttttgttaatgtaaagtaaatatttcagagcaaattttttaaacttattgcactaaatacaggctctgtacaaaaaaaaaaaaaaaaaaaaagcctcagcattttatcattccatggaaggagaatcttttgaaagaaagcattgcctcctaccagaactagacagtgaattagatcggtattatggaaatgcatacaagtaatgtcactagggcttaataagcagccgtttgctaatgtgcttcctttcaaagggttggacctttaaattgctgcaaaaggtaaattgtatttttttttaagtattggtgttctttactctagctaggctaaaatttgctaaatgccttggtttcttttaaaagttcatgtaatatttctgatttttcagaatatttgcaataagagtctggattttaaaaaacacatgcatacacacaattaagagctcatgtcttagcaagatctgggaaaccaacattgcgagagtagctattttgaaagaataattctccagaagttaacatctaatatctagtatcaccaaacagtatcgctgttctcttttattcatttgaaatgaatataattatataactaacaattgtccaaatagatgagagagcaaatcatgtgagaaaattcagaataccatctgtttcatagccgcacagattttggactttcacaaacattgggaactaaatttagaattggcaaaagtctagaagatgggtatcaaaacagaagacattccaggagctagcaattttaagaggtgtccctccaaagtgacctgatggaagtcctgaacttggaaattaggttctactcacttggacatccctgcatcatggactgttgctgctccctgttccatatgctcgcaatctcagctatttggaagctaccaggaatgctttctaattatcatttgcaactagaactgtaatcagaaagaaattttgtatttttgtataacttgattgtgtgccattttatataacaggtcctgttttacaaataaattttgttttactaacattgtgtttagaaattataatctatgtgtaaccatgtcatttgagttgcaaattaattgccaggctgttttccttaagtaaattcatgtgccgtgtagaaatatgcagatatgcattacacaggcacacacagagagatatttaatatgtggaatatcactctttcatgagctttattccttgattaatttgataaagcctcacagaggattttaagcaatatttaaatgtgttgaggttatgtttggatattcctgctgcctcttttcattcatttcaagtcattcttcagctagctatgggctgccttattgctattcgctcactgcttccatcttctgcccaagtgagaagaatagatgaagaacagaaatttctctgtgaaatgtggatacccgaataatttcataaatcattgattctatgtggtggtttttgtcttcttctgtggtgaatcttcaaaactgtattcaggactcatatttctagagttttaattggggtcctctattgtcaattgtagtagtgaccagagtatcgtggtttttgccatcagataattaaggctctggtgcataatttagactttctaagctcctgcctgaagaataaggtcttccataatatggaagagaaaagttatatttcagtgtaaatccaagagacccatcttctatgagaggcttaccagtgcattagtaataaaacattagcaatttagctagagcactgagattgtataatccttgcatggatgagcagagctcaaagccagttgttcctttaaagcatttaatgcaatggctaatgtttaggattaaagtttttattttatcctataagataattaagtcctaagtcactacaacttaagtagcttaactgtatgttggtacccaaactttttctataatggttaaggaggaggcacttactgagtttattttaaagttatgctagaaatgtttttcttttgtagagatgctctctctctctctctctttttttttttttttttttttttttttccgtgagggcattaggctgctgattgtaagttatttccaataccactgatcttggtatctgccaagggcttccttgccttccctgggcagttttaggatttcaccctagtagggggtatgaggcactgacccctttattctggacccaaactgctttagagcagagttaatacctctccctccctcttcaaaacagctacaggaactgcaggcaccacatatgtgtgaggccacatcactgcccctgaggcttcaactatttccaccatgcactattactagctactaacagccattttaagagatctcctagcctgcaaggtagaattctgggatcagttccaaaaccagaactgccagtaatggtgacttgaatattttatttgatttttggtcagtaaccttgtcatttaaattggactttccaatagccttaacatggcctctgagaagtttcctccagaaaggtctttaagctttcgcttttcaataagtaagttctttactgcttttctactgctactttaaaaaaaaaacaacaacaacaaataaaactctcagagtctggaggcttatcagtgcacctgccacagttaatttctgtattcttttcatacattccatctgacacatacgagtgcactataatggcttgcctagaactggtaagaagtggtctgtgaatgtatattgaaaaaatgtgggttcataagtaaaagcgtaacgcagatatttgtgtattctgtattcacagcgtaggctgccttttgctttaaatgcatattcatgtatctttgtgtgctaagaatgcatgttagcccttttgaaaagtaggcactattcatacacagtagcttcttggaattaactcatctttgttaacttagtggcacatagtccaaatttttaaaaagcaagacccttgaatatgccaagagaaaatctaaagctagcaaacttaaaaaacaaaacaaaaattacacgtcgtgtacagttatgaatttagaatagcacactttttccattcagatttcatacatttgagccaaattcttatactccatgttttaattttaaaaggataattttaatccaagatttaaatctttgaaaatatctttcttatagaaaactttaatgcagtttttaaacttactgatttctgtggaaaacctttcttttctatagaaatactgtagtgccctttcttcccatcttgattttgtacatgtaaagacaaatgatgattcagtttcaatattgcatgaacaattgccactttgtaaattatatggacagaatgtgttctaaggaaattcgttagtaaatttgtgaaaaacatgtgagattgttcgagacctattaggctattcttcagttttgatgctcagttttacaacttaaatgattttctccaggacacggagctcagaataataaagcttttattaatggtctagtgaagatctagttgaacatggaaacattgtaatttacaaatgtctcagaaatttctcacttttatttgctaagacctgaatttaatatttgatattcaaaaacaagttattttgaagagacaatgggtctctttgagcttaagaaagctatggactatctttccttcaaatgcacatcacatgtctgtgaacactcaaaatgctcatagaatttcagggccctcagacggccagcttccacccctgtaccccctcaggggctaatgaacccaagtcaaaaggctgctctaaagttgttctgataatgtgttttgaaatgaggaagtgattaggcctccactagagatacttttgagatgatgcttaccaccttctgacctggaatcatttttataacttaaagactttatgtaatttagtagcaggttagggaatagaaaccacactaatctgaaggaataacaagatgatcaacactgaatcttcatgacagtaagattttctttccttggaggtatgagggtgtgtatgtgtgtgtgtgtgtgtgtgtgtttgtgtgtgtgtgtgtgtgtcctggcggttatttgggggcaaggtaccagattatttgcagtgagccaaaaaaaaaaaaatatccaagaagaaataaatagggaatccttgtaattaatccatctaccaaaacacttgattctttttattgtagctcagctatgacattatgacattatgtggcttagtgttatcagtatactactgtcttaaaatatatttgtcaacatgtccagttccaacaacagttgaagatgatgataaattagcaaactcaagggtagtccatagttggcaaaaaataaatttggtagaaagttggaggagcagatgctgaaggtagaaatgcaaaagatgttttttcttcctgcataaatcacggaggtgtgttctgttttagtgttttccagtcacccactagagcagcttcagattcctctgccaatagaactccacccccagtcccttacctactctatcttctttagggaagcatgtggatttcttcacatctgcaccttactattaggtaagggtgctgcatctacatggaaggctccctgggcccttgaaaaagcaggcagaaactcatcaaggggtttgaagttcttgtgaaatttgatcccagtggctcatgacttatagtcaggcatcaaaccatttcctactttttcaggctgaagaaagtggaaatataactggctggtgaagaaaggagaaaagtcagccccctaccccaccccacactcctagaaaagtttgggggttttttttgtttgtttttggtgtttttttgagacggagtctcgctctatcgccagcttagagtgcagtggctcaatcttagctcactgcaacctccacctcccaggttcaagtgattctcctgcatcagcctcctgagtagctgggaccacaggcatgtgccaccacacccagctaatttttgtatttttagtagagacggggtttcaccacgttggccaggccaatctcgaactcctgacctcaggtgatccacccgcctcagcctcccaaagtgctgggattacaggcatgagccaccgcgcccggcctagaagagttttaatgaaccttccacagtagtaaatgcagagaccactggtggaaattcccatgttggatagaaaagggcgtaagtccagtctaagtatctaaatgtgatatgcccttttgtcacagaagtgtaagacttaaagggaatattctgaccttcgtgtatgaatctgatccacccatcctgtcagctaggattataatttgaactgtcgtttcaggagcatgtgttaaatcatatgagtaaaaaaaaagtagacattgaaaagaagacttgggaataattgggcagatagaatgggttccatggatcattctagttgccactagaaaatgtgagctccttcttcatttaccatgttgataatccggtggtgactttttttttttttttgtaaattgtattagataccccacaggaatgtgacaataataggatagctttgggggctggtgatttgaaacagggactattaagtagattttcccccatcctctaggttcctgtagtctgtgctcagaacttggtttttggcccctattgtttttgcctattttgattttcagagatgatcacatggggacagttaacttttcttctgctgtgttgccttaatgctactagattgtgttgtgttgttggagttttctgacttcttccctataaaaagatactgagagctccataatgaaagaagttgttatactttctcagaatattctggaccactgaatgcacttctaatagagctttaatctaaagaagttagttcagtggttattaactgattttattacaggagaaaaaaactttaacaaaaaggcagggagaaaagtgtgaagggcatcaagcaaaatgacaggggcttcaaaaaacaaccaaagacaaaaccctatcttctgaagaccaaaggtccaactttacttactggctggcacagcctttctgaactccttgagtttagaatagagctcctagaataataaggcggccaaatttaaagatcagtcaatacagtagggacctgctattgatctctcaggcactgagtcttcacatccagtgtcaagcccagcccagcatatggggtgatatgagcagaaaacacacatcggtgtgtcttgatttctcgcagctgtgtaatgtggcatgagaagtatgttttggtgccacatatttctcaatctgatgcctttttgtctttttttttttttgccatttgcatcctatttcatagtgccaaaatgaatttttgtatcttgtcttgtctttgtccattataaactggaggatcacagttaagccttccatgaattcatagtttggaatcatttaccttaccattattttggatttttttcttattacagtgtcactacactgtattcatgtgggggaacaaacatgtaggtgcttgaacatgccccacagacacagttgtagccctagtatttgtgacggtcattattgacacagtgcagactttgcagatggagcattatgctctcagaggactttaaaaatatgtatattaagcaattaactttctggagttggagttatcaaatcttgctgggaaattaacttccaagagctctgaattggatggaattccatctggcttcagagaacaatcagcctatatgaaacggagctttgaaatgtttttcttgtgcagaaatacgaactagaaagaaaagtgctgatctaatgctaagttttctctgtgtactgactcagttgccagaattataatgaaaactgtattttagtctaacaaatgtatagaattttttatgtaataaataaaattttataggaaagaa

SEQ ID NO: 271285 - DNA, 1383 bp, Artificial Sequence
  derived and/or modified sequence
ggggcgccgggactatgtcgcgggcgcggagccacctgcgcgccgctctattcctggcagcggcgtctgcgcgcggcataacgacccaggtcgcggcgcggcggggcttgagcgcgtggccggtgccgcaggagccgagcatggagtaccaggatgccgtgcgcatgctcaataccctgcagaccaatgccggctacctggagcaggtgaagcgccagcggggtgaccctcagacacagttggaagccatggaactgtacctggcacggagtgggctgcaggtggaggacttggaccggctgaacatcatccacgtcactgggacgaaggggaagggctccacctgtgccttcacggaatgtatcctccgaagctatggcctgaagacgggattctttagctctccccacctggtgcaggttcgggagcggatccgcatcaatgggcagcccatcagtcctgagctcttcaccaagtacttctggcgcctctaccaccggctggaggagaccaaggatggcagctgtgtctccatgcccccctacttccgcttcctgacactcatggccttccacgtcttcctccaagagaaggtggacctggcagtggtggaggtgggcattggcggggcttatgactgcaccaacatcatcaggaagcctgtggtgtgcggagtctcctctcttggcatcgaccacaccagcctcctgggggatacggtggagaagatcgcatggcagaaagggggcatctttaagcaaggtgtccctgccttcactgtgctccaacctgaaggtcccctggcagtgctgagggaccgagcccagcagatctcagtgctggggagccaaaggcatccaggccagggctcctgtggcagctgcccctggcacctgtgttccagcccacatcccacatgcggctcgggcttcggaacacggagtggccgggccggacgcaggtgctgcggcgcgggcccctcacctggtacctggacggtgcgcacaccgccagcagcgcgcaggcctgcgtgcgctggttccgccaggcgctgcagggccgcgagaggccgagcggtggccccgaggttcgagtcttgctcttcaatgctaccggggaccgggacccggcggccctgctgaagctgctgcagaccaacagaacttcacagtgacactggaccaggtcctgctccgctgcctggaacaccagcagcactggaaccacctggacgaagagcaggccagcccggacctctggagtgcccccagcccagagcccggtgggtccgcatccctgcttctggcgccccacccaccccacacctgcagtgccagctccctcgtcttcagctgcatttcacatgccttgcaatggatcagc

SEQ ID NO: 271286 - DNA, 959 bp, Artificial Sequence
  derived and/or modified sequence
ggctgggaattcggagactatagcgtccccgccccgggttgggaagtgggaagtggcacaggagctaggatccagaagcccagaggctcagcggtgcttctggagttccagtgatcccggagtctgaaccggcagtgagagtggggaaagagggatgccgtgcgcatgctcaataccctgcagaccaatgccggctacctggagcaggtgaagcgccagcggggtgaccctcagacacagttggaagccatggaactgtacctggcacggagtgggctgcaggtggaggacttggaccggctgaacatcatccacgtcactgggacgaaggggaagggctccacctgtgccttcacggaatgtatcctccgaagctatggcctgaagacgggattctttagctctccccacctggtgcaggttcgggagcggatccgcatcaatgggcagcccatcagtcctgagctcttcaccaagtacttctggcgcctctaccaccggctggaggagaccaaggatggcagctgtgtctccatgcccccctacttccgcttcctgacactcatggccttccacgtcttcctccaagagaaggtggacctggcagtggtggaggtgggcattggcggggcttatgactgcaccaacatcatcaggaagcctgtggtgtgcggagtctcctctcttggcatcgaccacaccagcctcctgggggatacggtggagaagatcgcatggcagaaagggggcatctttaagcaaggtgtccctgccttcactgtgctccaacctgaaggtcccctggcagtgctgagggaccgagcccagcagatctcagtgctggggagccaaaggcatccaggccagggctcctgtggcagctgcccctggcacctgtgttccagcccacatcccacatgcggctcgggcttcggaacacggagtggccgggccggacg

SEQ ID NO: 271287 - DNA, 1128 bp, Artificial Sequence
  derived and/or modified sequence
atgagccgggcgcggagccacctacgggccgcgctctttctggcagctgcttccgcaaggggtattaccacacaggtggcggcacggcggggactctccgcatggcctgttccacaggagcccagtatggagtatcaggacgccgtcagaatgttaaacaccttacagaccaatgcgggttatttagaacaggtgaaaagacagcgaggcgacccccagacccagctggaggctatggaactctacttggctagatccgggctacaggttgaagacttagacagacttaatataattcatgtgaccgggaccaagggtaaaggttcaacttgcgcctttaccgagtgcatccttagatcttacggcttaaagacgggtttcttctcatcccctcacctggtgcaagtcagggagcgtattaggatcaatgggcagccaatcagtccggagctctttacgaaatacttttggcggctttatcaccggctcgaagagaccaaggatggatcctgcgtttctatgccaccatacttcaggtttctgaccctgatggctttccatgtgtttttacaagagaaagtcgatctggccgttgttgaagttggtatcggcggtgcttacgattgtacgaacattattaggaaacccgtcgtgtgcggcgtgagttcgctcggcattgatcatacttcgctgctgggggacaccgtggaaaagatcgcctggcaaaagggcggaatcttcaaacagggcgtccctgcttttactgtactccagcccgaggggcccctcgccgtgctgagagatagagcacaacagattagcgtcctgggctcacaacggcatccgggtcaggggagctgcggctcctgcccatggcacctctgcagcagtcctcaccccacttgcgggagcggctttggcacgagatcgggacgggccggcagaaggtgttgcggcgcaggtccaagtcctggaacgtggaccgtgcgcacaccgcccgctgcacgtcggcccgcatgtgctggctctgcaaggcggtgtcgggctgctcgggggcgtgccgtggctcctcgtttcgagtcctgcagtagtatgctccccggcaccggcactaggcggccatgttag

SEQ ID NO: 271288 - DNA, 1128 bp, Artificial Sequence
  derived and/or modified sequence
atgagtcgcgctcggtcccatctgcgagccgccctgttcttagccgctgcatccgctcgcggtattactactcaagtcgccgccaggaggggcctctccgcctggcctgtacctcaggaaccttcgatggagtaccaagacgctgtgcgtatgcttaatacacttcagactaacgcaggatacctcgagcaagtgaaaaggcagcggggcgatccgcagacccagctagaggccatggagctgtatttggccaggtctggactgcaggtggaggatctggacagactaaacatcatccatgtaaccggcaccaaaggtaaagggagcacatgtgcgttcacggaatgtattctgcggagctatggactgaaaaccggcttcttttccagtccccatttggttcaggtcagggagcgaatcagaattaatggacaaccaattagcccagaactattcaccaagtatttttggaggctctaccatcgcctagaggagaccaaggacggttcctgcgtcagcatgcctccctactttagatttctgacgcttatggcttttcatgtgttcctgcaggaaaaggtagatctcgccgtggtcgaggtggggattggaggcgcctatgattgcactaacatcatcaggaagccagtggtgtgcggggtttcaagcctgggcattgaccacacatctctccttggggatactgtggaaaaaattgcatggcagaagggggggattttcaagcagggagtcccagctttcacggtgctgcagccagaaggccctcttgccgtcctgcgggaccgtgcacaacagatcagtgtactgggctcacagcgccacccaggtcaggggtcgtgtgggtcatgcccatggcatctctgtagttctccacaccctacctgcggaagcggctttggaactcgaagtggccgcgccggacggagatgctgtggcgccggtcctagcccaggaacgtggaccgtgaggactcctcccgccgctcggagaccagcctgtgcagggtctgctagacgatgtagagccgcacggggaagggcagtggcccctcgattcgaaagctgttcaagcatgctgcccggtacggggaccaggaggccatgttag

SEQ ID NO: 271289 - DNA, 798 bp, Artificial Sequence
  derived and/or modified sequence
atgttgaacacccttcagactaatgccggatacctcgaacaggttaaaaggcaacgcggggatccgcagacacaactggaagccatggaattgtacctggctcggtcgggcctccaagtggaagacctggacagactgaatatcatccacgttactgggacgaaggggaaggggagcacctgtgcatttactgagtgcattctcaggagttacggcctgaagactggctttttttccagcccccacctagtccaagtgagagaaagaatcagaattaatggccagccgatttctcccgaactatttacaaagtatttttggagactctatcatcgcttggaggagacgaaagatgggtcctgtgtttcaatgccgccatattttcggttcctgacactcatggccttccatgtgtttttgcaggagaaggtggacctagccgtggtggaagtaggaatcggaggcgcttatgattgcacaaacatcatacgaaaaccagttgtttgcggggtcagctctctggggattgaccacacatccttgttgggagataccgtggagaagatagcgtggcagaaaggcggaatctttaaacagggagtgccagccttcaccgttctgcagcctgagggccctttggccgtcctgagggatcgggcccagcagatctcggtgctgggatcacagcgccaccctggccagggaagctgtgggtcctgtccatggcatctttgtagctctcctcacccaacctgcggctccggttttggaaccagaagtggtcgagccgggaggtag

SEQ ID NO: 271290 - DNA, 1128 bp, Artificial Sequence
  derived and/or modified sequence
atgagccgggcccggagccacctgcgggccgccctcttcctggccgccgccagcgcccggggcatcaccacccaggtggccgcccggcggggcctgagcgcctggcctgtgccccaggagcccagcatggagtaccaggatgctgtgaggatgctgaacaccctgcagaccaatgccggctacctggagcaggtgaagaggcagagaggagacccccagacccagctggaggccatggagctgtacctggcccggagcggcctgcaggtggaggacctggaccggctgaacatcatccacgtgacaggcaccaagggcaagggcagcacctgtgccttcacagagtgcatcctgcggagctatggcctgaagacaggcttcttcagcagcccccacctggtgcaggtgcgggagcgcatccgcatcaatggccagcccatcagccctgagctgttcaccaagtacttctggaggctgtaccaccggctggaggagaccaaggatggcagctgtgtgtccatgccaccctacttccgcttcctgaccctgatggccttccacgtgttcctgcaggagaaggtggacctggccgtggtggaggtgggcattggaggagcctatgactgcaccaacatcatcaggaagcctgtggtgtgtggggtgagcagcctgggcatcgaccacaccagcctgctgggggacacagtggagaagatcgcctggcagaagggcggcatcttcaagcagggcgtgcctgccttcaccgtgctgcagcctgagggccccctggccgtgctgcgggaccgggcccagcagatctctgtgctgggcagccagaggcaccctggccagggcagctgtggcagctgcccctggcacctgtgcagcagcccccaccccacctgtggcagcggcttcggcaccaggagcggccgggccggccgccgctgctgcggggccggccccagccctggcacctggacagtgaggaccccacctgctgcccggcggcctgcctgtgccggcagcgcccggcgctgcagagctgcccggggccgggctgtggcccccaggtttgagagctgcagctccatgctgcccggcaccggcacccggcggccctgctag

SEQ ID NO: 271291 - DNA, 798 bp, Artificial Sequence
  derived and/or modified sequence
atgctgaacaccctgcagaccaatgccggctacctggagcaggtgaagaggcagagaggagacccccagacccagctggaggccatggagctgtacctggcccggagcggcctgcaggtggaggacctggaccggctgaacatcatccacgtgacaggcaccaagggcaagggcagcacctgtgccttcacagagtgcatcctgcggagctatggcctgaagacaggcttcttcagcagcccccacctggtgcaggtgcgggagcgcatccgcatcaatggccagcccatcagccctgagctgttcaccaagtacttctggaggctgtaccaccggctggaggagaccaaggatggcagctgtgtgtccatgccaccctacttccgcttcctgaccctgatggccttccacgtgttcctgcaggagaaggtggacctggccgtggtggaggtgggcattggaggagcctatgactgcaccaacatcatcaggaagcctgtggtgtgtggggtgagcagcctgggcatcgaccacaccagcctgctgggggacacagtggagaagatcgcctggcagaagggcggcatcttcaagcagggcgtgcctgccttcaccgtgctgcagcctgagggccccctggccgtgctgcgggaccgggcccagcagatctctgtgctgggcagccagaggcaccctggccagggcagctgtggcagctgcccctggcacctgtgcagcagcccccaccccacctgtggcagcggcttcggcaccaggagcggccgggccggccgctag

SEQ ID NO: 271292 - DNA, 1128 bp, Artificial Sequence
  derived and/or modified sequence
atgagccgggcccggagccacctgcgggccgccctgttcctggccgctgctagcgcgcgcggcattactacacaggtcgctgccaggagaggcctatccgcctggccagtaccccaggagcccagcatggagtaccaggacgccgtgagaatgctcaatacactgcagactaatgccggatatctggaacaggtgaaacgtcagcgaggcgacccacagacacagctggaggctatggaactctaccttgctagatccggtttacaggtcgaggatctcgatagactgaatattatccacgtgacaggcaccaaaggaaagggcagcacttgcgcgttcactgagtgcatcctacgttcctacggattaaagacggggtttttctcttccccgcacctggtgcaagtgcgggagagaatccggatcaatggccagccaatatctccagagctgttcacaaagtacttttggagactgtatcatcggctagaggaaaccaaggatggaagttgtgtgtccatgcccccctacttcaggtttcttacgctgatggcattccatgtgttcctccaggaaaaagtggacctggccgtggtcgaagttggcatcgggggagcttacgattgcacaaatataataagaaaacctgtagtgtgcggggtcagctcccttggaatcgaccacacttctctgctcggggacacggtggaaaagatagcctggcagaagggcggcatctttaagcagggggtccctgcctttacggttctgcagcctgaagggcccctggcggttctgcgggatcgggcccagcagatttcggtgctcggctctcagcgacatcctggacagggctcctgcggtagctgtccttggcacctttgcagcagtccccacccgacttgcggctcgggtttcggtacacgtagcggaagggccggtaggcgctgctgcggcgctgggccctccccaggcacctggaccgtgcggacgccacccgcagcaaggcgacccgcttgcgcaggttccgcaagacggtgcagagccgctcggggacgggcagtggcaccaagattcgaatcctgctcaagcatgctcccaggaacgggcaccagacgcccctgttag

SEQ ID NO: 271293 - DNA, 1128 bp, Artificial Sequence
  derived and/or modified sequence
atgagccgggcccggagccacctgcgggccgccctgttcctggccgccgcctcggcccgaggcattaccacacaggtggccgctcgcaggggactgtcagcctggccggtgccccaagagccttcaatggaatatcaggacgccgttcgaatgttaaataccctgcagaccaatgctggctatctcgaacaagtcaaaagacagagaggcgatccgcagacacagctggaggccatggagctatacctggcccggtcaggcctgcaggtcgaagacctggataggcttaacattattcacgtcaccggcaccaaaggaaagggttcaacttgcgctttcactgaatgcatcctccgatcatatggcctcaagacgggatttttctcttcaccccatctggtgcaggttagggaacgcataaggatcaatggccagcccattagccccgaactgtttacaaaatacttttggcggctgtaccaccgcctggaagaaacaaaagatggaagctgtgtcagtatgccaccttacttccgctttttgacacttatggcctttcatgtcttcctgcaggaaaaagtcgacctcgcagtagtggaagtggggatcgggggtgcctacgactgcaccaacataataaggaagccggtcgtttgcggcgtttcctccttggggatcgatcatacaagtctactgggcgatacagtggagaaaatagcctggcagaaaggcggcatctttaagcagggcgtgcctgcattcacagttctacagcctgagggacctctcgctgtgttaagagacagagcacagcagataagcgtacttggttctcagaggcaccctgggcagggtagttgcgggtcttgcccttggcatctgtgtagctcaccacatccgacttgtggatcaggctttggcactaggtcgggtcgtgcaggacggagatgctgtggagcgggcccgtcgccgggtacttggacagtgcgcaccccccccgccgcccgtcgccccgcatgtgccgggtcagcccgtcggtgtcgggcagctcgtgggagagctgtggctccacgctttgagagctgttcctctatgcttcctggcaccggcactcgtagaccatgttag

SEQ ID NO: 271294 - DNA, 798 bp, Artificial Sequence
  derived and/or modified sequence
atgctgaacaccctgcagaccaacgccggctacctggagcaggtgaagaggcagcggggcgatcctcagactcaacttgaagccatggagttatacctggctaggagcggactgcaagtagaagatctagaccgactgaatatcatccacgtcaccggcacgaaggggaaaggttccacctgtgcctttaccgagtgtatcctccggtcctacggccttaaaacaggatttttctctagcccacacttggtccaggtgcgcgaacgaattcggatcaatggtcaacctatcagtcctgagcttttcacaaaatacttttggcgactctaccaccgactagaggaaacaaaggatggctcatgtgtgtcaatgcccccatacttcagattcctgaccctgatggctttccatgtgttcctgcaggagaaggtcgacctggctgtggtggaagtcgggataggcggagcatatgattgtacaaacatcattagaaagcccgttgtatgcggggtgtcttcactgggaatcgatcacacatcactgctcggcgacacagtagagaaaatcgcctggcaaaaaggcggaatcttcaaacagggggttccggctttcaccgtgcttcagcccgaaggacccctggcagttctacgtgaccgcgcacagcagatctccgtccttggcagccagaggcatcctggtcaaggatcttgcggttcctgcccttggcacctctgctcttctccccaccctacctgtggatccggtttcggtacaaggagcggacgtgccggaaggtag

SEQ ID NO: 271295 - DNA, 1128 bp, Artificial Sequence
  derived and/or modified sequence
atgagccgggcacgcagccatcttcgggctgcgcttttcctggccgctgcttctgcccgtggaatcacaactcaggtggcagcaaggcgaggtctgagtgcctggcccgtgcctcaggaaccctctatggagtaccaggacgccgtcagaatgctgaatacactccaaactaacgcgggatatcttgaacaggtgaagcgccagcgaggagacccccaaacacaattagaggcaatggaactttatttagctaggtccggccttcaggtcgaggatctggaccggctgaatattatccacgttaccggcaccaaaggcaaaggctccacatgtgcttttacagagtgcatactgcggtcttacggacttaaaacaggtttcttttcatctccacaccttgtgcaagtgagagagcgcatccgtattaatggacagcccatctctcccgagctgtttacaaaatatttttggcgtctgtatcatcgtctggaggagacaaaagatggttcgtgcgtctccatgcccccatacttccgatttctgacattgatggctttccacgttttcctacaggaaaaggtggacttggcagtagtcgaggtgggtattggaggcgcatacgattgcaccaacatcatccgcaagccagttgtgtgcggcgtgagttcgctcggcattgatcacactagcttgcttggtgatactgtggagaagatagcctggcagaaaggagggatctttaagcagggcgttccagccttcactgtgctacagccagagggccctctggccgtcttgcgcgaccgtgcacagcagatttccgtactcggcagccagcggcatccagggcagggttcatgcggaagctgcccctggcacctttgctcctcacctcacccgacatgcggatcaggtttcgggaccaggtctgggagggctggaaggcgatgctgtggggcaggcccatcacccggaacttggacagtgcgaacccctcccgctgcacggagaccagcttgtgcgggtagcgccagaaggtgcagagccgcacgaggcagggccgtggctcctcgatttgaatcctgctcctccatgctgcccggtacaggaacaaggcggccatgctag

SEQ ID NO: 271296 - DNA, 1128 bp, Artificial Sequence
  derived and/or modified sequence
atgtcacgcgctagaagccacctgcgcgctgcgttatttctggctgctgcaagcgccaggggaataaccactcaggtggccgctcgacggggactatccgcctggcctgtcccacaggaacccagtatggaataccaagatgcagtgcgcatgctaaatactttacagaccaacgctggatacctggaacaggtaaaaagacagcgaggagacccccagacccagcttgaggcaatggagctttatctggctagatctggattgcaggtggaggatctcgataggctgaatattatccatgtgaccggcacaaaaggcaagggctctacgtgtgcatttactgagtgtatcttacgcagctatggcctcaagaccggattctttagctccccacatctcgtgcaggtgcgagagcgcattcggatcaacggacagcctatatcccctgagctgttcaccaaatatttctggcgcctttaccacaggctcgaggagactaaagacggcagttgtgtcagcatgcctccctattttcgatttttgacactgatggcctttcacgtgttcctacaggagaaggtggacctggcagtggttgaggttggtattgggggagcttacgattgtacgaacatcattcgcaagcccgttgtgtgcggtgtctcttcactgggcatagatcacacctcactactgggggacactgtggaaaagatcgcctggcaaaagggtgggatcttcaaacagggcgtgcccgcattcaccgtcctgcagccggagggacccctggcagtccttagagatcgagctcagcagatctctgttttgggtagtcagcgacacccaggtcagggaagctgtgggagctgtccatggcatttgtgctccagtcctcatcccacctgtgggtcagggttcggaactagatcaggccgtgccggacgcaggtgctgtggggcaggaccgtccccaggcacttggaccgtgcgaaccccccctgctgcccgaaggcccgcatgcgccggatccgccagacggtgccgagccgcaagaggaagagccgtggcccctcgattcgaaagctgtagcagcatgttacccggtaccggtactcgcagaccatgctag

SEQ ID NO: 271297 - DNA, 798 bp, Artificial Sequence
  derived and/or modified sequence
atgctgaatacattacagacaaacgcgggttatttagagcaggtcaaacgccagaggggagatccacaaactcagctggaggccatggaactgtacctagcgcgatctggcctgcaggtcgaggatctagacagattgaacatcatacatgtcacaggcacaaaaggcaagggcagcacttgcgccttcacagagtgcattcttcgttcttatgggctcaagactgggttcttctcttcgcctcacttggtgcaggtccgggagagaatccgcattaatgggcagcctatttctcccgaactgtttacgaagtacttttggagactgtatcaccgactggaagagacaaaggacggatcttgcgtgagtatgcctccatacttccgtttcctgaccctaatggctttccacgtgtttctgcaggaaaaggtagatttggccgttgtggaggtaggcatcgggggagcttatgactgcactaatataatccggaagcccgtagtgtgcggagtctcgtccttagggatcgaccacaccagcttgctgggagacaccgttgaaaagatcgcatggcagaaggggggtattttcaaacagggggtcccggctttcacggtcctccaaccagaggggccattggccgtgttgcgcgatcgcgctcagcagatctccgttctgggcagccagcgccatccaggccaaggtagttgcggatcctgcccctggcatctctgctcatctccacatcccacctgcggttctggatttgggacccggtctggtagggcaggacgctag

SEQ ID NO: 271298 - DNA, 1128 bp, Artificial Sequence
  derived and/or modified sequence
atgagcagagccagaagccacctgagagccgccctgttcctggccgccgccagcgccagaggcatcaccacccaggtggccgccagaagaggcctgagcgcctggcccgtgccccaggagcccagcatggagtaccaggacgccgtgagaatgctgaacaccctgcagaccaacgccggctacctggagcaggtgaagagacagagaggcgacccccagacccagctggaggccatggagctgtacctggccagaagcggcctgcaggtggaggacctggacagactgaacatcatccacgtgaccggcaccaagggcaagggcagcacctgcgccttcaccgagtgcatcctgagaagctacggcctgaagaccggcttcttcagcagcccccacctggtgcaggtgagagagagaatcagaatcaacggccagcccatcagccccgagctgttcaccaagtacttctggagactgtaccacagactggaggagaccaaggacggcagctgcgtgagcatgcccccctacttcagattcctgaccctgatggccttccacgtgttcctgcaggagaaggtggacctggccgtggtggaggtgggcatcggcggcgcctacgactgcaccaacatcatcagaaagcccgtggtgtgcggcgtgagcagcctgggcatcgaccacaccagcctgctgggcgacaccgtggagaagatcgcctggcagaagggcggcatcttcaagcagggcgtgcccgccttcaccgtgctgcagcccgagggccccctggccgtgctgagagacagagcccagcagatcagcgtgctgggcagccagagacaccccggccagggcagctgcggcagctgcccctggcacctgtgcagcagcccccaccccacctgcggcagcggcttcggcaccagaagcggcagagccggcagaagatgctgcggcgccggccccagccccggcacctggaccgtgagaaccccccccgccgccagaagacccgcctgcgccggcagcgccagaagatgcagagccgccagaggcagagccgtggcccccagattcgagagctgcagcagcatgctgcccggcaccggcaccagaagaccctgctag

SEQ ID NO: 271299 - DNA, 798 bp, Artificial Sequence
  derived and/or modified sequence
atgctgaacaccctgcagaccaacgccggctacctggagcaggtgaagagacagagaggcgacccccagacccagctggaggccatggagctgtacctggccagaagcggcctgcaggtggaggacctggacagactgaacatcatccacgtgaccggcaccaagggcaagggcagcacctgcgccttcaccgagtgcatcctgagaagctacggcctgaagaccggcttcttcagcagcccccacctggtgcaggtgagagagagaatcagaatcaacggccagcccatcagccccgagctgttcaccaagtacttctggagactgtaccacagactggaggagaccaaggacggcagctgcgtgagcatgcccccctacttcagattcctgaccctgatggccttccacgtgttcctgcaggagaaggtggacctggccgtggtggaggtgggcatcggcggcgcctacgactgcaccaacatcatcagaaagcccgtggtgtgcggcgtgagcagcctgggcatcgaccacaccagcctgctgggcgacaccgtggagaagatcgcctggcagaagggcggcatcttcaagcagggcgtgcccgccttcaccgtgctgcagcccgagggccccctggccgtgctgagagacagagcccagcagatcagcgtgctgggcagccagagacaccccggccagggcagctgcggcagctgcccctggcacctgtgcagcagcccccaccccacctgcggcagcggcttcggcaccagaagcggcagagccggcagatag

SEQ ID NO: 271300 - protein, 245 aa, Artificial Sequence
  derived and/or modified sequence
VEEEGDVSNRGVELLQLEPDEDQVRARILGCLQEPTKSRPDQPAAFGLLCRMADQTFISIVDWARRCMVFKELEVADQMTLLQNCWSELLVFDHIYRQVQHGKEGSILLVTGQEVELTTVATQAGSLLHSLVLRAQELVLQLLALQLDRQEFVCLKFIILFSLDLKFLNNHILVKDAQEKANAALLDYTLCHYPHCGDKFQQLLLCLVEVRALSMQAKEYLYHKHLGNEMPRNNLLIEMLQAKQT

SEQ ID NO: 271301 - DNA, 738 bp, Artificial Sequence
  derived and/or modified sequence
gtggaagaggagggcgatgtttctaatcgcggcgtcgaactccttcagctagaaccagacgaagatcaggtacgcgcccggattctcggctgcttgcaggaaccaacaaagtccagacctgatcagccagccgcctttggccttttatgcaggatggcggatcaaacgttcatcagcattgtggattgggcccgtagatgtatggtttttaaagagctcgaggtggcagatcagatgacactgcttcagaactgttggtctgagctgctggtgtttgatcacatctatcggcaggttcaacatggaaaagaaggcagcattttgttggtgaccggacaggaagtggaactaacaaccgtggcaacccaggccggttccctgttgcactccctggtcctgcgcgcgcaggagttggtccttcagctactggccctgcagttggacaggcaagaattcgtgtgcctgaagtttattatcctattttctcttgatttgaagtttctgaacaatcacattctagtgaaagacgcacaggagaaggcaaacgcagccctgttggattacactctgtgccattaccctcattgtggcgataaatttcagcagttgctgctgtgcttggtggaagtgcgggccctgtcgatgcaggcgaaggaatacctgtaccacaaacatctcggtaatgaaatgcctagaaacaacttattgattgaaatgctgcaggcaaagcagacctag

SEQ ID NO: 271302 - DNA, 738 bp, Artificial Sequence
  derived and/or modified sequence
gtggaggaggagggagatgtgagcaacagaggagtggagctgctgcagctggagccagatgaggaccaggtgcgggcccgcatcctgggctgcctgcaggagcccaccaagagcaggccagaccagcctgctgccttcggcctgctgtgcaggatggctgaccagaccttcatcagcatcgtggactgggcccggcgctgcatggtgttcaaggagctggaggtggccgaccagatgaccctgctgcagaactgctggagcgagctgctggtgtttgaccacatctaccggcaggtgcagcacggcaaggagggcagcatcctgctggtgacaggccaggaggtggagctgaccaccgtggccacccaggccggcagcctgctgcacagcctggtgctgcgggcccaggagctggtgctgcagctgctggccctgcagctggaccggcaggagtttgtgtgcctgaagttcatcatcctcttcagcctggacctgaagttcctgaacaaccacatcctggtgaaggatgcccaggagaaggccaatgctgccctgctggactacaccctgtgccactacccccactgtggggacaagttccagcagctgctgctgtgcctggtggaggtgcgggccctgtccatgcaggccaaggagtacctgtaccacaagcacctgggcaatgagatgcccaggaacaacctgctgattgagatgctgcaggccaagcagacctag

SEQ ID NO: 271303 - DNA, 738 bp, Artificial Sequence
  derived and/or modified sequence
gtggaggaggagggcgacgtgagcaaccggggcgtggagctgctgcagcttgaacccgacgaagatcaggtgcgagccaggatcctaggctgcctgcaggagcccactaaatccagacccgaccagcccgcggcattcgggctgttatgtcgtatggccgaccagaccttcatcagcatcgtggattgggctagaaggtgcatggttttcaaggaactagaagttgctgaccaaatgaccttactccagaactgctggtccgagctgttggtcttcgatcacatttaccgacaagtgcagcacggtaaagaaggctcaatcctcttagttacaggtcaagaagtggagctgacaacggttgcaacacaggccgggtcactcctgcattctcttgtcctgcgtgcccaggagttggtgctccagttgctcgcgcttcagctagaccgacaagagtttgtctgtctgaaatttattatacttttctctctcgacctgaaattcctgaacaaccatattctcgtaaaggacgcacaagaaaaagcgaatgcagctcttttggattatacactgtgccattacccccattgcggcgacaaatttcaacagttactattgtgtctggtcgaagtgcgagcactgtccatgcaggccaaagagtacctttaccacaaacacttggggaatgagatgcctcggaataacctgctgatcgaaatgctgcaagccaagcagacctag

SEQ ID NO: 271304 - DNA, 768 bp, Artificial Sequence
  derived and/or modified sequence
gtggaggaggaaggagatgtgtcaaacagaggagtggagctgctgcagctggagccggatgaggaccaggtgcgggcccgcatcttgggctgcctgcaggagcccaccaaaagccgccccgaccagccggcggccttcggcctcctgtgcagaatggccgaccagaccttcatctccatcgtggactgggcacgcaggtgcatggtcttcaaggagctggaggtggccgaccagatgacgctgctgcagaactgctggagcgagctgctggtgttcgaccacatctaccgccaggtccagcacggcaaggagggcagcatcctgctggtcaccgggcaggaggtggagctgaccacagtggccacccaggcgggctcgctgctgcacagcctggtgttgcgggcgcaggagctggtgctgcagctgcttgcgctgcagctggaccggcaggagtttgtctgcctcaagttcatcatcctcttcagcctggatttgaagttcctgaataaccacatcctggtgaaagacgctcaggagaaggccaacgccgccctgcttgactacaccctgtgccactacccgcactgcggggacaaattccagcagctgctgctgtgcctggtggaggtgcgggccctgagcatgcaggccaaggagtacctgtaccacaagcacctgggcaacgagatgccccgcaacaacctgctcatcgaaatgctgcaagccaagcagacttgagcctgggccgggggcggggccgggactggg

SEQ ID NO: 271305 - DNA, 738 bp, Artificial Sequence
  derived and/or modified sequence
gttgaagaggagggggatgttagtaacaggggtgtagagttacttcaactcgagccggacgaggaccaagtacgagcaaggattctgggatgtctccaagaacctacaaaatcccgccctgatcagcccgctgccttcgggttgttgtgtagaatggccgaccagacatttatctccatcgtagactgggcacggaggtgcatggtttttaaagagcttgaagtggcagatcaaatgacactactgcagaattgctggagtgaattgctagtgtttgaccatatctacagacaggtccagcacggaaaagaaggaagtattctcctcgtcaccggacaagaagtcgagctgactaccgtcgccacccaggcagggtccttgctacattccctggtcttgcgtgcacaagagctcgtcctccaactgctggccctccagttggatcgccaggagtttgtttgtctcaagttcatcatcctgttttctctcgacctgaagtttctcaacaatcatattctcgtgaaagacgctcaggagaaggcaaatgctgcgctccttgattatactctgtgccattatccccattgtggagacaagtttcaacagctgcttctgtgcttggttgaagtgcgcgcactgagtatgcaggcaaaggagtacctgtaccacaagcatctgggcaacgaaatgcccagaaacaaccttttgattgaaatgctgcaggctaagcagacatag

SEQ ID NO: 271306 - DNA, 738 bp, Artificial Sequence
  derived and/or modified sequence
gtggaggaggagggcgacgtgagcaacagaggcgtggagctgctgcagctggagcccgacgaggaccaggtgagagccagaatcctgggctgcctgcaggagcccaccaagagcagacccgaccagcccgccgccttcggcctgctgtgcagaatggccgaccagaccttcatcagcatcgtggactgggccagaagatgcatggtgttcaaggagctggaggtggccgaccagatgaccctgctgcagaactgctggagcgagctgctggtgttcgaccacatctacagacaggtgcagcacggcaaggagggcagcatcctgctggtgaccggccaggaggtggagctgaccaccgtggccacccaggccggcagcctgctgcacagcctggtgctgagagcccaggagctggtgctgcagctgctggccctgcagctggacagacaggagttcgtgtgcctgaagttcatcatcctgttcagcctggacctgaagttcctgaacaaccacatcctggtgaaggacgcccaggagaaggccaacgccgccctgctggactacaccctgtgccactacccccactgcggcgacaagttccagcagctgctgctgtgcctggtggaggtgagagccctgagcatgcaggccaaggagtacctgtaccacaagcacctgggcaacgagatgcccagaaacaacctgctgatcgagatgctgcaggccaagcagacctag

SEQ ID NO: 271307 - protein, 110 aa, Artificial Sequence
  derived and/or modified sequence
MEGKAKYILPTETIYVGEMKDGMFHGEGTLYFPSGSQYDAIWENGLAIKGTYTFSDGLHYDEKNWHYCDGYDRRFYTEILNGLKPAGMAQLTNMDPPRKIPKGYYDCGDG

SEQ ID NO: 271308 - protein, 175 aa, Artificial Sequence
  derived and/or modified sequence
MEYTGSKYIGEYVDGRMEGKAKYILPTETIYVGEMKDGMFHGEGTLYFPSGSQYDAIWENGLAIKGTYTFSDGLHYDEKNWHYCDGYDRRFYTEILNGLKPAGMAQLTNMDPPRKIPKGYYDCGDGFYNPVTRVVKDYRNRFLRNAGRFLPTLQHVFSSPTYEYVHLYVQMYAHT

SEQ ID NO: 271309 - DNA, 528 bp, Artificial Sequence
  derived and/or modified sequence
atggagtacaccggcagcaagtacatcggcgagtacgtggacggcagaatggagggcaaggccaagtacatcctgcccaccgagaccatctacgtgggcgagatgaaggacggcatgttccacggcgagggcaccctgtacttccccagcggcagccagtacgacgccatctgggagaacggcctggccatcaagggcacctacaccttcagcgacggcctgcactacgacgagaagaactggcactactgcgacggctacgacagaagattctacaccgagatcctgaacggcctgaagcccgccggcatggcccagctgaccaacatggacccccccagaaagatccccaagggctactacgactgcggcgacggcttctacaaccccgtgaccagagtggtgaaggactacagaaacagattcctgagaaacgccggcagattcctgcccaccctgcagcacgtgttcagcagccccacctacgagtacgtgcacctgtacgtgcagatgtacgcccacacctag

SEQ ID NO: 271310 - DNA, 528 bp, Artificial Sequence
  derived and/or modified sequence
atggagtataccgggagcaagtatattggtgagtacgtcgacggccgcatggaggggaaggcaaaatacatcctcccgactgaaacaatttacgtcggagagatgaaggatgggatgtttcacggggagggtaccctctattttccaagcggatcacagtacgacgcaatttgggagaacggactagccattaagggcacatataccttctccgatggactgcattacgacgaaaagaattggcattactgcgacggctatgatagacggttctatacggagattttgaacgggctgaagcctgctgggatggcgcagctgacaaatatggatcctcctaggaagatccctaaagggtattatgattgtggagatggcttctacaacccagtaaccagggtagttaaagactataggaataggtttctgcgcaacgctgggcgcttcctgcctacgctccaacatgtcttttctagccccacatatgagtatgtccacctatacgtgcagatgtacgctcatacctag

SEQ ID NO: 271311 - DNA, 528 bp, Artificial Sequence
  derived and/or modified sequence
atggagtacacaggcagcaagtacatcggggagtatgtggatggccgcatggagggcaaggccaagtacatcctgcccacagagaccatctacgtgggggagatgaaggatggcatgtttcatggagagggcaccctgtacttccccagcggcagccagtatgatgccatctgggagaatggcctggccatcaagggcacctacaccttcagtgatggcctgcactatgatgagaagaactggcactactgtgatggctatgaccggcgcttctacacagagatcctgaatggcctgaagccagctggcatggcccagctgaccaacatggacccccccaggaagatccccaagggctactatgactgtggagatggcttctacaaccctgtgaccagggtggtgaaggactacagaaaccgcttcctgagaaatgccggccgcttcctgcccaccctgcagcacgtgttcagcagccccacctatgaatatgtgcacctgtatgtgcagatgtatgcccacacctag

SEQ ID NO: 271312 - DNA, 528 bp, Artificial Sequence
  derived and/or modified sequence
atggagtacaccggcagcaagtacatcggcgagtacgtggacggcaggatggaaggcaaggccaagtacatcctgccaactgaaacgatctacgtgggggaaatgaaagacggcatgttccacggcgaagggacgctctatttcccctcaggctcccagtatgacgcaatttgggagaatgggttggccatcaaaggaacatataccttctctgacggactacactatgatgagaaaaattggcactattgcgacgggtatgatcgccggttttacactgagatcctcaacggattaaagcccgccggcatggcacaactaactaacatggaccctcctaggaaaatccctaaaggatactatgactgcggcgacggcttctataatcccgtcaccagagtagtgaaagattacaggaatcggttcctccggaatgctggacgctttttaccaacattacaacacgttttttcttcccccacttacgagtacgtgcatctatacgtgcaaatgtatgcacatacatag

SEQ ID NO: 271313 - DNA, 1543 bp, Artificial Sequence
  derived and/or modified sequence
ctccggatcctaacagctggaagctaaaaacaggcgccatggagtacacagggagcaaatatatcggggaatatgtagatgggaggatggagggcaaagccaagtacatcctccctaccgaaacaatatatgttggggaaatgaaggatggcatgtttcacggcgagggaaccctgtacttccccagcggaagccaatacgacgccatttgggaaaacggattggccataaagggcacatatacgttctcagatgggctgcactatgatgagaaaaactggcattactgcgacggctatgatcggaggttttacacagagatcctcaatggcttgaagcctgcaggtatggctcaactcaccaatatggacccacctagaaaaatccccaagggctattacgattgtggagacggcttctataacccagtcacgagggtagtcaaggactataggaaccgctttctaagaaacgcaggtaggtttcttccgacactgcagcacgttttctcttcacccacatatgagtatgtgcatctgtatgtacaaatgtatgcacacacttgatgagaaagaagcttttgctgatagaagatgaaagttgattacctggatgttttattttttggacttctcgtggctggcaaatctgtacatagtcctagagtgaggtaaaagcacattcgtggtctagcagtgacggcacataaatgtcgcactgaaaggattaaggtacttatttttgtatgcattccttcgattttaatgggcacctactatatgctagacactgtgcttggtgttgggggaaaagcagagcaaagctggacacagccccccttccttgtggagcttgcattctaaaagtggcagagaagtactataaacagttaattgtatcatggaacaaacacaatgaagggaaaaacatggtcctgtgggaagggaaagtaggggccccagagaggtgggacggatgctgtgggagcacaaataaggggtatcaaatcccgaagcggttagtcagagaaggtttcaaggaggaaatgacttctaagctgagacctgaagaataactgggagttgaccacaaggcctggggagagggtttcccagcgagaggaaatggcacaggcaacggcctagaggggagtgatcccttgaggtgcaagaaggttggttcatcctttagccaggggagtaggtaccttggaggatccagaacctcagtttggtgagtcaacacaaggctgatcagactgagaagaacccatttacagtgaccaaactcacaggagatcaatacacaaataatagaacattttcctttaatgcagtgattcctaaacttatccttttctgaagtcacactcccactaggaatatcaaaagatacggaccctcttgccagaaaaatgtccaatgcatgcacacacacacacacgtgcacccacacgcgcacatgcatacacacacacattttgcagatagtcttaaggggtgaatggtccctctaaagacctaggtcaagaaaccttgctcta

SEQ ID NO: 271314 - DNA, 528 bp, Artificial Sequence
  derived and/or modified sequence
atggagtataccggcagtaaatacatcggagagtatgtggacggccgtatggaggggaaggcgaagtatatccttccgaccgagaccatctacgtcggtgaaatgaaggatgggatgtttcacggcgagggcaccctgtacttcccatctggtagtcagtacgacgccatctgggagaatggtctggccatcaagggcacctacaccttttccgatggcttgcactatgacgaaaagaattggcattactgcgatggctacgaccggaggttttacacagagatcctcaacggactcaagcctgcgggaatggctcagttaacaaatatggacccacccaggaagatcccaaaaggatactacgactgcggagacgggttctataaccctgtgacccgggtggtcaaagactacaggaaccgttttctgaggaacgcaggaagatttctcccgaccctgcagcatgtgttttcatctcccacttacgagtatgttcacctttacgtgcagatgtatgcgcacacctag

SEQ ID NO: 271315 - DNA, 366 bp, Artificial Sequence
  derived and/or modified sequence
gtgagaggtctgaacagtgatgtccagttcaaggatggagggcaaagccaagtacatcctccctaccgaaacaatatatgttggggaaatgaaggatggcatgtttcacggcgagggaaccctgtacttccccagcggaagccaatacgacgccatttgggaaaacggattggccataaagggcacatatacgttctcagatgggctgcactatgatgagaaaaactggcattactgcgacggctatgatcggaggttttacacagagatcctcaatggcttgaagcctgcaggtatggctcaactcaccaatatggacccacctagaaaaatccccaagggctattacgattgtggagacggctt

SEQ ID NO: 271316 - protein, 140 aa, Artificial Sequence
  derived and/or modified sequence
GTTTFLGFTAAGFVVFQGNKRIHLIKWPDVCKLKFEGKTFYVIGTQKEKKAMLAFHTSTPAACKHLWKCGVENQAFYKYAKSSQIKTVSSSKIFFKGSRFRYSGKVAKEVVEASSKIQREPPEVHRCVQKKICSCFGVTW

SEQ ID NO: 271317 - protein, 870 aa, Artificial Sequence
  derived and/or modified sequence
MFSQQQQQQLQQQQQQLQQLQQQQLQQQQLQQQQLLQLQQLLQQSPPQAPLPMAVSRGLPPQQPQQPLLNLQGTNSASLLNGSMLQRALLLQQLQGLDQFAMPPATYDTAGLTMPTATLGNLRGYGMASPGLAAPSLTPPQLATPNLQQFFPQATRQSLLGPPPVGVPMNPSQFNLSGRNPQKQARTSSSTTPNRKDSSSQTMPVEDKSDPPEGSEEAAEPRMDTPEDQDLPPCPEDIAKEKRTPAPEPEPCEASELPAKRLRSSEEPTEKEPPGQLQVKAQPQARMTVPKQTQTPDLLPEALEAQVLPRFQPRVLQVQAQVQSQTQPRIPSTDTQVQPKLQKQAQTQTSPEHLVLQQKQVQPQLQQEAEPQKQVQPQVQPQAHSQGPRQVQLQQEAEPLKQVQPQVHTQAQPSVQPQEHPPAQVSVQPPEQTHEQPHTQPQVSLLAPEQTPVVVHVCGLEMPPDAVEAGGGMEKTLPEPVGTQVSMEEIQNESACGLDVGECENRAREMPGVWGAGGSLKVTILQSSDSRAFSTVPLTPVPRPSDSVSSTPAATSTPSKQALQFFCYICKASCSSQQEFQDHMSEPQHQQRLGEIQHMSQACLLSLLPVPRDVLETEDEEPPPRRWCNTCQLYYMGDLIQHRRTQDHKIAKQSLRPFCTVCNRYFKTPRKFVEHVKSQGHKDKAKELKSLEKEIAGQDEDHFITVDAVGCFEGDEEEEEDDEDEEEIEVEEELCKQVRSRDISREEWKGSETYSPNTAYGVDFLVPVMGYICRICHKFYHSNSGAQLSHCKSLGHFENLQKYKAAKNPSPTTRPVSRRCAINARNALTALFTSSGRPPSQPNTQDKTPSKVTARPSQPPLPRRSTRLKT

SEQ ID NO: 271318 - protein, 252 aa, Artificial Sequence
  derived and/or modified sequence
MFSQQQQQQLQQQQQQLQQLQQQQLQQQQLQQQQLLQLQQLLQQSPPQAPLPMAVSRGLPPQQPQQPLLNLQGTNSASLLNGSMLQRALLLQQLQGLDQFAMPPATYDTAGLTMPTATLGNLRGYGMASPGLAAPSLTPPQLATPNLQQFFPQATRQSLLGPPPVGVPMNPSQFNLSGRNPQKQARTSSSTTPNRKDSSSQTMPVEDKSDPPEGSEEAAEPRMDTPEDQDLPPCPEDIAKEKRTPAPEPEPC

SEQ ID NO: 271319 - protein, 898 aa, Artificial Sequence
  derived and/or modified sequence
MFSQQQQQQLQQQQQQLQQLQQQQLQQQQLQQQQLLQLQQLLQQSPPQAPLPMAVSRGLPPQQPQQPLLNLQGTNSASLLNGSMLQRALLLQQLQGLDQFAMPPATYDTAGLTMPTATLGNLRGYGMASPGLAAPSLTPPQLATPNLQQFFPQATRQSLLGPPPVGVPMNPSQFNLSGRNPQKQARTSSSTTPNRKDSSSQTMPVEDKSDPPEGSEEAAEPRMDTPEDQDLPPCPEDIAKEKRTPAPEPEPCEASELPAKRLRSSEEPTEKEPPGQLQVKAQPQARMTVPKQTQTPDLLPEALEAQVLPRFQPRVLQVQAQVQSQTQPRIPSTDTQVQPKLQKQAQTQTSPEHLVLQQKQVQPQLQQEAEPQKQVQPQVQPQAHSQGPRQVQLQQEAEPLKQVQPQVQPQAHSQPPRQVQLQLQKQVQTQTYPQVHTQAQPSVQPQEHPPAQVSVQPPEQTHEQPHTQPQVSLLAPEQTPVVVHVCGLEMPPDAVEAGGGMEKTLPEPVGTQVSMEEIQNESACGLDVGECENRAREMPGVWGAGGSLKVTILQSSDSRAFSTVPLTPVPRPSDSVSSTPAATSTPSKQALQFFCYICKASCSSQQEFQDHMSEPQHQQRLGEIQHMSQACLLSLLPVPRDVLETEDEEPPPRRWCNTCQLYYMGDLIQHRRTQDHKIAKQSLRPFCTVCNRYFKTPRKFVEHVKSQGHKDKAKELKSLEKEIAGQDEDHFITVDAVGCFEGDEEEEEDDEDEEEIEVEEELCKQVRSRDISREEWKGSETYSPNTAYGVDFLVPVMGYICRICHKFYHSNSGAQLSHCKSLGHFENLQKYKAAKNPSPTTRPVSRRCAINARNALTALFTSSGRPPSQPNTQDKTPSKVTARPSQPPLPRRSTRLKT

SEQ ID NO: 271320 - protein, 837 aa, Artificial Sequence
  derived and/or modified sequence
MFSQQQQQQLQQQQQAPLPMAVSRGLPPQQPQQPLLNLQGTNSASLLNGSMLQRALLLQQLQGLDQFAMPPATYDTAGLTMPTATLGNLRGYGMASPGLAAPSLTPPQLATPNLQQFFPQATRQSLLGPPPVGVPMNPSQFNLSGRNPQKQARTSSSTTPNRKDSSSQTMPVEDKSDPPEGSEEAAEPRMDTPEDQDLPPCPEDIAKEKRTPAPEPEPCEASELPAKRLRSSEEPTEKEPPGQLQVKAQPQARMTVPKQTQTPDLLPEALEAQVLPRFQPRVLQVQAQVQSQTQPRIPSTDTQVQPKLQKQAQTQTSPEHLVLQQKQVQPQLQQEAEPQKQVQPQVQPQAHSQGPRQVQLQQEAEPLKQVQPQVHTQAQPSVQPQEHPPAQVSVQPPEQTHEQPHTQPQVSLLAPEQTPVVVHVCGLEMPPDAVEAGGGMEKTLPEPVGTQVSMEEIQNESACGLDVGECENRAREMPGVWGAGGSLKVTILQSSDSRAFSTVPLTPVPRPSDSVSSTPAATSTPSKQALQFFCYICKASCSSQQEFQDHMSEPQHQQRLGEIQHMSQACLLSLLPVPRDVLETEDEEPPPRRWCNTCQLYYMGDLIQHRRTQDHKIAKQSLRPFCTVCNRYFKTPRKFVEHVKSQGHKDKAKELKSLEKEIAGQDEDHFITVDAVGCFEGDEEEEEDDEDEEEIEVEEELCKQVRSRDISREEWKGSETYSPNTAYGVDFLVPVMGYICRICHKFYHSNSGAQLSHCKSLGHFENLQKYKAAKNPSPTTRPVSRRCAINARNALTALFTSSGRPPSQPNTQDKTPSKVTARPSQPPLPRRSTRLKT

SEQ ID NO: 271321 - protein, 797 aa, Artificial Sequence
  derived and/or modified sequence
MPPATYDTAGLTMPTATLGNLRGYGMASPGLAAPSLTPPQLATPNLQQFFPQATRQSLLGPPPVGVPMNPSQFNLSGRNPQKQARTSSSTTPNRKDSSSQTMPVEDKSDPPEGSEEAAEPRMDTPEDQDLPPCPEDIAKEKRTPAPEPEPCEASELPAKRLRSSEEPTEKEPPGQLQVKAQPQARMTVPKQTQTPDLLPEALEAQVLPRFQPRVLQVQAQVQSQTQPRIPSTDTQVQPKLQKQAQTQTSPEHLVLQQKQVQPQLQQEAEPQKQVQPQVQPQAHSQGPRQVQLQQEAEPLKQVQPQVQPQAHSQPPRQVQLQLQKQVQTQTYPQVHTQAQPSVQPQEHPPAQVSVQPPEQTHEQPHTQPQVSLLAPEQTPVVVHVCGLEMPPDAVEAGGGMEKTLPEPVGTQVSMEEIQNESACGLDVGECENRAREMPGVWGAGGSLKVTILQSSDSRAFSTVPLTPVPRPSDSVSSTPAATSTPSKQALQFFCYICKASCSSQQEFQDHMSEPQHQQRLGEIQHMSQACLLSLLPVPRDVLETEDEEPPPRRWCNTCQLYYMGDLIQHRRTQDHKIAKQSLRPFCTVCNRYFKTPRKFVEHVKSQGHKDKAKELKSLEKEIAGQDEDHFITVDAVGCFEGDEEEEEDDEDEEEIEVEEELCKQVRSRDISREEWKGSETYSPNTAYGVDFLVPVMGYICRICHKFYHSNSGAQLSHCKSLGHFENLQKYKAAKNPSPTTRPVSRRCAINARNALTALFTSSGRPPSQPNTQDKTPSKVTARPSQPPLPRRSTRLKT

SEQ ID NO: 271322 - DNA, 3032 bp, Artificial Sequence
  derived and/or modified sequence
aacacgattcctctggccaggccaaggggagggcgacactgacaggcgccccccacccaggggccgtggcgaagcaaggggccggctgctcagaaaaggataagaagtggtttctcctcccctcttcccttcctcatcctgcagcccgcgcctcccccctcgccgcgctgcgcacggatggcggcgggagccgcagagccaccatgttcagccagcagcagcagcagcagctccagcaacagcagcagcagctccagcagttacagcagcagcagctccagcagcagcaattgcagcagcagcagttactgcagctccagcagctgctccagcagtccccaccacaggccccgttgcccatggctgtcagccgggggctccccccgcagcagccacagcagccgcttctgaatctccagggcaccaactcagcctccctcctcaacggctccatgctgcagagagctttgcttttacagcagttgcaaggactggaccagtttgcaatgccaccagccacgtatgacactgccggtctcaccatgcccacagcaacactgggtaacctccgaggctatggcatggcatccccaggcctcgcagcccccagcctcacacccccacaactggccactccaaatttgcaacagttctttccccaggccactcgccagtccttgctgggacctcctcctgttggggtccccatgaacccttcccagttcaacctttcaggacggaacccccagaaacaggcccggacctcctcctctaccacccccaatcgaaaggattcttcttctcagacaatgcctgtggaagacaagtcagaccccccagaggggtctgaggaagccgcagagccccggatggacacaccagaagaccaagatttaccgccctgcccagaggacatcgccaaggaaaaacgcactccagcacctgagcctgagccttgtgaggcgtccgagctgccagcaaagagattgaggagctcagaagagcccacagagaaggaacctccagggcagttacaggtgaaggcccagccgcaggcccggatgacagtaccgaaacagacacagacaccagacctgctgcctgaggccctggaagcccaagtgctgccacgattccagccacgggtcctgcaggtccaggcccaggtgcagtcacagactcagccgcggataccatccacagacacccaggtgcagccaaagctgcagaagcaggcgcaaacacagacctctccagagcacttagtgctgcaacagaagcaggtgcagccacagctgcagcaggaggcagagccacagaagcaggtgcagccacaggtacagccacaggcacattcacagggcccaaggcaggtgcagctgcagcaggaggcagagccgctgaagcaggtgcagccacaggtgcagccccaggcacattcacagcccccaaggcaggtgcagctgcagctgcagaagcaggtccagacacagacatatccacaggtccacacacaggcacagccaagcgtccagccacaggagcatcctccagcgcaggtgtcagtacagccaccagagcagacccatgagcagcctcacacccagccgcaggtgtcgttgctggctccagagcaaacaccagttgtggttcatgtctgcgggctggagatgccacctgatgcagtagaagctggtggaggcatggaaaagaccttgccagagcctgtgggcacccaagtcagcatggaagagattcagaatgagtcggcctgtggcctagatgtgggagaatgtgaaaacagagcgagagagatgccaggggtatggggcgccgggggctccctgaaggtcaccattctgcagagcagtgacagccgggcctttagcactgtacccctgacacctgtcccccgccccagtgactccgtctcctccacccctgcggctaccagcactccctctaagcaggccctccagttcttctgctacatctgcaaggccagctgctccagccagcaggagttccaggaccacatgtcggagcctcagcaccagcagcggctaggggagatccagcacatgagccaagcctgcctcctgtccctgctgcccgtgccccgggacgtcctggagacagaggatgaggagcctccaccaaggcgctggtgcaacacctgccagctctactacatgggggacctgatccaacaccgcaggacacaggaccacaagattgccaaacaatccttgcgacccttctgcaccgtttgcaaccgctacttcaaaacccctcgcaagtttgtggagcacgtgaagtcccaggggcataaggacaaagccaaggagctgaagtcgcttgagaaagaaattgctggccaagatgaggaccacttcattacagtggacgctgtgggttgcttcgagggtgatgaagaagaggaagaggatgatgaggatgaagaagagatcgaggttgaggaggaactctgcaagcaggtgaggtccagagatatatccagagaggagtggaagggctcggagacctacagccccaatactgcatatggtgtggacttcctggtgcccgtgatgggctatatctgccgcatctgccacaagttctatcacagcaactcaggggcacagctctcccactgcaagtccctgggccactttgagaacctgcagaaatacaaggcggccaagaaccccagccccaccacccgacctgtgagccgccggtgcgcaatcaacgcccggaacgctttgacagccctgttcacctccagcggccgcccaccctcccagcccaacacccaggacaaaacacccagcaaggtgacggctcgaccctcccagcccccactacctcggcgctcaacccgcctcaaaacctgatagagggacctccctgtccctggcctgcctgggtccagatctgctaatgctttttaggagtctgcctggaaactttgacatggttcatgtttttactcaaaatccaataaaacaaggtagtttggctgtgca

SEQ ID NO: 271323 - DNA, 2613 bp, Artificial Sequence
  derived and/or modified sequence
atgtttagccaacagcaacagcaacagctgcagcagcaacagcagcagctccagcagctgcaacaacaacagcttcagcagcagcaactgcagcagcaacaactgctgcagttgcaacagttgctgcagcagtctccaccacaggcgccactcccaatggccgtctctcggggtctgcctccccaacaaccacagcagccattgctgaacctgcaagggactaattctgcttccctcttgaacggaagcatgcttcagagggctctcttactccagcaattgcagggactcgaccagtttgccatgccacccgccacctacgacaccgccggtctgactatgccgacggccactctggggaacctgaggggctacgggatggcgtcccctggtctcgccgctccttccctgacacctccccagctcgccaccccaaacctgcagcagttcttccctcaggctacgcgccagtcattgttgggacctccacctgtcggggtgcctatgaacccctcccaattcaacttgtccggaaggaaccctcagaagcaggcacgcaccagctcctctacaacccctaatagaaaagactcttcgtcgcaaactatgcctgtggaggataaaagtgatccgcccgagggcagtgaggaagccgctgagccgcgaatggatacaccagaagaccaggatttgcccccttgtcctgaagacatagccaaggagaagagaaccccagccccagaacccgagccatgtgaggcctcagaacttcctgctaaacgcctacgaagttcagaggaacctaccgagaaggagcccccaggccagctgcaggttaaggcgcagccgcaggctcgcatgacggtgcccaagcagacccagactcctgacctgctccccgaagctctggaagcccaggtcctccccagattccaacccagggtgctgcaggtgcaagcgcaggtgcagtctcaaacacagcctcgtatcccttctacagatactcaggtacagccgaagcttcagaaacaggctcaaacgcagacaagccctgaacacctggtgctgcagcagaagcaggtccagccccagctccaacaagaggcggagccacagaagcaagtgcagccccaggtgcagcctcaggcccatagccagggccctagacaagtgcaactgcaacaggaagccgagccgctcaagcaggtgcagccacaggtgcatacgcaggcacagccctctgtgcaaccccaggagcaccctcccgctcaagtctccgtgcagccacccgagcagacccatgagcagccccacacgcagcctcaagtgtctcttttggcaccagaacagacacctgtggtagtacatgtgtgcggactcgagatgccccccgatgccgtcgaggctggcgggggtatggaaaagaccctccctgaaccagtcggcactcaggtgtcaatggaagagattcagaatgaaagcgcttgtggcttagacgtcggcgaatgtgagaatagggcaagggagatgcctggtgtctggggggctggcgggtctcttaaagtgactattctccagtcttcagactcacgtgccttctctacagtgccactgaccccagttccacggcccagcgactccgtatcatcaactccagctgcgacatcaaccccttccaagcaggctctacagtttttttgttacatctgtaaagcttcatgtagctcccagcaggagttccaggaccatatgtccgaacctcaacaccagcagcgccttggtgagatccagcatatgagccaggcttgcctactgtcactcctcccagtgccacgagacgtactagagaccgaggatgaggaacccccccccaggaggtggtgtaacacctgccagctttactatatgggcgatcttattcaacatcgccgcacacaggaccacaaaattgctaaacagtctctgaggcccttttgtacagtgtgcaaccggtactttaaaacaccccgaaagttcgtggagcacgtcaaatcccaggggcataaggacaaagccaaggaactaaagagcctagagaaagagatcgcaggccaagatgaagatcatttcataaccgtggatgcagtcgggtgtttcgagggggatgaagaagaagaggaggacgacgaggacgaggaggagatcgaagttgaagaggagctgtgtaagcaagttcggtccagagatatctctcgcgaggagtggaagggaagcgaaacttactctcctaacaccgcttacggagttgacttcctcgtcccggtgatgggatatatctgcaggatctgtcacaaattctatcactcgaattcgggcgcccagctgagtcattgcaagagtttaggtcactttgaaaatctacaaaagtacaaagcagccaagaacccgagtcctaccactagacctgtgtcccgacggtgcgcgatcaatgcgcgcaatgctctcacagccttgttcaccagtagcggtcggcctcccagccaacctaacacccaggataagacgccaagcaaggtcaccgcaagaccctcacagcccccactgccccgacgatccactcgcctgaaaacgtag

SEQ ID NO: 271324 - DNA, 2613 bp, Artificial Sequence
  derived and/or modified sequence
atgttctcccaacagcagcagcaacaacttcaacagcagcagcagcagttacagcaattgcagcagcaacagttgcagcagcagcaacttcagcaacagcagctgcttcagctgcagcagctcctccagcagagcccccctcaggcgcccctaccaatggcagtatcccgaggcctcccaccccaacaacctcaacaacctcttttgaacctgcaaggcacgaattccgccagtctgctcaacggctctatgcttcagagagcactcctgcttcaacagttacagggcctggatcagtttgccatgcccccagcaacctacgatacggcaggcttgacaatgcccacagccacgctcggaaatctgagagggtacggtatggcaagccctgggctggccgccccctctctcaccccgcctcagctggccacacctaatctgcagcaattctttcctcaggccacacgccaaagccttctggggcccccccccgtgggcgtgcccatgaatccatcacaattcaacctttcaggacggaatccacagaagcaggcccggactagtagctctacaaccccgaatcgcaaggactcgtccagtcagacaatgcctgtagaggacaaaagcgaccccccggaagggagcgaggaggcagcagaaccgcgcatggatacccctgaagatcaagacctccccccttgcccagaggatatcgcaaaggagaaacggacacctgcccccgagcccgagccctgtgaggcctcagagctccccgctaagcgcctgcggtcatcagaggaacctacagagaaggagccccctggacagctacaggtcaaggcccagccgcaggccagaatgacagtgcccaaacagactcagacacctgatcttctccccgaggcgctggaagcgcaagtactccccaggttccagcctagggtcctgcaggtgcaggcccaggtccagagtcagacgcagcctcgcataccatccacggatacacaggtacagcccaaactgcagaagcaggcccagacacaaacatcacccgagcatttggtgctgcagcagaaacaggtgcaaccgcagctgcagcaggaagctgaaccccagaagcaggtgcagccccaagtgcagccacaagcacactctcagggccccagacaagtgcagctgcagcaggaagcagagcccctcaaacaggtgcagccccaggtgcatacccaagcccagccaagcgtacagccacaggaacacccccccgcccaggtgagtgtgcagccccctgaacagacccacgagcagcctcacacccagcctcaagtgagtcttctggctcccgaacagacccccgtggtggtgcacgtttgtgggctagagatgccgccagatgccgtggaagcgggaggcgggatggagaagaccctgccagagcccgtgggtactcaagtatcaatggaagaaatccagaacgaaagcgcgtgtggactggatgtcggcgagtgtgaaaatcgagctcgcgagatgcccggggtctggggtgccggcgggtctttgaaggtcaccatactgcaatcttcggactctcgtgccttttccaccgtgcctctaacacccgtgcctcgcccgtctgactcggtaagcagcaccccggcggcaacatctactccatccaaacaagctttacagtttttttgttacatttgtaaggcttcttgttccagccagcaggagttccaggatcacatgtccgaaccccagcaccagcagcggctcggggaaatccagcatatgagccaggcttgtttgctgagtctactgccggttcccagggatgtcctggagacagaagacgaggaacctcccccaaggcgctggtgcaatacatgccagttgtattacatgggtgatctgattcagcatcgaagaacccaggatcataaaatagccaagcagtctctgagaccattctgcacggtctgcaaccgctactttaaaactcccagaaaattcgtggagcacgtgaagagccaggggcataaggataaagctaaagagctcaagtctcttgaaaaagagatcgccgggcaggacgaagaccatttcatcactgtggatgccgttgggtgcttcgagggcgacgaggaagaggaagaggacgacgaggacgaggaagaaattgaggttgaagaggagctgtgtaaacaggttcgctcacgagatatcagtcgcgaggaatggaagggtagtgagacatactctccaaacaccgcatacggcgtagactttctggttccagtcatggggtatatatgtcgtatctgccacaaattctaccactcaaattctggggctcagctctcgcattgtaagtctctgggacacttcgagaatctgcaaaaatacaaagctgcgaagaacccttctcctaccacgcgccctgtgtcccggcgctgtgccattaacgccaggaacgcgctcaccgctctgtttacctccagcgggcgacctccatctcagcccaatacccaggataaaactcctagcaaagtaacagctagaccttcacagccgcctttaccccggcgatccacacgcctcaaaacctag

SEQ ID NO: 271325 - DNA, 2697 bp, Artificial Sequence
  derived and/or modified sequence
atgttcagccagcaacagcagcagcagctccagcagcaacaacagcagctccagcaactgcaacagcagcaactccaacaacagcagttgcagcaacaacagcttttgcaattgcagcagctcctgcagcagagcccacctcaggcaccgctccccatggcagtctcaagaggcctcccaccacagcagccccagcagccactgctcaacctgcaggggaccaactccgcatcgctattgaatgggtctatgctgcagcgcgctctactgctgcagcagcttcagggattagatcagttcgccatgcccccagccacatacgacaccgccgggcttaccatgcccaccgcaacactcggtaaccttcgcggctatggcatggccagtcccggcctggcggctcccagccttacgcccccccagctggccacccccaatctgcagcagttttttccgcaagccactcgccaatcactactggggcctcctcctgtcggcgtccctatgaacccgagtcagtttaacctctccgggagaaacccacagaaacaagcccgcacatcatccagcacaacccctaatcgcaaggattcttccagtcagactatgcctgtggaggacaagtcagatccccccgaggggtccgaggaggctgcagaaccaaggatggacacccctgaagaccaggacttgccaccatgtcccgaggatatcgctaaggagaaaaggacacccgcccctgagcccgagccctgcgaagcaagcgagctgcctgccaagcgcctgagatcctcagaggaaccaacagagaaagaaccacctggacagttgcaagttaaagcccagccacaggctagaatgaccgtgccgaaacagactcagacccccgacttgcttccagaagccctcgaggcacaggtgctgcctcgtttccagcctcgagtcctgcaagtgcaggcccaggtgcaatcacagactcaaccacgcatcccgagtaccgacactcaagtgcagcccaagctccagaaacaggctcagacccagacctctcctgagcatctagttttacaacagaaacaggtgcagcctcagcttcagcaggaagcagagccacagaagcaagtccagccacaggtgcagccccaagcacattctcaggggccccgacaggtccagctgcagcaggaggcagagcccctgaagcaagtgcagccccaagtacaaccacaagcacattcccagccaccaaggcaagtgcaactccaactccagaagcaggtccagactcagacttatccccaggtgcacactcaggctcagccttctgtgcagcctcaggaacacccccctgcccaggtgagcgtccagccccccgaacagacacatgaacagccccatactcagcctcaagtatccttgctcgcacccgaacagactcccgtggtggtgcacgtgtgcggcctagaaatgccgcccgacgccgttgaggccggcgggggaatggaaaagactttgcctgagcctgtggggactcaggtgtctatggaagaaattcaaaatgagtctgcatgcggattagacgtcggagaatgtgagaatcgggcacgtgaaatgccgggtgtgtggggcgccggagggagtctgaaggtaacaattctccagtcatctgactctcgtgccttttctaccgtgccattgacaccagtcccccgtcctagcgattccgtatcatcaactcctgcagccactagcacaccgagcaagcaggctcttcaattcttctgttacatctgcaaagcttcatgctcttcccagcaggagtttcaagatcacatgtctgagccacaacatcaacagcggttgggcgagatacagcacatgtcacaggcttgtctgctttctctcctccccgttccacgcgacgtgttggaaaccgaggacgaggagcctccacctcggcgctggtgtaatacatgccaactttactatatgggggacctgatccaacaccgtaggactcaggaccacaagatagcaaaacagtcccttcggccattctgtaccgtgtgtaataggtactttaaaacacccagaaaattcgttgagcatgtaaagtcccaaggacacaaggataaggccaaggagctcaaaagtctggagaaggaaatcgccggtcaggacgaggaccactttatcacagtagatgcggtcggatgctttgagggagatgaagaagaggaggaggacgatgaagacgaggaggagatcgaagtggaggaggagctttgtaaacaggtacggtctagagatataagtagagaggaatggaaaggatccgaaacttattcaccaaataccgcctacggagtggactttcttgtccccgtaatggggtacatttgtcggatctgccacaaattctatcactccaactctggggcgcaactctctcactgcaaatcccttgggcacttcgaaaacttacagaaatacaaggctgctaagaatccgtctccgactacccgacctgtatcacgacgatgcgctattaatgccagaaatgccctaacggccttgtttactagtagtggcagacctccttctcagccaaacacccaggacaaaactcctagcaaggtgactgcgcgaccttctcaaccacctctgcctcgccgtagcacaaggcttaaaacatag

SEQ ID NO: 271326 - DNA, 2697 bp, Artificial Sequence
  derived and/or modified sequence
atgttttctcagcagcagcagcagcagctgcagcagcagcaacaacagcttcagcagctccaacagcaacaactgcagcaacaacagctgcagcagcagcaactgctacagctgcagcagctgctgcagcagagtccccctcaggcgcctttaccaatggctgtctccagaggtttacctccacagcagccgcagcagccgctgcttaacctgcagggcacaaattctgctagcctgctcaatgggagtatgttacagcgcgctctcttgcttcaacagctgcaaggtctggaccaattcgcaatgcccccagccacttacgacacagcaggacttaccatgccaacggctacactaggcaatctgcgcggatacgggatggcttcccctggattagcagctccttctctgacacctccgcagctggcaactcctaacttgcagcagttctttccgcaggccacccggcaatctttattgggtcccccccccgttggagtgccgatgaacccatctcaatttaatttatctggccgcaacccacagaaacaggctaggaccagttcttctaccaccccgaatcgaaaggactcaagctcccagacaatgcctgtggaggacaagagcgacccccctgaagggtctgaagaagcagccgaaccaagaatggatacccctgaagaccaggacctgccaccttgtcctgaagacatcgccaaagagaagaggactccagcccccgagcccgaaccctgcgaagcctcagaactgcccgcaaaacgactcaggtcctctgaagaacccacagagaaggagccacccgggcaattgcaggtgaaggcccagcctcaggcaagaatgactgtgcctaaacaaactcagacccctgacctgctccctgaagcccttgaggcgcaggtgttgcctagatttcagccaagagttctgcaggtgcaggcacaggtccagtcccagactcagccaaggattccgagcaccgatactcaagtacaacctaagctccagaagcaggcacaaactcagacaagcccagagcacttagtgttgcagcagaaacaggtgcagccccagttacaacaggaagcagaaccgcagaaacaggtgcagcctcaggtgcagccccaggcccatagtcaaggcccccggcaagtccaactgcaacaagaggccgaacctcttaaacaggtccagccccaggtgcagccacaggcccactctcagccgccgagacaagtgcagttgcagttacagaagcaggtccaaacccagacatacccccaggtccacacacaagcacagcccagtgtccagccccaggaacaccctccggcacaggtcagcgttcagcctccggaacaaacccacgagcaaccacatactcaacctcaggtctctctgctggcccctgagcaaacacctgtggttgtgcacgtttgtggcctggagatgccgcctgatgcggtagaagccggaggtggtatggagaagactctcccagaacccgttgggactcaggtgagcatggaagagatccagaatgagtctgcatgcgggctggatgtgggagaatgtgagaatagggcacgggagatgcctggcgtgtggggcgctggcggtagcctcaaggttaccattctccaaagctcagactcaagagccttttctaccgtcccccttactcccgtaccacggcccagcgatagtgtgtcttcaacgccagccgcaacctcaactccatcaaagcaggccctgcagtttttttgctatatctgtaaagctagttgttcatctcagcaagagttccaggatcacatgagcgaaccccagcaccagcagaggctgggcgagatccagcacatgagccaggcttgtcttctatcattgcttccggtgccaagagacgtgttggagacggaagacgaggagccccctccgagaagatggtgcaatacatgtcagttgtactacatgggcgatttaattcagcatcgacgaacccaggatcataagatcgcaaaacagagcttgagacccttttgtacagtctgcaaccgttactttaagacacctagaaagttcgtggagcacgtaaagagtcagggccataaggacaaggcaaaggagctcaagagtctggagaaagagatcgcggggcaggatgaagaccactttattaccgtggacgcagtgggctgctttgaaggtgatgaggaagaggaagaagacgatgaggacgaggaggagatcgaggtcgaggaggagttgtgtaagcaagtcagatccagagacatcagcagagaggagtggaaaggctcagagacttacagtcctaacacagcctatggtgtggactttctggtccccgtcatggggtacatctgtcgcatttgccataaattctaccacagcaattccggcgcacaacttagtcactgcaagtcactgggccactttgagaacctgcagaagtataaagcagccaaaaacccatcacctacaacccggcctgtgtcacgtaggtgcgctattaatgctcggaatgctctgactgcactgtttacttcttcgggtcgtccccccagtcagcccaatacccaggataaaacaccttccaaagttactgcccggcctagccaaccccccctgcctcgtcgcagcacccgcctcaaaacctag

SEQ ID NO: 271327 - DNA, 2514 bp, Artificial Sequence
  derived and/or modified sequence
atgttttctcagcagcagcagcaacagctccaacagcagcagcaagcacctctgcccatggccgtctcaaggggactccccccgcagcagccccagcaacctctgctgaatctccagggaacaaattccgcctctttgttgaacggcagcatgctccaaagggctttgctgttgcagcagctgcagggactcgaccagtttgccatgccccccgcaacatacgatacagccggtttaactatgccaacagctactctgggaaatctccgaggatacggcatggcctccccaggcctggctgctccgagtctgactcctccgcagctcgccacaccaaatctacagcaattcttccctcaggccactcggcagtctctcctcggccccccacccgtcggagtgcccatgaacccctctcagtttaacttgagtggcagaaatccccagaagcaagcccgaactagttcaagcacaacccccaacagaaaagatagcagcagtcagaccatgcccgtggaagataagtcagacccacccgagggctctgaggaggccgcagaaccacggatggatacccccgaggaccaagatcttcccccatgtcctgaggatatcgccaaggaaaaaaggacacctgcccctgagcctgagccttgtgaagcctcagaattacccgccaagagattacgctcgtccgaagaaccgactgaaaaagaaccacctggccagctacaggtgaaagcccaaccacaggccagaatgacagtgcctaaacaaacccagacccccgacttgttgccagaagcccttgaggctcaggtgctgccgcggtttcagccacgagtgctgcaagtccaggctcaggtccaaagtcagactcagcctagaattccctcaacggacacccaagtgcagccaaaacttcaaaagcaggcccagacacagaccagcccagagcatcttgtgctgcagcagaagcaagtacagccccaactgcagcaagaagccgaaccgcagaaacaggtgcagcctcaggtgcagcctcaggcgcacagccaggggccccgccaggttcagctgcagcaggaggctgaaccactgaaacaggtgcagccacaggtgcacactcaagctcagccctccgtccagccacaagaacatccacctgcccaggtgtcagttcagcctcccgagcagacccacgaacagccgcatacccaaccgcaggtgtccctcttggcccctgaacagacacccgtggtggttcatgtttgcgggctggagatgccacccgacgctgtcgaggccgggggtggtatggagaagaccctgccggaacccgtcggcacacaggtaagcatggaggagattcagaacgaatctgcatgtggcttggatgtgggtgagtgtgagaatcgcgccagagagatgcctggcgtatggggcgctggaggctccttgaaagtgacaattctgcaaagctccgatagtcgggcattcagcactgtgccgctgacacccgtgccccggccaagcgattccgtcagcagtaccccagccgctactagcaccccgtcgaaacaggccctgcagttcttttgttacatctgtaaagccagttgttccagccaacaggagtttcaggatcacatgagcgaacctcagcatcaacagcgtctgggcgaaatccaacatatgagtcaggcctgcctgctgtctctgctgccggtgcctagggatgtcctagaaacagaggacgaagagcctcctccccgcagatggtgcaatacatgccagttatattacatgggggacctcattcaacataggcgcacacaagaccacaagatagccaagcagagcctcaggcctttttgcacagtctgcaaccgctacttcaagaccccaaggaagttcgtggagcatgtcaaaagccagggccacaaggacaaggctaaggaactgaaaagcctcgagaaggagattgctggtcaggatgaggaccacttcatcaccgtggacgccgtgggttgctttgagggagacgaggaggaggaggaggacgacgaagatgaagaggagatcgaggttgaagaggagctgtgtaagcaggtccgctccagagacatcagcagggaagagtggaagggctctgaaacatactcacctaatacagcttacggggtggatttcctggtgccggttatggggtacatttgccgcatctgccacaaattttatcactcaaattccggggcacagctttctcactgtaaatctctgggccattttgagaatcttcagaagtacaaggccgcgaaaaatccctctccaactacaagacccgtttctcgcagatgtgccatcaatgcaaggaacgcgttgaccgccctgtttacctcttctgggcggccgccttcccaacctaacacccaagataagacaccaagcaaagttactgcccgtcccagccaaccgcctcttccaaggcgctctaccagactaaagacctag

SEQ ID NO: 271328 - DNA, 2394 bp, Artificial Sequence
  derived and/or modified sequence
atgcctcccgctacttacgatacagctggactaactatgccgacagccacccttggaaacttaagaggctatggcatggcaagccctgggttggcggctccaagcctcacccctcctcagttggctactcctaacctgcaacaattcttcccccaggccaccaggcaaagcctgcttggacctccgcctgttggtgtgccaatgaatccatctcaattcaatttatccggcagaaaccctcaaaagcaggcaagaacatcttccagcacgactccaaaccgtaaagactcttcctctcaaaccatgccagtggaagataagagtgatccccccgaaggcagcgaggaggccgcggagcctcgcatggacactcctgaggaccaggatctgccgccttgccctgaggacattgctaaagagaaacgcacaccagctcctgagccggagccatgtgaagcctccgaactacccgccaagagactgcgatcatctgaggagcccactgaaaaggagcccccaggccagcttcaggtgaaggcacagcctcaggctcggatgacggtgcccaagcagacccaaactcccgacctcctccccgaggccctcgaggcccaggttttacctcgcttccaaccccgggtcctccaggtgcaggctcaggtacagtctcagacccagccaaggataccaagcacggatactcaagtgcagcccaagttgcagaaacaggcgcagacgcagacatcacccgagcatttggtgctgcaacagaagcaggttcagccgcaattgcagcaggaagccgagccacaaaagcaggttcagccccaagtgcagccccaagcacactcccaaggacccaggcaggtgcagctgcagcaagaggcggagccccttaaacaagtccaacctcaggttcagccacaggcccactcacagccgcctcgtcaagtgcagttgcagcttcagaagcaggtccagacacagacctaccctcaggttcatacccaagcccagccaagcgttcagccccaggaacaccctcctgcgcaggtgagtgtgcagcctcccgagcagacgcatgaacagccccatacacagcctcaggtgtcactgctggcccccgagcagacacctgttgtggtccatgtctgtggtctggagatgcccccagacgcagttgaagcggggggtggcatggagaagaccctaccagagcccgttggaactcaagtgtccatggaagaaattcaaaacgagtccgcttgcggcctggacgtcggggagtgcgagaatcgcgctagggaaatgccaggtgtgtggggtgccggcggctctctgaaagtaaccattttgcaaagcagtgacagtagggcattcagcaccgtcccccttacacccgtgcctaggccaagcgacagcgtgagttccactcctgcagcaactagcaccccgtctaaacaggcgttgcagttcttctgctacatctgcaaagctagctgtagttcacagcaggaattccaagatcacatgtcagagccgcagcaccagcagcggctgggcgagatacagcatatgagccaggcctgcctcctgagcctgctgcccgtgccacgcgacgtgctggagactgaggatgaggaaccaccaccgcggcggtggtgcaacacatgccagctgtattacatgggtgatctgatccagcatcgccgaacacaggatcataagatagccaaacagtccttgagacctttctgcacagtttgcaaccgctacttcaagactcccagaaaatttgtggagcacgtaaaaagccaggggcataaggataaggccaaggaactgaaaagcctggaaaaagagattgctggccaggatgaagaccactttattacagttgatgctgtaggatgctttgagggcgatgaggaggaagaggaggacgatgaagatgaggaagaaatagaggttgaggaagagctttgtaagcaggtacgatccagggatatttcccgagaggagtggaagggatccgaaacctatagcccgaacactgcttacggcgtagattttttggtgccggtgatgggatacatctgtcggatctgtcacaagttttaccattcgaatagtggtgcccagttgagtcattgcaagtctttaggccacttcgagaaccttcaaaagtataaggctgccaaaaacccctcaccaaccacccgccctgtgtcccggcggtgcgcaataaatgctcgtaatgcactcactgctctgtttacctcaagtggccgacctcctagtcagccaaatacccaggataaaactccgtctaaggtgacggcccggccgtctcaacctcccttgcctaggcggtctaccagactaaagacctag

SEQ ID NO: 271329 - DNA, 2613 bp, Artificial Sequence
  derived and/or modified sequence
atgttcagccagcagcagcagcagcagctgcagcagcagcagcagcagctgcagcagctgcagcagcagcagctgcagcagcagcagctgcagcagcagcagctgctgcagctgcagcagctgctgcagcagagccccccccaggcccccctgcccatggctgtgtcccggggcctgcccccccagcagccccagcagcccctgctgaacctgcagggcaccaacagcgccagcctgctgaatggctccatgctgcagagggccctgctgctgcagcagctgcagggcctggaccagtttgccatgcccccagccacctatgacacagctggcctgaccatgcccacagccaccctgggcaacctgcggggctacggcatggccagccctggcctggccgcccccagcctgaccccaccccagctggccacccccaacctgcagcagttcttcccccaggccacccggcagagcctgctgggccccccacctgtgggcgtgcccatgaaccccagccagttcaacctgtctggaagaaacccccagaagcaggcccggaccagcagcagcaccacccccaacaggaaggacagcagcagccagaccatgcctgtggaggacaagagtgaccccccagagggcagcgaggaggccgctgagcccaggatggacaccccagaggaccaggacctgcccccctgcccagaggacatcgccaaggagaagaggaccccagcccctgagcctgagccctgtgaggccagcgagctgcctgccaagaggctgcggagcagcgaggagcccacagagaaggagcccccaggccagctgcaggtgaaggcccagccccaggccaggatgacagtgcccaagcagacccagaccccagacctgctgcctgaggccctggaggcccaggtgctgccccgcttccagccccgggtgctgcaggtgcaggcccaggtgcagagccagacccagccccgcatccccagcacagacacccaggtgcagcccaagctgcagaagcaggcccagacccagaccagccctgagcacctggtgctgcagcagaagcaggtgcagccccagctgcagcaggaggccgagccccagaagcaggtgcagccccaggtgcagccccaggcccacagccagggcccccggcaggtgcagctgcagcaggaggccgagcccctgaagcaggtgcagccccaggtgcacacccaggcccagcccagcgtgcagccccaggagcaccccccagcccaggtgtctgtgcagcccccagagcagacccatgagcagccccacacccagccccaggtgtccctgctggcccctgagcagacccctgtggtggtgcacgtgtgtggcctggagatgcccccagatgctgtggaggccggcggcggcatggagaagaccctgcctgagcctgtgggcacccaggtgtccatggaggagatccagaatgaaagtgcctgtggcctggatgtgggggagtgtgagaacagagcccgggagatgcctggggtgtggggcgctgggggcagcctgaaggtgaccatcctgcagagcagtgacagccgggccttcagcacagtgcccctgacccctgtgccccggcccagcgacagcgtgagcagcaccccagctgccaccagcacccccagcaagcaggccctgcagttcttctgctacatctgcaaggccagctgcagcagccagcaggagttccaggaccacatgtctgagccccagcaccagcagaggctgggggagatccagcacatgagccaggcctgcctgctgagcctgctgcctgtgcccagagatgtgctggagacagaagatgaggagcccccaccccggcgctggtgcaacacctgccagctgtactacatgggagacctgatccagcacaggaggacccaggaccacaagatcgccaagcagagcctgcggcccttctgcaccgtgtgcaaccgctacttcaagacccccaggaagtttgtggagcacgtgaagagccagggccacaaggacaaggccaaggagctgaagagcctggagaaggagattgctggccaggatgaggaccacttcatcaccgtggatgctgtgggctgctttgaaggagatgaggaggaggaggaggatgatgaagatgaggaggagattgaggtggaggaggagctgtgcaagcaggtgcgcagccgggacatcagccgggaggagtggaagggcagcgagacctacagccccaacacagcctacggcgtggacttcctggtgcctgtgatgggctacatctgccgcatctgccacaagttctaccacagcaacagcggggcccagctgagccactgcaagagcctgggccactttgagaacctgcagaagtacaaggccgccaagaaccccagccccaccaccaggcctgtgagccgccgctgtgccatcaatgccagaaatgccctgacagccctcttcaccagcagcggccggccccccagccagcccaacacccaggacaagacccccagcaaggtgacagcccggcccagccagccccccctgcccaggaggagcacccggctgaagacctag

SEQ ID NO: 271330 - DNA, 2697 bp, Artificial Sequence
  derived and/or modified sequence
atgttcagccagcagcagcagcagcagctgcagcagcagcagcagcagctgcagcagctgcagcagcagcagctgcagcagcagcagctgcagcagcagcagctgctgcagctgcagcagctgctgcagcagagccccccccaggcccccctgcccatggctgtgtcccggggcctgcccccccagcagccccagcagcccctgctgaacctgcagggcaccaacagcgccagcctgctgaatggctccatgctgcagagggccctgctgctgcagcagctgcagggcctggaccagtttgccatgcccccagccacctatgacacagctggcctgaccatgcccacagccaccctgggcaacctgcggggctacggcatggccagccctggcctggccgcccccagcctgaccccaccccagctggccacccccaacctgcagcagttcttcccccaggccacccggcagagcctgctgggccccccacctgtgggcgtgcccatgaaccccagccagttcaacctgtctggaagaaacccccagaagcaggcccggaccagcagcagcaccacccccaacaggaaggacagcagcagccagaccatgcctgtggaggacaagagtgaccccccagagggcagcgaggaggccgctgagcccaggatggacaccccagaggaccaggacctgcccccctgcccagaggacatcgccaaggagaagaggaccccagcccctgagcctgagccctgtgaggccagcgagctgcctgccaagaggctgcggagcagcgaggagcccacagagaaggagcccccaggccagctgcaggtgaaggcccagccccaggccaggatgacagtgcccaagcagacccagaccccagacctgctgcctgaggccctggaggcccaggtgctgccccgcttccagccccgggtgctgcaggtgcaggcccaggtgcagagccagacccagccccgcatccccagcacagacacccaggtgcagcccaagctgcagaagcaggcccagacccagaccagccctgagcacctggtgctgcagcagaagcaggtgcagccccagctgcagcaggaggccgagccccagaagcaggtgcagccccaggtgcagccccaggcccacagccagggcccccggcaggtgcagctgcagcaggaggccgagcccctgaagcaggtgcagccccaggtgcagccccaggcccacagccagcccccccggcaggtgcagctgcagctgcagaagcaggtgcagacccagacctacccccaggtgcacacccaggcccagcccagcgtgcagccccaggagcaccccccagcccaggtgtctgtgcagcccccagagcagacccatgagcagccccacacccagccccaggtgtccctgctggcccctgagcagacccctgtggtggtgcacgtgtgtggcctggagatgcccccagatgctgtggaggccggcggcggcatggagaagaccctgcctgagcctgtgggcacccaggtgtccatggaggagatccagaatgaaagtgcctgtggcctggatgtgggggagtgtgagaacagagcccgggagatgcctggggtgtggggcgctgggggcagcctgaaggtgaccatcctgcagagcagtgacagccgggccttcagcacagtgcccctgacccctgtgccccggcccagcgacagcgtgagcagcaccccagctgccaccagcacccccagcaagcaggccctgcagttcttctgctacatctgcaaggccagctgcagcagccagcaggagttccaggaccacatgtctgagccccagcaccagcagaggctgggggagatccagcacatgagccaggcctgcctgctgagcctgctgcctgtgcccagagatgtgctggagacagaagatgaggagcccccaccccggcgctggtgcaacacctgccagctgtactacatgggagacctgatccagcacaggaggacccaggaccacaagatcgccaagcagagcctgcggcccttctgcaccgtgtgcaaccgctacttcaagacccccaggaagtttgtggagcacgtgaagagccagggccacaaggacaaggccaaggagctgaagagcctggagaaggagattgctggccaggatgaggaccacttcatcaccgtggatgctgtgggctgctttgaaggagatgaggaggaggaggaggatgatgaagatgaggaggagattgaggtggaggaggagctgtgcaagcaggtgcgcagccgggacatcagccgggaggagtggaagggcagcgagacctacagccccaacacagcctacggcgtggacttcctggtgcctgtgatgggctacatctgccgcatctgccacaagttctaccacagcaacagcggggcccagctgagccactgcaagagcctgggccactttgagaacctgcagaagtacaaggccgccaagaaccccagccccaccaccaggcctgtgagccgccgctgtgccatcaatgccagaaatgccctgacagccctcttcaccagcagcggccggccccccagccagcccaacacccaggacaagacccccagcaaggtgacagcccggcccagccagccccccctgcccaggaggagcacccggctgaagacctag

SEQ ID NO: 271331 - DNA, 2514 bp, Artificial Sequence
  derived and/or modified sequence
atgttcagccagcagcagcagcagcagctgcagcagcagcagcaggcccccctgcccatggctgtgtcccggggcctgcccccccagcagccccagcagcccctgctgaacctgcagggcaccaacagcgccagcctgctgaatggctccatgctgcagagggccctgctgctgcagcagctgcagggcctggaccagtttgccatgcccccagccacctatgacacagctggcctgaccatgcccacagccaccctgggcaacctgcggggctacggcatggccagccctggcctggccgcccccagcctgaccccaccccagctggccacccccaacctgcagcagttcttcccccaggccacccggcagagcctgctgggccccccacctgtgggcgtgcccatgaaccccagccagttcaacctgagcggcaggaacccccagaagcaggcccggaccagcagcagcaccacccccaacaggaaggacagcagcagccagaccatgcctgtggaggacaagagtgaccccccagagggcagcgaggaggccgctgagcccaggatggacaccccagaggaccaggacctgcccccctgcccagaagatattgccaaggagaagaggaccccagcccctgagcctgagccctgtgaggccagcgagctgcctgccaagaggctgcggagcagcgaggagcccacagagaaggagcccccaggccagctgcaggtgaaggcccagccccaggccaggatgacagtgcccaagcagacccagaccccagacctgctgcctgaggccctggaggcccaggtgctgccccgcttccagccccgggtgctgcaggtgcaggcccaggtgcagagccagacccagccccgcatccccagcacagacacccaggtgcagcccaagctgcagaagcaggcccagacccagaccagccctgagcacctggtgctgcagcagaagcaggtgcagccccagctgcagcaggaggccgagccccagaagcaggtgcagccccaggtgcagccccaggcccacagccagggcccccggcaggtgcagctgcagcaggaggccgagcccctgaagcaggtgcagccccaggtgcacacccaggcccagcccagcgtgcagccccaggagcaccccccagcccaggtgtctgtgcagcccccagagcagacccatgagcagccccacacccagccccaggtgtccctgctggcccctgagcagacccctgtggtggtgcacgtgtgtggcctggagatgcccccagatgctgtggaggccggcggcggcatggagaagaccctgcctgagcctgtgggcacccaggtgtccatggaggagatccagaatgaaagtgcctgtggcctggatgtgggagaatgtgaaaatagagcccgggagatgcctggggtgtggggcgccggcggcagcctgaaggtgaccatcctgcagagcagtgacagccgggccttcagcacagtgcccctgacccctgtgccccggcccagcgacagcgtgagcagcaccccagctgccaccagcacccccagcaagcaggccctgcagttcttctgctacatctgcaaggccagctgcagcagccagcaggagttccaggaccacatgtctgagccccagcaccagcagaggctgggggagatccagcacatgagccaggcctgcctgctgagcctgctgcctgtgcccagagatgtgctggagacagaagatgaggagcccccaccccggcgctggtgcaacacctgccagctgtactacatgggagacctgatccagcacaggaggacccaggaccacaagatcgccaagcagagcctgcggcccttctgcaccgtgtgcaaccgctacttcaagacccccaggaagtttgtggagcacgtgaagagccagggccacaaggacaaggccaaggagctgaagagcctggagaaggagattgctggccaggatgaggaccacttcatcaccgtggatgctgtgggctgctttgaaggagatgaggaggaggaggaggatgatgaagatgaggaggagattgaggtggaggaggagctgtgcaagcaggtgcgcagccgggacatcagccgggaggagtggaagggcagcgagacctacagccccaacacagcctatggagtggacttcctggtgcctgtgatgggctacatctgccgcatctgccacaagttctaccacagcaacagcggggcccagctgagccactgcaagagcctgggccactttgagaacctgcagaagtacaaggccgccaagaaccccagccccaccaccaggcctgtgtccagaagatgtgccatcaatgccagaaatgccctgacagccctcttcaccagcagcggccggccccccagccagcccaacacccaggacaagacccccagcaaggtgacagcccggcccagccagccccccctgccccggcgcagcacccggctgaagacctag

SEQ ID NO: 271332 - DNA, 2394 bp, Artificial Sequence
  derived and/or modified sequence
atgcccccagccacctatgacacagctggcctgaccatgcccacagccaccctgggcaacctgcggggctacggcatggccagccctggcctggccgcccccagcctgaccccaccccagctggccacccccaacctgcagcagttcttcccccaggccacccggcagagcctgctgggccccccacctgtgggcgtgcccatgaaccccagccagttcaacctgagcggcaggaacccccagaagcaggcccggaccagcagcagcaccacccccaacaggaaggacagcagcagccagaccatgcctgtggaggacaagagtgaccccccagagggcagcgaggaggccgctgagcccaggatggacaccccagaggaccaggacctgcccccctgcccagaagatattgccaaggagaagaggaccccagcccctgagcctgagccctgtgaggccagcgagctgcctgccaagaggctgcggagcagcgaggagcccacagagaaggagcccccaggccagctgcaggtgaaggcccagccccaggccaggatgacagtgcccaagcagacccagaccccagacctgctgcctgaggccctggaggcccaggtgctgccccgcttccagccccgggtgctgcaggtgcaggcccaggtgcagagccagacccagccccgcatccccagcacagacacccaggtgcagcccaagctgcagaagcaggcccagacccagaccagccctgagcacctggtgctgcagcagaagcaggtgcagccccagctgcagcaggaggccgagccccagaagcaggtgcagccccaggtgcagccccaggcccacagccagggcccccggcaggtgcagctgcagcaggaggccgagcccctgaagcaggtgcagccccaggtgcagccccaggcccacagccagcccccccggcaggtgcagctgcagctgcagaagcaggtgcagacccagacctacccccaggtgcacacccaggcccagcccagcgtgcagccccaggagcaccccccagcccaggtgtctgtgcagcccccagagcagacccatgagcagccccacacccagccccaggtgtccctgctggcccctgagcagacccctgtggtggtgcacgtgtgtggcctggagatgcccccagatgctgtggaggccggcggcggcatggagaagaccctgcctgagcctgtgggcacccaggtgtccatggaggagatccagaatgaaagtgcctgtggcctggatgtgggagaatgtgaaaatagagcccgggagatgcctggggtgtggggcgccggcggcagcctgaaggtgaccatcctgcagagcagtgacagccgggccttcagcacagtgcccctgacccctgtgccccggcccagcgacagcgtgagcagcaccccagctgccaccagcacccccagcaagcaggccctgcagttcttctgctacatctgcaaggccagctgcagcagccagcaggagttccaggaccacatgtctgagccccagcaccagcagaggctgggggagatccagcacatgagccaggcctgcctgctgagcctgctgcctgtgcccagagatgtgctggagacagaagatgaggagcccccaccccggcgctggtgcaacacctgccagctgtactacatgggagacctgatccagcacaggaggacccaggaccacaagatcgccaagcagagcctgcggcccttctgcaccgtgtgcaaccgctacttcaagacccccaggaagtttgtggagcacgtgaagagccagggccacaaggacaaggccaaggagctgaagagcctggagaaggagattgctggccaggatgaggaccacttcatcaccgtggatgctgtgggctgctttgaaggagatgaggaggaggaggaggatgatgaagatgaggaggagattgaggtggaggaggagctgtgcaagcaggtgcgcagccgggacatcagccgggaggagtggaagggcagcgagacctacagccccaacacagcctatggagtggacttcctggtgcctgtgatgggctacatctgccgcatctgccacaagttctaccacagcaacagcggggcccagctgagccactgcaagagcctgggccactttgagaacctgcagaagtacaaggccgccaagaaccccagccccaccaccaggcctgtgtccagaagatgtgccatcaatgccagaaatgccctgacagccctcttcaccagcagcggccggccccccagccagcccaacacccaggacaagacccccagcaaggtgacagcccggcccagccagccccccctgccccggcgcagcacccggctgaagacctag

SEQ ID NO: 271333 - DNA, 2613 bp, Artificial Sequence
  derived and/or modified sequence
atgttcagccagcagcagcagcagcagctgcagcagcagcagcagcagctgcagcagctgcagcagcagcaactgcaacagcaacaactgcagcagcagcagcttctccagctccagcagctgctgcagcagtcccctccgcaggcccctttgcccatggccgtcagcaggggattgccgccacaacagccacaacaacccctgttgaatctgcagggcactaacagtgcctctcttctgaacgggtcaatgttacagcgggctttactgctgcagcagcttcaggggctagaccaattcgcaatgcctccagcaacctatgacactgcaggtttaactatgcctacagctactttaggtaacctgcgcggctacggaatggctagtcctggattggcggccccttctcttacacccccacagctagcaacaccgaatctacagcagttcttcccgcaggctactaggcaaagcctgctcggcccccctccagtcggggtgccaatgaatcctagccagttcaatttaagtggccgcaatcctcaaaaacaggcccgaacgagctctagtactacacccaatcggaaggactcttcatcccaaaccatgccagtggaagacaaatctgacccacccgagggatccgaggaagccgctgaaccccgtatggacacaccagaagatcaggacctgcccccatgtccagaggatatagccaaggagaaaaggacaccagcccctgaaccagagccgtgcgaagcatcagaactgcctgcaaagcgtctgagaagctctgaggaacctacggagaaagaaccccctggccaattacaggtaaaggctcagccccaggcacggatgactgtcccaaaacagactcagaccccagacctcttgccagaggctctggaggcccaggtcttaccgaggttccaaccacgagtgctacaggttcaggcccaagtgcagtcacagacacaacctagaatcccgtctacagacacccaggtgcaacctaagctccagaaacaggcacagacgcagaccagccccgagcatctggttctccaacaaaagcaggtgcaaccccagctccagcaggaggccgagcctcaaaaacaggtgcagccacaggtacaacctcaggctcactctcagggccctcggcaagtccagctccaacaggaggccgagccgcttaaacaggtgcagccacaggtacacacacaggctcaacctagcgtgcagccacaggagcacccacctgcccaggtttccgtgcagccaccagaacagacccatgaacaacctcatactcagccacaggttagtctgttggcccctgagcaaacacccgtggtcgtgcacgtctgcgggctagagatgccacccgacgccgtggaggccgggggtgggatggaaaaaacactgccagagccagtgggtacccaggtgtccatggaagagattcagaatgagagtgcgtgtggcctggatgtgggcgagtgcgagaatagggccagggagatgcccggcgtgtggggagccggaggctctctgaaagttacgatactgcaatcaagtgactcaagagctttcagcaccgtgcccctcacgcctgtgcctagaccttcagattctgtcagcagcacgccggcagcaacatctacaccctccaaacaggcccttcagttcttctgttatatttgcaaagcctcttgctcttcacaacaggaatttcaggatcacatgtctgagccccagcaccagcagagacttggtgagattcagcatatgagtcaggcttgcctgctctctcttcttccagtgccccgggatgtgcttgagacagaagacgaagagcccccaccacggagatggtgcaatacttgccagttgtactacatgggcgatctgattcaacatcgacggacgcaagatcacaaaatcgcaaagcaaagtttgagacctttttgcacagtgtgcaatagatacttcaaaaccccaaggaagttcgtggaacatgtgaaaagccaggggcataaggacaaggccaaggagcttaagagtcttgaaaaagagatcgcggggcaagatgaggatcactttattaccgtcgatgctgtcgggtgttttgagggtgacgaagaggaagaagaagacgacgaagatgaggaggagattgaggtggaagaagagctttgtaagcaggtgagatcaagagacattagccgggaagaatggaaaggtagcgagacatactcgccaaatactgcttatggggtggacttcctcgtccccgtgatgggctatatctgcaggatttgtcacaagttttaccacagtaattccggagcgcagctgtctcattgcaaatccctgggccacttcgagaatctgcagaaatacaaggcagccaagaacccttcacccactacgagacctgtgtcccgccgttgtgctattaatgcaaggaacgctctgactgccctatttacctccagtgggagacctccatcacagcctaatacccaagacaaaactccctcaaaggtaactgctaggcctagccagcctccccttccccgaaggtctacccgcctgaagacatag

SEQ ID NO: 271334 - DNA, 2613 bp, Artificial Sequence
  derived and/or modified sequence
atgttcagccagcagcagcagcagcagctgcagcagcagcagcagcaactgcagcagctccaacagcagcaattacagcagcagcagctccagcagcagcaactattacagcttcagcagctgttgcagcagtcaccaccccaggccccactgcctatggcggttagccgcggcctgccccctcagcagcctcagcagcctcttctaaatctccaaggaaccaactccgcgagcctgcttaatgggtctatgcttcagcgcgctttgcttctacagcagctgcagggccttgaccagtttgccatgccccccgccacctatgatacagccggcctgactatgccgacagccaccttgggcaacctccgagggtacggcatggcttcccccgggctggcagcacctagccttacacccccgcaactggctacccccaacctgcagcaattttttccacaggctacccgtcagtcactactgggccctcctcccgtgggggtcccaatgaatccgtcgcagttcaatctgtccggtaggaacccacagaagcaggcacggacctcttccagcactaccccaaacaggaaagactcgagttctcagaccatgccagtggaagacaagtccgacccgcccgaggggagcgaggaggccgctgagcctcgcatggacacaccagaagatcaggaccttcccccctgccccgaagacattgcgaaggaaaagcgcacccctgctcccgagcctgagccctgcgaagcctctgaactaccagcaaaaaggttgcgctccagcgaagaaccaaccgagaaagaacccccgggccaattgcaggtgaaagcacagccccaagctaggatgacagtgccaaaacagacccagacaccagaccttctgcccgaagcattggaggctcaggtcctgcccaggtttcagccccgggtgcttcaggttcaggctcaggttcagtctcagacacagccgcggattccctcaaccgatacacaagtgcagcctaaactacaaaagcaagcccagacccagacaagcccagagcaccttgtgttgcaacagaaacaagtccagccccagctgcagcaggaggccgagccacagaagcaggtgcagccgcaggtgcagccccaggcccactcccagggacctaggcaggtgcaactgcagcaggaagcagagcccctaaagcaagtgcaacctcaggtccacacacaggctcaaccttctgtgcaaccacaggagcacccccccgctcaagtcagtgtccagccgcccgagcagacacatgagcaaccccacactcaacctcaggtctccctgctcgcacccgagcagacccccgttgttgtgcatgtctgcggcctggagatgccccctgatgccgtggaggccggagggggtatggagaaaaccctgccagagcccgttggaactcaggtaagtatggaagagatccagaacgagagtgcatgcggcctggacgtcggtgagtgcgagaacagggcccgcgagatgcccggcgtatggggcgctggtggaagccttaaggtaaccatccttcaaagctctgacagccgagcgttctcaactgttcccctcacacctgtgccacgacccagtgactctgtgtcctccacccccgccgccacaagtaccccctctaagcaggctctccaattcttttgctacatttgcaaagcctcgtgcagtagccaacaggaatttcaagaccacatgtcggaaccacagcaccaacagagactgggcgagatccagcacatgtctcaggcctgcctactctccctgttgccggtcccccgggatgttttggagaccgaggacgaggaacccccacctaggagatggtgcaatacttgccagctgtactacatgggggacctcattcaacatcggcgtacccaggatcacaaaatagcaaaacagtccttgagacctttctgcacagtctgtaaccgttacttcaagacacctcgaaaatttgtagagcatgtgaagagccaggggcataaagataaggcaaaggaactgaagagcctggagaaagagatcgcggggcaggacgaagaccacttcataactgtggatgccgttggctgttttgagggggacgaggaggaggaggaggacgacgaggacgaggaagagatcgaagtggaagaggagctatgtaagcaagttcggagcagggatatctccagggaagaatggaagggttctgagacctacagccctaataccgcttacggtgttgactttctggtgcccgttatggggtacatctgccggatttgccacaagttctaccactccaatagtggtgcacagcttagccactgtaaaagtctgggacattttgagaacctgcagaaatacaaagccgccaaaaacccgtcccccaccacccgccccgtgtcaagacgctgtgctatcaatgcccgtaacgccctgacggccctcttcacgtccagtggaagacctccttcccagccgaatactcaggacaaaacaccgtctaaggtgacagccagaccctcgcagcctccgctgccaagacgctcaacaagattgaaaacctag

SEQ ID NO: 271335 - DNA, 2697 bp, Artificial Sequence
  derived and/or modified sequence
atgttcagccagcagcagcagcagcagctgcagcagcagcagcagcagcttcaacagctacagcaacagcagctacagcagcaacagctacaacagcaacagttactgcagcttcagcaactgttacaacagagccccccccaggccccgcttcccatggctgtctcaagggggctccccccacagcagccccagcagcctttgctcaatctgcagggaacaaactctgcttctctcctcaatgggtctatgctgcagagggcattgttgctgcagcagttgcaaggcctcgaccagtttgccatgcccccagctacttatgacaccgctgggttgaccatgccgactgcaactctgggcaacctccgcgggtatgggatggcctcacccggactggccgctccatctctgacaccacctcagctggctacgccaaacttacagcagtttttcccgcaagcaacgagacagtcgcttctgggtccccccccagtgggcgtgccgatgaacccctcacagttcaacttaagcggccggaacccccaaaagcaggctaggactagtagtagcactacacccaatcggaaggattcctcttcccaaaccatgcctgttgaagacaagagcgaccctccagaaggatccgaagaagctgctgagccacgcatggatacacccgaagatcaggacctcccaccatgtcctgaagatatcgccaaagagaaacgcacaccagccccagagcccgagccatgtgaagcatcagagctgccagctaagcggctaaggtcctctgaggaaccaaccgagaaggaaccccctggacagctgcaggttaaagctcagccacaggctaggatgaccgttcccaagcagactcagacacctgacttgctgcctgaggccctggaggcccaggttctgcccagattccagccgcgggtgctgcaagtgcaggcccaagtccagtctcaaacgcagccaaggatcccctccacggatactcaggtccagcccaaattgcagaaacaagcacagacccagacaagcccagaacacctggtgctgcaacagaagcaggtccaacctcagctgcagcaggaagcggaaccacagaaacaggtgcagccccaggtgcaaccacaggcccactcacaggggcctcgccaggtccagctgcagcaagaggctgagcctcttaaacaggttcaaccacaggtgcaaccccaagcccactctcagcctcctcggcaggtccagctccagttacagaagcaggttcagacccagacctatccacaggtccacacacaggcccagccttcagtgcagccccaggagcatccgcctgcccaggtgtctgtgcagccacccgaacagacccacgagcagccccacacacagccacaagtgagccttctggccccggagcagacaccggtagtggtgcacgtgtgcgggctggaaatgccaccagacgccgttgaagcgggaggagggatggaaaagacactccctgaaccagtggggacccaggtgagtatggaggagatacaaaatgagtccgcctgcggccttgatgtgggggaatgtgaaaaccgcgcacgggagatgccaggcgtctggggagctggcggctcactcaaggttactatacttcaaagcagtgacagccgcgcattctctactgtccccctcacccctgtgccccgcccgagcgattcagtcagtagcactcccgccgccacatccaccccatccaagcaggccctacagttcttttgctatatttgtaaagcttcttgctcttcccagcaggagttccaggaccatatgagtgaaccccagcaccagcagaggctgggagaaatccagcacatgtcacaggcctgcctgctgtcactactcccggtaccaagggacgttttggagaccgaggatgaagagcctccaccacgccggtggtgtaatacttgccagctgtactatatgggggatctgatccagcatagaagaactcaagaccataaaattgccaagcagagcctgaggcccttctgcaccgtttgcaaccgctactttaaaacaccaaggaagttcgtggagcacgtcaagtcacagggccataaggacaaagctaaagagctgaaatcgctagagaaggaaatagcggggcaggatgaggatcactttatcaccgtggatgctgtgggatgtttcgagggcgatgaggaggaggaggaggacgacgaagatgaagaggagatagaagttgaagaggagctgtgtaagcaggttcgaagtagagacatatcccgcgaagaatggaaaggctcggaaacctattcacccaatacagcatatggcgtcgatttcttggttcccgtcatgggctacatttgccgcatttgtcataagttttaccattctaactccggagcccagctctcccactgtaaatcactgggccactttgaaaatctgcaaaaatataaggccgccaaaaatccctcccctacgacaagacccgtgtcacgtaggtgtgctatcaacgccagaaatgcactcacagccctattcacctcatcgggccgcccaccttcgcaaccgaacacccaggacaagactccatctaaggtgactgcccgaccctcccaacctccactgccaaggcggtccacacgactgaagacatag

SEQ ID NO: 271336 - DNA, 2697 bp, Artificial Sequence
  derived and/or modified sequence
atgttcagccagcagcagcagcagcagctgcagcagcagcagcagcagctacagcagctccagcagcaacagttgcagcagcaacagttacagcagcaacagttgctccagctccagcaactgctgcagcagagccctcctcaggcgccccttcctatggctgttagcagagggctcccaccccagcagcctcaacaacctctactgaaccttcagggaactaacagtgctagcctgctcaacggttccatgctacagagggccctgctgctgcaacagcttcagggactggatcaattcgcgatgcctcccgccacatacgacactgcgggtttaacaatgcccaccgctacattagggaacttgagagggtatgggatggcaagccctggtctggccgcacctagcttgactccccctcagcttgccactcctaaccttcagcagttctttccacaagcaacgcgccagagcttgctgggtcctcctcccgtgggcgtgccaatgaatccatcgcagtttaacttgtctgggcgcaatcctcagaaacaggctcgcactagttcatccactacccccaatagaaaagactcttcgtctcagactatgccagtagaagacaagtccgacccccctgagggcagcgaggaagcagctgagcctagaatggatacaccagaagaccaggacttgccgccctgccctgaggacattgccaaggagaagcggactcccgcgccagagccagaaccttgcgaggcttccgagcttcccgcgaaaagactgcgcagcagcgaagagcccacagagaaggagcctcctggccagttacaagtcaaggcgcagccgcaagccagaatgactgtgccaaagcagacacagacccccgacctgttacccgaggctctagaggcgcaggtcctaccacgtttccaacccagagttttacaggtccaagctcaggtccaaagccagacacagccccgcattccatcgacagacacacaagtccagcctaagctgcagaagcaggctcagacccaaacgagccccgaacatctggtactgcagcaaaaacaagtgcaacctcagttgcagcaggaggctgagccacagaaacaggttcagccacaggtccagcctcaggcacacagccagggaccgcggcaagtacagctgcagcaggaggcagagccactaaaacaggtgcagccacaagtgcagccgcaagcccattcccagcctcccaggcaggtgcagttgcaattgcaaaaacaagttcaaacacagacctacccacaggttcatactcaagcacagccctctgtgcaacctcaggagcacccaccagcccaggtcagtgtccaacccccagagcagacccatgagcagcctcatacacaaccacaagtctctctgctggcccccgagcagacgcctgttgtggtgcacgtctgtggcttggagatgccccctgacgctgtggaggccggtggtggaatggagaaaactttgccagaaccagtcggtacccaggtcagcatggaagaaatacagaacgagtctgcttgtggcctggatgtgggggaatgcgaaaacagagccagggaaatgcctggggtctggggggccggagggtcacttaaggtgactatactgcagagtagcgattctagagctttttccacagtgccactgacccctgtgcccaggcccagtgatagtgtatcgagcacccctgcagccacttccactccttccaagcaagccttacaatttttttgctacatttgtaaagcttcctgctcctcacaacaggaattccaggatcatatgtccgagccccaacatcagcaacggctgggcgagattcaacatatgagtcaggcctgcctactgagccttctgcctgtgccccgggatgtcttggagaccgaggacgaggaaccccctcctagaaggtggtgcaacacgtgtcagctatattacatgggggacttgatacaacatcggcgcacccaggaccataaaattgctaagcagagtttgcgacctttttgcacagtttgcaatcgttattttaaaacgccacgtaaatttgtagagcatgtgaaatcccagggccacaaggacaaagcgaaggagttaaagtctcttgagaaagagatcgcgggtcaggacgaggaccacttcattactgtagacgccgtcgggtgtttcgagggggacgaggaggaagaggaagatgacgaagatgaggaggaaatcgaagttgaggaagagctctgtaagcaggtgaggtccagagatatcagcagagaggagtggaagggtagcgaaacctatagccccaacactgcatacggtgtggactttctggtaccagtgatgggatacatctgtaggatttgtcataaattctatcacagtaatagtggcgcccagctgtcgcattgtaaatcactgggccacttcgaaaatcttcagaagtataaggccgccaaaaaccccagcccaaccacaagacccgtgagcagaagatgtgcgataaatgccaggaatgccctcacagcactcttcactagcagcggccggcctccctcccagcccaacactcaggataaaacacccagcaaagtcaccgcgcgtccctctcagcccccactcccaaggagatctacacgtcttaagacctag

SEQ ID NO: 271337 - DNA, 2514 bp, Artificial Sequence
  derived and/or modified sequence
atgttcagccagcagcagcagcagcagctgcagcagcagcagcaggcaccgctccctatggctgtttcacgtggtctgcccccgcagcagccccagcagccactcctgaatttgcaaggcaccaactccgctagcctcttaaacggatcgatgctgcaacgagcattgctgctgcagcagcttcagggcctcgaccagttcgctatgccccccgcgacatacgacacagccggcttaaccatgccaactgctaccctgggcaacctgcgagggtacggaatggcttcacctggactggccgcgccctccttaactcccccacagctcgccacccctaacctccaacagttctttcctcaagccacccgtcaaagtttgttagggccccctccagtgggcgtgcctatgaaccctagccaattcaacctgtccgggaggaatcctcagaaacaggcacgaacttccagtagtaccacacctaaccgaaaggattccagctcccagactatgcctgtggaagacaaaagtgaccctcctgagggatcagaagaggcagcagaaccccggatggacactccagaggaccaggacctgccaccatgcccagaggacatcgccaaagaaaagcggactcccgcacccgaacctgagccgtgtgaggcatctgagctcccagctaaaaggctcagatcaagcgaagagcctactgagaaggaaccgcccggccagctccaggtaaaagcacagccacaggcccgcatgactgtgcccaaacagacccagactcctgacctgctgcccgaagctctcgaggctcaggtgttgccaagatttcaaccaagggtgctgcaagtccaggctcaggtgcagagtcagactcagccacgcattccctcaactgacactcaggtccagccaaagctacaaaaacaggctcaaacgcagacaagccccgaacacctggtgttacaacagaagcaggtgcagcctcagctgcagcaggaagctgagcctcagaaacaggttcagccacaagtgcagccacaagcccactctcaagggcctcggcaggtgcagctccagcaggaagcagaaccattgaagcaggtccaacctcaggttcatacacaggcccagccaagtgtgcagcctcaggaacacccccctgctcaggtatcagtgcaaccacctgaacagacgcacgagcagcctcacactcagccacaggtaagcctgctggcccctgaacagacccctgtcgtcgtgcacgtgtgcgggctcgaaatgccccccgacgcagtggaagcgggcggtggaatggaaaaaacgctgcccgagccagtcgggacgcaggtttctatggaagaaattcaaaacgaaagcgcatgtggcctggatgtgggcgagtgtgaaaacagggcacgcgagatgcctggcgtatggggtgctgggggctccctgaaagtgactattcttcagtcatccgactctagggctttttctactgtgccgcttaccccagtgcccaggcctagtgattctgtgtcctcaacacccgccgctacgagcacgccaagcaagcaggccttgcaatttttttgctacatttgcaaagcatcatgttcatcccaacaggagtttcaggatcacatgtctgagccacagcatcagcagcggctgggcgaaatacagcatatgtcacaggcgtgtctgttgagccttctgcccgttccaagagacgtgttggaaacagaggacgaggagccacctcctcggcgctggtgcaacacttgccagctgtattatatgggcgaccttattcagcaccgtcggacccaggatcacaagatcgcaaaacagtccctccggcctttctgcactgtgtgcaaccgatatttcaaaactcctcgcaagttcgttgagcacgtgaaaagccaaggccacaaagataaggccaaagagctcaagtctcttgaaaaggagatcgctggacaagacgaagaccatttcatcaccgtggatgcagtgggttgcttcgagggggacgaggaagaggaggaggatgatgaagacgaagaggagatcgaggtggaggaggagttgtgtaaacaggtgcggtccagggatatctcaagggaggagtggaagggtagtgaaacctatagtcctaatacggcttatggggttgatttcctcgtgccggtgatgggctatatttgccgtatatgccataagttctaccatagcaacagtggagctcagctgagtcattgcaaatccctcgggcattttgagaatttgcagaagtataaagcagccaaaaatccatctccgaccactaggcctgtgtcccgccggtgcgccattaacgcaaggaatgccttaaccgcattgtttacatctagtggacggccgccatcccagcccaatacccaggataaaacgccttcaaaagtgacagcgcgaccaagccagcccccattgcctagacgctcaacccggctgaaaacgtag

SEQ ID NO: 271338 - DNA, 2394 bp, Artificial Sequence
  derived and/or modified sequence
atgccccccgccacctacgacaccgccggcctgaccatgcccaccgccactttgggaaacctgaggggatacggaatggccagccctggtctcgcagctccatctctcaccccgccccagctagctactccgaatctgcagcagttctttcctcaagcaacccgccagtccttgctgggaccgcctcctgtgggcgttcctatgaaccctagccagtttaatttaagcggcaggaatcctcaaaagcaagcccgcacgtctagcagtaccacacccaatcgaaaggatagctcaagtcaaactatgccagtcgaagataaatcagacccccctgaaggctccgaggaggccgctgaacctagaatggacacccctgaggaccaggacctgcctccttgccctgaggacatcgccaaggaaaagaggacccctgctccggagcctgagccttgtgaagcttccgagctgcccgctaagcgcctccgctctagcgaagagccaactgagaaagagccgcctggccagctgcaagtaaaggcccagccacaggcaaggatgaccgtgccaaagcagacccagacgccagatctactccctgaggccctggaggctcaggttctgcctagatttcagcctcgcgtgctgcaggtgcaagcccaagtgcagtcccagactcagccccggattccatccactgacactcaggttcagcctaaactgcagaagcaggcccagacccagacctctcccgagcacctggtgctccagcagaagcaggtgcaaccacagctgcaacaggaagcagaaccccagaagcaggtgcagccccaagtgcagccccaggcccattctcagggcccccgccaggtacagcttcagcaggaagcagagcctctgaagcaggtacagcctcaagtacagccacaggcacactcacagccccctcggcaagtgcagcttcagctgcagaagcaagtacagacacagacctacccccaggtgcacacccaggcacagcccagcgttcagcctcaggaacacccccctgcacaagtttccgtgcagccccctgagcaaacccacgaacagccacatacccagccgcaggtgagtcttctggcacctgagcagacaccagtggtggtgcatgtctgcgggctggagatgcccccagacgccgtggaagctggcggtggcatggaaaaaaccctaccagaacctgtgggcacccaggtgtctatggaggaaattcagaacgaatctgcatgtgggctcgatgtgggggagtgtgaaaatcgtgctagagagatgcctggagtgtggggagctggcggtagcctgaaggtcactattctccagtcttccgatagccgggcgttctctacagttcccttgaccccggtgcctcgcccctcagattcagtgtccagcacaccagctgcgacaagtacccccagcaagcaggccctccagtttttttgctatatctgcaaggcctcctgcagttcccagcaggagttccaagaccacatgtcagagccacagcatcagcagcgattgggagagatacagcatatgtctcaggcctgtctgctgagcctgctgccagtgccacgggacgtattagagactgaggacgaggagccgcctccccgtcggtggtgcaacacttgccagctgtactatatgggagacttaatccagcatcgcagaacacaggaccataaaatagccaaacagagtctgcgtcctttctgtactgtgtgtaatcggtacttcaaaacccctaggaagttcgttgaacacgttaagtctcaaggccacaaagacaaagccaaagaactcaagtcattggagaaagagatagcaggccaggatgaagaccattttataacggtcgacgctgtcgggtgctttgagggtgacgaggaggaggaggaggacgacgaggatgaagaggaaattgaggtggaggaggagttatgcaaacaagtgagatccagggacatatcacgcgaggaatggaagggctctgagacatacagcccaaataccgcttacggcgtggatttcctagtgccagtgatggggtacatttgcaggatttgccacaagttctatcacagcaacagcggcgcccaactgtcacactgcaaaagcctgggacattttgaaaatctgcagaaatacaaggccgctaagaaccccagtcctactacccgccccgtctctaggcgctgcgctatcaacgcaaggaacgcactcactgctctgtttacgagttcgggtaggccaccctcccagcccaatactcaggacaagaccccttcaaaggtcactgccagaccatctcagcctcccctccctcgtcgcagcactcgcttgaagacatag

SEQ ID NO: 271339 - DNA, 2613 bp, Artificial Sequence
  derived and/or modified sequence
atgttctcccagcagcagcagcaacaactgcaacaacagcagcagcagctccagcagctccagcaacagcagctccagcaacagcagctgcaacaacaacaactgctgcagcttcagcagctgctgcagcagtccccgccacaggccccactgcccatggctgtgtctaggggcctcccaccacagcagccacagcagcctttactcaacctccaggggaccaatagcgctagcctcttaaatgggtccatgctgcagagggccctgctgctgcagcagttacaagggctcgaccagttcgccatgcccccagcaacctatgatacagcgggactgactatgccaacagctactctgggtaatctcagggggtacggtatggcgagcccagggctcgctgccccaagcctgacgccaccccagctcgccacgcccaatttgcagcagtttttccctcaggctacgcggcaatcattgcttgggccaccgcctgtgggcgttccgatgaacccctcccaattcaacctgagtgggagaaacccacagaaacaagcacgcacatcctcctcaaccacacctaataggaaggattcctcaagtcagaccatgcccgtggaggacaagagtgatcctccagaaggatctgaggaggctgcagagccaagaatggatacgccagaagaccaagatctgcccccttgtccggaagatatcgctaaggagaagaggacacctgcacccgaacccgaaccctgcgaggcttccgaactgcctgcaaagcgtctccgatcctccgaagaacccaccgagaaggaaccgcctggtcagctgcaggtaaaagcacaaccacaggcacgcatgactgtgcccaagcagacccagacccctgacttattgcccgaagccctcgaggcccaggtcctccccagatttcaacctcgcgtgctccaagtgcaggcccaggttcagtcacagactcagcctcgcattccgtctacagatacccaagtacagcccaagctccagaaacaggctcagactcagacaagcccagaacatctcgttctccagcagaagcaagtgcaaccgcagctgcaacaggaggcagaaccacagaaacaggtgcaaccacaggtgcagccgcaggcccactctcagggacctcgtcaggtgcaactgcagcaagaagccgaaccgctaaagcaggtgcaaccacaggtgcacacacaggcccagccatccgtgcagcctcaggagcacccgcctgcccaggtgtccgtccagcccccagagcagacacatgagcagccacacacccagccccaagtgagcttgctagcacccgaacagaccccagttgttgtccacgtgtgtggccttgaaatgccccctgacgcggtagaagccggagggggaatggaaaagactctgccggaacctgtcggaactcaggtgtctatggaggagatccagaacgagagtgcttgcgggctggatgtcggagaatgtgaaaacagggcacgagagatgcccggagtctggggtgccggtggttcattgaaggtgacgatactccagtcatcagacagccgggcttttagcaccgtccccctaactcccgtcccccgaccaagtgacagcgtttcctcgacgccagcagcaacctccacaccatcaaagcaagccctgcaattcttttgctacatttgcaaggcctcctgtagttcacaacaggaattccaggaccatatgagtgagccccaacatcagcagcgtctgggtgaaatccagcacatgagccaggcttgcctgctaagcctcctgcctgtccccagagacgtcctggagacagaggacgaagaacctccacccaggagatggtgcaatacatgccagctttattatatgggcgacttgatccaacatcgcagaacacaagatcataagattgctaaacagtctcttcggcctttttgcacggtctgcaaccgatactttaaaacaccccgaaagttcgtggaacacgtaaaatcacaggggcataaagataaagctaaggaactcaagtcactcgagaaagagatcgctggtcaggatgaggaccactttataaccgtggacgctgttgggtgctttgagggggacgaggaggaggaggaagacgatgaagacgaagaagaaattgaagtggaggaggaactgtgcaagcaggtgaggtctcgggatatctcacgcgaggagtggaaggggagcgagacctatagcccaaatacggcttacggagtagactttctggtgcctgttatggggtacatctgcaggatttgtcataagttttatcactcaaatagcggtgctcaactcagccactgcaaatccctcggacactttgagaatctccagaagtacaaagccgctaagaacccatcccctaccactagaccagtgagccggagatgcgccattaacgctcgtaacgccctgaccgcgttgttcacgtcatctggccgtcccccttcacagcccaatacccaggacaagacccccagcaaggtgactgcccgaccctctcagccgccactgcctcgcagaagcacgcgcttgaaaacctag

SEQ ID NO: 271340 - DNA, 2613 bp, Artificial Sequence
  derived and/or modified sequence
atgttttctcaacaacagcaacagcagctgcagcagcagcagcagcaactgcagcaattgcagcagcagcagctgcaacagcagcagctacagcagcaacaactgctgcagctgcaacagctcctccagcagtccccaccccaggccccactccctatggctgtcagcagggggctgcccccacaacagccacaacaacctcttctaaacttgcagggaacaaactcagctagcctactaaacggcagcatgctgcagcgcgctctgctcctacagcagctgcagggtttggatcagtttgcaatgcctccagccacctacgataccgctggcctgacgatgccgactgctactcttgggaacctacgcggatatgggatggcatcacccggacttgcagccccttccctgactccaccccaactggctacaccgaaccttcagcaattcttcccccaggccaccaggcaatccctactcgggccacccccagttggcgtcccaatgaatccatcacagttcaatctgagcggcagaaatccccagaagcaggctagaacttccagtagcactacaccaaaccgcaaggacagttcaagccaaaccatgcccgtggaggataagagcgaccctcctgagggttctgaagaggcggctgagccaaggatggatacaccagaggatcaggatctacccccttgccctgaagatatcgctaaggagaaaaggactcctgcacccgagccagaaccttgcgaggcctccgaactccccgctaagagacttcggagcagtgaggagcctactgagaaagaaccgcctgggcagctccaggtgaaggcgcagccgcaggcacggatgactgtgcctaaacagacgcaaacacccgatctgctacctgaggcattggaggcccaagtcctgcctaggttccagccgagggtactgcaagtgcaggcgcaggtacagtctcaaacgcaacccagaattcctagtactgatacacaggtccagcccaaactgcagaaacaagcccagacacagacctctccagagcatctcgttctccagcagaagcaggtccagccgcagctgcaacaggaggccgaaccccagaagcaggtacaaccacaggttcagcctcaggcacattctcaagggccacgccaagtccaactgcaacaggaggctgagccactgaagcaggtgcagccgcaggttcacactcaagcacaaccatctgttcaacctcaggaacatccaccagcgcaggtgtctgtgcagcctcctgagcaaacccatgaacagccacacacacagccacaggtttcacttctcgccccagagcagacacccgttgtcgttcacgtttgcggcctggagatgccgcctgatgcagtcgaagccggtggcggaatggaaaaaactctgcctgagcccgtaggaacccaggtgagcatggaagaaattcagaatgagagcgcctgtggtctcgatgtcggagaatgtgagaatcgggcacgagaaatgcctggagtatggggagccggaggatcattaaaggtgactatccttcagtccagcgactcccgggctttttcgaccgtgcctttaactccagtgccccgacccagtgactccgttagctctacccctgccgcaacgtcaactccatcgaagcaggctcttcagttcttctgttatatatgtaaggcgagttgcagctctcagcaggagtttcaggatcacatgtcagagccccagcaccagcagcgattgggcgagattcagcacatgtcccaggcatgccttctaagcttattacctgtaccccgagacgtacttgaaaccgaagacgaggagcctccacccaggcgctggtgtaacacctgtcaattgtactacatgggcgacctgatccagcacagaagaacacaggaccacaagatagcaaaacagtcgctcagacccttttgcactgtatgcaaccggtattttaagactccaagaaaattcgtggagcatgttaagtctcaaggccacaaagacaaagcaaaagaactcaagagtctcgaaaaggagatcgcaggacaagacgaggatcacttcattacagtcgatgcagttggatgcttcgagggggatgaagaggaggaggaagatgatgaagacgaagaggagatcgaagtagaggaagaactgtgtaaacaggtgagatcccgtgatatatcacgtgaggagtggaagggctctgaaacctatagcccaaatacggcttatggcgttgatttccttgtgccagttatgggctacatctgtaggatttgtcacaagttctaccattcaaactccggagctcagttaagtcattgcaagtccctggggcacttcgagaacctgcagaagtataaagctgcaaaaaacccaagtccgaccactcgccctgttagcaggagatgtgccatcaatgcgcgaaatgccctaacagccctctttacaagtagcggaagacctcccagccagccaaacacacaggataaaactccaagcaaggtaacagccaggcctagtcagccccctcttcccaggaggtccacccggttgaagacctag

SEQ ID NO: 271341 - DNA, 2697 bp, Artificial Sequence
  derived and/or modified sequence
atgttctcgcaacaacagcagcagcagttacagcagcagcagcagcaactgcagcagctgcagcagcagcagcttcaacagcagcaactgcagcagcagcagctgttgcagctgcagcagcttctgcagcagagccctccacaggccccattaccgatggccgtcagccggggtctgccaccacaacagccacagcagccgctactcaacctgcagggaactaattccgcttcattactcaatggttccatgcttcaacgcgcactcctgctccagcagctacaaggcctggatcagtttgccatgcccccagccacctacgataccgctggattgacaatgcctactgcaaccctggggaatctaaggggatatggcatggccagtcccggactggccgcaccaagcctaacacctccccagctggccacaccaaacctgcaacagtttttcccacaggccactcgacagtctttgctgggaccccctccagtaggtgtacccatgaacccttctcaatttaacctttcaggcaggaacccccagaaacaggccagaacctcaagcagtaccactccaaaccggaaggattccagctcccagacaatgcctgtcgaagacaagtccgatccccctgagggtagcgaagaggcggcagaacctaggatggatacaccagaggaccaggacctgcccccttgtcctgaggatattgcaaaggagaaacggactcccgctccggagcccgagccatgtgaagcctccgaactgcccgcaaagagactgaggagtagtgaggaaccaacagagaaggaacctcccggacagctgcaagtcaaggctcaaccccaggcaagaatgactgtgcccaagcagacccaaactccagacctgctgcctgaagctctcgaagctcaggtcttgccccgatttcagccgagggtgttacaagtgcaggcgcaagtgcagagccagacccaaccccgaatccccagcactgatacccaggtgcaaccaaagttgcagaaacaggctcagacccaaacgtcacccgagcatttggtgttacaacagaaacaggtacaaccgcaactgcaacaggaagccgaaccgcaaaagcaggtgcagcctcaggtccaaccccaggctcacagtcaggggccaagacaggtgcagcttcagcaggaggctgaacccctcaaacaggttcaaccacaagttcagccccaggcacactcccaaccgcctcgccaggtccagctgcaactgcagaaacaggtgcaaactcagacgtatccccaggtgcacactcaagcacaaccatcagtccagccacaggaacatccacccgcacaggtgagcgtacagcccccagagcaaacacacgagcagccccatactcagccccaggtgagcctgctggcccctgagcagactcccgtcgtggtgcatgtgtgcgggctggaaatgccaccagacgcagttgaggccggaggagggatggaaaagactctacccgagcctgtgggcactcaggtcagcatggaagagattcagaacgaatccgcgtgtgggctggacgtgggagagtgcgagaatagggccagagaaatgccaggagtttggggcgcagggggatctctgaaggttaccatcctgcagagctcagacagcagggcttttagcaccgtgccactgactccggtccctcggcctagtgatagcgtgtccagcactccagcggcaaccagtacacctagcaaacaagccctgcagttcttctgttacatctgtaaagccagctgcagctcccagcaggagtttcaggatcatatgagcgaaccacagcatcagcagagattgggagaaatccagcatatgagtcaggcctgcctgctttctctgctgcctgtgccaagagacgtacttgagactgaggatgaagagcctccgccaaggagatggtgcaatacttgccaactctactatatgggagacctgatccagcatagacgcacgcaggatcataagattgcgaagcagagcctgcgacccttttgtactgtgtgtaatagatatttcaagacccccaggaaattcgttgagcacgttaagagtcaaggtcataaggataaagccaaggagcttaagtctctcgagaaggagattgctggacaggacgaggatcatttcatcactgtagatgccgtcggatgtttcgagggcgatgaagaggaggaagaggacgacgaggatgaggaggagatcgaggtggaggaggaactgtgcaagcaggtgcggagtagagatattagccgcgaggagtggaaaggctcagaaacctatagccctaacaccgcctatggagtcgattttctggtacctgtaatggggtacatctgtaggatctgccacaagttctatcattcaaattctggcgcacagctgtcccactgcaagagcctaggccatttcgaaaacctccagaaatacaaagcggctaagaacccctcccccaccactcgcccagtgtctcgacgatgcgcgatcaacgcacgcaacgctctgaccgcgttgtttaccagcagcggtcgcccacctagccaacccaatacacaggataaaacccctagcaaagttactgctcgcccttctcagcctcccctgccgagacgctccaccagactgaagacatag

SEQ ID NO: 271342 - DNA, 2697 bp, Artificial Sequence
  derived and/or modified sequence
atgttcagtcagcagcaacaacaacagcttcagcagcagcagcaacagctgcagcagcttcaacaacagcagctccagcagcagcaactccagcagcagcagttgctccagctgcagcaactcctccagcaaagtccaccacaggcccctcttcctatggccgtcagtagagggctgcctccccaacagccccaacagcccttgctgaatctgcaaggtactaactccgctagtctccttaatggatcaatgttgcagcgggcacttcttctacagcagctccagggactggatcagttcgccatgccacctgctacctatgataccgctggactaactatgcccaccgctactttggggaacctgcgaggctatgggatggcttctcctggcctcgcagcacctagccttactccaccccaactggctacacctaatctacagcagttttttccccaggcaactcggcaatcacttcttgggccacctccagtaggcgtccccatgaatccctcccagtttaacctgtccggtaggaaccctcagaaacaggctcggacgagtagtagtacaacgcccaacaggaaggattcttcgagtcaaacaatgccagtggaagacaagagcgaccccccagagggatccgaggaggcagccgagcctcgcatggacacacccgaggaccaggatctgcccccttgccctgaggatatagcaaaggagaaacgcactcccgctccggagccagaaccttgcgaggcttcggaactccctgcaaagcgcctgcgatcctccgaggagccaaccgaaaaagagcctccaggccaactccaggtcaaggcgcaaccccaggcaagaatgacggtccccaagcagacccagacccctgatttgttaccagaagcccttgaagcgcaggtgctcccaaggttccagcctcgcgtgctacaggtacaggctcaggtgcaatcacaaacacagcctaggataccttcaactgacactcaggtacaaccgaagcttcaaaaacaggcacagacccagaccagccctgaacatcttgtattacagcaaaagcaggtgcagccacagctgcagcaagaggccgagcctcagaagcaggtccagcctcaggtgcaacctcaggcacacagccagggcccaagacaagtgcagcttcagcaggaggctgaacctctgaaacaggtccaaccgcaggtccagccgcaggcccacagccagccccctcgccaggtgcagctgcagttgcagaaacaggtgcaaacccagacctaccctcaggtccatacgcaggctcagccctccgtacagccacaagagcaccctccagctcaggtgtccgtgcagcctcccgaacagacacacgagcagccccacacacagccacaggtcagcctgctggcccctgagcaaactccggtcgtggtccatgtttgcggactcgagatgcctcctgatgcagtggaggctggaggcggtatggagaaaacattgcccgaaccagtggggacccaggtttctatggaggagattcagaacgagtctgcatgtgggctcgacgtaggtgaatgcgaaaatcgcgctcgcgagatgccgggagtctggggtgctgggggatctctgaaggtcacaatcctccagtcgtctgactcaagagcattttcaacagtgcctctaacacctgttccgaggcccagtgacagcgtctcatccactccagccgcaactagcacgcccagtaaacaagcattgcaatttttctgctatatttgtaaagcatcttgcagcagtcaacaagagtttcaggatcatatgtcagaaccgcagcaccagcagcggctaggggaaattcagcacatgtcacaagcatgcctgttgagcctgttaccggtccccagggatgtccttgaaacggaagatgaagaaccccctcctcgcagatggtgcaacacctgccagctgtactacatgggtgacctgatccagcacaggcgaacgcaggaccataagatcgcgaaacagtccctgagacccttttgcactgtgtgcaataggtacttcaaaaccccgaggaaatttgtcgaacatgtcaagtctcaagggcataaagacaaagccaaagaactaaagtcactggaaaaggagattgccggacaggacgaggaccattttatcacggtggacgcggtcgggtgcttcgagggggatgaggaagaggaagaggacgacgaggatgaagaggagattgaagtcgaagaagagctatgcaaacaagtccggtcccgcgatatctctagggaggagtggaagggatcggaaacttacagcccaaacaccgcttatggagtcgattttctggtgcccgttatggggtacatatgccgcatctgccacaaattttatcattccaattctggggcacaactcagccattgcaaaagccttggccacttcgagaaccttcaaaagtataaggcagccaagaaccccagccctactactaggccggtctcccgccgttgtgccataaatgccaggaacgccctgacggccctctttacctcctccgggaggcctccttcccagcccaacacacaggacaaaacccccagcaaggttactgcgagaccttcacagccaccactgccaaggaggtcaactcgactgaagacttag

SEQ ID NO: 271343 - DNA, 2514 bp, Artificial Sequence
  derived and/or modified sequence
atgttttctcagcagcagcaacagcagctgcagcagcagcaacaggccccacttcctatggctgtgagccgaggcctcccaccccagcagccccaacagcccctactgaaccttcaggggacaaactctgcttctctactcaatggttcaatgcttcaaagggctttgctgcttcagcagcttcagggacttgatcagtttgctatgccaccggctacctatgacactgctggccttaccatgcctacggccactctcggaaatctgcggggatacgggatggcctcgcccggacttgccgcacccagcctcactcccccacagctggcaactcctaacttacagcagttcttcccccaagctacccgccaatcactactcggccctccccctgtcggggtacccatgaacccctcccaatttaacctttcaggcagaaacccccagaaacaggcacggaccagcagttctaccacaccaaatcggaaggatagctcctctcagacaatgcctgtcgaggacaagagcgacccacccgagggctccgaggaagccgcagaacctaggatggacactccagaggaccaggatttgcccccttgcccagaggatatcgccaaggaaaagcggactcctgcgccagagccggagccatgcgaagcttcagagctccctgccaaaaggctcaggtcttctgaagaacctactgagaaggagccaccaggtcagttgcaagtaaaagcacagcctcaagcccgaatgaccgttccaaaacaaacccaaactcctgatttacttcccgaagcactcgaggctcaggtactgccgcgttttcaaccgagagtcctgcaggtccaggcacaagtccaaagtcagacacagcccaggatacctagcacagatacccaggtccagcctaaactgcagaagcaggcccaaacacagaccagtccagagcatcttgtcctgcagcagaagcaggttcagccccagttgcagcaggaggcagaaccacagaagcaggtacagccccaagtgcaaccacaggcacatagtcagggccctcgccaggtccagctgcaacaggaggcagagcccctgaagcaggtccagccccaagtgcacacccaggcccagcccagcgtgcagccacaggaacaccccccagctcaagtaagcgtgcaacccccagagcagacacacgaacagccacatacacagccacaggtgagcttactcgcgccagagcagacccctgtggttgtgcatgtttgtggcctggaaatgcctcctgacgccgtagaagcgggagggggaatggaaaagacgctgcccgagccagtgggcactcaagtctctatggaggaaattcagaacgaatctgcctgcggcctggacgtgggcgaatgcgagaatagagccagagaaatgcctggggtttggggagccggaggaagcttgaaggtgacaatactgcagtccagtgattcgcgcgcttttagcaccgtgcctctgaccccggtccctaggccttccgacagcgtgtcaagcaccccagccgctacgagcacccctagtaagcaggcactacaatttttttgctacatttgcaaagcatcatgtagttcgcagcaggaatttcaggaccatatgagcgagcctcagcatcagcagagattgggcgagatccagcacatgagtcaggcctgcctgctctcactgctacctgtgccgcgtgatgtgctggaaactgaggatgaggagccccctcccagaagatggtgcaacacctgccagctctattacatgggcgatctcatacagcatcggaggacccaagatcacaaaatagccaaacagagcctgcgcccattttgcacagtgtgtaaccgatacttcaagacacctcgcaagtttgtggaacatgtcaaaagtcaggggcacaaggacaaggctaaagagttgaaatcattggagaaagagattgctggccaggatgaggaccatttcatcacggtcgatgccgtgggttgcttcgaaggggatgaggaagaagaagaagatgatgaggacgaagaagaaatcgaagtggaagaggagctgtgcaagcaggtgagatcaagggacatttcaagagaagagtggaagggttccgagacttactcccctaacaccgcctatggcgtcgacttcttggtccccgttatgggatacatatgccgtatctgtcacaaattttatcacagtaattctggggcacagctttctcattgcaagtccctgggccactttgaaaacctgcagaagtacaaggcagccaaaaacccttctccaacaacacggcctgtatcccgcagatgtgccattaacgccagaaacgctttaaccgccctgttcacgagcagtgggcgtcccccttctcagcccaacacgcaggacaaaacaccttctaaagttaccgctaggccctctcagccacctctgccacgaagatctactagactgaagacatag

SEQ ID NO: 271344 - DNA, 2394 bp, Artificial Sequence
  derived and/or modified sequence
atgcccccagctacctacgatactgctggcctgacgatgccaacggccacattaggcaatcttcggggttatgggatggccagccccggattagctgcacctagcctgacccctccacagctcgctactccaaacctgcagcaatttttcccccaggccacccgccagtccctactcggacccccacccgtaggcgtcccaatgaacccgagccaattcaacctgtccggcaggaacccacaaaagcaggccagaaccagcagctccacaacaccaaaccggaaggattccagcagccagacgatgcctgtggaggataaatcagatcccccagagggctcagaggaagccgcagagcctcggatggatacccccgaggatcaggaccttccaccgtgtccagaagatattgctaaggagaagcggacacctgctcccgagccggagccatgcgaggcttccgaactgcccgctaaacggctgagatccagtgaggaacctaccgaaaaagagccccctggccaactgcaggttaaggctcagcctcaagccagaatgacggtgccaaaacaaacccaaacacctgacctcctgccagaggctctagaggctcaggtcctgccgagatttcagccaagggtgttgcaggttcaggcccaagtccaatctcagactcaaccaaggattccctcaacagacacacaagtgcagccgaagctccagaagcaggcacagactcagacctcgcccgaacatctggtccttcagcagaagcaggttcagcctcaacttcaacaggaagccgagccacagaaacaggtgcagccccaggttcaaccccaggcacacagccaagggccacgccaggtccagctccagcaggaagccgagcctctcaagcaggtgcagccacaggtgcagccccaggcccactctcagcctcccagacaggtgcagcttcagctccagaagcaagtgcagactcagacttacccccaggttcatacacaggcccaacctagcgtgcagccgcaggaacacccaccagctcaggttagtgtccagccacctgagcaaactcacgagcagccgcacacacagcctcaggtgagcctgcttgcacccgaacaaacacccgttgttgtccatgtttgcggccttgagatgcccccagacgccgtagaggctggcggtggcatggagaagaccctgcctgagccagtgggaacccaggtgtccatggaggaaatccagaacgagtccgcgtgtggactcgacgttggtgaatgcgagaaccgggctagggagatgcccggagtctggggagctggaggatccctgaaggtcactatcctccaaagctctgattcccgggctttctctactgtgccgctgacacccgtccctaggcccagcgactctgtgtcgagcacaccagccgcaaccagcactccctcaaagcaggctcttcagttcttttgttatatttgtaaagcatcatgtagctctcagcaggagtttcaagatcatatgtcagagcctcagcaccagcagaggctgggagagatccagcacatgtctcaagcctgcctgctttcactgctgcccgtgccacgggatgtgctagaaaccgaggatgaagaacccccaccccgacgatggtgtaacacttgtcaactttattatatgggcgacctgattcagcataggagaacccaggaccacaagatcgctaagcaatctttacgaccattttgtacggtttgtaatagatactttaagactccccgtaaattcgtagaacacgtgaaatctcaggggcacaaggataaagcaaaggaacttaagtccctagaaaaggagatagcagggcaggatgaggatcactttatcacggtcgacgccgtgggatgttttgaaggtgacgaggaggaagaggaggatgacgaggacgaggaagagattgaggtcgaggaagaactgtgtaaacaggtgagatcaagggatattagccgggaggaatggaagggctccgagacatattctcccaacacagcttacggggtagatttcttagttccagttatgggctacatctgccggatatgtcataagttctatcacagcaatagcggcgcacaattaagccattgcaagagtcttggacacttcgaaaacttacaaaagtacaaagcagccaagaaccctagtccaacaaccaggcccgtgtcccgcagatgcgccatcaatgcacgtaacgcgctgacagccctgttcacttccagtgggagaccaccttcccagcctaacactcaagataagaccccttccaaggtgaccgcacgcccaagccagcccccacttcccaggcgttcaaccagacttaagacatag

SEQ ID NO: 271345 - DNA, 2742 bp, Artificial Sequence
  derived and/or modified sequence
accatgttcagccagcagcagcagcagcagctccagcaacagcagcagcagctccagcagttacagcagcagcagctccagcagcagcaattgcagcagcagcagttactgcagctccagcagctgctccagcagtccccaccacaggccccgttgcccatggctgtcagccgggggctccccccgcagcagccacagcagccgcttctgaatctccagggcaccaactcagcctccctcctcaacggctccatgctgcagagagctttgcttttacagcagttgcaaggactggaccagtttgcaatgccaccagccacgtatgacactgccggtctcaccatgcccacagcaacactgggtaacctccgaggctatggcatggcatccccaggcctcgcagcccccagcctcacacccccacaactggccactccaaatttgcaacagttctttccccaggccactcgccagtccttgctgggacctcctcctgttggggtccccatgaacccttcccagttcaacctttcaggacggaacccccagaaacaggcccggacctcctcctctaccacccccaatcgaaaggattcttcttctcagacaatgcctgtggaagacaagtcagaccccccagaggggtctgaggaagccgcagagccccggatggacacaccagaagaccaagatttaccgccctgcccagaggacatcgccaaggaaaaacgcactccagcacctgagcctgagccttgtgaggcgtccgagctgccagcaaagagattgaggagctcagaagagcccacagagaaggaacctccagggcagttacaggtgaaggcccagccgcaggcccggatgacagtaccgaaacagacacagacaccagacctgctgcctgaggccctggaagcccaagtgctgccacgattccagccacgggtcctgcaggtccaggcccaggtgcagtcacagactcagccgcggataccatccacagacacccaggtgcagccaaagctgcagaagcaggcgcaaacacagacctctccagagcacttagtgctgcaacagaagcaggtgcagccacagctgcagcaggaggcagagccacagaagcaggtgcagccacaggtacagccacaggcacattcacagggcccaaggcaggtgcagctgcagcaggaggcagagccgctgaagcaggtgcagccacaggtccacacacaggcacagccaagcgtccagccacaggagcatcctccagcgcaggtgtcagtacagccaccagagcagacccatgagcagcctcacacccagccgcaggtgtcgttgctggctccagagcaaacaccagttgtggttcatgtctgcgggctggagatgccacctgatgcagtagaagctggtggaggcatggaaaagaccttgccagagcctgtgggcacccaagtcagcatggaagagattcagaatgagtcggcctgtggcctagatgtgggagaatgtgaaaacagagcgagagagatgccaggggtatggggcgccgggggctccctgaaggtcaccattctgcagagcagtgacagccgggcctttagcactgtacccctgacacctgtcccccgccccagtgactccgtctcctccacccctgcggctaccagcactccctctaagcaggccctccagttcttctgctacatctgcaaggccagctgctccagccagcaggagttccaggaccacatgtcggagcctcagcaccagcagcggctaggggagatccagcacatgagccaagcctgcctcctgtccctgctgcccgtgccccgggacgtcctggagacagaggatgaggagcctccaccaaggcgctggtgcaacacctgccagctctactacatgggggacctgatccaacaccgcaggacacaggaccacaagattgccaaacaatccttgcgacccttctgcaccgtttgcaaccgctacttcaaaacccctcgcaagtttgtggagcacgtgaagtcccaggggcataaggacaaagccaaggagctgaagtcgcttgagaaagaaattgctggccaagatgaggaccacttcattacagtggacgctgtgggttgcttcgagggtgatgaagaagaggaagaggatgatgaggatgaagaagagatcgaggttgaggaggaactctgcaagcaggtgaggtccagagatatatccagagaggagtggaagggctcggagacctacagccccaatactgcatatggtgtggacttcctggtgcccgtgatgggctatatctgccgcatctgccacaagttctatcacagcaactcaggggcacagctctcccactgcaagtccctgggccactttgagaacctgcagaaatacaaggcggccaagaaccccagccccaccacccgacctgtgagccgccggtgcgcaatcaacgcccggaacgctttgacagccctgttcacctccagcggccgcccaccctcccagcccaacacccaggacaaaacacccagcaaggtgacggctcgaccctcccagcccccactacctcggcgctcaacccgcctcaaaacctgatagagggacctccctgtccctggcctgcctgggtccagatctgctaatgctttttaggagtctgcctggaaactttgacatggttcatgtttttactcaaaatccaataaaacaaggtagtttggc

SEQ ID NO: 271346 - DNA, 2907 bp, Artificial Sequence
  derived and/or modified sequence
cccgcccgcatttgggccttacgagcccacaggccccggagtagcagcggggaggccgggagcccgcgggccggagccgcccggccgaggcgtgggggctgcggggccggcccatccgtgggggcgacttgagcgttgagggcgcgcggggaggcgagccaccatgttcagccagcagcagcagcagcagctccagcaacagcagcagcagctccagcagttacagcagcagcagctccagcagcagcaattgcagcagcagcagttactgcagctccagcagctgctccagcagtccccaccacaggccccgttgcccatggctgtcagccgggggctccccccgcagcagccacagcagccgcttctgaatctccagggcaccaactcagcctccctcctcaacggctccatgctgcagagagctttgcttttacagcagttgcaaggactggaccagtttgcaatgccaccagccacgtatgacactgccggtctcaccatgcccacagcaacactgggtaacctccgaggctatggcatggcatccccaggcctcgcagcccccagcctcacacccccacaactggccactccaaatttgcaacagttctttccccaggccactcgccagtccttgctgggacctcctcctgttggggtccccatgaacccttcccagttcaacctttcaggacggaacccccagaaacaggcccggacctcctcctctaccacccccaatcgaaaggattcttcttctcagacaatgcctgtggaagacaagtcagaccccccagaggggtctgaggaagccgcagagccccggatggacacaccagaagaccaagatttaccgccctgcccagaggacatcgccaaggaaaaacgcactccagcacctgagcctgagccttgtgaggcgtccgagctgccagcaaagagattgaggagctcagaagagcccacagagaaggaacctccagggcagttacaggtgaaggcccagccgcaggcccggatgacagtaccgaaacagacacagacaccagacctgctgcctgaggccctggaagcccaagtgctgccacgattccagccacgggtcctgcaggtccaggcccaggtgcagtcacagactcagccgcggataccatccacagacacccaggtgcagccaaagctgcagaagcaggcgcaaacacagacctctccagagcacttagtgctgcaacagaagcaggtgcagccacagctgcagcaggaggcagagccacagaagcaggtgcagccacaggtacagccacaggcacattcacagggcccaaggcaggtgcagctgcagcaggaggcagagccgctgaagcaggtgcagccacaggtccacacacaggcacagccaagcgtccagccacaggagcatcctccagcgcaggtgtcagtacagccaccagagcagacccatgagcagcctcacacccagccgcaggtgtcgttgctggctccagagcaaacaccagttgtggttcatgtctgcgggctggagatgccacctgatgcagtagaagctggtggaggcatggaaaagaccttgccagagcctgtgggcacccaagtcagcatggaagagattcagaatgagtcggcctgtggcctagatgtgggagaatgtgaaaacagagcgagagagatgccaggggtatggggcgccgggggctccctgaaggtcaccattctgcagagcagtgacagccgggcctttagcactgtacccctgacacctgtcccccgccccagtgactccgtctcctccacccctgcggctaccagcactccctctaagcaggccctccagttcttctgctacatctgcaaggccagctgctccagccagcaggagttccaggaccacatgtcggagcctcagcaccagcagcggctaggggagatccagcacatgagccaagcctgcctcctgtccctgctgcccgtgccccgggacgtcctggagacagaggatgaggagcctccaccaaggcgctggtgcaacacctgccagctctactacatgggggacctgatccaacaccgcaggacacaggaccacaagattgccaaacaatccttgcgacccttctgcaccgtttgcaaccgctacttcaaaacccctcgcaagtttgtggagcacgtgaagtcccaggggcataaggacaaagccaaggagctgaagtcgcttgagaaagaaattgctggccaagatgaggaccacttcattacagtggacgctgtgggttgcttcgagggtgatgaagaagaggaagaggatgatgaggatgaagaagagatcgaggttgaggaggaactctgcaagcaggtgaggtccagagatatatccagagaggagtggaagggctcggagacctacagccccaatactgcatatggtgtggacttcctggtgcccgtgatgggctatatctgccgcatctgccacaagttctatcacagcaactcaggggcacagctctcccactgcaagtccctgggccactttgagaacctgcagaaatacaaggcggccaagaaccccagccccaccacccgacctgtgagccgccggtgcgcaatcaacgcccggaacgctttgacagccctgttcacctccagcggccgcccaccctcccagcccaacacccaggacaaaacacccagcaaggtgacggctcgaccctcccagcccccactacctcggcgctcaacccgcctcaaaacctgatagagggacctccctgtccctggcctgcctgggtccagatctgctaatgctttttaggagtctgcctggaaactttgacatggttcatgtttttactcaaaatccaataaaacaaggtagtttggctgtgc

SEQ ID NO: 271347 - DNA, 2984 bp, Artificial Sequence
  derived and/or modified sequence
cccgcccgcatttgggccttacgagcccacaggccccggagtagcagcggggaggccgggagcccgcgggccggagccgcccggccgaggcgtgggggctgcggggccggcccatccgtgggggcgacttgagcgttgagggcgcgcggggaggcgagccaccatgttcagccagcagcagcagcagcagctccagcaacagcagcagcagctccagcagttacagcagcagcagctccagcagcagcaattgcagcagcagcagttactgcagctccagcagctgctccagcagtccccaccacaggccccgttgcccatggctgtcagccgggggctccccccgcagcagccacagcagccgcttctgaatctccagggcaccaactcagcctccctcctcaacggctccatgctgcagagagctttgcttttacagcagttgcaaggactggaccagtttgcaatgccaccagccacgtatgacactgccggtctcaccatgcccacagcaacactgggtaacctccgaggctatggcatggcatccccaggcctcgcagcccccagcctcacacccccacaactggccactccaaatttgcaacagttctttccccaggccactcgccagtccttgctgggacctcctcctgttggggtccccatgaacccttcccagttcaacctttcaggacggaacccccagaaacaggcccggacctcctcctctaccacccccaatcgaaaggattcttcttctcagacaatgcctgtggaagacaagtcagaccccccagaggggtctgaggaagccgcagagccccggatggacacaccagaagaccaagatttaccgccctgcccagaggacatcgccaaggaaaaacgcactccagcacctgagcctgagccttgtgaggcgtccgagctgccagcaaagagattgaggagctcagaagagcccacagagaaggaacctccagggcagttacaggtgaaggcccagccgcaggcccggatgacagtaccgaaacagacacagacaccagacctgctgcctgaggccctggaagcccaagtgctgccacgattccagccacgggtcctgcaggtccaggcccaggtgcagtcacagactcagccgcggataccatccacagacacccaggtgcagccaaagctgcagaagcaggcgcaaacacagacctctccagagcacttagtgctgcaacagaagcaggtgcagccacagctgcagcaggaggcagagccacagaagcaggtgcagccacaggtacagccacaggcacattcacagggcccaaggcaggtgcagctgcagcaggaggcagagccgctgaagcaggtgcagccacaggtgcagccccaggcacattcacagcccccaaggcaggtgcagctgcagctgcagaagcaggtccagacacagacatatccacaggtccacacacaggcacagccaagcgtccagccacaggagcatcctccagcgcaggtgtcagtacagccaccagagcagacccatgagcagcctcacacccagccgcaggtgtcgttgctggctccagagcaaacaccagttgtggttcatgtctgcgggctggagatgccacctgatgcagtagaagctggtggaggcatggaaaagaccttgccagagcctgtgggcacccaagtcagcatggaagagattcagaatgagtcggcctgtggcctagatgtgggagaatgtgaaaacagagcgagagagatgccaggggtatggggcgccgggggctccctgaaggtcaccattctgcagagcagtgacagccgggcctttagcactgtacccctgacacctgtcccccgccccagtgactccgtctcctccacccctgcggctaccagcactccctctaagcaggccctccagttcttctgctacatctgcaaggccagctgctccagccagcaggagttccaggaccacatgtcggagcctcagcaccagcagcggctaggggagatccagcacatgagccaagcctgcctcctgtccctgctgcccgtgccccgggacgtcctggagacagaggatgaggagcctccaccaaggcgctggtgcaacacctgccagctctactacatgggggacctgatccaacaccgcaggacacaggaccacaagattgccaaacaatccttgcgacccttctgcaccgtttgcaaccgctacttcaaaacccctcgcaagtttgtggagcacgtgaagtcccaggggcataaggacaaagccaaggagctgaagtcgcttgagaaagaaattgctggccaagatgaggaccacttcattacagtggacgctgtgggttgcttcgagggtgatgaagaagaggaagaggatgatgaggatgaagaagagatcgaggttgaggaggaactctgcaagcaggtgaggtccagagatatatccagagaggagtggaagggctcggagacctacagccccaatactgcatatggtgtggacttcctggtgcccgtgatgggctatatctgccgcatctgccacaagttctatcacagcaactcaggggcacagctctcccactgcaagtccctgggccactttgagaacctgcagaaatacaaggcggccaagaaccccagccccaccacccgacctgtgagccgccggtgcgcaatcaacgcccggaacgctttgacagccctgttcacctccagcggccgcccaccctcccagcccaacacccaggacaaaacacccagcaaggtgacggctcgaccctcccagcccccactacctcggcgctcaacccgcctcaaaacctgatagagggacctccctgtccctggcctgcctgggtccagatctgctaatgctttttaggagtctgcctggaaactttgacatggttcatgtttttactcaaaatccaataaaacaaggtagtttg

SEQ ID NO: 271348 - DNA, 2645 bp, Artificial Sequence
  derived and/or modified sequence
atgttcagccagcagcagcagcagcagctccagcaacagcagcaggccccgttgcccatggctgtcagccgggggctccccccgcagcagccacagcagccgcttctgaatctccagggcaccaactcagcctccctcctcaacggctccatgctgcagagagctttgcttttacagcagttgcaaggactggaccagtttgcaatgccaccagccacgtatgacactgccggtctcaccatgcccacagcaacactgggtaacctccgaggctatggcatggcatccccaggcctcgcagcccccagcctcacacccccacaactggccactccaaatttgcaacagttctttccccaggccactcgccagtccttgctgggacctcctcctgttggggtccccatgaacccttcccagttcaacctttcaggacggaacccccagaaacaggcccggacctcctcctctaccacccccaatcgaaaggattcttcttctcagacaatgcctgtggaagacaagtcagaccccccagaggggtctgaggaagccgcagagccccggatggacacaccagaagaccaagatttaccgccctgcccagaggacatcgccaaggaaaaacgcactccagcacctgagcctgagccttgtgaggcgtccgagctgccagcaaagagattgaggagctcagaagagcccacagagaaggaacctccagggcagttacaggtgaaggcccagccgcaggcccggatgacagtaccgaaacagacacagacaccagacctgctgcctgaggccctggaagcccaagtgctgccacgattccagccacgggtcctgcaggtccaggcccaggtgcagtcacagactcagccgcggataccatccacagacacccaggtgcagccaaagctgcagaagcaggcgcaaacacagacctctccagagcacttagtgctgcaacagaagcaggtgcagccacagctgcagcaggaggcagagccacagaagcaggtgcagccacaggtacagccacaggcacattcacagggcccaaggcaggtgcagctgcagcaggaggcagagccgctgaagcaggtgcagccacaggtccacacacaggcacagccaagcgtccagccacaggagcatcctccagcgcaggtgtcagtacagccaccagagcagacccatgagcagcctcacacccagccgcaggtgtcgttgctggctccagagcaaacaccagttgtggttcatgtctgcgggctggagatgccacctgatgcagtagaagctggtggaggcatggaaaagaccttgccagagcctgtgggcacccaagtcagcatggaagagattcagaatgagtcggcctgtggcctagatgtgggagaatgtgaaaacagagcgagagagatgccaggggtatggggcgccgggggctccctgaaggtcaccattctgcagagcagtgacagccgggcctttagcactgtacccctgacacctgtcccccgccccagtgactccgtctcctccacccctgcggctaccagcactccctctaagcaggccctccagttcttctgctacatctgcaaggccagctgctccagccagcaggagttccaggaccacatgtcggagcctcagcaccagcagcggctaggggagatccagcacatgagccaagcctgcctcctgtccctgctgcccgtgccccgggacgtcctggagacagaggatgaggagcctccaccaaggcgctggtgcaacacctgccagctctactacatgggggacctgatccaacaccgcaggacacaggaccacaagattgccaaacaatccttgcgacccttctgcaccgtttgcaaccgctacttcaaaacccctcgcaagtttgtggagcacgtgaagtcccaggggcataaggacaaagccaaggagctgaagtcgcttgagaaagaaattgctggccaagatgaggaccacttcattacagtggacgctgtgggttgcttcgagggtgatgaagaagaggaagaggatgatgaggatgaagaagagatcgaggttgaggaggaactctgcaagcaggtgaggtccagagatatatccagagaggagtggaagggctcggagacctacagccccaatactgcatatggtgtggacttcctggtgcccgtgatgggctatatctgccgcatctgccacaagttctatcacagcaactcaggggcacagctctcccactgcaagtccctgggccactttgagaacctgcagaaatacaaggcggccaagaaccccagccccaccacccgacctgtgagccgccggtgcgcaatcaacgcccggaacgctttgacagccctgttcacctccagcggccgcccaccctcccagcccaacacccaggacaaaacacccagcaaggtgacggctcgaccctcccagcccccactacctcggcgctcaacccgcctcaaaacctgatagagggacctccctgtccctggcctgcctgggtccagatctgctaatgctttttaggagtctgcctggaaactttgacatggttcatgtttttactcaaaatccaataaaacaaggtagtttggctgtgc

SEQ ID NO: 271349 - DNA, 2858 bp, Artificial Sequence
  derived and/or modified sequence
cttacgagcccacaggccccggagtagcagcggggaggccgggagcccgcgggccggagccgcccggccgaggcgtgggggctgcggggccggcccatccgtgggggcgacttgagcgttgagggcgcgcggggaggcgagccaccatgttcagccagcagcagcagcagcagctccagcaacagcagcagcagctccagcagttacagcagcagcagctccagcagcagcaattgcagcagcagcagttactgcagctccagcagctgctccagcagtccccaccacaggccccgttgcccatggctgtcagccggactggaccagtttgcaatgccaccagccacgtatgacactgccggtctcaccatgcccacagcaacactgggtaacctccgaggctatggcatggcatccccaggcctcgcagcccccagcctcacacccccacaactggccactccaaatttgcaacagttctttccccaggccactcgccagtccttgctgggacctcctcctgttggggtccccatgaacccttcccagttcaacctttcaggacggaacccccagaaacaggcccggacctcctcctctaccacccccaatcgaaaggattcttcttctcagacaatgcctgtggaagacaagtcagaccccccagaggggtctgaggaagccgcagagccccggatggacacaccagaagaccaagatttaccgccctgcccagaggacatcgccaaggaaaaacgcactccagcacctgagcctgagccttgtgaggcgtccgagctgccagcaaagagattgaggagctcagaagagcccacagagaaggaacctccagggcagttacaggtgaaggcccagccgcaggcccggatgacagtaccgaaacagacacagacaccagacctgctgcctgaggccctggaagcccaagtgctgccacgattccagccacgggtcctgcaggtccaggcccaggtgcagtcacagactcagccgcggataccatccacagacacccaggtgcagccaaagctgcagaagcaggcgcaaacacagacctctccagagcacttagtgctgcaacagaagcaggtgcagccacagctgcagcaggaggcagagccacagaagcaggtgcagccacaggtacagccacaggcacattcacagggcccaaggcaggtgcagctgcagcaggaggcagagccgctgaagcaggtgcagccacaggtgcagccccaggcacattcacagcccccaaggcaggtgcagctgcagctgcagaagcaggtccagacacagacatatccacaggtccacacacaggcacagccaagcgtccagccacaggagcatcctccagcgcaggtgtcagtacagccaccagagcagacccatgagcagcctcacacccagccgcaggtgtcgttgctggctccagagcaaacaccagttgtggttcatgtctgcgggctggagatgccacctgatgcagtagaagctggtggaggcatggaaaagaccttgccagagcctgtgggcacccaagtcagcatggaagagattcagaatgagtcggcctgtggcctagatgtgggagaatgtgaaaacagagcgagagagatgccaggggtatggggcgccgggggctccctgaaggtcaccattctgcagagcagtgacagccgggcctttagcactgtacccctgacacctgtcccccgccccagtgactccgtctcctccacccctgcggctaccagcactccctctaagcaggccctccagttcttctgctacatctgcaaggccagctgctccagccagcaggagttccaggaccacatgtcggagcctcagcaccagcagcggctaggggagatccagcacatgagccaagcctgcctcctgtccctgctgcccgtgccccgggacgtcctggagacagaggatgaggagcctccaccaaggcgctggtgcaacacctgccagctctactacatgggggacctgatccaacaccgcaggacacaggaccacaagattgccaaacaatccttgcgacccttctgcaccgtttgcaaccgctacttcaaaacccctcgcaagtttgtggagcacgtgaagtcccaggggcataaggacaaagccaaggagctgaagtcgcttgagaaagaaattgctggccaagatgaggaccacttcattacagtggacgctgtgggttgcttcgagggtgatgaagaagaggaagaggatgatgaggatgaagaagagatcgaggttgaggaggaactctgcaagcaggtgaggtccagagatatatccagagaggagtggaagggctcggagacctacagccccaatactgcatatggtgtggacttcctggtgcccgtgatgggctatatctgccgcatctgccacaagttctatcacagcaactcaggggcacagctctcccactgcaagtccctgggccactttgagaacctgcagaaatacaaggcggccaagaaccccagccccaccacccgacctgtgagccgccggtgcgcaatcaacgcccggaacgctttgacagccctgttcacctccagcggccgcccaccctcccagcccaacacccaggacaaaacacccagcaaggtgacggctcgaccctcccagcccccactacctcggcgctcaacccgcctcaaaacctgatagagggacctccctgtccctggcctgcctgggtccagatctgctaatgctttttaggagtctgcctggaaactttgacatggttcatgtttttactcaaaatccaataaaacaaggtagtttggctgtgc

SEQ ID NO: 271350 - DNA, 2613 bp, Artificial Sequence
  derived and/or modified sequence
atgttcagccagcagcagcagcagcagctgcagcagcagcagcagcagctgcagcagctgcagcagcagcagctgcagcagcagcagctgcagcagcagcagctgctgcagctgcagcagctgctgcagcagagccccccccaggcccccctgcccatggccgtgagcagaggcctgcccccccagcagccccagcagcccctgctgaacctgcagggcaccaacagcgccagcctgctgaacggcagcatgctgcagagagccctgctgctgcagcagctgcagggcctggaccagttcgccatgccccccgccacctacgacaccgccggcctgaccatgcccaccgccaccctgggcaacctgagaggctacggcatggccagccccggcctggccgcccccagcctgacccccccccagctggccacccccaacctgcagcagttcttcccccaggccaccagacagagcctgctgggccccccccccgtgggcgtgcccatgaaccccagccagttcaacctgagcggcagaaacccccagaagcaggccagaaccagcagcagcaccacccccaacagaaaggacagcagcagccagaccatgcccgtggaggacaagagcgacccccccgagggcagcgaggaggccgccgagcccagaatggacacccccgaggaccaggacctgcccccctgccccgaggacatcgccaaggagaagagaacccccgcccccgagcccgagccctgcgaggccagcgagctgcccgccaagagactgagaagcagcgaggagcccaccgagaaggagccccccggccagctgcaggtgaaggcccagccccaggccagaatgaccgtgcccaagcagacccagacccccgacctgctgcccgaggccctggaggcccaggtgctgcccagattccagcccagagtgctgcaggtgcaggcccaggtgcagagccagacccagcccagaatccccagcaccgacacccaggtgcagcccaagctgcagaagcaggcccagacccagaccagccccgagcacctggtgctgcagcagaagcaggtgcagccccagctgcagcaggaggccgagccccagaagcaggtgcagccccaggtgcagccccaggcccacagccagggccccagacaggtgcagctgcagcaggaggccgagcccctgaagcaggtgcagccccaggtgcacacccaggcccagcccagcgtgcagccccaggagcacccccccgcccaggtgagcgtgcagccccccgagcagacccacgagcagccccacacccagccccaggtgagcctgctggcccccgagcagacccccgtggtggtgcacgtgtgcggcctggagatgccccccgacgccgtggaggccggcggcggcatggagaagaccctgcccgagcccgtgggcacccaggtgagcatggaggagatccagaacgagagcgcctgcggcctggacgtgggcgagtgcgagaacagagccagagagatgcccggcgtgtggggcgccggcggcagcctgaaggtgaccatcctgcagagcagcgacagcagagccttcagcaccgtgcccctgacccccgtgcccagacccagcgacagcgtgagcagcacccccgccgccaccagcacccccagcaagcaggccctgcagttcttctgctacatctgcaaggccagctgcagcagccagcaggagttccaggaccacatgagcgagccccagcaccagcagagactgggcgagatccagcacatgagccaggcctgcctgctgagcctgctgcccgtgcccagagacgtgctggagaccgaggacgaggagcccccccccagaagatggtgcaacacctgccagctgtactacatgggcgacctgatccagcacagaagaacccaggaccacaagatcgccaagcagagcctgagacccttctgcaccgtgtgcaacagatacttcaagacccccagaaagttcgtggagcacgtgaagagccagggccacaaggacaaggccaaggagctgaagagcctggagaaggagatcgccggccaggacgaggaccacttcatcaccgtggacgccgtgggctgcttcgagggcgacgaggaggaggaggaggacgacgaggacgaggaggagatcgaggtggaggaggagctgtgcaagcaggtgagaagcagagacatcagcagagaggagtggaagggcagcgagacctacagccccaacaccgcctacggcgtggacttcctggtgcccgtgatgggctacatctgcagaatctgccacaagttctaccacagcaacagcggcgcccagctgagccactgcaagagcctgggccacttcgagaacctgcagaagtacaaggccgccaagaaccccagccccaccaccagacccgtgagcagaagatgcgccatcaacgccagaaacgccctgaccgccctgttcaccagcagcggcagaccccccagccagcccaacacccaggacaagacccccagcaaggtgaccgccagacccagccagccccccctgcccagaagaagcaccagactgaagacctag

SEQ ID NO: 271351 - DNA, 2697 bp, Artificial Sequence
  derived and/or modified sequence
atgttcagccagcagcagcagcagcagctgcagcagcagcagcagcagctgcagcagctgcagcagcagcagctgcagcagcagcagctgcagcagcagcagctgctgcagctgcagcagctgctgcagcagagccccccccaggcccccctgcccatggccgtgagcagaggcctgcccccccagcagccccagcagcccctgctgaacctgcagggcaccaacagcgccagcctgctgaacggcagcatgctgcagagagccctgctgctgcagcagctgcagggcctggaccagttcgccatgccccccgccacctacgacaccgccggcctgaccatgcccaccgccaccctgggcaacctgagaggctacggcatggccagccccggcctggccgcccccagcctgacccccccccagctggccacccccaacctgcagcagttcttcccccaggccaccagacagagcctgctgggccccccccccgtgggcgtgcccatgaaccccagccagttcaacctgagcggcagaaacccccagaagcaggccagaaccagcagcagcaccacccccaacagaaaggacagcagcagccagaccatgcccgtggaggacaagagcgacccccccgagggcagcgaggaggccgccgagcccagaatggacacccccgaggaccaggacctgcccccctgccccgaggacatcgccaaggagaagagaacccccgcccccgagcccgagccctgcgaggccagcgagctgcccgccaagagactgagaagcagcgaggagcccaccgagaaggagccccccggccagctgcaggtgaaggcccagccccaggccagaatgaccgtgcccaagcagacccagacccccgacctgctgcccgaggccctggaggcccaggtgctgcccagattccagcccagagtgctgcaggtgcaggcccaggtgcagagccagacccagcccagaatccccagcaccgacacccaggtgcagcccaagctgcagaagcaggcccagacccagaccagccccgagcacctggtgctgcagcagaagcaggtgcagccccagctgcagcaggaggccgagccccagaagcaggtgcagccccaggtgcagccccaggcccacagccagggccccagacaggtgcagctgcagcaggaggccgagcccctgaagcaggtgcagccccaggtgcagccccaggcccacagccagccccccagacaggtgcagctgcagctgcagaagcaggtgcagacccagacctacccccaggtgcacacccaggcccagcccagcgtgcagccccaggagcacccccccgcccaggtgagcgtgcagccccccgagcagacccacgagcagccccacacccagccccaggtgagcctgctggcccccgagcagacccccgtggtggtgcacgtgtgcggcctggagatgccccccgacgccgtggaggccggcggcggcatggagaagaccctgcccgagcccgtgggcacccaggtgagcatggaggagatccagaacgagagcgcctgcggcctggacgtgggcgagtgcgagaacagagccagagagatgcccggcgtgtggggcgccggcggcagcctgaaggtgaccatcctgcagagcagcgacagcagagccttcagcaccgtgcccctgacccccgtgcccagacccagcgacagcgtgagcagcacccccgccgccaccagcacccccagcaagcaggccctgcagttcttctgctacatctgcaaggccagctgcagcagccagcaggagttccaggaccacatgagcgagccccagcaccagcagagactgggcgagatccagcacatgagccaggcctgcctgctgagcctgctgcccgtgcccagagacgtgctggagaccgaggacgaggagcccccccccagaagatggtgcaacacctgccagctgtactacatgggcgacctgatccagcacagaagaacccaggaccacaagatcgccaagcagagcctgagacccttctgcaccgtgtgcaacagatacttcaagacccccagaaagttcgtggagcacgtgaagagccagggccacaaggacaaggccaaggagctgaagagcctggagaaggagatcgccggccaggacgaggaccacttcatcaccgtggacgccgtgggctgcttcgagggcgacgaggaggaggaggaggacgacgaggacgaggaggagatcgaggtggaggaggagctgtgcaagcaggtgagaagcagagacatcagcagagaggagtggaagggcagcgagacctacagccccaacaccgcctacggcgtggacttcctggtgcccgtgatgggctacatctgcagaatctgccacaagttctaccacagcaacagcggcgcccagctgagccactgcaagagcctgggccacttcgagaacctgcagaagtacaaggccgccaagaaccccagccccaccaccagacccgtgagcagaagatgcgccatcaacgccagaaacgccctgaccgccctgttcaccagcagcggcagaccccccagccagcccaacacccaggacaagacccccagcaaggtgaccgccagacccagccagccccccctgcccagaagaagcaccagactgaagacctag

SEQ ID NO: 271352 - DNA, 2514 bp, Artificial Sequence
  derived and/or modified sequence
atgttcagccagcagcagcagcagcagctgcagcagcagcagcaggcccccctgcccatggccgtgagcagaggcctgcccccccagcagccccagcagcccctgctgaacctgcagggcaccaacagcgccagcctgctgaacggcagcatgctgcagagagccctgctgctgcagcagctgcagggcctggaccagttcgccatgccccccgccacctacgacaccgccggcctgaccatgcccaccgccaccctgggcaacctgagaggctacggcatggccagccccggcctggccgcccccagcctgacccccccccagctggccacccccaacctgcagcagttcttcccccaggccaccagacagagcctgctgggccccccccccgtgggcgtgcccatgaaccccagccagttcaacctgagcggcagaaacccccagaagcaggccagaaccagcagcagcaccacccccaacagaaaggacagcagcagccagaccatgcccgtggaggacaagagcgacccccccgagggcagcgaggaggccgccgagcccagaatggacacccccgaggaccaggacctgcccccctgccccgaggacatcgccaaggagaagagaacccccgcccccgagcccgagccctgcgaggccagcgagctgcccgccaagagactgagaagcagcgaggagcccaccgagaaggagccccccggccagctgcaggtgaaggcccagccccaggccagaatgaccgtgcccaagcagacccagacccccgacctgctgcccgaggccctggaggcccaggtgctgcccagattccagcccagagtgctgcaggtgcaggcccaggtgcagagccagacccagcccagaatccccagcaccgacacccaggtgcagcccaagctgcagaagcaggcccagacccagaccagccccgagcacctggtgctgcagcagaagcaggtgcagccccagctgcagcaggaggccgagccccagaagcaggtgcagccccaggtgcagccccaggcccacagccagggccccagacaggtgcagctgcagcaggaggccgagcccctgaagcaggtgcagccccaggtgcacacccaggcccagcccagcgtgcagccccaggagcacccccccgcccaggtgagcgtgcagccccccgagcagacccacgagcagccccacacccagccccaggtgagcctgctggcccccgagcagacccccgtggtggtgcacgtgtgcggcctggagatgccccccgacgccgtggaggccggcggcggcatggagaagaccctgcccgagcccgtgggcacccaggtgagcatggaggagatccagaacgagagcgcctgcggcctggacgtgggcgagtgcgagaacagagccagagagatgcccggcgtgtggggcgccggcggcagcctgaaggtgaccatcctgcagagcagcgacagcagagccttcagcaccgtgcccctgacccccgtgcccagacccagcgacagcgtgagcagcacccccgccgccaccagcacccccagcaagcaggccctgcagttcttctgctacatctgcaaggccagctgcagcagccagcaggagttccaggaccacatgagcgagccccagcaccagcagagactgggcgagatccagcacatgagccaggcctgcctgctgagcctgctgcccgtgcccagagacgtgctggagaccgaggacgaggagcccccccccagaagatggtgcaacacctgccagctgtactacatgggcgacctgatccagcacagaagaacccaggaccacaagatcgccaagcagagcctgagacccttctgcaccgtgtgcaacagatacttcaagacccccagaaagttcgtggagcacgtgaagagccagggccacaaggacaaggccaaggagctgaagagcctggagaaggagatcgccggccaggacgaggaccacttcatcaccgtggacgccgtgggctgcttcgagggcgacgaggaggaggaggaggacgacgaggacgaggaggagatcgaggtggaggaggagctgtgcaagcaggtgagaagcagagacatcagcagagaggagtggaagggcagcgagacctacagccccaacaccgcctacggcgtggacttcctggtgcccgtgatgggctacatctgcagaatctgccacaagttctaccacagcaacagcggcgcccagctgagccactgcaagagcctgggccacttcgagaacctgcagaagtacaaggccgccaagaaccccagccccaccaccagacccgtgagcagaagatgcgccatcaacgccagaaacgccctgaccgccctgttcaccagcagcggcagaccccccagccagcccaacacccaggacaagacccccagcaaggtgaccgccagacccagccagccccccctgcccagaagaagcaccagactgaagacctag

SEQ ID NO: 271353 - DNA, 2394 bp, Artificial Sequence
  derived and/or modified sequence
atgccccccgccacctacgacaccgccggcctgaccatgcccaccgccaccctgggcaacctgagaggctacggcatggccagccccggcctggccgcccccagcctgacccccccccagctggccacccccaacctgcagcagttcttcccccaggccaccagacagagcctgctgggccccccccccgtgggcgtgcccatgaaccccagccagttcaacctgagcggcagaaacccccagaagcaggccagaaccagcagcagcaccacccccaacagaaaggacagcagcagccagaccatgcccgtggaggacaagagcgacccccccgagggcagcgaggaggccgccgagcccagaatggacacccccgaggaccaggacctgcccccctgccccgaggacatcgccaaggagaagagaacccccgcccccgagcccgagccctgcgaggccagcgagctgcccgccaagagactgagaagcagcgaggagcccaccgagaaggagccccccggccagctgcaggtgaaggcccagccccaggccagaatgaccgtgcccaagcagacccagacccccgacctgctgcccgaggccctggaggcccaggtgctgcccagattccagcccagagtgctgcaggtgcaggcccaggtgcagagccagacccagcccagaatccccagcaccgacacccaggtgcagcccaagctgcagaagcaggcccagacccagaccagccccgagcacctggtgctgcagcagaagcaggtgcagccccagctgcagcaggaggccgagccccagaagcaggtgcagccccaggtgcagccccaggcccacagccagggccccagacaggtgcagctgcagcaggaggccgagcccctgaagcaggtgcagccccaggtgcagccccaggcccacagccagccccccagacaggtgcagctgcagctgcagaagcaggtgcagacccagacctacccccaggtgcacacccaggcccagcccagcgtgcagccccaggagcacccccccgcccaggtgagcgtgcagccccccgagcagacccacgagcagccccacacccagccccaggtgagcctgctggcccccgagcagacccccgtggtggtgcacgtgtgcggcctggagatgccccccgacgccgtggaggccggcggcggcatggagaagaccctgcccgagcccgtgggcacccaggtgagcatggaggagatccagaacgagagcgcctgcggcctggacgtgggcgagtgcgagaacagagccagagagatgcccggcgtgtggggcgccggcggcagcctgaaggtgaccatcctgcagagcagcgacagcagagccttcagcaccgtgcccctgacccccgtgcccagacccagcgacagcgtgagcagcacccccgccgccaccagcacccccagcaagcaggccctgcagttcttctgctacatctgcaaggccagctgcagcagccagcaggagttccaggaccacatgagcgagccccagcaccagcagagactgggcgagatccagcacatgagccaggcctgcctgctgagcctgctgcccgtgcccagagacgtgctggagaccgaggacgaggagcccccccccagaagatggtgcaacacctgccagctgtactacatgggcgacctgatccagcacagaagaacccaggaccacaagatcgccaagcagagcctgagacccttctgcaccgtgtgcaacagatacttcaagacccccagaaagttcgtggagcacgtgaagagccagggccacaaggacaaggccaaggagctgaagagcctggagaaggagatcgccggccaggacgaggaccacttcatcaccgtggacgccgtgggctgcttcgagggcgacgaggaggaggaggaggacgacgaggacgaggaggagatcgaggtggaggaggagctgtgcaagcaggtgagaagcagagacatcagcagagaggagtggaagggcagcgagacctacagccccaacaccgcctacggcgtggacttcctggtgcccgtgatgggctacatctgcagaatctgccacaagttctaccacagcaacagcggcgcccagctgagccactgcaagagcctgggccacttcgagaacctgcagaagtacaaggccgccaagaaccccagccccaccaccagacccgtgagcagaagatgcgccatcaacgccagaaacgccctgaccgccctgttcaccagcagcggcagaccccccagccagcccaacacccaggacaagacccccagcaaggtgaccgccagacccagccagccccccctgcccagaagaagcaccagactgaagacctag

SEQ ID NO: 271354 - protein, 842 aa, Artificial Sequence
  derived and/or modified sequence
MFSQQQQQQLQQQQQQLQQLQQQQLQQQQLQQQQLLQLQQLLQQSPPQAPLPMAVSRGLPPQQPQQPLLNLQGTNSASLLNGSMLQRALLLQQLQGLDQFAMPPATYDTAGLTMPTATLGNLRGYGMASPGLAAPSLTPPQLATPNLQQFFPQATRQSLLGPPPVGVPMNPSQFNLSGRNPQKQARTSSSTTPNRKDSSSQTMPVEDKSDPPEGSEEAAEPRMDTPEDQDLPPCPEDIAKEKRTPAPEPEPCEASELPAKRLRSSEEPTEKEPPGQLQVKAQPQARMTVPKQTQTPDLLPEALEAQVLPRFQPRVLQVQAQVQSQTQPRIPSTDTQVQPKLQKQAQTQTSPEHLVLQQKQVQPQLQQEAEPQKQVQPQVHTQAQPSVQPQEHPPAQVSVQPPEQTHEQPHTQPQVSLLAPEQTPVVVHVCGLEMPPDAVEAGGGMEKTLPEPVGTQVSMEEIQNESACGLDVGECENRAREMPGVWGAGGSLKVTILQSSDSRAFSTVPLTPVPRPSDSVSSTPAATSTPSKQALQFFCYICKASCSSQQEFQDHMSEPQHQQRLGEIQHMSQACLLSLLPVPRDVLETEDEEPPPRRWCNTCQLYYMGDLIQHRRTQDHKIAKQSLRPFCTVCNRYFKTPRKFVEHVKSQGHKDKAKELKSLEKEIAGQDEDHFITVDAVGCFEGDEEEEEDDEDEEEIEVEEELCKQVRSRDISREEWKGSETYSPNTAYGVDFLVPVMGYICRICHKFYHSNSGAQLSHCKSLGHFENLQKYKAAKNPSPTTRPVSRRCAINARNALTALFTSSGRPPSQPNTQDKTPSKVTARPSQPPLPRRSTRLKT

SEQ ID NO: 271355 - protein, 168 aa, Artificial Sequence
  derived and/or modified sequence
MFSQQQQQQLQQQQQQLQQLQQQQLQQQQLQQQQLLQLQQLLQQSPPQAPLPMAVSRGLPPQQPQQPLLNLQGTNSASLLNGSMLQRALLLQQLQGLDQFAMPPATYDTAGLTMPTATLGNLRGYGMASPGLAAPSLTPPQLATPNLQQFFPQATRQSLLGPPPVGVP

SEQ ID NO: 271356 - DNA, 759 bp, Artificial Sequence
  derived and/or modified sequence
atgttctctcagcaacagcaacaacagttgcagcagcagcaacagcagctccagcagctccagcaacagcagctccagcagcagcagcttcaacagcagcaactgttgcagctacagcagttgctccagcagtctccccctcaggcccctctccccatggccgtgtctcgcgggctgcctccgcagcagccccaacagcctctcctgaatctgcagggaacgaactctgccagtcttttgaacggtagcatgctacaacgggctctcctgctgcaacagctacagggtttagatcaatttgcgatgccacctgccacctatgatacagccgggctgacaatgccaactgccactctgggaaatctacgtggttacgggatggcgagtcctggattggctgcccctagcttaacaccaccacagctggcgacacctaatctgcaacagtttttcccacaggccactcgtcagtcacttctgggaccacctcctgtgggggttcccatgaacccctcccagtttaatttgagtggccgcaacccccagaagcaagcccgcacttcttcctccaccacccccaatcggaaggacagcagcagccagactatgcctgtggaggacaagagcgacccgccggaaggttctgaggaagccgccgaacctcgcatggatacccctgaagaccaggaccttcccccatgccccgaagacattgcgaaagagaagcgaacacccgcccccgagcccgagccatgctag

SEQ ID NO: 271357 - DNA, 2529 bp, Artificial Sequence
  derived and/or modified sequence
atgttctctcagcagcaacaacagcagctgcagcagcaacagcaacagttgcagcaactccagcagcagcaattgcaacagcagcagttgcagcagcagcagctgcttcaattacagcagcttctgcagcagtcccctccccaagctcccctgcccatggcggtgtctcggggactacccccccaacaaccgcaacagcctctactgaacctgcaaggcacaaattccgctagcctgctgaatggcagcatgctgcagcgcgccttgctcttacagcaactgcagggcttggatcagttcgccatgcctcccgccacctatgacaccgccggactgacaatgccaactgccaccctgggaaacctgaggggatacggaatggcaagcccaggactcgctgctccaagccttacgcctccacagctggcaacacccaacctacagcaatttttcccgcaagctacgcggcagtccctactcgggccacctccagtcggtgtacctatgaacccgtcccagtttaacttaagcggtaggaacccgcagaagcaggccagaacctctagttcgaccactccaaatcgaaaggattcctcatcccagacaatgcctgtcgaggataaatccgatcctcctgaggggagcgaggaggcagctgaaccacgtatggacactccagaggatcaggatctgcctccctgtcctgaagatattgccaaagagaagaggactcccgcccccgaacctgagccctgcgaggcctccgagctaccggccaagagactgagaagcagcgaggagccaaccgagaaagagcctcccggacagctgcaggttaaagcacagccccaggcccggatgaccgtgcccaaacaaacacagacccctgacctcttgcccgaagccctggaagctcaagtgctgcccaggttccagccccgggttcttcaagtccaagcccaggtccagtcacagactcaaccacgcatacccagcaccgacacgcaggtccagccgaaactgcaaaaacaagcccaaacacaaacctctcctgagcatctcgtgctccaacaaaagcaagtccaacctcagctgcaacaggaagccgaaccacagaagcaagtgcagccacaagtccacacccaggcccaacccagcgtccagccccaagagcaccctccagcacaggtttctgtgcagcctccagaacaaacccatgagcaacctcacactcagcctcaggtgagtttattagccccagagcagacgcctgttgtggttcacgtgtgcgggctcgagatgccccccgatgcagtggaagccggaggcggaatggagaagacgctccctgaacccgttggaacccaggtctctatggaagagatccaaaatgagtcagcctgtggtttggacgtaggggagtgcgaaaatagggctagggaaatgccgggcgtctggggcgcaggcggctccctaaaggtgaccattctccagtcgtctgacagcagggcattttccactgtccctctgaccccagtgcccagaccatcagactcagtgtccagcacaccggcagccacctcgacgccgtccaagcaggctctgcaattcttttgctacatctgcaaggccagctgctcaagtcagcaggagtttcaagaccacatgtctgaaccgcagcatcagcagaggctcggtgaaattcagcatatgtcccaggcctgtttgctcagcttgcttccagttcctcgcgacgttctggagacagaggacgaagaaccaccaccacgacggtggtgtaacacatgtcagctctattacatgggcgatctgatacagcaccgaaggactcaagatcataagatcgcgaaacaatcacttaggcctttttgtactgtgtgcaatcgctatttcaagacacctcggaaatttgttgaacacgttaaatctcagggacacaaagacaaggctaaggagttgaagagcttagaaaaggaaattgccggacaggacgaggaccactttatcaccgttgatgccgtgggttgcttcgagggagatgaagaagaagaagaagacgacgaggacgaagaggagatcgaggtggaagaggagctgtgtaagcaggtgaggagccgtgatatctctagggaagaatggaaggggtccgaaacctatagtcctaataccgcttacggagtcgacttccttgtgccggttatggggtatatctgtaggatctgccacaagttctatcattcaaattccggagcccagctctcacactgtaagagcctgggccatttcgagaatctccagaaatataaagcggcgaagaatcccagccctacgactcggcccgtcagccgccggtgtgccattaacgcgagaaacgcactaaccgcactattcacctcatctggccggcctccctctcagcccaacacccaagataagaccccctccaaggttacagcaaggccaagccagccccccctgcccaggagatccaccagacttaagacttag

SEQ ID NO: 271358 - DNA, 759 bp, Artificial Sequence
  derived and/or modified sequence
atgttcagccagcagcagcagcagcagctgcagcagcagcagcagcagctgcagcagctgcagcagcagcagctgcagcagcagcagctgcagcagcagcagctgctgcagctgcagcagctgctgcagcagagccccccccaggcccccctgcccatggctgtgtcccggggcctgcccccccagcagccccagcagcccctgctgaacctgcagggcaccaacagcgccagcctgctgaatggctccatgctgcagagggccctgctgctgcagcagctgcagggcctggaccagtttgccatgcccccagccacctatgacacagctggcctgaccatgcccacagccaccctgggcaacctgcggggctacggcatggccagccctggcctggccgcccccagcctgaccccaccccagctggccacccccaacctgcagcagttcttcccccaggccacccggcagagcctgctgggccccccacctgtgggcgtgcccatgaaccccagccagttcaacctgtctggaagaaacccccagaagcaggcccggaccagcagcagcaccacccccaacaggaaggacagcagcagccagaccatgcctgtggaggacaagagtgaccccccagagggcagcgaggaggccgctgagcccaggatggacaccccagaggaccaggacctgcccccctgcccagaggacatcgccaaggagaagaggaccccagcccctgagcctgagccctgctag

SEQ ID NO: 271359 - DNA, 2529 bp, Artificial Sequence
  derived and/or modified sequence
atgttcagccagcagcagcagcagcagctgcagcagcagcagcagcagctgcagcagctgcagcagcagcagctgcagcagcagcagctgcagcagcagcagctgctgcagctgcagcagctgctgcagcagagccccccccaggcccccctgcccatggctgtgtcccggggcctgcccccccagcagccccagcagcccctgctgaacctgcagggcaccaacagcgccagcctgctgaatggctccatgctgcagagggccctgctgctgcagcagctgcagggcctggaccagtttgccatgcccccagccacctatgacacagctggcctgaccatgcccacagccaccctgggcaacctgcggggctacggcatggccagccctggcctggccgcccccagcctgaccccaccccagctggccacccccaacctgcagcagttcttcccccaggccacccggcagagcctgctgggccccccacctgtgggcgtgcccatgaaccccagccagttcaacctgtctggaagaaacccccagaagcaggcccggaccagcagcagcaccacccccaacaggaaggacagcagcagccagaccatgcctgtggaggacaagagtgaccccccagagggcagcgaggaggccgctgagcccaggatggacaccccagaggaccaggacctgcccccctgcccagaggacatcgccaaggagaagaggaccccagcccctgagcctgagccctgtgaggccagcgagctgcctgccaagaggctgcggagcagcgaggagcccacagagaaggagcccccaggccagctgcaggtgaaggcccagccccaggccaggatgacagtgcccaagcagacccagaccccagacctgctgcctgaggccctggaggcccaggtgctgccccgcttccagccccgggtgctgcaggtgcaggcccaggtgcagagccagacccagccccgcatccccagcacagacacccaggtgcagcccaagctgcagaagcaggcccagacccagaccagccctgagcacctggtgctgcagcagaagcaggtgcagccccagctgcagcaggaggccgagccccagaagcaggtgcagccccaggtgcacacccaggcccagcccagcgtgcagccccaggagcaccccccagcccaggtgtctgtgcagcccccagagcagacccatgagcagccccacacccagccccaggtgtccctgctggcccctgagcagacccctgtggtggtgcacgtgtgtggcctggagatgcccccagatgctgtggaggccggcggcggcatggagaagaccctgcctgagcctgtgggcacccaggtgtccatggaggagatccagaatgaaagtgcctgtggcctggatgtgggggagtgtgagaacagagcccgggagatgcctggggtgtggggcgctgggggcagcctgaaggtgaccatcctgcagagcagtgacagccgggccttcagcacagtgcccctgacccctgtgccccggcccagcgacagcgtgagcagcaccccagctgccaccagcacccccagcaagcaggccctgcagttcttctgctacatctgcaaggccagctgcagcagccagcaggagttccaggaccacatgtctgagccccagcaccagcagaggctgggggagatccagcacatgagccaggcctgcctgctgagcctgctgcctgtgcccagagatgtgctggagacagaagatgaggagcccccaccccggcgctggtgcaacacctgccagctgtactacatgggagacctgatccagcacaggaggacccaggaccacaagatcgccaagcagagcctgcggcccttctgcaccgtgtgcaaccgctacttcaagacccccaggaagtttgtggagcacgtgaagagccagggccacaaggacaaggccaaggagctgaagagcctggagaaggagattgctggccaggatgaggaccacttcatcaccgtggatgctgtgggctgctttgaaggagatgaggaggaggaggaggatgatgaagatgaggaggagattgaggtggaggaggagctgtgcaagcaggtgcgcagccgggacatcagccgggaggagtggaagggcagcgagacctacagccccaacacagcctacggcgtggacttcctggtgcctgtgatgggctacatctgccgcatctgccacaagttctaccacagcaacagcggggcccagctgagccactgcaagagcctgggccactttgagaacctgcagaagtacaaggccgccaagaaccccagccccaccaccaggcctgtgagccgccgctgtgccatcaatgccagaaatgccctgacagccctcttcaccagcagcggccggccccccagccagcccaacacccaggacaagacccccagcaaggtgacagcccggcccagccagccccccctgcccaggaggagcacccggctgaagacctag

SEQ ID NO: 271360 - DNA, 759 bp, Artificial Sequence
  derived and/or modified sequence
atgttcagccagcagcagcagcagcagctgcagcagcagcagcagcagctccagcagctgcagcagcaacagctccaacagcagcagctgcagcagcagcaattgcttcaactgcagcagctcttgcagcagagcccgccacaggccccgctgcccatggccgtgagtagaggcttgccaccacaacaaccacagcagccactgctgaatctgcaaggcactaattccgcctcgcttctcaacggctccatgctccaacgcgccttattactgcagcaactgcaagggctggatcagttcgcaatgcccccagctacgtacgatacagccggcctcaccatgccgaccgcaacacttggaaatctgagagggtacggcatggcaagcccggggctcgctgccccaagtctgactcctccgcagttggccacccctaatctgcagcagttcttcccacaagctacacgacagagtctgctgggaccccccccagtcggcgtccccatgaatccttctcaattcaatctgtctgggagaaatccacagaagcaggctagaacctctagcagcactacaccaaacaggaaggactcgtcttcacagactatgccggtggaggacaaatctgaccccccggagggcagcgaggaagctgccgagccacgaatggacacacccgaagatcaggatctgcccccatgtcctgaggatattgctaaggagaagcgcactccagcccccgaacctgagccatgttag

SEQ ID NO: 271361 - DNA, 2529 bp, Artificial Sequence
  derived and/or modified sequence
atgttcagccagcagcagcagcagcagctgcagcagcagcagcagcagttacaacagttacagcagcagcaactccagcagcaacagctgcaacagcagcagctgctgcagctgcagcagctcctgcagcaatcgccaccccaagcaccattgcctatggcagtgtctcgcgggctgcccccccagcagccccagcagcccctgctcaacttgcagggcacgaattccgctagtctgttgaatggatcaatgcttcagcgtgccctcctcctccagcaactccagggcctcgatcagttcgccatgccccccgccacatacgacactgctggacttacaatgcctacagcgaccctcggcaacttgagaggatacggcatggcaagccctggactggccgcgcccagcctgacaccgccacaactcgctacccccaatctgcaacaatttttcccccaagctacccggcaaagtctcctaggtccacctcctgtgggcgtgccaatgaaccccagccagtttaacctgtctgggcgcaaccctcagaaacaggcccgtacatcttcctccactacaccaaataggaaagattcttctagccagacaatgccagttgaggataaatcggaccccccggaggggtcggaggaagccgccgagcctcgcatggatacccccgaggaccaggaccttcccccttgccccgaggacattgcaaaagaaaagaggaccccggcgccggagcccgaaccatgtgaagcatcagaactgcctgctaagcgccttcgatccagcgaggaaccaactgagaaggaaccacccgggcaactgcaggtaaaagcccagccacaggcacggatgaccgtgccaaagcagactcaaaccccggacctcctgccagaggcccttgaagcccaggtgctcccgagattccagccacgcgtgctccaagttcaggcgcaggtgcaaagccagacgcagccacgcattcctagcaccgatacacaggtccagcctaaattgcaaaaacaggcccaaacgcagacctctcccgagcaccttgtcttgcaacagaaacaggttcagcctcagctgcagcaggaagctgagccacagaagcaagtccagcctcaggtgcacactcaggcccagccatccgtccagccccaggaacatcccccggcgcaggtctccgtgcagcctcctgagcagacacatgaacaaccccacactcagccccaggtgtccttgctggcacccgagcagacacccgtcgttgtgcatgtctgtggactggagatgcccccggacgccgtagaagctgggggcgggatggaaaaaacgctgcccgaacctgtcggcacccaggtctccatggaggagatccaaaatgaatccgcatgtggactggatgtcggagaatgtgaaaaccgagcaagagagatgcccggcgtctggggggctggtggtagtctgaaagtgactatcctccaaagctctgacagtagagctttcagtaccgttccgctcactcccgtgccaagaccgtcggattctgtgagctctacccccgctgctaccagcactccctcaaagcaggcgttgcaattcttctgctacatatgtaaggctagctgttcctcacagcaggaatttcaggaccacatgtccgaaccacagcatcagcagcgcctgggggaaattcagcatatgtcacaagcttgtctgctaagtctattgccggtacctcgtgacgtgcttgaaaccgaggatgaggagccgcctccccgtcggtggtgcaacacctgtcagctgtattacatgggtgacctgatccagcaccgtcggactcaagatcataaaattgctaaacagagtctccgcccgttttgcactgtgtgtaaccgatactttaagactccccgtaagtttgtggagcacgttaagagtcagggccacaaggataaggcaaaggaactgaagtctctggagaaagagatcgccggccaggacgaagaccactttataaccgtcgatgccgttggttgtttcgagggagatgaggaagaagaggaggacgacgaggatgaagaagaaattgaagtggaggaagagttatgtaaacaggtgagaagccgcgacatctcccgagaggaatggaaggggtctgaaacctattctcccaacaccgcatacggagtagatttcctggtgccggtgatgggatacatctgcaggatttgccataagttctatcacagtaatagcggcgctcagctcagccactgtaagtctctgggacacttcgagaacttacagaaatataaggctgccaagaacccatccccgactactcgccccgtctcaagaagatgcgccataaatgcacggaacgccctaacagctctttttaccagcagcggtcggcctcctagccagccgaatacacaggacaaaacgcccagtaaggtcactgcccgaccctctcagccgccactgcctcgacgttccacgcgtctcaagacttag

SEQ ID NO: 271362 - DNA, 759 bp, Artificial Sequence
  derived and/or modified sequence
atgttctcccagcaacagcagcagcaactccagcagcagcaacagcaattgcaacagttgcagcagcagcagttgcaacaacagcagttacaacagcagcaactgctgcagctgcagcagctactgcaacagagtcctccacaggcgccactacctatggcagtcagcagaggtctgcctccacagcagcctcaacagccgctactgaacctacaaggcactaactcagccagcctgctaaacggcagcatgttgcagagggcccttctgctgcagcagctgcaggggctggaccaattcgcaatgcccccagctacatatgacacggcaggcctgaccatgcccaccgcaactctgggcaacctgcgtggctatggaatggcttccccgggtttagctgccccatctctgactccgcctcagctggctactcccaatttgcagcagttttttccccaggccacccgtcagtctctgctaggccctccaccggtaggcgtccctatgaatcccagtcagttcaatctctcaggtcgcaacccccagaaacaagccaggactagctcaagcacgacccccaatcggaaagacagctcttcgcagacaatgccagtcgaggataagtcagatccaccagaagggagtgaagaagccgctgagcccagaatggatactccagaagaccaagatctccctccatgcccggaagacatcgccaaagagaagcgtacacctgctcccgagcctgagccatgttag

SEQ ID NO: 271363 - DNA, 2529 bp, Artificial Sequence
  derived and/or modified sequence
atgttctctcagcaacagcagcaacagctccagcaacagcagcagcaattgcaacagctccagcagcaacagctgcagcaacaacaacttcaacagcaacagctcctgcaactgcagcagttgttgcagcagtcacctccccaagcgccactgccaatggccgtttcccgcggtctacccccacagcagccacagcagcctttactgaacctgcaagggactaacagtgcaagtctactgaatggctctatgctgcaacgcgctctgttacttcagcagctgcagggtctcgaccagttcgcaatgcccccagccacctatgacaccgccggactcacgatgcccacagctactctggggaacctgagagggtatggcatggcctcacctggactggcagccccttcgttgacccctccacagctagcaacaccaaaccttcagcagttttttccccaagcaacaaggcagagtctgctgggccctccccctgtaggtgtacctatgaaccccagtcagtttaatctctctggccgtaatccacaaaagcaggcccgaactagctcctcaaccacaccgaaccgaaaggattccagcagccagacaatgccagtagaagacaagtcagatcctccagagggctctgaggaggcagccgagccccgtatggacactcctgaagaccaagacttacctccctgtcctgaggacattgcaaaggaaaagagaactccagctcccgaacccgagccctgtgaggccagcgagctgcccgctaagagattgaggagctctgaggaacctacggagaaggagccacctggacagcttcaggtgaaggcccaacctcaggctcgcatgaccgtacccaaacaaacgcagacccccgatttgctgcctgaggcactggaagcacaggtcctgccacgcttccagcccagggtactgcaggtgcaggcccaggtgcagagccagacgcaaccccgaatcccctccaccgacacccaagtgcagccgaaattgcagaagcaggctcagacacagacttctcccgaacacctggtcctacagcagaaacaggttcagcctcagctccagcaggaagctgagcctcagaagcaggtgcagccccaggtgcacacccaggcgcagccatccgttcagcctcaggaacatcctcccgctcaggtcagcgtgcagccccctgagcagacccatgagcaaccacatacacagcctcaggtctccttgctggctcccgaacagaccccagttgtggttcacgtttgcgggcttgagatgcccccagacgcggtcgaggcagggggaggaatggagaagaccctccccgaaccagtgggtacacaagtgtcaatggaggagattcagaacgagagcgcctgcggtctggacgtgggagagtgcgagaatagagccagggagatgcctggagtctggggagctggtggttctctgaaagtaacgatattgcaatcctcagatagtagggccttctctactgttcccctaacgccagtaccacgaccgtccgatagcgtgtcttctacccccgcagctacctccacgcctagtaagcaagctcttcagtttttttgctatatctgcaaagcaagctgcagttcacagcaggaattccaggaccacatgtcagagccacagcaccagcagagactgggagagatccagcatatgagccaagcatgcctgttgtccttacttcctgttcccagagacgtacttgaaaccgaggacgaggagcctcctcctcgacggtggtgcaacacatgccagctgtattacatgggagacctgatacaacataggcggacccaggaccataagatcgcaaagcagagcctccgaccattctgtactgtgtgtaaccggtacttcaagacaccacgcaaatttgtggaacacgtgaaaagtcagggtcataaagataaagcaaaggaactgaagtccctcgaaaaagagatcgcaggtcaggacgaggaccactttattaccgtggacgcggttggatgcttcgagggtgacgaggaggaggaagaggacgatgaggatgaagaggagatcgaagttgaagaagaactgtgcaagcaggtgagatcccgagacatttctcgcgaagagtggaagggctcagaaacctattccccaaacactgcttacggcgtggacttcctcgtaccagtgatggggtacatttgtaggatttgtcataagttttaccacagtaactccggagcgcaactgtcccactgtaagagcctcggtcattttgagaatttgcagaaatacaaagccgctaaaaaccccagtcccacgacacgccctgtttccagacggtgcgctattaacgccaggaacgcccttaccgccctgtttaccagttcaggcaggccacccagccaacctaatactcaggacaaaacaccctctaaagtgactgccagaccctcccaaccccctctacctagaagatccactaggcttaaaacatag

SEQ ID NO: 271364 - DNA, 809 bp, Artificial Sequence
  derived and/or modified sequence
ggtctccgagcctccccttcgcgatgcggaggacgcgggacagaggccaccatgttcagccagcagcagcagcagcagctccagcaacagcagcagcagctccagcagttacagcagcagcagctccagcagcagcaattgcagcagcagcagttactgcagctccagcagctgctccagcagtccccaccacaggccccgttgcccatggctgtcagccgggggctccccccgcagcagccacagcagccgcttctgaatctccagggcaccaactcagcctccctcctcaacggctccatgctgcagagagctttgcttttacagcagttgcaaggactggaccagtttgcaatgccaccagccacgtatgacactgccggtctcaccatgcccacagcaacactgggtaacctccgaggctatggcatggcatccccaggcctcgcagcccccagcctcacacccccacaactggccactccaaatttgcaacagttctttccccaggccactcgccagtccttgctgggacctcctcctgttggggtccccatgaacccttcccagttcaacctttcaggacggaacccccagaaacaggcccggacctcctcctctaccacccccaatcgaaaggattcttcttctcagacaatgcctgtggaagacaagtcagaccccccagaggggtctgaggaagccgcagagccccggatggacacaccagaagaccaagatttaccgccctgcccagaggacatcgccaaggaaaaacgcactccagcacctgagcctgagccttgtga

SEQ ID NO: 271365 - DNA, 2858 bp, Artificial Sequence
  derived and/or modified sequence
aacacgattcctctggccaggccaaggggagggcgacactgacaggcgccccccacccaggggccgtggcgaagcaaggggccggctgctcagaaaaggataagaagtggtttctcctcccctcttcccttcctcatcctgcagcccgcgcctcccccctcgccgcgctgcgcacggatggcggcgggagccgcagagccaccatgttcagccagcagcagcagcagcagctccagcaacagcagcagcagctccagcagttacagcagcagcagctccagcagcagcaattgcagcagcagcagttactgcagctccagcagctgctccagcagtccccaccacaggccccgttgcccatggctgtcagccgggggctccccccgcagcagccacagcagccgcttctgaatctccagggcaccaactcagcctccctcctcaacggctccatgctgcagagagctttgcttttacagcagttgcaaggactggaccagtttgcaatgccaccagccacgtatgacactgccggtctcaccatgcccacagcaacactgggtaacctccgaggctatggcatggcatccccaggcctcgcagcccccagcctcacacccccacaactggccactccaaatttgcaacagttctttccccaggccactcgccagtccttgctgggacctcctcctgttggggtccccatgaacccttcccagttcaacctttcaggacggaacccccagaaacaggcccggacctcctcctctaccacccccaatcgaaaggattcttcttctcagacaatgcctgtggaagacaagtcagaccccccagaggggtctgaggaagccgcagagccccggatggacacaccagaagaccaagatttaccgccctgcccagaggacatcgccaaggaaaaacgcactccagcacctgagcctgagccttgtgaggcgtccgagctgccagcaaagagattgaggagctcagaagagcccacagagaaggaacctccagggcagttacaggtgaaggcccagccgcaggcccggatgacagtaccgaaacagacacagacaccagacctgctgcctgaggccctggaagcccaagtgctgccacgattccagccacgggtcctgcaggtccaggcccaggtgcagtcacagactcagccgcggataccatccacagacacccaggtgcagccaaagctgcagaagcaggcgcaaacacagacctctccagagcacttagtgctgcaacagaagcaggtgcagccacagctgcagcaggaggcagagccacagaagcaggtgcagccacaggtccacacacaggcacagccaagcgtccagccacaggagcatcctccagcgcaggtgtcagtacagccaccagagcagacccatgagcagcctcacacccagccgcaggtgtcgttgctggctccagagcaaacaccagttgtggttcatgtctgcgggctggagatgccacctgatgcagtagaagctggtggaggcatggaaaagaccttgccagagcctgtgggcacccaagtcagcatggaagagattcagaatgagtcggcctgtggcctagatgtgggagaatgtgaaaacagagcgagagagatgccaggggtatggggcgccgggggctccctgaaggtcaccattctgcagagcagtgacagccgggcctttagcactgtacccctgacacctgtcccccgccccagtgactccgtctcctccacccctgcggctaccagcactccctctaagcaggccctccagttcttctgctacatctgcaaggccagctgctccagccagcaggagttccaggaccacatgtcggagcctcagcaccagcagcggctaggggagatccagcacatgagccaagcctgcctcctgtccctgctgcccgtgccccgggacgtcctggagacagaggatgaggagcctccaccaaggcgctggtgcaacacctgccagctctactacatgggggacctgatccaacaccgcaggacacaggaccacaagattgccaaacaatccttgcgacccttctgcaccgtttgcaaccgctacttcaaaacccctcgcaagtttgtggagcacgtgaagtcccaggggcataaggacaaagccaaggagctgaagtcgcttgagaaagaaattgctggccaagatgaggaccacttcattacagtggacgctgtgggttgcttcgagggtgatgaagaagaggaagaggatgatgaggatgaagaagagatcgaggttgaggaggaactctgcaagcaggtgaggtccagagatatatccagagaggagtggaagggctcggagacctacagccccaatactgcatatggtgtggacttcctggtgcccgtgatgggctatatctgccgcatctgccacaagttctatcacagcaactcaggggcacagctctcccactgcaagtccctgggccactttgagaacctgcagaaatacaaggcggccaagaaccccagccccaccacccgacctgtgagccgccggtgcgcaatcaacgcccggaacgctttgacagccctgttcacctccagcggccgcccaccctcccagcccaacacccaggacaaaacacccagcaaggtgacggctcgaccctcccagcccccactacctcggcgctcaacccgcctcaaaacctgatagagggacctccctgtccctggcctgcctgggtccagatctgctaatgctttttaggagtctgcctggaaactttgacatggttcatgtttttactcaaaatccaataaaacaaggtagtttggc

SEQ ID NO: 271366 - DNA, 759 bp, Artificial Sequence
  derived and/or modified sequence
atgttcagccagcagcagcagcagcagctgcagcagcagcagcagcagctgcagcagctgcagcagcagcagctgcagcagcagcagctgcagcagcagcagctgctgcagctgcagcagctgctgcagcagagccccccccaggcccccctgcccatggccgtgagcagaggcctgcccccccagcagccccagcagcccctgctgaacctgcagggcaccaacagcgccagcctgctgaacggcagcatgctgcagagagccctgctgctgcagcagctgcagggcctggaccagttcgccatgccccccgccacctacgacaccgccggcctgaccatgcccaccgccaccctgggcaacctgagaggctacggcatggccagccccggcctggccgcccccagcctgacccccccccagctggccacccccaacctgcagcagttcttcccccaggccaccagacagagcctgctgggccccccccccgtgggcgtgcccatgaaccccagccagttcaacctgagcggcagaaacccccagaagcaggccagaaccagcagcagcaccacccccaacagaaaggacagcagcagccagaccatgcccgtggaggacaagagcgacccccccgagggcagcgaggaggccgccgagcccagaatggacacccccgaggaccaggacctgcccccctgccccgaggacatcgccaaggagaagagaacccccgcccccgagcccgagccctgctag

SEQ ID NO: 271367 - DNA, 2529 bp, Artificial Sequence
  derived and/or modified sequence
atgttcagccagcagcagcagcagcagctgcagcagcagcagcagcagctgcagcagctgcagcagcagcagctgcagcagcagcagctgcagcagcagcagctgctgcagctgcagcagctgctgcagcagagccccccccaggcccccctgcccatggccgtgagcagaggcctgcccccccagcagccccagcagcccctgctgaacctgcagggcaccaacagcgccagcctgctgaacggcagcatgctgcagagagccctgctgctgcagcagctgcagggcctggaccagttcgccatgccccccgccacctacgacaccgccggcctgaccatgcccaccgccaccctgggcaacctgagaggctacggcatggccagccccggcctggccgcccccagcctgacccccccccagctggccacccccaacctgcagcagttcttcccccaggccaccagacagagcctgctgggccccccccccgtgggcgtgcccatgaaccccagccagttcaacctgagcggcagaaacccccagaagcaggccagaaccagcagcagcaccacccccaacagaaaggacagcagcagccagaccatgcccgtggaggacaagagcgacccccccgagggcagcgaggaggccgccgagcccagaatggacacccccgaggaccaggacctgcccccctgccccgaggacatcgccaaggagaagagaacccccgcccccgagcccgagccctgcgaggccagcgagctgcccgccaagagactgagaagcagcgaggagcccaccgagaaggagccccccggccagctgcaggtgaaggcccagccccaggccagaatgaccgtgcccaagcagacccagacccccgacctgctgcccgaggccctggaggcccaggtgctgcccagattccagcccagagtgctgcaggtgcaggcccaggtgcagagccagacccagcccagaatccccagcaccgacacccaggtgcagcccaagctgcagaagcaggcccagacccagaccagccccgagcacctggtgctgcagcagaagcaggtgcagccccagctgcagcaggaggccgagccccagaagcaggtgcagccccaggtgcacacccaggcccagcccagcgtgcagccccaggagcacccccccgcccaggtgagcgtgcagccccccgagcagacccacgagcagccccacacccagccccaggtgagcctgctggcccccgagcagacccccgtggtggtgcacgtgtgcggcctggagatgccccccgacgccgtggaggccggcggcggcatggagaagaccctgcccgagcccgtgggcacccaggtgagcatggaggagatccagaacgagagcgcctgcggcctggacgtgggcgagtgcgagaacagagccagagagatgcccggcgtgtggggcgccggcggcagcctgaaggtgaccatcctgcagagcagcgacagcagagccttcagcaccgtgcccctgacccccgtgcccagacccagcgacagcgtgagcagcacccccgccgccaccagcacccccagcaagcaggccctgcagttcttctgctacatctgcaaggccagctgcagcagccagcaggagttccaggaccacatgagcgagccccagcaccagcagagactgggcgagatccagcacatgagccaggcctgcctgctgagcctgctgcccgtgcccagagacgtgctggagaccgaggacgaggagcccccccccagaagatggtgcaacacctgccagctgtactacatgggcgacctgatccagcacagaagaacccaggaccacaagatcgccaagcagagcctgagacccttctgcaccgtgtgcaacagatacttcaagacccccagaaagttcgtggagcacgtgaagagccagggccacaaggacaaggccaaggagctgaagagcctggagaaggagatcgccggccaggacgaggaccacttcatcaccgtggacgccgtgggctgcttcgagggcgacgaggaggaggaggaggacgacgaggacgaggaggagatcgaggtggaggaggagctgtgcaagcaggtgagaagcagagacatcagcagagaggagtggaagggcagcgagacctacagccccaacaccgcctacggcgtggacttcctggtgcccgtgatgggctacatctgcagaatctgccacaagttctaccacagcaacagcggcgcccagctgagccactgcaagagcctgggccacttcgagaacctgcagaagtacaaggccgccaagaaccccagccccaccaccagacccgtgagcagaagatgcgccatcaacgccagaaacgccctgaccgccctgttcaccagcagcggcagaccccccagccagcccaacacccaggacaagacccccagcaaggtgaccgccagacccagccagccccccctgcccagaagaagcaccagactgaagacctag

SEQ ID NO: 271368 - DNA, 507 bp, Artificial Sequence
  derived and/or modified sequence
atgttctcccaacagcagcagcagcaactgcagcagcaacagcagcagcttcagcagctccagcagcagcagctccagcagcagcagttgcagcagcagcaactgttacagctacagcagctgctccaacagtcgcctccgcaagcaccgcttcctatggcagtgagcagaggtctgcccccacagcagccgcagcagcctctgctgaatctgcagggcaccaatagtgccagtcttctcaacggaagtatgttacagagagcgcttcttttgcagcaattgcaaggattggaccagtttgcgatgccccctgccacctacgacacagcgggccttacaatgccgaccgccacacttggaaacctccgaggatacgggatggcttccccggggttggcggcgccgagtctgactcccccacagttggcaactcccaatctgcaacagtttttccctcaggctacaaggcagagcctgctggggccgccgcccgtgggtgtgccatag

SEQ ID NO: 271369 - DNA, 507 bp, Artificial Sequence
  derived and/or modified sequence
atgttcagccagcagcagcagcagcagctgcagcagcagcagcagcagctgcagcagctgcagcagcagcagctgcagcagcagcagctgcagcagcagcagctgctgcagctgcagcagctgctgcagcagagccccccccaggcccccctgcccatggctgtgtcccggggcctgcccccccagcagccccagcagcccctgctgaacctgcagggcaccaacagcgccagcctgctgaatggctccatgctgcagagggccctgctgctgcagcagctgcagggcctggaccagtttgccatgcccccagccacctatgacacagctggcctgaccatgcccacagccaccctgggcaacctgcggggctacggcatggccagccctggcctggccgcccccagcctgaccccaccccagctggccacccccaacctgcagcagttcttcccccaggccacccggcagagcctgctgggccccccacctgtgggcgtgccctag

SEQ ID NO: 271370 - DNA, 507 bp, Artificial Sequence
  derived and/or modified sequence
atgttcagccagcagcagcagcagcagctgcagcagcagcagcagcagctgcaacaattgcagcagcaacaattgcagcagcagcagctccagcagcaacaattgcttcagctgcaacaactgctccagcagagccctccacaagcaccactcccaatggccgtgagccgcggactgcccccacaacagcctcagcagcctctgctgaaccttcagggaacgaattctgccagcctgctgaatggatcaatgcttcagcgcgcgttacttttgcaacagctgcagggccttgaccagttcgcaatgccaccagccacatacgataccgccggccttaccatgccgacagcaaccttaggtaatttgcgggggtatggcatggccagtccaggccttgcagcacccagcctgacgcctccccaattggcgacacctaatctacagcagttctttcctcaggccactagacaaagcctgctgggcccccctcccgtgggtgtgccctag

SEQ ID NO: 271371 - DNA, 507 bp, Artificial Sequence
  derived and/or modified sequence
atgttctctcagcagcagcagcagcagctgcagcagcagcagcaacagttacaacagctccagcagcagcagctacaacagcagcagctccaacagcaacagctgttgcagctgcagcagctgctgcagcagtccccgccacaggcaccactgcctatggctgtgtccaggggactgccccctcagcagccacaacagcccttgctgaaccttcagggaaccaacagcgcaagtctactgaacgggagcatgcttcagcgggctctgctgctgcagcaacttcagggtttggaccagttcgcaatgccacccgctacttatgataccgctggtctgaccatgcctacggccactctaggcaatctgcgcggttacggaatggccagcccagggctggctgccccaagcctgacacctccacagcttgcgactccaaatttacagcagttctttcctcaggcaaccagacagtctcttctgggcccacccccagtgggcgtgccgtag

SEQ ID NO: 271372 - DNA, 684 bp, Artificial Sequence
  derived and/or modified sequence
gagggcgcgcggggaggcgaggtgcggggccgggggcggctgggtcgtggggctccgcctgcgagctggctgtgtctgcggaggaggcggctggcggggtgggagcgggcggagtggggcgcgaggaggtggcggtggtggagagaagccgtcccacggagctcaggaccacgccaccatgttcagccagcagcagcagcagcagctccagcaacagcagcagcagctccagcagttacagcagcagcagctccagcagcagcaattgcagcagcagcagttactgcagctccagcagctgctccagcagtccccaccacaggccccgttgcccatggctgtcagccgggggctccccccgcagcagccacagcagccgcttctgaatctccagggcaccaactcagcctccctcctcaacggctccatgctgcagagagctttgcttttacagcagttgcaaggactggaccagtttgcaatgccaccagccacgtatgacactgccggtctcaccatgcccacagcaacactgggtaacctccgaggctatggcatggcatccccaggcctcgcagcccccagcctcacacccccacaactggccactccaaatttgcaacagttctttccccaggccactcgccagtccttgctgggacctcctcctgttggggtccccat

SEQ ID NO: 271373 - DNA, 507 bp, Artificial Sequence
  derived and/or modified sequence
atgttcagccagcagcagcagcagcagctgcagcagcagcagcagcagctgcagcagctgcagcagcagcagctgcagcagcagcagctgcagcagcagcagctgctgcagctgcagcagctgctgcagcagagccccccccaggcccccctgcccatggccgtgagcagaggcctgcccccccagcagccccagcagcccctgctgaacctgcagggcaccaacagcgccagcctgctgaacggcagcatgctgcagagagccctgctgctgcagcagctgcagggcctggaccagttcgccatgccccccgccacctacgacaccgccggcctgaccatgcccaccgccaccctgggcaacctgagaggctacggcatggccagccccggcctggccgcccccagcctgacccccccccagctggccacccccaacctgcagcagttcttcccccaggccaccagacagagcctgctgggccccccccccgtgggcgtgccctag

SEQ ID NO: 271374 - DNA, 2457 bp, Artificial Sequence
  derived and/or modified sequence
atgttttcccaacaacaacaacagcaattgcagcaacagcagcagcagcttcagcagctacagcagcagcagctgcagcagcaacaactgcagcagcaacaattgctccaactgcagcaactgctgcaacagtcgccacctcaggcccctctgcccatggccgtgtctagggggctacctccacaacagccacagcagccactcttgaacttacagggcactaatagtgcgtccctgctcaacggaagcatgctgcagagagcgctcctgctccagcagctccaggggaatctgcgcggctatggtatggcaagcccaggactcgccgccccgtcccttacaccgcctcagcttgcaacgccaaacctccagcagttcttcccacaggctacccgccaatcactcctgggacctccaccagttggggtccccatgaatccatcacagtttaacctgagcgggagaaaccctcagaaacaggcaagaacatcttcatctactaccccgaatagaaaggattcgtcttctcaaacaatgccagtcgaggataagtccgacccgcctgagggctctgaggaagccgccgagcccagaatggatacgcctgaggatcaggacctgccaccctgccccgaagacatagccaaggaaaagagaacacccgcccctgaacccgagccttgtgaagccagcgaacttccagccaagcgcctgcgatctagcgaagagccaacggagaaggaacctccaggacaactgcaggtcaaagcacaaccccaagcaagaatgacggtgcccaagcagactcagacacctgacttgctgccagaagcccttgaagcccaagtgcttccccggttccaacccagagtcctgcaggtgcaggctcaggtccagagtcagactcaaccacgcatcccgtccaccgatacacaggtccagcccaaactgcagaagcaggcccagacccagacctccccagaacatctggtcctacagcaaaaacaggtgcagcctcagctccagcaagaagctgaaccccagaaacaggtgcagccacaggtacatacccaggcccagcccagtgtgcagcctcaggagcacccacccgctcaggtgtccgtgcaaccacccgaacagactcatgaacagccacacacacaaccgcaggtctcactgttggctccagagcaaaccccagtcgtggttcacgtgtgtggcctggagatgcccccagacgctgttgaagcaggcgggggtatggagaagacactccctgagcccgtgggtacgcaagtcagcatggaggagatacaaaacgagtcagcctgtgggttagacgtcggtgaatgcgaaaatcgcgctcgggagatgcctggggtctggggagccggcgggtccctgaaagtgacaattttgcagagctccgactcccgggcgttttccacagtgccacttacacctgtcccaaggcccagcgatagcgtaagtagcacccccgctgccacaagcaccccctccaaacaggccctgcagttcttctgttatatctgcaaggcctcctgttcatcacaacaggagttccaggaccatatgtcagagccacagcaccagcagcggctgggcgaaatccagcacatgtctcaggcctgcctgctatcattgctgcccgttccacgggacgtgctcgagaccgaggatgaggaaccccctcctcggcggtggtgtaatacttgtcagctgtattatatgggggatttgattcagcacaggagaacacaggaccataagatcgcgaagcagtccctaaggccgttctgcactgtgtgtaaccgttattttaaaaccccccgaaagtttgtggagcatgtgaagtcgcaagggcacaaggataaggcgaaggagctgaaatccctggagaaagagatagctggtcaagatgaagaccacttcatcacggttgacgcagtgggctgttttgagggagacgaagaggaggaggaggacgatgaagatgaagaggaaatcgaggttgaggaggagttatgcaaacaggtgcgtagccgggatatttcgagggaggagtggaagggctccgagacttattctcctaataccgcatatggagttgacttccttgtgcctgtgatgggatacatttgccggatctgccacaaattttaccattctaacagcggcgcacagctgtctcactgtaagtccctgggccatttcgaaaacctgcagaagtacaaagccgctaaaaacccttcaccaacaactagacccgtaagccgaagatgtgccattaacgctaggaatgccctcaccgccctgttcaccagttccggacggcccccatcacaaccaaacacccaagacaaaactcccagtaaggtgaccgctcgcccctctcaacctccgctgcctcgccgtagtacaaggctgaagacctag

SEQ ID NO: 271375 - DNA, 2457 bp, Artificial Sequence
  derived and/or modified sequence
atgttcagccagcagcagcagcagcagctgcagcagcagcagcagcagctgcagcagctgcagcagcagcagctgcagcagcagcagctgcagcagcagcagctgctgcagctgcagcagctgctgcagcagagccccccccaggcccccctgcccatggctgtgtcccggggcctgcccccccagcagccccagcagcccctgctgaacctgcagggcaccaacagcgccagcctgctgaatggctccatgctgcagagggccctgctgctgcagcagctgcagggcaacctgcggggctacggcatggccagccctggcctggccgcccccagcctgaccccaccccagctggccacccccaacctgcagcagttcttcccccaggccacccggcagagcctgctgggccccccacctgtgggcgtgcccatgaaccccagccagttcaacctgtctggaagaaacccccagaagcaggcccggaccagcagcagcaccacccccaacaggaaggacagcagcagccagaccatgcctgtggaggacaagagtgaccccccagagggcagcgaggaggccgctgagcccaggatggacaccccagaggaccaggacctgcccccctgcccagaggacatcgccaaggagaagaggaccccagcccctgagcctgagccctgtgaggccagcgagctgcctgccaagaggctgcggagcagcgaggagcccacagagaaggagcccccaggccagctgcaggtgaaggcccagccccaggccaggatgacagtgcccaagcagacccagaccccagacctgctgcctgaggccctggaggcccaggtgctgccccgcttccagccccgggtgctgcaggtgcaggcccaggtgcagagccagacccagccccgcatccccagcacagacacccaggtgcagcccaagctgcagaagcaggcccagacccagaccagccctgagcacctggtgctgcagcagaagcaggtgcagccccagctgcagcaggaggccgagccccagaagcaggtgcagccccaggtgcacacccaggcccagcccagcgtgcagccccaggagcaccccccagcccaggtgtctgtgcagcccccagagcagacccatgagcagccccacacccagccccaggtgtccctgctggcccctgagcagacccctgtggtggtgcacgtgtgtggcctggagatgcccccagatgctgtggaggccggcggcggcatggagaagaccctgcctgagcctgtgggcacccaggtgtccatggaggagatccagaatgaaagtgcctgtggcctggatgtgggggagtgtgagaacagagcccgggagatgcctggggtgtggggcgctgggggcagcctgaaggtgaccatcctgcagagcagtgacagccgggccttcagcacagtgcccctgacccctgtgccccggcccagcgacagcgtgagcagcaccccagctgccaccagcacccccagcaagcaggccctgcagttcttctgctacatctgcaaggccagctgcagcagccagcaggagttccaggaccacatgtctgagccccagcaccagcagaggctgggggagatccagcacatgagccaggcctgcctgctgagcctgctgcctgtgcccagagatgtgctggagacagaagatgaggagcccccaccccggcgctggtgcaacacctgccagctgtactacatgggagacctgatccagcacaggaggacccaggaccacaagatcgccaagcagagcctgcggcccttctgcaccgtgtgcaaccgctacttcaagacccccaggaagtttgtggagcacgtgaagagccagggccacaaggacaaggccaaggagctgaagagcctggagaaggagattgctggccaggatgaggaccacttcatcaccgtggatgctgtgggctgctttgaaggagatgaggaggaggaggaggatgatgaagatgaggaggagattgaggtggaggaggagctgtgcaagcaggtgcgcagccgggacatcagccgggaggagtggaagggcagcgagacctacagccccaacacagcctacggcgtggacttcctggtgcctgtgatgggctacatctgccgcatctgccacaagttctaccacagcaacagcggggcccagctgagccactgcaagagcctgggccactttgagaacctgcagaagtacaaggccgccaagaaccccagccccaccaccaggcctgtgagccgccgctgtgccatcaatgccagaaatgccctgacagccctcttcaccagcagcggccggccccccagccagcccaacacccaggacaagacccccagcaaggtgacagcccggcccagccagccccccctgcccaggaggagcacccggctgaagacctag

SEQ ID NO: 271376 - DNA, 2457 bp, Artificial Sequence
  derived and/or modified sequence
atgttcagccagcagcagcagcagcagctgcagcagcagcagcagcagcttcaacaattgcagcagcagcagttacaacagcagcaactgcaacagcaacagctgctacagctacaacagctccttcaacagtctccgccacaggcacctctccctatggctgtgagcagggggctcccacctcagcaaccccagcagcctttgctgaacttacaaggtacaaatagcgcgtctctgcttaatggcagcatgctgcagcgtgcacttcttctgcagcagctgcaaggcaacctgcgtgggtatggcatggcatcgcccggactggcagccccctcattgacccccccccaactggctacccctaatttacagcaatttttcccacaggctacacgccagtcccttttagggcccccaccagtgggcgtccctatgaatcccagtcagttcaatttgagcggaaggaaccctcagaaacaggccaggacctcttcctctactaccccaaaccggaaggattcaagttcccaaacaatgccagtggaagacaagagcgacccgcctgaagggagtgaggaggcagcagaaccccgcatggacacccctgaagaccaggacctgcctccctgcccagaggacatcgctaaggagaagagaaccccagctcccgagccagagccctgcgaggccagcgaacttcccgccaaacgactccgaagttctgaggaacccaccgaaaaagagcctccagggcagctgcaggtaaaggcccagcctcaggccaggatgaccgtccccaaacagactcaaacacccgacctactccctgaggccctcgaagcgcaggtgctgcccaggtttcagccgcgggtcctgcaggtgcaggctcaggttcagagccagacccaaccccgcattccctccaccgacacacaagtgcagcctaaactacaaaagcaggcccaaacacagacatcaccagaacacttagtgttacagcagaaacaggtgcaaccgcagctgcagcaggaagccgagccccaaaaacaggttcagcctcaggtccacacacaggcccagcccagcgttcagccacaggaacacccacctgcccaggtgagtgtgcaaccaccggaacagacgcatgagcagccacacacacagccccaagtgtcactactggcacccgagcagacacccgtggtggtccatgtctgtggtctggaaatgccacctgatgcagtggaagcaggcgggggaatggaaaagacactgcctgaacccgtggggacccaggtttctatggaggaaattcagaatgaaagcgcatgtggactagatgtgggtgagtgtgagaatagagcaagggaaatgccgggggtctggggggccggtggcagtttgaaagtgacaatcctgcaaagcagcgattcgagagccttttccaccgtgcctctcacacctgtgccaaggccatcggactcggtgtcctcgacccctgctgccacctctaccccaagtaaacaggccctccagttcttttgttacatttgcaaagcttcatgtagcagccagcaagagttccaagaccacatgtctgagccacaacatcagcagaggttaggagaaatccaacatatgagccaagcgtgcctgctgagccttcttcctgtcccacgggatgtgctggaaactgaggatgaggaacctcctcccagacggtggtgtaacacgtgccagctctactacatgggcgacctgatccaacacagaagaactcaggatcacaaaatagctaagcagagtttaagaccattctgcactgtgtgtaaccgctacttcaagacaccgagaaagttcgtggaacacgtgaagtcgcaaggccataaagacaaggccaaggagctgaagagcctggagaaggagattgctggacaagatgaagaccactttattaccgtagatgccgtgggatgtttcgagggtgacgaggaggaggaggaggatgacgaggacgaggaagagatcgaggtagaggaagaattgtgcaaacaggtgaggtctcgcgacattagtagagaggaatggaaaggaagcgaaacatactcacccaacaccgcctacggtgtggacttccttgtgccagtcatggggtatatctgccgtatttgccataagttctaccactctaacagtggcgcccagctctcccattgtaagagtctgggacactttgaaaacctgcaaaagtacaaagctgcaaaaaatccgtctcccactacaagacctgtttccaggcggtgcgcaattaacgctcgaaatgccctgacagccctttttacctcatccgggagacccccctctcagcccaatactcaagataaaacaccatcaaaagttacagcaagaccgagtcagcctcctcttcccagacgcagtacccggctgaagacctag

SEQ ID NO: 271377 - DNA, 2457 bp, Artificial Sequence
  derived and/or modified sequence
atgttcagccagcagcagcagcagcagctccagcaacaacagcaacagctgcaacagctgcagcagcagcaactgcagcagcagcagctgcagcaacagcaacttctccagctgcagcaactgctgcagcagagtccaccacaggcccctctgcctatggcagtcagtcggggtctgccccctcagcagcctcagcaaccgctcctgaacttgcaaggaactaattctgcctccttgctgaatgggtcaatgctacagagggctctactgcttcagcagctgcaagggaacttacgagggtacgggatggcaagccccggactcgcagcccctagcctcacaccgcctcagcttgcgacaccaaacctgcagcaattcttcccccaggcaactcgacagagcctcctggggccaccccctgttggcgtgcccatgaatcccagtcagttcaacctcagcggcagaaatccacagaagcaggcccgtaccagttcttcaactacaccaaataggaaggactctagctcacagacgatgccggtggaagacaagagtgacccccctgagggaagtgaggaggccgcagaaccgaggatggatactccagaagaccaggaccttcccccttgccctgaagacatcgcaaaagagaaacgaactcccgcacctgaacctgagccatgtgaggcttcagagctacctgcaaagcggttgcggagtagcgaggagccaaccgagaaggagccccctggccaactgcaggtcaaggcacagccacaggctagaatgacagtgcctaagcaaacccagaccccggatctgttgccagaggcattggaggctcaggtgctgcccagatttcagcccagggttttgcaagtgcaggcacaagttcaatcccagacacagccacgaataccgtccaccgacacacaagttcagccaaagctgcagaaacaggctcagacccagaccagccctgagcatctggtactgcagcaaaaacaagtccagccccagctgcaacaggaggccgaacctcagaaacaggtgcagccgcaggtgcacactcaggcccagccttccgtacagccgcaggagcatcctccagcgcaagtctccgtccagccacctgagcaaacgcacgaacagcctcacacacagcctcaagtgtctttgttagcgcctgagcagacccctgtcgtcgtgcacgtatgcggcctcgagatgccacctgatgctgtcgaagcgggaggaggcatggaaaagacactgccagagcctgtcggaacccaggtgagtatggaggagattcagaatgagtccgcttgtggcttggatgtgggcgagtgtgagaatagggccagggagatgcccggtgtgtggggagccggtggcagtcttaaggtaacaattctccaaagtagtgatagtagagccttttctacggtgccgctgacgccagtcccacgcccaagcgacagcgttagtagtactcctgcggctacatctacccctagtaaacaggctcttcagtttttttgctatatctgcaaagcttcatgttcctcccagcaagaattccaggatcatatgagtgagcctcaacaccaacagcgacttggcgagatccagcacatgtctcaggcttgcctgctcagtctcctgcccgtgcctcgcgacgtgctggaaactgaagacgaggaaccaccccctcggcgatggtgcaatacctgtcagctatattacatgggcgaccttatccagcaccggagaacccaagaccataagatagctaagcagagtctgcggcctttttgcaccgtctgcaatcgctactttaagaccccccgaaagttcgtggaacacgtgaagagtcaggggcataaagacaaggctaaagaactcaaaagtctggagaaggagatcgcagggcaggatgaggaccacttcatcacagttgacgctgtggggtgtttcgagggggacgaagaggaggaggaagacgacgaagacgaggaggaaatcgaagtcgaggaagaattgtgcaagcaggtgcgtagccgggatatttcgcgagaggaatggaaagggtctgaaacctactctcccaacacagcatacggcgtggatttcttagtgcctgttatgggctatatttgccggatttgccataaattctatcatagtaacagcggagctcagctatctcattgcaagagtttggggcactttgagaatctgcagaaatacaaggcagctaagaatccaagcccaacgaccaggccggttagtagaagatgtgccattaatgcacgcaatgctctcacagcgctatttacaagcagcggccgacctcccagtcagcccaatactcaggataagacaccttccaaagtgacagccaggccttcacagccaccacttcctcgtcggtctacacggctgaagacatag

SEQ ID NO: 271378 - DNA, 2731 bp, Artificial Sequence
  derived and/or modified sequence
cgagcccacaggccccggagtagcagcggggaggccgggagcccgcgggccggagccgcccggccgaggcgtgggggctgcggggccggcccatccgtgggggcgacttgagcgttgagggcgcgcggggaggcgagccaccatgttcagccagcagcagcagcagcagctccagcaacagcagcagcagctccagcagttacagcagcagcagctccagcagcagcaattgcagcagcagcagttactgcagctccagcagctgctccagcagtccccaccacaggccccgttgcccatggctgtcagccgggggctccccccgcagcagccacagcagccgcttctgaatctccagggcaccaactcagcctccctcctcaacggctccatgctgcagagagctttgcttttacagcagttgcaaggtaacctccgaggctatggcatggcatccccaggcctcgcagcccccagcctcacacccccacaactggccactccaaatttgcaacagttctttccccaggccactcgccagtccttgctgggacctcctcctgttggggtccccatgaacccttcccagttcaacctttcaggacggaacccccagaaacaggcccggacctcctcctctaccacccccaatcgaaaggattcttcttctcagacaatgcctgtggaagacaagtcagaccccccagaggggtctgaggaagccgcagagccccggatggacacaccagaagaccaagatttaccgccctgcccagaggacatcgccaaggaaaaacgcactccagcacctgagcctgagccttgtgaggcgtccgagctgccagcaaagagattgaggagctcagaagagcccacagagaaggaacctccagggcagttacaggtgaaggcccagccgcaggcccggatgacagtaccgaaacagacacagacaccagacctgctgcctgaggccctggaagcccaagtgctgccacgattccagccacgggtcctgcaggtccaggcccaggtgcagtcacagactcagccgcggataccatccacagacacccaggtgcagccaaagctgcagaagcaggcgcaaacacagacctctccagagcacttagtgctgcaacagaagcaggtgcagccacagctgcagcaggaggcagagccacagaagcaggtgcagccacaggtccacacacaggcacagccaagcgtccagccacaggagcatcctccagcgcaggtgtcagtacagccaccagagcagacccatgagcagcctcacacccagccgcaggtgtcgttgctggctccagagcaaacaccagttgtggttcatgtctgcgggctggagatgccacctgatgcagtagaagctggtggaggcatggaaaagaccttgccagagcctgtgggcacccaagtcagcatggaagagattcagaatgagtcggcctgtggcctagatgtgggagaatgtgaaaacagagcgagagagatgccaggggtatggggcgccgggggctccctgaaggtcaccattctgcagagcagtgacagccgggcctttagcactgtacccctgacacctgtcccccgccccagtgactccgtctcctccacccctgcggctaccagcactccctctaagcaggccctccagttcttctgctacatctgcaaggccagctgctccagccagcaggagttccaggaccacatgtcggagcctcagcaccagcagcggctaggggagatccagcacatgagccaagcctgcctcctgtccctgctgcccgtgccccgggacgtcctggagacagaggatgaggagcctccaccaaggcgctggtgcaacacctgccagctctactacatgggggacctgatccaacaccgcaggacacaggaccacaagattgccaaacaatccttgcgacccttctgcaccgtttgcaaccgctacttcaaaacccctcgcaagtttgtggagcacgtgaagtcccaggggcataaggacaaagccaaggagctgaagtcgcttgagaaagaaattgctggccaagatgaggaccacttcattacagtggacgctgtgggttgcttcgagggtgatgaagaagaggaagaggatgatgaggatgaagaagagatcgaggttgaggaggaactctgcaagcaggtgaggtccagagatatatccagagaggagtggaagggctcggagacctacagccccaatactgcatatggtgtggacttcctggtgcccgtgatgggctatatctgccgcatctgccacaagttctatcacagcaactcaggggcacagctctcccactgcaagtccctgggccactttgagaacctgcagaaatacaaggcggccaagaaccccagccccaccacccgacctgtgagccgccggtgcgcaatcaacgcccggaacgctttgacagccctgttcacctccagcggccgcccaccctcccagcccaacacccaggacaaaacacccagcaaggtgacggctcgaccctcccagcccccactacctcggcgctcaacccgcctcaaaacctgatagagggacctccctgtccctggcctgcctgggtccagatctgctaatgctttttaggagtctgcctggaaactttgacatggttcatgtttttactcaaaatccaataaaacaaggtagtttggctgtgca

SEQ ID NO: 271379 - DNA, 2457 bp, Artificial Sequence
  derived and/or modified sequence
atgttcagccagcagcagcagcagcagctgcagcagcagcagcagcagctgcagcagctgcagcagcagcagctgcagcagcagcagctgcagcagcagcagctgctgcagctgcagcagctgctgcagcagagccccccccaggcccccctgcccatggccgtgagcagaggcctgcccccccagcagccccagcagcccctgctgaacctgcagggcaccaacagcgccagcctgctgaacggcagcatgctgcagagagccctgctgctgcagcagctgcagggcaacctgagaggctacggcatggccagccccggcctggccgcccccagcctgacccccccccagctggccacccccaacctgcagcagttcttcccccaggccaccagacagagcctgctgggccccccccccgtgggcgtgcccatgaaccccagccagttcaacctgagcggcagaaacccccagaagcaggccagaaccagcagcagcaccacccccaacagaaaggacagcagcagccagaccatgcccgtggaggacaagagcgacccccccgagggcagcgaggaggccgccgagcccagaatggacacccccgaggaccaggacctgcccccctgccccgaggacatcgccaaggagaagagaacccccgcccccgagcccgagccctgcgaggccagcgagctgcccgccaagagactgagaagcagcgaggagcccaccgagaaggagccccccggccagctgcaggtgaaggcccagccccaggccagaatgaccgtgcccaagcagacccagacccccgacctgctgcccgaggccctggaggcccaggtgctgcccagattccagcccagagtgctgcaggtgcaggcccaggtgcagagccagacccagcccagaatccccagcaccgacacccaggtgcagcccaagctgcagaagcaggcccagacccagaccagccccgagcacctggtgctgcagcagaagcaggtgcagccccagctgcagcaggaggccgagccccagaagcaggtgcagccccaggtgcacacccaggcccagcccagcgtgcagccccaggagcacccccccgcccaggtgagcgtgcagccccccgagcagacccacgagcagccccacacccagccccaggtgagcctgctggcccccgagcagacccccgtggtggtgcacgtgtgcggcctggagatgccccccgacgccgtggaggccggcggcggcatggagaagaccctgcccgagcccgtgggcacccaggtgagcatggaggagatccagaacgagagcgcctgcggcctggacgtgggcgagtgcgagaacagagccagagagatgcccggcgtgtggggcgccggcggcagcctgaaggtgaccatcctgcagagcagcgacagcagagccttcagcaccgtgcccctgacccccgtgcccagacccagcgacagcgtgagcagcacccccgccgccaccagcacccccagcaagcaggccctgcagttcttctgctacatctgcaaggccagctgcagcagccagcaggagttccaggaccacatgagcgagccccagcaccagcagagactgggcgagatccagcacatgagccaggcctgcctgctgagcctgctgcccgtgcccagagacgtgctggagaccgaggacgaggagcccccccccagaagatggtgcaacacctgccagctgtactacatgggcgacctgatccagcacagaagaacccaggaccacaagatcgccaagcagagcctgagacccttctgcaccgtgtgcaacagatacttcaagacccccagaaagttcgtggagcacgtgaagagccagggccacaaggacaaggccaaggagctgaagagcctggagaaggagatcgccggccaggacgaggaccacttcatcaccgtggacgccgtgggctgcttcgagggcgacgaggaggaggaggaggacgacgaggacgaggaggagatcgaggtggaggaggagctgtgcaagcaggtgagaagcagagacatcagcagagaggagtggaagggcagcgagacctacagccccaacaccgcctacggcgtggacttcctggtgcccgtgatgggctacatctgcagaatctgccacaagttctaccacagcaacagcggcgcccagctgagccactgcaagagcctgggccacttcgagaacctgcagaagtacaaggccgccaagaaccccagccccaccaccagacccgtgagcagaagatgcgccatcaacgccagaaacgccctgaccgccctgttcaccagcagcggcagaccccccagccagcccaacacccaggacaagacccccagcaaggtgaccgccagacccagccagccccccctgcccagaagaagcaccagactgaagacctag

SEQ ID NO: 271380 - DNA, 550 bp, Artificial Sequence
  derived and/or modified sequence
aatcccttccaagagaattcagggaaactaccctcccgtttcacctcagtccctgggagctggtgcactgtctggttcttatagagcagaggtatctgtgcaggtgtgtgagagtaagtgtggtgcctcgtgcccgtgtaaatgatgtgaacaggtaatcacttacattagtgtgtacacaaatgtaccaggcatgggattgcatcaacacagtgtaataacgtgtgacctcctacggaatctatctccgcagatgcagcctctgctcccactgcggctgtggtccccctcggcgcagctctccgcgctgcgcgcccgctgagcccgaggttccccggcccatgtactggaagcatgagaacgccgccccggcgttgcccgagggctgccggctgccggccgagggcggccccgccaccgaccagttggaattgacactctggctacctcttatcttgggcattcacgacaatttctaattgcaggtgatggcccagccagggtccggctgcaaagcgaccacccgctgtcttgaagggaccgcgccgcc

SEQ ID NO: 271381 - DNA, 736 bp, Artificial Sequence
  derived and/or modified sequence
tttagtaaagacacaggcgaatcaagaggaggcgaggccggtattgtccgtctgaataggcgctgatagcgccgatgcgccgggggttgtgccggcgcagcgctgagaatcccgacgcggggccggtacccggcgcgccgaggggctggagggtgctttttcctccccttgagcgcctctcttttctctttttggtcccgtttcgccccgatctcgctctctttttgctccgggtttccctccgactggccctcgaaaggcgcctgaatccgtgtcaatatagctgcttcaatttcgccgcgcgtgtcaggcgggcgggcgggcgggtgctcaccgcgctcggggttttcttttcttcaaccaccctccgcccctcacccatctcttttttattttctttctttctctcttttctcctttttgcattttgtgccgagaggagaagggagcgaggaaggggagtggggtgggggggcgggtggagagagaaaaaattcgatttttaattactaccattaaaaaatcaaatttgcaattctttgggcggcctgatggatctcactgattgacagttggaattgacactctggctacctcttatcttgggcattcacgacaatttctaattgcaggtgatggcccagccagggtccggctgcaaagcgaccacccgctgtcttgaagggaccgcgccgcccgccatggctcagtctgacgccgaggccctggcaggagc

SEQ ID NO: 271382 - DNA, 66 bp, Artificial Sequence
  derived and/or modified sequence
atggcacagcctggatcagggtgcaaggccaccactcgctgcctcgagggaaccgcgcccccctag

SEQ ID NO: 271383 - DNA, 105 bp, Artificial Sequence
  derived and/or modified sequence
atggctcaaccaggaagcggctgcaaggcaacaacaagatgcctagagggtaccgctccccccgccatggctcagtctgatgccgaagctctggccggcgcttag

SEQ ID NO: 271384 - DNA, 66 bp, Artificial Sequence
  derived and/or modified sequence
atggcccagcccggcagcggctgcaaggccaccacccgctgcctggagggcacagccccaccctag

SEQ ID NO: 271385 - DNA, 105 bp, Artificial Sequence
  derived and/or modified sequence
atggcccagcccggcagcggctgcaaggccaccacccgctgcctggagggcacagcccccccagccatggcccagagtgatgctgaggccctggccggggcctag

SEQ ID NO: 271386 - DNA, 66 bp, Artificial Sequence
  derived and/or modified sequence
atggcccagcccggcagcggctgcaaggccaccacccggtgcctggaaggcacggctccgccatag

SEQ ID NO: 271387 - DNA, 105 bp, Artificial Sequence
  derived and/or modified sequence
atggcccagcccggcagcggctgcaaggccaccacccggtgcctggagggtaccgctccaccagctatggcgcagtccgatgcggaagcactggccggggcatag

SEQ ID NO: 271388 - DNA, 66 bp, Artificial Sequence
  derived and/or modified sequence
atggctcagccagggtcaggctgcaaagccacaacaagatgcctggaagggactgctccaccttag

SEQ ID NO: 271389 - DNA, 105 bp, Artificial Sequence
  derived and/or modified sequence
atggcacagcctggctccggctgcaaagcaactaccaggtgcctggagggaacagccccaccagccatggcccagagcgacgctgaggccctggctggagcatag

SEQ ID NO: 271390 - DNA, 66 bp, Artificial Sequence
  derived and/or modified sequence
atggcccagcccggcagcggctgcaaggccaccaccagatgcctggagggcaccgcccccccctag

SEQ ID NO: 271391 - DNA, 105 bp, Artificial Sequence
  derived and/or modified sequence
atggcccagcccggcagcggctgcaaggccaccaccagatgcctggagggcaccgccccccccgccatggcccagagcgacgccgaggccctggccggcgcctag

SEQ ID NO: 271392 - protein, 473 aa, Artificial Sequence
  derived and/or modified sequence
MWPQPRLPPRPAMSEETRQSKLAAAKKKLREYQQRNSPGVPTGAKKKKKIKNGSNPETTTSGGCHSPEDIQDILKVLVSDLNRSNGVALPPLDKWKTPKDNAATLQPSDDTVLPGGVPSPGASLTSMAASQNHDADNVPNLMDETKTFSSTESLRQLSQQLNGLVCESATCVNGEGPASSANLKDLESRYQQLAVALDSSYVTNKQLNITIEKLKQQNQEITDQLEEEKKECHQKQGALREQLQVHIQTIGILVSEKAELQTALAHTQHAARQKEGESEDLASRLQYSRRRVGELERALSAVSTQQKKADRYNKELTKERDALRLELYKNTQSNEDLKQEKSELEEKLRVLVTEKAGMQLNLEELQKKLEMTELLLQQFSSRCEAPDANQQLQQAMEERAQLEAHLGQVMESVRQLQMERDKYAENLKGESAMWRQRMQQMSEQVHTLREEKECSMSRVQELETSLAELRNQM

SEQ ID NO: 271393 - DNA, 1422 bp, Artificial Sequence
  derived and/or modified sequence
atgtggccccagcccagactgccccccagacccgccatgagcgaggagaccagacagagcaagctggccgccgccaagaagaagctgagagagtaccagcagagaaacagccccggcgtgcccaccggcgccaagaagaagaagaagatcaagaacggcagcaaccccgagaccaccaccagcggcggctgccacagccccgaggacatccaggacatcctgaaggtgctggtgagcgacctgaacagaagcaacggcgtggccctgccccccctggacaagtggaagacccccaaggacaacgccgccaccctgcagcccagcgacgacaccgtgctgcccggcggcgtgcccagccccggcgccagcctgaccagcatggccgccagccagaaccacgacgccgacaacgtgcccaacctgatggacgagaccaagaccttcagcagcaccgagagcctgagacagctgagccagcagctgaacggcctggtgtgcgagagcgccacctgcgtgaacggcgagggccccgccagcagcgccaacctgaaggacctggagagcagataccagcagctggccgtggccctggacagcagctacgtgaccaacaagcagctgaacatcaccatcgagaagctgaagcagcagaaccaggagatcaccgaccagctggaggaggagaagaaggagtgccaccagaagcagggcgccctgagagagcagctgcaggtgcacatccagaccatcggcatcctggtgagcgagaaggccgagctgcagaccgccctggcccacacccagcacgccgccagacagaaggagggcgagagcgaggacctggccagcagactgcagtacagcagaagaagagtgggcgagctggagagagccctgagcgccgtgagcacccagcagaagaaggccgacagatacaacaaggagctgaccaaggagagagacgccctgagactggagctgtacaagaacacccagagcaacgaggacctgaagcaggagaagagcgagctggaggagaagctgagagtgctggtgaccgagaaggccggcatgcagctgaacctggaggagctgcagaagaagctggagatgaccgagctgctgctgcagcagttcagcagcagatgcgaggcccccgacgccaaccagcagctgcagcaggccatggaggagagagcccagctggaggcccacctgggccaggtgatggagagcgtgagacagctgcagatggagagagacaagtacgccgagaacctgaagggcgagagcgccatgtggagacagagaatgcagcagatgagcgagcaggtgcacaccctgagagaggagaaggagtgcagcatgagcagagtgcaggagctggagaccagcctggccgagctgagaaaccagatgtag

SEQ ID NO: 271394 - DNA, 1422 bp, Artificial Sequence
  derived and/or modified sequence
atgtggccccagccccggctgcctcctcgtcccgcaatgtccgaggagactaggcaatcgaagttggctgctgcaaagaaaaagctccgggaatatcagcagcgaaacagccctggcgttcccaccggggcaaagaaaaaaaagaaaattaagaatggctccaaccctgaaactacgacctcaggcggatgccattctcccgaagatatccaggacatcttgaaagtgttggtttcagatctgaaccgctctaatggggtagcccttccccccctcgacaagtggaagacaccaaaggacaacgctgcaacgctgcaaccgtccgacgacaccgtcttgcccggcggagtcccatctccaggtgcctcgctgacctctatggccgcttctcaaaatcacgatgccgataatgtacccaatttgatggatgaaacgaagacatttagctctacggaatctctccgacagctcagccagcagctaaatggtctggtgtgtgaatctgcaacatgcgttaacggcgagggccccgccagcagcgcaaatttgaaggacctggagtctaggtaccaacagctggccgtggccttggactcctcttacgtcaccaacaagcagcttaatataaccatcgagaagctgaaacaacaaaatcaggaaataaccgatcagctcgaggaggaaaaaaaagaatgccatcagaagcaaggcgctcttcgggaacagctccaggtacacatccagacaattggaatcctggtcagtgagaaagcagagttacagacagctctagcccacacccaacacgccgcaagacagaaagaaggcgagtcagaggacctcgcctctcgtttgcagtactcacgtagacgggtcggtgaactcgaaagagcacttagcgccgtaagtactcagcaaaagaaggcagaccgctacaacaaggaactgaccaaggaacgagacgccctgcgcctggaactgtacaaaaacacgcagagcaatgaagatctgaaacaggagaaaagtgaattggaagagaagctccgcgtactggtgaccgaaaaggccggcatgcaactcaaccttgaggaacttcaaaaaaaactggaaatgactgaactgctcttacagcaattcagctctcgatgcgaggccccagacgccaatcaacagctgcaacaggcaatggaggaacgagcacaactcgaggcacatctgggccaggtaatggagagtgtccgtcaacttcagatggagcgggacaaatacgcagagaatttaaagggggagagcgccatgtggcggcagcgaatgcagcaaatgtccgagcaggtccacacgctgcgcgaagaaaaggagtgctctatgtccagggttcaagaattagagacatcccttgcggagcttagaaatcagatgtag

SEQ ID NO: 271395 - DNA, 1439 bp, Artificial Sequence
  derived and/or modified sequence
ggttgccgggatcgcgctgatgtggccccaaccccgcctccctccccgccccgcgatgtcggaagaaacccgacagagcaaattggccgcagcgaagaaaaagttgagagaatatcagcagaggaatagccctggtgttcctacaggagcgaaaaagaagaagaaaataaaaaatggcagtaaccctgagacaaccacttctggtggttgccactcacctgaggatattcaggacattctgaaggtgctggtgtccgaccttaaccgttccaatggggtagcgctccccccattggacaagtggaagacacccaaggacaatgctgctactctacaaccatctgatgacaccgtgttacctggcggtgtcccttcccctggtgccagtctcactagcatggcggcatctcagaatcatgatgctgacaatgtccctaatctcatggatgaaaccaagactttctcatcaaccgagagcctgcgacaactctcccaacagctcaatggtcttgtttgtgagtctgcgacatgtgtcaatggggagggccctgcatcgtctgctaacctgaaggatctggagagccggtaccaacagctagcggtagccctggactccagctatgtaacaaacaaacaactcaatatcacgatagagaaattgaaacaacagaaccaagaaattacggatcagttggaagaagaaaagaaagaatgccaccaaaagcagggagccctaagggagcagttacaggttcacattcagaccatagggatcctcgtatcagagaaagctgagttacagacagccctggctcacactcagcatgctgccaggcagaaagaaggagagtctgaagatctggccagccgcctgcagtattcccggcggcgtgtgggagagttggagcgggctctctctgctgtctccacgcagcagaagaaggcagacaggtacaacaaggagttaaccaaagagagagacgccctcaggctggagttatacaagaacacccaaagcaatgaggacctgaagcaagagaaatcagaattggaagagaagcttcgggtcctagtgactgagaaggctggcatgcagcttaacttggaagaattgcaaaagaagttagagatgacggaactcctgcttcaacagttttcaagccggtgtgaagcccctgatgctaaccagcagttacagcaggccatggaggagcgggcacagctggaagcacacctggggcaggtaatggagtcggttagacaactacaaatggagagagataaatatgcggagaatctcaaaggagagagcgccatgtggcggcagaggatgcagcagatgtcagagcaggtgcacacattgagagaggagaaggaatgtagcatgagtcgggtacaggagctggagacgagcttggctgaactgaggaaccagatgg

SEQ ID NO: 271396 - DNA, 1422 bp, Artificial Sequence
  derived and/or modified sequence
atgtggccccagccccggctgccccccaggcctgccatgtctgaggagacccggcagagcaagctggccgccgccaagaagaagctgcgggagtaccagcagaggaacagccctggggtgcccaccggggccaagaagaagaagaagatcaagaatggcagcaaccctgagaccaccaccagcggcggctgccacagccctgaggacatccaggacatcctgaaggtgctggtgtctgacctgaacagaagcaatggagtggccctgccccccctggacaagtggaagacccccaaggacaatgctgccaccctgcagcccagtgatgacacagtgctgcccggcggcgtgcccagccctggggccagcctgacctccatggccgccagccagaaccatgatgctgacaacgtgcccaacctgatggatgagaccaagaccttcagcagcacagagagcctgcggcagctgagccagcagctgaatggcctggtgtgtgagagcgccacctgtgtgaatggagagggccctgccagcagcgccaacctgaaggacctggagagccgctaccagcagctggccgtggccctggacagcagctatgtgaccaacaagcagctgaacatcaccatcgagaagctgaagcagcagaaccaggagatcacagaccagctggaggaggagaagaaggagtgccaccagaagcagggcgccctgcgggagcagctgcaggtgcacatccagaccatcggcatcctggtgtctgagaaggccgagctgcagacagccctggcccacacccagcacgccgcccggcagaaggagggggagagcgaggacctggccagccggctgcagtacagcagaagaagagtgggggagctggagcgggccctgtctgctgtgtccacccagcagaagaaggctgaccgctacaacaaggagctgaccaaggagagagatgccctgcggctggagctgtacaagaacacccagagcaatgaagacctgaagcaggagaagtctgagctggaggagaagctgcgggtgctggtgacagagaaggccggcatgcagctgaacctggaggagctgcagaagaagctggagatgacagagctgctgctgcagcagttcagcagccgctgtgaggccccagatgccaaccagcagctgcagcaggccatggaggagcgggcccagctggaggcccacctgggccaggtgatggagagcgtgcggcagctgcagatggagcgggacaagtatgcagagaacctgaagggggagagcgccatgtggaggcagaggatgcagcagatgtctgagcaggtgcacaccctgcgggaggagaaggaatgttccatgagccgggtgcaggagctggagaccagcctggccgagctgaggaaccagatgtag

SEQ ID NO: 271397 - DNA, 1422 bp, Artificial Sequence
  derived and/or modified sequence
atgtggccccagccccggctgcccccccggcccgccatgagcgaggagacaagacaaagcaaactcgcagctgctaagaagaaactgcgcgaataccagcagcggaactccccaggcgtgccaactggagccaaaaaaaagaagaagataaagaacggtagcaacccagagacaacaacatcaggggggtgccattcaccagaggatattcaagacatcctgaaggtgctcgtgtccgatctgaacagatccaatggcgtggcgttacccccccttgacaaatggaagacgcctaaggacaacgccgcgacgttgcagccttcagacgatactgtgttgcccgggggagtgccaagccctggcgcctccctgactagtatggcagccagtcagaaccatgatgccgacaacgtaccgaacctgatggatgaaactaagacctttagttccaccgaatctcttcgccagctgtctcaacagcttaatggactggtgtgcgaatctgcgacttgtgtcaatggtgagggtccagcctcttctgccaacttgaaagatctggaatcacgataccagcagttagccgtcgctctggattcttcatacgttaccaataaacagttaaacattactattgagaaactgaagcagcagaaccaggaaataacagaccagctggaagaagaaaagaaggaatgtcatcagaaacaaggagccctgcgtgaacagttgcaagtacacatacagaccattggaatactagtgagcgaaaaagccgagctgcagacagcgctggcccatactcaacatgccgcgaggcagaaggagggcgagtctgaggaccttgcttcaagattgcaatacagtagacggagagtaggcgagctagaaagagccctgtccgccgtttcaacccagcaaaagaaggccgaccgttataacaaagaattaacgaaggagagagacgctctgagacttgagctgtataagaacacccagagcaacgaggatttgaagcaggaaaagtccgagttagaagaaaaattgcgggttctagtgactgaaaaggctggaatgcagctaaatctggaggaactccagaagaagctagaaatgaccgagttactactgcagcaattctcttccaggtgtgaggccccagacgcaaaccagcagctgcagcaagcgatggaagagcgtgctcagttggaagcccacctgggccaggtgatggagagtgtaagacagctacagatggaacgagacaagtacgccgaaaatttaaaaggtgagtcggctatgtggcggcaaaggatgcagcaaatgagtgaacaggttcacacactgcgggaagagaaggagtgctctatgagtagggtgcaggagctggaaacatcactggccgagcttaggaaccagatgtag

SEQ ID NO: 271398 - DNA, 1422 bp, Artificial Sequence
  derived and/or modified sequence
atgtggccacagccccgactacctcctcgaccggctatgtccgaagagaccagacagagcaagttggccgctgccaagaaaaaacttagagagtaccagcagagaaattctccaggggtgcccacaggcgctaagaagaagaagaaaatcaagaacggcagcaacccagaaacaaccacatctggcggttgtcatagtccagaagatattcaggatatccttaaggtcttggtatcagatctaaatcggagcaatggggtagcactcccccctctggataagtggaagacacccaaagataatgccgctacgctccagcctagcgatgacacagttttgcctggcggagtcccttctccgggagcttccctgacgagtatggccgcatctcagaaccacgacgcagataacgtgcctaacctcatggatgagacaaaaacattttcctccactgaatcattgaggcagctgagccagcagctgaacggcctcgtctgcgagtcagcgacttgtgtaaacggcgaagggccagctagcagcgccaacctcaaggatcttgagagccgataccagcagctcgcagtggctctggacagttcctacgtgacgaataaacagctaaatattaccatcgaaaagttgaagcagcagaatcaggaaattactgaccaactggaagaagaaaaaaaagagtgccaccagaaacaaggtgctctgcgcgaacagctgcaggtccatattcagacaattggaatcctggtctctgaaaaagccgaactgcagaccgctctggcccacactcagcatgccgcacggcagaaggaaggtgaatcagaggatttggcatccagactgcaatattcaaggagaagggtgggtgaactggaacgcgcattgtccgctgtatctacgcagcagaagaaggccgataggtataataaggaactgacaaaggagcgcgatgcactccggttggaactctacaaaaacactcagtcaaacgaggaccttaaacaggaaaagagcgagctggaagagaaattacgggtgctcgtaactgagaaagccggaatgcagctcaatcttgaggagctgcagaagaagttagagatgactgaactcctgctgcagcagttttcaagcaggtgcgaagcaccagatgccaatcaacagcttcaacaggctatggaagaacgggcacagctggaggcccacctgggccaggtaatggagtcagtgcggcaactgcaaatggagcgggataaatacgcagagaatttgaaaggcgagtctgccatgtggcgtcagagaatgcagcagatgagtgaacaggttcataccctgagagaggaaaaagaatgttcaatgagtcgtgtgcaggagctggagacctccttagccgagctgaggaatcagatgtag

SEQ ID NO: 271399 - DNA, 585 bp, Artificial Sequence
  derived and/or modified sequence
atggtgacctggagccacagcaacagcaacaaggagctgaagcaggagaacagcgccctggccgagcagctgcaggtggtgctgattgacaaggccggcatgcagtgtgacctggaggagctgaagaagaagctggagctgacagagctgaccctgcagcagctgagctcctggtgtgaggccccagatgccaaccagcagctgcagcagcccacagatgagcgggcccagctggaggcccacctgggccaggtgatggagtggctgaagtacctgcagatggagcgggagcagtatgcagagtacctgcacggggagagcgccatgtggtggcagaggatgagggagatgtctgagcaggtgcacaccctgcgggaggagcgggtgcacagcatgagccgggtgcaggagctggagaccatcctggccgagctgaggaaccagctgaacccctgccccaggagcctgcagcagggcccccccaagtggagccgcagctacaagcagaggctgagcacctgtggccgctcctggaggatctggcaggacagcttcaagcccaagtggaagaagatgagggcctag

SEQ ID NO: 271400 - DNA, 3008 bp, Artificial Sequence
  derived and/or modified sequence
atgtgagcatggtgacgtggtcacacagcaacagcaataaggagctgaagcaggagaactcagctttggcagagcagcttcaagttgtactgattgacaaggcagggatgcagtgtgacttggaggagctgaaaaagaaactggaactcactgagctcacgcttcaacagttatctagctggtgtgaagcccctgatgctaaccagcagttacagcagcccacagacgaacgggcacagctggaagcacacctggggcaggtgatggagtggctgaagtatctgcaaatggagagagagcagtatgccgagtatctgcatggagagagtgccatgtggtggcagaggatgcgggagatgtcagagcaggtgcacacgttgagggaggagagagtgcacagcatgagtcgagtacaggagctggagacgatcttggctgaactaaggaaccagctgaacccctgcccccggagcctccagcagggccctccgaagtggagcagaagctacaagcagaggctgagcacctgtggaaggagctggagaatctggcaggacagcttcaagcccaagtggaagaaaatgagggcttgagtcacctgaaccaagagcaggaagaggttgctcaggttgttggagcaagaggagaagttgctggagcaagaggagaggttgctggagcaagaggagaggttgctggagcaagaggagaggctactggagctgcaggagagcctgctagagcagaagcggaaggccgcttcctttctcagctgaacccctacccggagcccccagcagggccctccgaggtggaacagcagctacaagcagaggctgaacacctgcggaaggagctggagaatctggcaggacagctttaagcccaagtggaagaaaatgagggcttgagtcgcctgaacgaagagcaggaagaggttgctgagattgttggaacaagacgagaggttgttggagcaagaggagaggttgctggagcaagaggagaggttgctggagctgcaggagaggctgctagagcagaagcggaaggccgcttcctttctcagctgaacccctactcccggagcccccagcagggccctccgaggtggagcagcagctacaagcagaggctgaacacctgcggaaggagctggagaatctgacaggacagctttaagcccatgtgcaagaaaatgagggcttgagtcgcctgaaccaagagcaggaagaggttgctggagcaagaggagaggatgctggagcaagaggagaggctgctggagcttgagtggaaagccgagccttgagaggagcaggtggaggcgctcaggcataccgtgcggaacgaccgtaccaccatcaggcgcgcgctctcccagaaacacgaactgaagaaccagtgctgaggtcttctgcagcagtactatcagcagctgatctctgaggaggaggcactgcacaggcagttatttctgcagatccagctcgtggaccagctgcagcaccagagaaaagagtagcagagatggcctgccaagagttgcaggagacccaggaaagggagttgctgagggcaggtccccgagggggatgagacctggcaacatccatgccttctcattctctttcctgaccccttaggagcgcctggaagcagaaccagtagctacaggcccagagatggactggagagtgaggaggaggaggagccttggtccatgctgagcatcctggaggacctggagagctgggagaccatgatgagcctgactccccatgccccacctttgcttcctccctctctcctccctcccagacacccttatgctcttggtttttctgccttctgatttctttggaccctcaccccttccctgggagccagtggtcagacaccatttcacctgagaccaataggtgcaccctctgaggccccaagggaagggcttctctctactgccctggcccgttcatcctgtgtatccccctacaagaatgggcacctcctgcccgcaggtggcattttaaaacttggctttagccagtgccgaagaggagcaggcacagctacatgggcagctgaaggagcaaagggtgcactgccagcgcctgtcttacccggtggccttggcccagaaggagccagaggcagcagcctcagccccagggactgggggcgattctgtgtggggaaacccaccggaccttgcaggggaccatggggaagctgcagagccgctttatggagctcatgcaggagaatgagcgggtggagaaactggaatgtcgctgcattcagctgtctggacaaacagacaccatcagtgagcgagaggaaagtacgtcacatcataccagagccagaggtcagtgctgaagacgtggaccgggagaatgagtacataagcaggctggctcaggacaaggaggagatgaaggtgaagctgctggagctggtgttgcagcttgtgggcgactgcaacaagtggcatggcagattcctggcagctgcccagaaccctgctgatgagcctgctccatgggacccagccccccaggagattggggctgccaacaagcagggtgatctcccacagtgtggagcctgaacaagaagaggctggggagggttttccccacgacagccccacggcacagcagatcatgcggctgcttcatgagatgcagaacccccaggagcgcccaggcttgggcagcaacccctgcatccccattttttactgagctcaggagagcaagatgaaggtaacaatcatctaaaagccagccactgtcagcaaagcctggagaaatgggaccagagagtctgcccctaccacgtccctgccaccccttcccagttacccctttacccttacagtagcaaaataagacccctatctagtgagggagacaggtgcagatgaggtgaagatcactgtcatctaaaagcaggccaccaaatttaaaaaaaaaaagttatgggaaaaaatttatgggatt

SEQ ID NO: 271401 - DNA, 861 bp, Artificial Sequence
  derived and/or modified sequence
atggccgtgccccagcccatgcccagcatccccgaggacctggagagcagagaggccatggtggccttcttcaacagcgccgtggccagcgccgaggaggagcaggccagactgagaggccagctgaaggagcagagagtgagatgcagaagactggcccacctgctggccagcgcccagaaggagcccgaggccgccgcccccgcccccggcaccggcggcgacagcgtgtgcggcgagacccacagagccctgcagggcgccatggagaagctgcagagcagattcatggagctgatgcaggagaaggccgacctgaaggagagagtggaggagctggagcacagatgcatccagctgagcggcgagaccgacaccatcggcgagtacatcgccctgtaccagagccagagagccgtgctgaaggagagacacagagagaaggaggagtacatcagcagactggcccaggacaaggaggagatgaaggtgaagctgctggagctgcaggagctggtgctgagactggtgggcgacagaaacgagtggcacggcagattcctggccgccgcccagaaccccgccgacgagcccaccagcggcgcccccgccccccaggagctgggcgccgccaaccagcagggcgacctgtgcgaggtgagcctggccggcagcgtggagcccgcccagggcgaggccagagagggcagccccagagacaaccccaccgcccagcagatcatgcagctgctgagagagatgcagaaccccagagagagacccggcctgggcagcaacccctgcatccccttcttctacagagccgacgagaacgacgaggtgaagatcaccgtgatctag

SEQ ID NO: 271402 - DNA, 861 bp, Artificial Sequence
  derived and/or modified sequence
atggctgtgcctcaaccaatgcctagcatacccgaggacctcgagtctagggaggcaatggtggcttttttcaattccgccgttgctagtgcagaagaagaacaggcacggctccgcggacagctcaaggagcagagggtccggtgccggcgcctggcacaccttctcgccagcgcccagaaggagccagaagctgctgcccccgctcccgggaccggaggagattcagtatgcggggagacgcaccgggcgctgcaaggagctatggaaaaattacaaagccggtttatggaactaatgcaagagaaggcagacctgaaggagcgagtcgaagagctggagcatagatgcattcaattatcaggagagactgatactataggtgagtatattgcactgtaccaatcccagagggccgtgctaaaagagcggcatagagaaaaagaggagtacatctctagacttgctcaagacaaggaagaaatgaaggtcaaactgctggagctgcaggaactggtgctgagactcgtcggcgaccgtaacgaatggcatgggcggttcttggccgctgcccagaaccccgctgacgaaccaaccagcggcgctcccgctccgcaagaactgggcgcagccaaccagcagggtgacctctgcgaggtgtccctggccggaagcgtggaacccgcacagggcgaggcgcgggagggtagccctcgcgacaacccaaccgcccagcagatcatgcagctgttgagagaaatgcagaatccacgcgagagacccggattgggatctaacccgtgtatccctttcttctaccgggctgacgaaaacgatgaggtgaagattacggtaatttag

SEQ ID NO: 271403 - DNA, 2212 bp, Artificial Sequence
  derived and/or modified sequence
gtcggaagaaacccgacagagcaaattggccgcagcgaagaaaaagttgagagaatatcagcagaggaatagccctggtgttcctacaggagcgaaaaagaagaagaaaataaaaaatggcagtacctcagcccatgccaagcatcccggaggacctggagagccgggaagccatggtggcatttttcaactcagctgtagccagtgccgaggaggagcaggcaaggctacgtgggcagctgaaggagcaaagggtgcgctgccggcgcctggctcacctgctggcctcggcccagaaggagcctgaggcagcagccccagccccagggaccgggggtgattctgtgtgtggggagacccaccgggccctgcagggggccatggagaagctgcagagccgctttatggagctcatgcaggagaaggcagacctgaaggagagggtagaggaactggaacatcgctgcatccagctttctggagagacagacaccattggagagtacattgcactgtaccagagccagagggcagtgctgaaggagcggcaccgggagaaggaggagtacatcagcaggctggcccaagacaaggaggagatgaaggtgaagctgctggagctgcaggagctggtcttacggcttgtgggcgaccgcaacgagtggcatggcagattcctggcagctgcccagaaccctgctgatgagcccacttcaggggccccagccccccaggaacttggggctgccaaccagcagggtgatctttgcgaggtgagcctcgccggcagtgtggagcctgcccaaggagaggccagggagggttctccccgtgacaaccccactgcacagcagatcatgcagctgcttcgtgagatgcagaacccccgggagcgcccaggcttgggcagcaacccctgcattccttttttttaccgggctgacgagaatgatgaggtgaagatcactgtcatctaaaagccggctactgtcagcaaagcctgaagaagtggggctggataccctgcccccaccatatccctaccatcccttctcagtcaaccctttacccttacagtagcaagcatagacccctgtctaacgggggtagacaggtgcagatgaggtgaagatcactgtcatctaaaagctggccactaaattaaaaaaaaattaaaagttatgggattaaaaaaagttatgggataaaaaaggttatgggtaacttatggtataaaagttatgaaaaaaggccaggtgcagtggctcacgcctgtaatcccagcacttttgggaggctgaggttgggagttcaagaccagcctggtcaacatggtgaaactgtgtctctactaaaaatacaaaaattagccaggcatggtggcacgtgcctgtaatcccagctactcgggaggctgaggcaggagaatcgcttgaacctgggaggtggaggttgcagtgggctgagatcacgccattgcactccagcctgggcgacagagtgagactctgtctcaaaaaaaaaaaaaattatgaaaaaagttatgggattaaagaaagtcaggataaaaattttaaaaagcaggccactgtcagcaaagcctggagaagtggggccggaggctccgcccccatcatgtgcctgccaccccttcccagtcatccctttactcttacagtagcaaataagacccctgtctaatggggggagacaaatgtgtagacccttagccaccttggccagggctgactccttaaatttctggatgatgatgattgttatttaatagccagaggctcatataattggcctctttggaagaggcctcatggcctccttactctcaccaaagcaatttttccctcaggggggctcccatcttcttacacagagaggcagctgaggcaggacagtggggctaactgtagaccaggcgagggcacgggctgctggggtggccctgcttccccagtgtacatattgtatctgtgtaacattttgtatattccaggggtagggccgccccctgtatcatacctagcagaggttggagctggcacatggggaggaggttctaataattatttggggctgggaaacttatttattgatagcataggacagaggaaggaggcggggatggggtcgtggcgccctggtgatgcgactcctgtttattttgctttttatttcggaataaatggatttagcc

SEQ ID NO: 271404 - DNA, 861 bp, Artificial Sequence
  derived and/or modified sequence
atggctgtgccccagcccatgcccagcatccctgaggacctggagagccgggaggccatggtggccttcttcaacagcgctgtggccagcgctgaggaggagcaggcccggctgcggggccagctgaaggagcagagggtgcgctgccggcggctggcccacctgctggccagcgcccagaaggagcctgaggccgccgccccagcccctggcaccggcggggacagcgtgtgtggggagacccaccgggccctgcagggcgccatggagaagctgcagagccgcttcatggagctgatgcaggagaaggctgacctgaaggagcgggtggaggagctggagcaccgctgcatccagctgtctggagaaacagacaccatcggggagtacatcgccctgtaccagagccagagagctgtgctgaaggagcggcaccgggagaaggaggagtacatcagccggctggcccaggacaaggaggagatgaaggtgaagctgctggagctgcaggagctggtgctgcggctggtgggggacagaaatgagtggcacggccgcttcctggccgccgcccagaacccagcagatgagcccaccagcggggccccagccccccaggagctgggcgccgccaaccagcagggcgacctgtgtgaggtgtccctggccggctctgtggagcccgcccagggcgaggcccgggagggcagcccccgggacaaccccacagcccagcagatcatgcagctgctgcgggagatgcagaacccccgggagaggcctggcctgggcagcaacccctgcatccccttcttctacagagcagatgaaaatgatgaggtgaagatcaccgtcatctag

SEQ ID NO: 271405 - DNA, 861 bp, Artificial Sequence
  derived and/or modified sequence
atggccgtgccccagcccatgcccagcatccccgaggacctggagagccgggaagctatggtggctttctttaacagcgcagtggcatcggctgaagaggaacaggctcgtctgagaggtcaactgaaggaacagcgtgtgagatgcagacgtttggcccacttactggccagtgcccagaaagaacctgaggctgctgccccagctccgggtacaggaggggattctgtctgcggcgaaactcatcgagctctacagggcgctatggagaagcttcagagccgcttcatggagctgatgcaagaaaaggctgaccttaaagagagagtcgaagagctggaacacagatgtatccaactgagcggggaaacagatactatcggcgaatatatcgccctctatcagtctcagcgcgccgttctgaaagaaagacaccgggagaaggaggagtatatcagtcggctggctcaggataaagaagagatgaaagttaagcttctggaattacaggaactcgttcttagattggtaggcgaccgcaacgagtggcacgggcggttcctggccgctgcccaaaaccctgcagatgaacccaccagcggggctcctgcccctcaggagttgggagccgcaaatcaacagggtgatctctgcgaggttagtctagctggctccgtggagccagctcagggcgaggcccgggaggggagcccccgagacaaccctaccgcccagcagatcatgcagctccttcgagaaatgcaaaacccccgagagcgacccgggctgggctctaatccttgtatccctttcttttatcgagccgatgaaaacgacgaggtcaagatcacggtcatctag

SEQ ID NO: 271406 - DNA, 861 bp, Artificial Sequence
  derived and/or modified sequence
atggccgtgccgcaacctatgcctagcatcccggaggatctagagtcccgcgaggccatggtggcgttctttaatagcgcagtggcttccgctgaagaagaacaagcccgactgcgaggccagctgaaagaacagagagttcgttgtcggcgactcgcacatctgctagcaagcgcccaaaaggagcccgaggccgctgccccagcaccgggaaccggcggagattctgtctgcggagagacccaccgagcccttcaaggcgcaatggaaaagcttcagtcccggtttatggaactgatgcaggagaaagctgacctaaaggaaagagtagaggaactcgagcataggtgcatacagctgtccggcgagaccgataccatcggtgaatacattgcactttatcaatctcagcgggcagtgctgaaggagaggcaccgggagaaagaagagtatatatcccgactcgctcaggacaaagaagaaatgaaagtcaagctgctcgagcttcaggaactggtcctgcgattggtcggagatagaaatgagtggcacggacgctttctagcagcagcccagaatcctgcagatgagcccacttctggtgcccctgcccctcaagagctcggcgcagccaaccaacagggtgacttatgtgaggtgagcctcgccggttcagtcgaaccagcacagggcgaggctagggagggctcgcccagagataacccaactgcacagcagattatgcagctgctgcgcgagatgcagaatcccagggagagacccggtcttggatcaaacccctgtatcccctttttttacagagcagatgagaacgacgaagtcaagattactgttatctag

SEQ ID NO: 271407 - DNA, 585 bp, Artificial Sequence
  derived and/or modified sequence
atggtgacctggagccacagcaacagcaacaaggagctgaagcaggagaacagcgccctggccgagcagctgcaggtggtgctgatcgacaaggccggcatgcagtgcgacctggaggagctgaagaagaagctggagctgaccgagctgaccctgcagcagctgagcagctggtgcgaggcccccgacgccaaccagcagctgcagcagcccaccgacgagagagcccagctggaggcccacctgggccaggtgatggagtggctgaagtacctgcagatggagagagagcagtacgccgagtacctgcacggcgagagcgccatgtggtggcagagaatgagagagatgagcgagcaggtgcacaccctgagagaggagagagtgcacagcatgagcagagtgcaggagctggagaccatcctggccgagctgagaaaccagctgaacccctgccccagaagcctgcagcagggcccccccaagtggagcagaagctacaagcagagactgagcacctgcggcagaagctggagaatctggcaggacagcttcaagcccaagtggaagaagatgagagcctag

SEQ ID NO: 271408 - DNA, 585 bp, Artificial Sequence
  derived and/or modified sequence
atggtgacatggtcccactccaattccaataaggagctaaagcaggaaaattctgcacttgccgagcagctgcaggtagtcttgatagataaagctggaatgcaatgcgatttggaggagctaaagaagaaactagagctcacagagctgactctgcagcagctcagtagctggtgtgaagctccagacgctaatcaacagctgcagcagccaacggacgagagagcacagcttgaagcccatctaggacaagttatggaatggttgaaatacctgcagatggagagggaacagtacgcagagtacctacacggagaatccgcgatgtggtggcagcgcatgcgagagatgtcggaacaagttcatacgctgcgagaggaacgagtgcacagtatgtcacgggtgcaggaattggagaccatcctagctgagttgcgaaatcaacttaacccctgtccccgcagtttgcaacagggtccgccaaaatggtctcggagttacaagcagcgcctcagcacctgtggccgctcctggcggatttggcaagattcttttaaacctaagtggaagaaaatgagggcttag

SEQ ID NO: 271409 - DNA, 585 bp, Artificial Sequence
  derived and/or modified sequence
atggtgacctggagccacagcaacagcaacaaggagctgaagcaggagaactctgccctggcggaacagctacaggtggtactgatcgataaagccgggatgcagtgcgatctggaagaactcaagaagaagcttgagctgacagagctgacgttgcaacagttgagcagttggtgtgaagcacctgacgcgaaccagcaactgcaacaacccacagacgagcgggcccaactcgaggcacatttggggcaagttatggagtggttaaaatacttgcagatggagcgcgagcagtacgccgagtatctccacggcgaatccgcgatgtggtggcaaagaatgcgagagatgagtgaacaggtccacactttgcgagaggaacgtgttcactccatgagcagggtgcaggaactggaaaccatattggcggaactgagaaatcaattgaacccatgtcctcgcagcctgcagcagggtcccccaaaatggtcacggtcatacaaacagcgtttgtctacctgcggaagatcatggaggatttggcaggattcctttaagcccaagtggaagaaaatgagagcctag

SEQ ID NO: 271410 - DNA, 585 bp, Artificial Sequence
  derived and/or modified sequence
atggtcacctggtcacattctaattcaaacaaggaactgaagcaggagaatagtgccctggccgaacaactccaggtcgtgctcatcgataaagcgggaatgcaatgcgatttggaggaactcaaaaagaaacttgaactcacggaactgactctacagcaactcagctcctggtgcgaagctccagacgcgaatcagcagctccaacaacctaccgacgagagggctcaactggaggcacatctgggccaagttatggagtggcttaaatacctgcaaatggagagggaacagtacgcggagtaccttcatggtgagagtgcaatgtggtggcagaggatgcgggagatgagcgagcaggtgcataccctgcgggaggagagggttcatagcatgagcagagttcaggagctagagacgatcttggctgagctgcgtaaccagctgaatccctgcccacggtccctgcagcaggggccacccaagtggtcgcggtcctacaagcagcggctaagcacctgtggacgctcgtggcgcatatggcaagactccttcaaaccgaagtggaagaagatgagagcttag

SEQ ID NO: 271411 - protein, 953 aa, Artificial Sequence
  derived and/or modified sequence
MAMEPGALWTFLGHLWLLAGPTCEEDVDECLSDPCLHGGTCSDTVAGYICRCPETWGGRDCSVQLTGCQGHTCPLAATCIPIFESGVHSYVCHCPPGTHGPFCGQNTTFSVMAGSPIQASVPAGGPLGLALRFRTTLPAGTLATRNDTKESLELALVAATLQATLWSYSTTVLVLRLPDLALNDGHWHQVEVVLHLATLELRLWHEGCPARLCVASGPVALASTASATPLPAGISSAQLGDATFAGCLQDVRVDGHLLLPEDLGENVLLGCERREQCRPLPCVHGGSCVDLWTHFRCDCARPHRGPTCADEIPAATFGLGGAPSSASFLLQELPGPNLTVSFLLRTRESAGLLLQFANDSAAGLTVFLSEGRIRAEVPGSPAVVLPGRWDDGLRHLVMLSFGPDQLQDLGQHVHVGGRLLAADSQPWGGPFRGCLQDLRLDGCHLPFFPLPLDNSSQPSELGGRQSWNLTAGCVSEDMCSPDPCFNGGTCLVTWNDFHCTCPANFTGPTCAQQLWCPGQPCLPPATCEEVPDGFVCVAEATFREGPPAAFSGHNASSGRLLGGLSLAFRTRDSEAWLLRAAAGALEGVWLAVRNGSLAGGVRGGHGLPGAVLPIPGPRVADGAWHRVRLAMERPAATTSRWLLWLDGAATPVALRGLASDLGFLQGPGAVRILLAENFTGCLGRVALGGLPLPLARPRPGAAPGAREHFASWPGTPAPILGCRGAPVCAPSPCLHDGACRDLFDAFACACGPGWEGPRCEAHVDPCHSAPCARGRCHTHPDGRFECRCPPGFGGPRCRLPVPSKECSLNVTCLDGSPCEGGSPAANCSCLEGLAGQRCQVPTLPCEANPCLNGGTCRAAGGVSECICNARFSGQFCEVAKGLPLPLPFPLLEVAVPAACACLLLLLLGLLSGILAARKRRQSEGTYSPSQQEVAGARLEMDSVLKVPPEERLI

SEQ ID NO: 271412 - DNA, 2862 bp, Artificial Sequence
  derived and/or modified sequence
atggccatggaacccggtgccctctggacatttctgggacacctgtggttgttagccggcccaacctgtgaggaggacgtcgacgagtgtctgtctgacccctgcttgcacggaggcacctgcagcgacaccgtggcaggttatatatgtaggtgtcccgagacgtggggcggccgtgattgtagtgtgcagctcactggatgccagggacacacctgcccacttgctgccacttgtatccctatattcgagagcggagtgcatagctacgtttgccattgcccaccagggacacatggacccttttgcggacagaacaccacattctctgtcatggccggatcccccatccaagcttcagttccagccggaggacccttgggcctggcactgcggttcagaaccactctcccagctggcacactggcaactcgaaacgacacaaaggaatctctggagcttgccctggtggcagccaccctgcaggcgactctctggtcctactctaccacagtcctggtccttagactcccagatcttgcgctgaatgacggccattggcatcaagttgaggttgtgctgcatctagccacacttgaacttcgcctgtggcacgaaggttgtcccgctaggctttgcgtagcttctggacctgtagctctcgccagcaccgcgtccgccacaccccttcccgcggggatctcgtccgctcagctgggcgacgccaccttcgcaggctgcttgcaggacgtgcgagttgacggtcacttgctcctgcccgaagatctgggcgagaacgtgctcctggggtgcgagcgtcgcgagcagtgccgtcccctcccgtgcgtacacggtggaagttgcgtcgacctgtggacacattttagatgcgactgcgctagaccccatcgcggccccacctgcgcagacgaaatcccggctgctacctttggcttaggcggcgcaccttccagtgcatccttcctcctccaggagctgcccggaccaaaccttacagtgtcttttctcctgcgaactcgcgaatcagccgggctgcttctccaattcgctaatgattcagccgcggggctcaccgtctttctttctgagggtaggatccgcgctgaggttccaggaagccccgcagttgtgctgccaggcaggtgggacgacgggttgagacacctcgtgatgcttagctttggaccagatcagctgcaggaccttggccaacacgttcacgttggtggccggctcctcgcagccgattcccaaccatggggaggcccattcaggggctgtttgcaggatctgcgcctggacggctgccacctgcccttttttccactgcccctggataatagttcccagccttccgaattaggaggcaggcagtcctggaatttaacagcaggttgtgtgagtgaagacatgtgcagtcccgatccctgctttaacggcggaacatgtctggtgacctggaacgatttccactgcacctgtccggccaacttcactggcccaacatgtgcccagcagttgtggtgccccggccagccttgcctcccaccggccacttgtgaggaagtccctgatggcttcgtctgcgtggccgaggccaccttccgggagggaccaccagccgcatttagcggccacaatgcctctagcggacgtctgctggggggattaagcttagcgtttaggacccgggatagtgaagcatggctgctgcgtgctgccgcgggggctctggagggggtttggctcgcagtcaggaacgggtcactcgccggaggagtacgtggtggacacgggctcccaggagctgtgcttcctattccgggtccaagggttgctgacggagcctggcatagggtgagactagctatggagaggcctgccgccacaacaagccggtggttgctatggctcgatggagcggctacgcccgtggcattgcgcggcctggcatccgatctcgggtttctgcaggggccgggagctgtgcgaatattgctcgccgagaattttaccggatgcctaggccgtgtggcattaggcggcttgccccttccacttgctagaccgagaccaggagctgcacccggcgcacgggagcactttgcaagctggccgggaacacccgctccgatactcggatgcagaggcgcccccgtttgcgcacctagcccgtgtcttcacgatggagcatgtagggatctcttcgatgcgtttgcgtgcgcttgcggccccggctgggaaggtcccaggtgcgaggcacacgtagatccctgccactccgccccctgtgcaagaggtagatgccacactcacccagacggacgattcgagtgtaggtgcccacctggcttcggcgggcccagatgccgcctgccagtcccctcaaaagaatgctcgctgaacgtgacctgcttggatggcagcccctgcgagggggggagcccggccgcaaattgctcatgtctagagggccttgcgggtcaaaggtgccaagtcccaactttgccctgtgaagccaacccgtgtctgaatggaggtacctgccgcgcagcgggaggcgtctcagaatgtatctgtaatgcacgcttttctgggcaattttgcgaagtggcaaagggattgcctctcccactgccctttcctctactcgaggtcgccgtccctgcagcatgtgcttgcctcttacttttactactcggcctgctgagcgggatattagccgcccgcaaacggcgccagagcgaggggacttactccccctcccagcaggaagtggctggagctcgacttgagatggatagtgtgctgaaggtcccccccgaagaacgtctcatctag

SEQ ID NO: 271413 - DNA, 2862 bp, Artificial Sequence
  derived and/or modified sequence
atggccatggagcccggggccctgtggaccttcctgggccacctgtggctgctggccggccccacctgtgaagaagatgtggatgaatgtctgagtgacccctgcctgcatggaggcacctgcagcgacacagtggccggctacatctgccgctgcccagagacctggggcggccgggactgcagcgtgcagctgaccggctgccagggccacacctgccccctggccgccacctgcatccccatctttgaaagtggagtgcacagctatgtgtgccactgccccccaggcacccacggccccttctgtggccagaacaccaccttctctgtgatggccggcagccccatccaggcctctgtgcctgctgggggccccctgggcctggccctgcgcttccgcaccaccctgcctgctggcaccctggccaccagaaatgacaccaaggagagcctggagctggccctggtggccgccaccctgcaggccaccctgtggagctacagcaccaccgtgctggtgctgcggctgcctgacctggccctgaatgatggccactggcaccaggtggaggtggtgctgcacctggccaccctggagctgcggctgtggcatgagggctgcccagcccggctgtgtgtggccagcggccctgtggccctggccagcacagccagcgccacccccctgcctgctggcatcagcagcgcccagctgggagatgccacctttgctggctgcctgcaggatgtgcgggtggatggccacctgctgctgcctgaggacctgggagaaaatgtgctgctgggctgtgaaagaagagagcagtgccggcccctgccctgtgtgcacggcggcagctgtgtggacctgtggacccacttccgctgtgactgtgcccggccccaccggggccccacctgtgctgatgagatcccagctgccaccttcggcctgggcggggcccccagcagcgccagcttcctgctgcaggagctgcccggccccaacctgactgtgtccttcctgctgcggacccgggagagcgctggcctgctgctgcagtttgccaatgacagcgctgctggcctgactgtgttcctgtctgagggccgcatccgggcagaggtgcccggcagccctgctgtggtgctgcccggccgctgggatgatggcctgcggcacctggtgatgctgagctttggaccagaccagctgcaggacctgggccagcacgtgcacgtgggcggccgcctgctggccgctgacagccagccctggggcggccccttccggggctgcctgcaggacctgcggctggatggctgccacctgcccttcttccccctgcccctggacaacagcagccagcccagcgagctgggcggccggcagagctggaacctgacagctggctgtgtgtctgaggacatgtgcagcccagacccctgcttcaacggcggcacctgcctggtgacctggaatgacttccactgcacctgcccagccaacttcaccggccccacctgtgcccagcagctgtggtgccccggccagccctgcctgcccccagccacctgtgaggaggtgcctgatggctttgtgtgtgtggccgaggccaccttccgggagggccccccagctgccttcagcggccacaatgccagcagcggccgcctgctgggcggcctgagcctggccttccgcacccgggacagcgaggcctggctgctgcgggctgctgctggggccctggagggcgtgtggctggccgtgagaaatggcagcctggccggcggcgtgcggggcggccacggcctgcccggggctgtgctgcccatccctggcccccgggtggctgatggagcctggcaccgggtgcggctggccatggagaggcctgctgccaccaccagccgctggctgctgtggctggatggagctgccacccctgtggccctgcggggcctggccagtgacctgggcttcctgcagggccctggagctgtgcgcatcctgctggccgagaacttcaccggctgcctgggccgggtggccctgggcggcctgcccctgcccctggcccggcccaggcctggagctgcccctggggcccgggagcactttgcctcctggccaggcaccccagcccccatcctgggctgccgcggggcccctgtgtgtgcccccagcccctgcctgcatgatggagcctgccgggacctgtttgatgcctttgcctgtgcctgtggccctggctgggagggcccccgctgtgaggcccacgtggacccctgccacagcgccccctgtgcccggggccgctgccacacccacccagatggccgctttgaatgtcgctgccccccaggctttggaggcccccgctgccgcctgcctgtgcccagcaaagaatgttccctgaatgtgacctgcctggatggcagcccctgtgagggcggcagccctgctgccaactgcagctgcctggagggcctggccggccagcgctgccaggtgcccaccctgccctgtgaggccaacccctgcctgaatggaggcacctgcagagctgctggaggagtgtctgagtgcatctgcaatgcccgcttcagcggccagttctgtgaggtggccaagggcctgcccctgcccctgcccttccccctgctggaggtggccgtgcctgctgcctgtgcctgcctgctgctgctgctgctgggcctgctgagcggcatcctggccgccaggaagaggcggcagagcgagggcacctacagccccagccagcaggaggtggccggggcccggctggagatggacagcgtgctgaaggtgcccccagaggagcggctcatctag

SEQ ID NO: 271414 - DNA, 2862 bp, Artificial Sequence
  derived and/or modified sequence
atggccatggagcccggcgccctgtggaccttcctgggccacctgtggctgcttgccggaccaacctgcgaggaggatgtggatgagtgtctaagtgatccctgcctgcacggcggtacatgctccgacacagtggcgggatacatctgccggtgtccggagacctggggggggcgggactgctccgtccagcttaccggatgtcaggggcacacatgcccccttgcagcaacctgtatccctatttttgaatccggggtccatagctacgtctgccactgcccccccgggacccacggtccattctgtggtcaaaacacgacattctccgtgatggccggctctccaattcaggcaagcgtccctgcagggggccctctgggcctggcactacgtttcaggactactttaccagctggaaccttggcaacacgtaacgacacaaaagagtcactagagctcgcattagtggccgctaccctgcaggccactctgtggagttattccacgactgttctggtgctccggctccccgatctagctctgaatgatgggcactggcaccaggtcgaagtggtgctgcacctcgcaactcttgaattaagattgtggcacgagggctgccccgctaggctgtgcgtagcctccgggcccgtcgcccttgccagcacagcctctgcgaccccactgcccgccggaatctcctctgcccagctgggcgatgccacttttgccggttgcctccaagacgtgagagtagacgggcacttgctgcttcccgaagacctgggtgagaacgtgttgctcggctgtgagaggcgcgaacagtgccgtccactgccttgtgtgcatggcggctcgtgcgtagacctatggacccactttcgctgtgactgcgcccgacctcatcggggtcctacctgtgctgacgagatcccagccgccacattcggattaggcggggccccttcatcagcttccttcttgctgcaagagctcccaggacctaacctgactgttagttttctcctaagaaccagggaatctgccgggctgctactgcagttcgcgaatgattcagcggccggccttacggtctttctgagcgagggacgcatcagggccgaggttccaggttccccggctgtggtgctccccggtagatgggacgatgggcttcgacatctcgtcatgttatcatttgggcctgatcaacttcaggatctgggccagcatgtgcacgtcgggggacggctgctggcagcggactctcagccctggggcggaccatttagagggtgtcttcaagatctgcgactagatggttgtcacctgccatttttccctctgcccttagataattcctctcagccttctgagctggggggcagacagagctggaacctgaccgcaggatgcgtgtcagaagatatgtgttcccctgatccatgtttcaatggcggtacatgcctggtcacgtggaatgattttcactgtacttgcccagccaattttacggggcccacttgtgcacagcaactgtggtgccccggtcagccctgcctcccacccgccacctgtgaggaggtccctgatggctttgtttgcgtggcagaggccactttccgcgaaggccctcctgcagctttcagcggccacaacgccagtagcggccgcttgctgggtggcctgtccttagcattccgaacgcgagactcagaggcatggcttctccgggctgcggctggtgctctggaaggcgtctggctggccgtgaggaatggttccctagcagggggggtacggggtgggcacggactgccaggcgcagttctgccgataccaggtcctcgcgtcgcagacggcgcctggcacagggtgcgcctggctatggagcgcccggccgccacaacgtcacgctggcttctgtggctagacggcgccgcaaccccggttgccctgaggggactggcatccgacctggggttcttgcaggggcccggtgctgtccgtatcctgctggcagagaacttcaccggttgcctggggagggtcgcattgggcggactgcctttgccactggcacgccccaggcccggggcagctcctggagctcgggagcatttcgccagctggccaggaactcccgcccctattctaggatgccggggtgcacccgtttgcgctccctctccctgtctgcatgatggggcttgtcgggatttgtttgatgccttcgcctgcgcttgcggtcctggttgggagggacctagatgcgaagctcacgtggatccctgtcactccgcaccttgcgccagagggaggtgtcatactcatccagacggaaggtttgaatgtcgctgccccccaggatttggcgggccgagatgtcgtctcccagtgccttctaaagaatgctctctgaatgtcacatgtctagacggttcaccttgtgagggcgggagccctgccgccaactgcagttgcctagaaggcctggcagggcagcggtgccaggtgccgacacttccttgtgaggccaacccatgtctgaacggcgggacctgtcgggcggccgggggagtctctgaatgcatctgtaatgcacgattctccggacaattttgcgaggtagctaaaggtctgccattaccactgcccttccctctcctggaagtcgctgtacctgccgcctgtgcgtgccttctgttgcttttgctcggtctcctcagcggtatccttgccgcaaggaaaagacgccagtctgaaggaacctatagcccatcccaacaagaggttgctggagcaaggctggagatggacagcgtgcttaaagtgccccccgaggagcgactgatttag

SEQ ID NO: 271415 - DNA, 2862 bp, Artificial Sequence
  derived and/or modified sequence
atggccatggagcccggtgccctttggactttcctgggacacctgtggctccttgcgggacccacttgcgaagaggacgtggacgagtgtttgagcgacccatgcctccacggaggtacttgctctgacacagtggcaggctatatttgtagatgtcctgaaacttggggaggaagggattgcagcgtccagctgacaggttgtcagggacatacgtgccctctcgccgctacatgtatccctattttcgaatccggcgtccatagctatgtatgtcactgtccaccgggaacacacggacccttctgcggtcagaatactacatttagcgttatggccggatcccccattcaagcttctgtgccggcaggcggaccactggggttagcccttcgcttccgaacaactcttccagcagggactctggctacacgtaacgataccaaagagtccctggagttagccctggtggctgccaccttacaagctacgctgtggagctacagtacgactgtgctggtgttgcgcctccccgacctggctctgaacgatggacactggcatcaggtagaggtggtgctgcatcttgctactctggaactgaggttgtggcatgaaggatgccctgctagactttgtgtagctagtggacccgtggccctggcatccaccgccagcgccactccactgcccgcagggatctcctccgcacagctgggggacgctacattcgctggctgcctccaagatgttagagtggacgggcatctgctgctgccggaagacctaggtgagaatgttcttctcgggtgcgagcgccgagagcagtgccgccctttaccgtgtgtacatggtggatcatgcgtggacctgtggactcacttccgctgtgactgcgcaaggccccatcgcggacccacttgtgcagacgaaattcccgctgccacgtttggacttggcggagcaccaagcagcgctagtttcttgctccaagagcttccaggacccaatctgactgtctctttcttgttgagaactcgggagtcagctggcctcctgctgcagttcgctaatgacagtgctgcaggtctcacagtttttttgtctgagggcagaatcagggccgaggtgcctgggtcaccagccgtggttctgccaggtcgatgggacgacgggcttagacatctggtaatgctctcttttggacctgaccagttgcaggacctggggcagcatgtgcatgtgggcggacggttgctggcagctgattcacaaccctgggggggaccattcagagggtgtctacaggatctgagacttgacgggtgccacctgccatttttcccactccccctggacaactctagccaaccttctgagcttggaggtcgccagtcatggaacctcactgctggctgcgtttcagaagacatgtgcagcccagacccgtgttttaatggcggaacctgtctggtcacatggaacgattttcactgtacctgtccagcaaacttcacagggccaacatgcgctcagcagctttggtgccctggacagccctgtctccctccggcaacctgtgaagaggtgccggacggttttgtctgtgttgccgaagcaacattcagagaagggcctcccgctgcctttagcggtcacaatgcttcttctgggaggttgctcggaggcttgtccctggcgtttcgtaccagggacagcgaggcatggcttttgcgcgctgctgcaggagctttagaaggggtgtggctcgctgttaggaacggaagcctcgcaggtggggtcaggggcggtcatggcctgcctggggctgtgttgcccatccccggacctcgggtggctgacggcgcttggcatcgcgtccggctggccatggagaggcccgctgcaactacttcaagatggctactgtggctcgacggggctgctacccctgtagctttaagggggctcgcttccgacctcggcttcctgcagggccctggagcagtgcgtattctccttgcggagaattttacaggttgcctggggagggtggccttaggcggactacctttgccgctggctagaccccgacccggagccgctcctggggcaagggagcattttgcaagttggcccggaacaccagcaccaatcctgggatgtaggggtgctccggtctgcgctcccagcccatgtttacacgacggtgcgtgcagggacctgttcgatgcgtttgcttgcgcgtgtggcccaggatgggaaggccctagatgtgaggcacatgtcgatccttgtcattccgccccatgcgcaagaggccgatgccacactcatccagacggaagatttgagtgccgctgccctcccggtttcggtggcccacgttgtcgtctgcctgtccccagcaaggaatgcagcttgaacgtaacatgtctggatggctcaccgtgcgagggtggatcccctgccgcaaattgctcttgtcttgagggacttgccggacagaggtgccaggtgcctactctcccctgcgaagctaacccatgtctcaacggaggcacatgcagggctgcaggtggcgtttcagaatgtatctgcaatgctaggttcagcggtcaattttgtgaggtcgctaaagggttgccactccccctcccattccccctgttggaggtggcagtacctgctgcatgtgcttgcttactgctgctgttgctcggactcctctcaggtatcctagccgcacggaaacggaggcagtccgagggaacatactctccaagccagcaagaggtagcaggcgctcgtctggagatggactccgttctgaaggtcccacccgaagagaggctcatttag

SEQ ID NO: 271416 - DNA, 4553 bp, Artificial Sequence
  derived and/or modified sequence
atggcaatggagccgggggctctgtggaccttcctgggccacctgtggctcctggcagggccgacatgtgaggaagatgtggatgaatgcctgtcggatccctgcctgcacggcggaacctgcagtgacactgtggcaggctatatctgcaggtgcccagagacctggggtgggcgcgactgttctgtgcagctcactggctgccagggccacacctgcccgctggctgccacctgcatccctatcttcgagtctggggtccacagttacgtctgccactgcccacctggtacccatggaccgttctgtggccagaataccaccttctctgtgatggctgggagccccattcaggcatcagtgccagctggtggccccctgggtctggcactgaggtttcgcaccacactgcccgctgggaccttggccactcgcaatgacaccaaggaaagcttggagctggcattggtggcagccacacttcaggccacactctggagctacagcaccactgtgcttgtcctgagactgccggacctggccctaaacgatggccattggcaccaggtggaggttgtgctccatctagcgaccctggagctacggctctggcatgagggctgccctgcccggctctgtgtggcctctggtcctgtggccctggcttccacggcttcggcaactccgctgcctgccgggatctcctctgcccagctgggggacgcgacctttgcaggctgcctccaggacgtgcgtgtggatggccacctcctgctgcctgaggatctcggtgagaacgtcctcctgggctgtgagcgccgagagcagtgccggcctctgccttgtgtccacggagggtcctgtgtggatctgtggactcatttccgttgcgactgtgcccggccccatagaggtcccacgtgcgctgatgagattcctgctgccacctttggcttgggaggcgccccaagctctgcctcctttctgctccaagagctgccaggtcccaacctcacagtgtctttccttctccgcactcgggagtccgctggcctgttgctccagtttgccaatgactccgcagctggcctaacagtattcctgagtgagggtcggatccgggctgaggtgccgggcagtcctgctgtagtgctccctgggcgctgggatgatgggctccgtcacctggtgatgctcagcttcgggcctgaccagctgcaggacctggggcagcacgtgcacgtgggtgggaggctccttgctgccgacagccagccctggggtgggcccttccgaggctgcctccaggacctgcgactcgatggctgccacctccccttctttcctctgccactggataactcaagccagcccagcgagctcggcggcaggcagtcctggaacctcactgcgggctgcgtctccgaggacatgtgcagtcctgacccctgtttcaatggtgggacttgcctcgtcacctggaatgacttccactgtacctgccctgccaatttcacggggcctacgtgtgcccagcagctgtggtgtcccggccagccctgtctcccacctgccacgtgtgaggaggtccctgatggctttgtgtgtgtggcggaggccacgttccgcgagggtccccccgccgcgttcagcgggcacaacgcgtcgtcagggcgcttgctcggcggcctgtcgctggcctttcgcacgcgcgactccgaggcctggctgctgcgtgccgcggcgggcgccctggaaggcgtgtggctggcggtgcgcaatggctcgctggcggggggcgtgcgcggaggccatggcctgcccggcgctgtgctgcccataccggggccgcgcgtggccgatggtgcctggcaccgcgtgcgtctggccatggagcgcccggcggccaccacctcgcgctggctgctgtggctggatggtgccgccaccccggtggcgctgcgcggcctggccagtgacctgggcttcctgcagggcccgggtgctgtgcgcatcctgctggctgagaacttcaccggctgcttgggccgcgtggcgctgggcggcctgcccctgcccttggcgcggccccggcccggcgcggcccctggcgcccgagagcacttcgcgtcttggcctgggacgccggccccgatcctcggctgccgcggcgcgcccgtgtgtgcgccctcgccctgtctgcacgacggtgcctgccgtgacctcttcgacgcctttgcctgcgcctgcggcccggggtgggaaggcccgcgctgcgaagcccacgtcgacccctgtcactccgccccctgcgcccgtggccgctgtcacacgcaccccgacggccgcttcgagtgccgctgcccgcctggcttcgggggcccgcgctgcaggttgcctgtcccatccaaggagtgcagcctgaatgtcacctgcctcgatggcagcccatgtgagggtggctctcccgctgccaactgcagctgcctggagggtcttgctggccagaggtgtcaggtccccactctcccctgtgaagccaacccctgcttgaatgggggcacctgccgggcagctggaggggtgtctgaatgtatctgcaatgccagattctccggccagttctgtgaagtggcgaagggcctgcccctgccgctgccattcccactgctggaggtggccgtacctgcagcctgtgcctgcctcctcctcctcctcctgggcctcctttcagggatcctggcagcccgaaagcgccgccagtctgagggcacctacagcccaagccagcaggaggtggctggggcccggctggagatggacagtgtcctcaaggtgccaccggaggagagactcatctaggccagcctggctgctggcaccagcacctggaggtcctgaatggtttctacctggagacccaaggaagctgcttccagggctcgggacattgctacggaagtgtccccttggctggcagcctctgcctctgcctctgccccatcctggatggaggacgaggggagcaactcagggaaacagaggcctagagaggctgcggacttctccatcccaccctcggggttccgccttggcaggtgtacggctgtgcgtgggagggcacacgtgggttcacagtgtgttcaggagtgtgtgtatctggaggagtgtgtgtgtgagtgtgtacctgggcctgtgttagtctgcagatgctagtgtgagtgtgtcctgacatggctccagggcgtgtctgccgtgtttactgtgtgtctatgactgtgatgggtgtagctgatcccaggaggtggcggctgcgccatggggtcaaccattacagtcctagggcaggggcggcccaaggctgcatgttctccaggaggccaggccggggttgcccaggcacctccttccccgcctctgggggctgctcctgctgtggaggcagctgggaagtcagggaaggccactagcagaggctgagtgggcttctggctcctagaacaaatgtcccttcaggcaggtctgtctgccagaagccagagccagtcatgcgagggaaccacagacccacccgccccctcagccggagcagcccgagggagcagaggaggggctgcctggagcttcccaccctgctgtggtcatttgtcaaagggggaaggcacccactgcctacctcacagggctgttgtgaggatcagagaggacgacagtggggaaagaatctggaagtcttcaactgccgtctgatgggaaggaccgtctgggtgtccttctgggatgaggatgacagagcaacccttctcctgccctgaacccccccagctcacctgaccacctctggttctccagctccggtccttcctagcagcctggtgagctcactccttcccctgatgactggctgcctctacacagactcggcgagaggacttgaaggaagccctctgggttgtctgctgagtacaggggctcagtgaacactggcgctgcctctgagtcggggctgggcctgcagaggccgactcagaggagactctgctgcttgctcccagccccttccccggcgatgcccatcacactgtgacctcccatccctgaagggcacctgcctgagggcctggcctccttccagcttcatggacctggagatgtgccctttcatccttcctgcttcccaggccagtagatccgtttacacttttgggtcgacagtcagcttttccttttggttttggcgggtcccagaggcatgggtgtccagtccaatgtggggagccacgtgacaacgtgggggactgggacatgggactgggaagtcagcagacgctgggatagagagggccctgaacaccaggctcaggggcttgcttggtccttatcctgtaggaggtgggaccacctttccctgaactttctctacaacccttgggagcgtggggaggaggcggctggttccagggtcagtttactaagttagagatttggaaaacctgtgtcagctgtaactcctaggatattttatgtggaacctaacatgcagatgaaagctg

SEQ ID NO: 271417 - DNA, 2862 bp, Artificial Sequence
  derived and/or modified sequence
atggccatggagcccggcgccctgtggaccttcctgggccacctgtggctgctggccggccccacctgcgaggaggacgtggacgagtgcctgagcgacccctgcctgcacggcggcacctgcagcgacaccgtggccggctacatctgcagatgccccgagacctggggcggcagagactgcagcgtgcagctgaccggctgccagggccacacctgccccctggccgccacctgcatccccatcttcgagagcggcgtgcacagctacgtgtgccactgcccccccggcacccacggccccttctgcggccagaacaccaccttcagcgtgatggccggcagccccatccaggccagcgtgcccgccggcggccccctgggcctggccctgagattcagaaccaccctgcccgccggcaccctggccaccagaaacgacaccaaggagagcctggagctggccctggtggccgccaccctgcaggccaccctgtggagctacagcaccaccgtgctggtgctgagactgcccgacctggccctgaacgacggccactggcaccaggtggaggtggtgctgcacctggccaccctggagctgagactgtggcacgagggctgccccgccagactgtgcgtggccagcggccccgtggccctggccagcaccgccagcgccacccccctgcccgccggcatcagcagcgcccagctgggcgacgccaccttcgccggctgcctgcaggacgtgagagtggacggccacctgctgctgcccgaggacctgggcgagaacgtgctgctgggctgcgagagaagagagcagtgcagacccctgccctgcgtgcacggcggcagctgcgtggacctgtggacccacttcagatgcgactgcgccagaccccacagaggccccacctgcgccgacgagatccccgccgccaccttcggcctgggcggcgcccccagcagcgccagcttcctgctgcaggagctgcccggccccaacctgaccgtgagcttcctgctgagaaccagagagagcgccggcctgctgctgcagttcgccaacgacagcgccgccggcctgaccgtgttcctgagcgagggcagaatcagagccgaggtgcccggcagccccgccgtggtgctgcccggcagatgggacgacggcctgagacacctggtgatgctgagcttcggccccgaccagctgcaggacctgggccagcacgtgcacgtgggcggcagactgctggccgccgacagccagccctggggcggccccttcagaggctgcctgcaggacctgagactggacggctgccacctgcccttcttccccctgcccctggacaacagcagccagcccagcgagctgggcggcagacagagctggaacctgaccgccggctgcgtgagcgaggacatgtgcagccccgacccctgcttcaacggcggcacctgcctggtgacctggaacgacttccactgcacctgccccgccaacttcaccggccccacctgcgcccagcagctgtggtgccccggccagccctgcctgccccccgccacctgcgaggaggtgcccgacggcttcgtgtgcgtggccgaggccaccttcagagagggcccccccgccgccttcagcggccacaacgccagcagcggcagactgctgggcggcctgagcctggccttcagaaccagagacagcgaggcctggctgctgagagccgccgccggcgccctggagggcgtgtggctggccgtgagaaacggcagcctggccggcggcgtgagaggcggccacggcctgcccggcgccgtgctgcccatccccggccccagagtggccgacggcgcctggcacagagtgagactggccatggagagacccgccgccaccaccagcagatggctgctgtggctggacggcgccgccacccccgtggccctgagaggcctggccagcgacctgggcttcctgcagggccccggcgccgtgagaatcctgctggccgagaacttcaccggctgcctgggcagagtggccctgggcggcctgcccctgcccctggccagacccagacccggcgccgcccccggcgccagagagcacttcgccagctggcccggcacccccgcccccatcctgggctgcagaggcgcccccgtgtgcgcccccagcccctgcctgcacgacggcgcctgcagagacctgttcgacgccttcgcctgcgcctgcggccccggctgggagggccccagatgcgaggcccacgtggacccctgccacagcgccccctgcgccagaggcagatgccacacccaccccgacggcagattcgagtgcagatgcccccccggcttcggcggccccagatgcagactgcccgtgcccagcaaggagtgcagcctgaacgtgacctgcctggacggcagcccctgcgagggcggcagccccgccgccaactgcagctgcctggagggcctggccggccagagatgccaggtgcccaccctgccctgcgaggccaacccctgcctgaacggcggcacctgcagagccgccggcggcgtgagcgagtgcatctgcaacgccagattcagcggccagttctgcgaggtggccaagggcctgcccctgcccctgcccttccccctgctggaggtggccgtgcccgccgcctgcgcctgcctgctgctgctgctgctgggcctgctgagcggcatcctggccgccagaaagagaagacagagcgagggcacctacagccccagccagcaggaggtggccggcgccagactggagatggacagcgtgctgaaggtgccccccgaggagagactgatctag

SEQ ID NO: 271418 - DNA, 3018 bp, Artificial Sequence
  derived and/or modified sequence
caggctggagtgcaatggcacgatatcagctcactgaagcctccacctcctgggctcaagcactcctcccacctcagccccccaggtagctgagactacaggtagaatggataaagcacggagaggaaccaagaatgtgctcagaaaaaaatccttcctcactgaaaccaggactaaggaaaggagattcccttctaccatccatggactcaggctgacggagcacgctgcctgtctgtgtctctccgtttctctctctggaacgttgtcagatgtcacggcggagggaaaagagacctggaatgacttgccgaatttttagcccataaccaggcactgtgtaaaccgctttacctcattcagtctttgcaattataccacaaggtcacactgtttagaaggagaaagaagagctcgctgtgaaaaacgctccacaatgctgcagagccttgtgaaggtggaagagtactctcatcagcaaacggcattccttccatggaaaatgtcattgggaggaaagcaggttcaagtgattctcctgcctcagcctcctgagtagctgggattacagagcccaacagcatggtggtggaacaccccgagttcctcaaggcagggaaggagcctggcctgcagatctggcgtgtggagaagttcgatctggtgcccgtgcccaccaacctttatggagacttcttcacgggcgacgcctacgtcatcctgaagacagtgcagctgaggaacggaaatctgcagtatgacctccactactggctgggcaatgagtgcagccaggatgagagcggggcggccgccatctttaccgtgcagctggatgactacctgaacggccgggccgtgcagcaccgtgaggtccagggcttcgagtcggccaccttcctaggctacttcaagtctggcctgaagtacaagaaaggaggtgtggcatcaggattcaagcacgtggtacccaacgaggtggtggtgcagagactcttccaggtcaaagggcggcgtgtggtccgtgccaccgaggtacctgtgtcctgggagagcttcaacaatggcgactgcttcatcctggacctgggcaacaacatccaccagtggtgtggttccaacagcaatcggtatgaaagactgaaggccacacaggtgtccaagggcatccgggacaacgagcggagtggccgggcccgagtgcacgtgtctgaggagggcactgagcccgaggcgatgctccaggtgctgggccccaagccggctctgcctgcaggtaccgaggacaccgccaaggaggatgcggccaaccgcaagctggccaagctctacaaggtctccaatggtgcagggaccatgtccgtctccctcgtggctgatgagaaccccttcgcccagggggccctgaagtcagaggactgcttcatcctggaccacggcaaagatgggaaaatctttgtctggaaaggcaagcaggcaaacacggaggagaggaaggctgccctcaaaacagcctctgacttcatcaccaagatggactaccccaagcagactcaggtctcggtccttcctgagggcggtgagaccccactgttcaagcagttcttcaagaactggcgggacccagaccagacagatggcctgggcttgtcctacctttccagccatatcgccaacgtggagcgggtgcccttcgacgccgccaccctgcacacctccactgccatggccgcccagcacggcatggatgacgatggcacaggccagaaacagatctggagaatcgaaggttccaacaaggtgcccgtggaccctgccacatatggacagttctatggaggcgacagctacatcattctgtacaactaccgccatggtggccgccaggggcagataatctataactggcagggtgcccagtctacccaggatgaggtcgctgcatctgccatcctgactgctcagctggatgaggagctgggaggtacccctgtccagagccgtgtggtccaaggcaaggagcccgcccacctcatgagcctgtttggtgggaagcccatgatcatctacaagggcggcacctcccgcgagggcgggcagacagcccctgccagcacccgcctcttccaggtccgcgccaacagcgctggagccacccgggctgttgaggtattgcctaaggctggtgcactgaactccaacgatgcctttgttctgaaaaccccctcagccgcctacctgtgggtgggtacaggagccagcgaggcagagaagacgggggcccaggagctgctcagggtgctgcgggcccaacctgtgcaggtggcagaaggcagcgagccagatggcttctgggaggccctgggcgggaaggctgcctaccgcacatccccacggctgaaggacaagaagatggatgcccatcctcctcgcctctttgcctgctccaacaagattggacgttttgtgatcgaagaggttcctggtgagctcatgcaggaagacctggcaacggatgacgtcatgcttctggacacctgggaccaggtctttgtctgggttggaaaggattctcaagaagaagaaaagacagaagccttgacttctgctaagcggtacatcgagacggacccagccaatcgggatcggcggacgcccatcaccgtggtgaagcaaggctttgagcctccctcctttgtgggctggttccttggctgggatgatgattactggtctgtggaccccttggacagggccatggctgagctggctgcctgaggaggggcagggcccacccatgtcaccggtcagtgccttttggaactgtccttccctcaaagaggccttagagcgagcagagcagctctgctatgagtgtgtgtgtgtgtgtgtgttgtttcttttttttttttttacagtatccaaaaatagccctgcaaaaattcagagtccttgcaaaattgtctaaaatgtcagtgtttgggaaattaaatccaataaaaacattttgaagtgtgt

SEQ ID NO: 271419 - DNA, 2734 bp, Artificial Sequence
  derived and/or modified sequence
tcccgcccgcgccctgcccaccccggccgcgcgcaccacaacgcccccgccccgccgcccggaaccagctgagcgcagctggacccagcagccgctgtctccagtgccgcagcagcaggtagtgctcatagctctctttgtccagtgcttcggccttggtcccagcgccttcccacggagcagcactcttcaccctgcacagccttgttaggccttggttgctattctgtagaagagcagagtccccataaagaggaggtgcaggaattcttcccagaggctttggagagcccaacagcatggtggtggaacaccccgagttcctcaaggcagggaaggagcctggcctgcagatctggcgtgtggagaagttcgatctggtgcccgtgcccaccaacctttatggagacttcttcacgggcgacgcctacgtcatcctgaagacagtgcagctgaggaacggaaatctgcagtatgacctccactactggctgggcaatgagtgcagccaggatgagagcggggcggccgccatctttaccgtgcagctggatgactacctgaacggccgggccgtgcagcaccgtgaggtccagggcttcgagtcggccaccttcctaggctacttcaagtctggcctgaagtacaagaaaggaggtgtggcatcaggattcaagcacgtggtacccaacgaggtggtggtgcagagactcttccaggtcaaagggcggcgtgtggtccgtgccaccgaggtacctgtgtcctgggagagcttcaacaatggcgactgcttcatcctggacctgggcaacaacatccaccagtggtgtggttccaacagcaatcggtatgaaagactgaaggccacacaggtgtccaagggcatccgggacaacgagcggagtggccgggcccgagtgcacgtgtctgaggagggcactgagcccgaggcgatgctccaggtgctgggccccaagccggctctgcctgcaggtaccgaggacaccgccaaggaggatgcggccaaccgcaagctggccaagctctacaaggtctccaatggtgcagggaccatgtccgtctccctcgtggctgatgagaaccccttcgcccagggggccctgaagtcagaggactgcttcatcctggaccacggcaaagatgggaaaatctttgtctggaaaggcaagcaggcaaacacggaggagaggaaggctgccctcaaaacagcctctgacttcatcaccaagatggactaccccaagcagactcaggtctcggtccttcctgagggcggtgagaccccactgttcaagcagttcttcaagaactggcgggacccagaccagacagatggcctgggcttgtcctacctttccagccatatcgccaacgtggagcgggtgcccttcgacgccgccaccctgcacacctccactgccatggccgcccagcacggcatggatgacgatggcacaggccagaaacagatctggagaatcgaaggttccaacaaggtgcccgtggaccctgccacatatggacagttctatggaggcgacagctacatcattctgtacaactaccgccatggtggccgccaggggcagataatctataactggcagggtgcccagtctacccaggatgaggtcgctgcatctgccatcctgactgctcagctggatgaggagctgggaggtacccctgtccagagccgtgtggtccaaggcaaggagcccgcccacctcatgagcctgtttggtgggaagcccatgatcatctacaagggcggcacctcccgcgagggcgggcagacagcccctgccagcacccgcctcttccaggtccgcgccaacagcgctggagccacccgggctgttgaggtattgcctaaggctggtgcactgaactccaacgatgcctttgttctgaaaaccccctcagccgcctacctgtgggtgggtacaggagccagcgaggcagagaagacgggggcccaggagctgctcagggtgctgcgggcccaacctgtgcaggtggcagaaggcagcgagccagatggcttctgggaggccctgggcgggaaggctgcctaccgcacatccccacggctgaaggacaagaagatggatgcccatcctcctcgcctctttgcctgctccaacaagattggacgttttgtgatcgaagaggttcctggtgagctcatgcaggaagacctggcaacggatgacgtcatgcttctggacacctgggaccaggtctttgtctgggttggaaaggattctcaagaagaagaaaagacagaagccttgacttctgctaagcggtacatcgagacggacccagccaatcgggatcggcggacgcccatcaccgtggtgaagcaaggctttgagcctccctcctttgtgggctggttccttggctgggatgatgattactggtctgtggaccccttggacagggccatggctgagctggctgcctgaggaggggcagggcccacccatgtcaccggtcagtgccttttggaactgtccttccctcaaagaggccttagagcgagcagagcagctctgctatgagtgtgtgtgtgtgtgtgtgttgtttcttttttttttttttacagtatccaaaaatagccctgcaaaaattcagagtccttgcaaaattgtctaaaatgtcagtgtttgggaaattaaatccaataaaaacattttgaagtgtg

SEQ ID NO: 271420 - DNA, 2196 bp, Artificial Sequence
  derived and/or modified sequence
atggtggtcgagcatccagagttcctcaaagcgggcaaggagccggggctgcaaatttggcgggtcgagaaattcgacttggtgcccgtgcccaccaacctgtatggagatttttttaccggcgatgcatatgttattttgaagacagtgcaactgcgcaatggcaatctgcagtacgatttacactactggttggggaacgaatgtagccaggatgaaagcggcgccgcagctatctttactgtccagctggacgactatctgaacggcagggcggtgcaacatcgtgaagtgcagggattcgagtctgcaacttttctgggctacttcaagtccggacttaaatacaagaaaggcggggtggcctccgggtttaaacatgtggtgcccaacgaagtggtggtacagcggctgttccaggtcaagggaaggcgcgtggttagagccacagaagtgcccgtttcttgggagtccttcaacaatggggactgcttcattcttgacctaggaaacaacatccaccagtggtgcggctctaatagcaacaggtacgagaggcttaaggcaactcaggtatcgaagggaattcgagataatgagcgctctggaagagccagggtgcatgtgagcgaagagggaaccgagcccgaggccatgcttcaggtcctgggacccaagcccgcactacccgccggcaccgaggatacagccaaagaagacgcagccaaccgcaaactcgctaagctgtacaaggtgtctaacggcgcaggcactatgagtgtctcactggttgctgacgaaaatccttttgcccagggagccctgaagagcgaagattgcttcatattagatcatggcaaagacggtaaaatctttgtctggaagggaaaacaggctaacaccgaagaacggaaagcagccttaaagactgccagcgacttcattacaaaaatggattatcccaagcagacccaggtgagtgtccttcccgagggtggcgagactcccctgttcaaacagtttttcaaaaactggcgcgatcctgaccagactgacggcctgggactgtcctacttaagttctcacatagctaacgtcgaaagagtaccattcgacgcagcaaccttgcatacaagtaccgccatggctgcccagcacggtatggacgatgacggcacagggcaaaagcagatatggaggatagaaggctctaataaggtgccggtcgaccctgctacctatgggcagttttacggcggggatagctatattatactgtataactaccgccacggcggtcgacagggccaaatcatctacaattggcagggcgctcagtcaacgcaggacgaagtcgctgccagtgcgatcttgacagcccagttggacgaggaactgggcggaacccctgtccaatccagggttgtgcaagggaaagaaccagctcacctcatgtctctattcggtggaaaacctatgattatctacaagggaggaacatcgcgggaaggcggtcagacggccccagcctccacaagactgtttcaggtcagggctaattctgccggcgccaccagagccgttgaggttctgccaaaggccggagccttgaacagtaacgacgcctttgtgctgaaaaccccctctgctgcctacctgtgggtgggaactggggcctctgaggcagaaaaaacaggagcacaagaactgctccgggtgcttcgagcccaaccagtgcaggtggccgagggctctgagcctgatggcttctgggaggccctcggaggaaaggccgcctataggacctcccctaggctgaaagataaaaagatggacgcccatcccccccgccttttcgcctgcagcaacaagatcggcagatttgtcattgaggaagtgccaggcgaactcatgcaggaagacctggcaacagacgacgttatgctccttgacacgtgggatcaggtatttgtttgggtaggcaaggattcccaggaggaagaaaagaccgaagctctcacatcagctaagcggtatattgagactgatcccgccaatcgcgatagacggacccccatcactgtcgtcaagcaaggattcgaaccccccagctttgttgggtggtttctcggctgggacgatgactattggtcagtggatcctctggaccgagcgatggccgagttagccgcttag

SEQ ID NO: 271421 - DNA, 2196 bp, Artificial Sequence
  derived and/or modified sequence
atggtggtggagcaccccgaattcctcaaggctggcaaggagcccggcctgcaaatctggcgggttgagaaatttgacctagtacccgtgcccactaatttgtatggggatttctttaccggggacgcgtatgttatcctgaagactgtccagctccggaacggcaacctccagtatgaccttcattattggcttggaaatgaatgcagtcaggacgaatccggcgcagctgctatcttcacagtccagctggatgattacctgaatggacgggcagtacagcatagggaggtccagggcttcgagagcgctacgtttctggggtattttaagagcgggcttaagtataagaagggtggagtggcctctggtttcaagcacgtggttcctaacgaggtggtagtccagcgactgttccaagtgaagggcagaagagtagttcgagcaaccgaggtgccagtgtcttgggagagttttaacaacggggactgtttcattctggacctggggaacaacatccaccaatggtgcggttctaattcaaaccgttatgagaggctgaaggcaactcaggttagtaaaggcattcgggacaatgaaaggtctggaagggcccgagttcatgtgtctgaggaaggaacagagcccgaagccatgctgcaggtcttaggacctaagcctgcactccccgctggaactgaggacactgcaaaagaagacgctgccaacaggaaacttgctaagctgtacaaagtgtccaatggggcagggaccatgtccgtaagtcttgtagccgatgaaaatccgttcgcacagggcgccctgaaaagtgaggattgttttatcctcgatcacggcaaagacggaaagatcttcgtgtggaagggaaagcaggcaaataccgaggagaggaaggccgcactgaagacagccagtgacttcatcacaaagatggactaccctaagcaaacacaggtgagtgtactgcccgagggaggggaaactccgttatttaagcagttcttcaagaactggagggatcccgatcagaccgacgggcttggcctatcctatcttagcagtcacatcgccaacgtagaacgagtcccatttgacgcagccactctgcatacctctacagccatggcagctcaacacggcatggatgatgacgggaccggccagaagcagatatggcgcattgaaggctctaataaagtacctgtggatcccgccacctacgggcagttttacggcggagattcgtatataattctttacaactacaggcatggagggagacagggacaaataatctataattggcagggggcccaaagcacccaggatgaagttgcagcctccgccatcctgactgcccagcttgacgaggaactggggggcactcccgtgcagagtagggtagtccaaggaaaggagcccgcccatttaatgagcttattcgggggcaagcccatgataatctataaaggaggcactagccgtgagggaggacaaacggctcctgcatccactcggctcttccaggtgagagcaaactctgctggagcaacaagggcagtcgaagtactccccaaggccggggctctcaacagtaacgacgcattcgtcctgaagacccccagcgctgcatatctgtgggtggggaccggagcgtctgaagctgagaagactggtgcccaggagctactccgcgtactaagggctcagcccgtgcaggtcgcagagggcagcgagcccgacggattctgggaggctcttggaggtaaggccgcctaccgcacatcaccgaggctgaaagacaagaaaatggatgctcatccccccaggctgttcgcctgtagcaacaagattggacggtttgtgattgaagaggtgcctggcgagctgatgcaggaagatctcgccacagacgacgtgatgttactggatacctgggatcaggtgtttgtgtgggtgggtaaggactcgcaagaggaggagaagacagaggccctcacgtctgccaaacgatacatcgaaacggaccccgctaatcgtgacaggcgcacaccaattaccgtggtgaagcagggtttcgaaccccctagcttcgtgggctggttcctaggctgggatgacgattactggtccgtggatcctttagacagggctatggccgagcttgcagcctag

SEQ ID NO: 271422 - DNA, 2196 bp, Artificial Sequence
  derived and/or modified sequence
atggtggtcgaacatccagagtttctgaaggcggggaaagaacccggtttacagatctggagagtggaaaagtttgacctggtcccagtgccaaccaatctttacggggacttttttactggtgacgcttatgtcatcctgaagacagttcagctccggaacgggaatcttcagtacgacctgcattactggctaggcaacgagtgctcacaggacgagagcggggctgccgcaattttcactgtgcaactggacgattatttgaatggccgcgcagtgcaacacagggaggtgcagggctttgagtctgcaacattcctaggatactttaagtctggactgaagtacaaaaagggaggggtcgcgagcggcttcaaacacgtggtaccaaacgaggtcgtggtacaacgtctgttccaggtaaagggccgtcgcgtggttcgggctaccgaggtcccagtaagctgggaatctttcaacaatggtgactgctttattctcgatctcggaaacaatatccaccagtggtgtggcagcaatagcaaccgatacgaaaggctgaaagcgacccaggtttctaaggggatcagagataacgaacggtctgggagagctcgggttcatgtatctgaagagggaactgagcctgaggccatgctgcaagtgttggggccaaaacccgcactacctgccggaacagaggacacagcgaaggaggatgccgcaaatcgaaagctagccaagctgtacaaagtgtccaatggggcaggaacgatgtctgtatcccttgtggctgatgagaatccttttgcacagggggcgcttaagtcagaagattgcttcatcctcgaccacggaaaggatggtaagatcttcgtttggaaaggtaagcaagctaacaccgaggaacggaaagcagcattgaaaacagcaagtgacttcatcacgaaaatggactaccccaagcagacccaagtttccgtactcccagagggtggcgagactcctctattcaagcagttctttaaaaactggagggatccagaccaaacagacggtcttggccttagctatctctcgagccacatcgcaaacgtggagagagtgcctttcgacgcggcaactttgcatacaagcacggctatggcagcacagcacgggatggacgacgatggcaccggacagaaacaaatatggaggatcgagggttctaacaaggtgcccgtggaccccgctacatacggccagttctatgggggggactcgtatatcatcctttataattatagacacgggggcaggcaaggtcagattatctacaattggcaaggtgcacaatccacacaggatgaggtggccgcctctgctatactgactgcacagctcgatgaagagctgggaggaaccccagtgcaatctcgtgtcgtgcaaggaaaggaacccgctcacctcatgagcctgttcggcgggaagcctatgattatatacaagggcgggactagcagagagggcgggcagacagcaccagcatctactcgcttgttccaggtgagagccaactctgccggggcaaccagggctgtggaggtgctgccaaaagctggcgccctgaactctaatgacgccttcgtgttaaagacaccttcagctgcttacctgtgggtcgggactggggcctcagaagcagaaaaaactggagcccaagagctgttgagggttctgagagcacagcctgttcaggttgcggaaggatcagagccagacggattctgggaggccctgggcggcaaggccgcctacaggacttctcctcgtttgaaggataagaaaatggatgcgcaccccccgaggctttttgcttgtagcaacaaaatcggccgctttgtgatagaagaggtgccgggagagttaatgcaagaggatctcgcaactgacgacgtgatgctccttgacacatgggatcaggtgttcgtgtgggtcggcaaggactctcaggaggaagagaagactgaagcactcacctctgccaagcgctatatagaaactgatccagcaaaccgcgatcggagaactcccatcactgttgtgaaacaaggcttcgagcccccatctttcgtcggatggttcttaggctgggatgacgattattggagcgttgacccccttgatcgagccatggcggagctggcggcttag

SEQ ID NO: 271423 - DNA, 2148 bp, Artificial Sequence
  derived and/or modified sequence
atggttgtcgagcacccggagttccttaaggcaggcaaagagccagggctccaaatatggcgggttgagaagttcgacgcctatgtgatcctcaagaccgtgcagctacgcaatgggaacctgcagtatgatctgcactattggcttggcaacgagtgcagccaggatgagtccggagctgcagctatatttacagtacaacttgacgactacctaaacggtagagcagtgcagcacagggaggtgcagggtttcgagtctgcaacatttctaggctacttcaagtcgggactcaagtataagaagggcggagtggcctctggttttaagcatgtggtccctaacgaggtagtcgtgcaaagattgtttcaggttaaaggcaggcgcgtcgttcgagccactgaggtgcctgtgtcctgggaaagctttaataacggggactgcttcatcctggacctgggaaacaacattcaccagtggtgcggctcgaatagtaataggtatgagaggctgaaagccacacaggtaagtaaggggatccgcgacaatgagaggagcggtagagcccgagtacacgtgagtgaggaaggaacggaaccggaagccatgctgcaagtgttgggtcccaaacctgccctgccagcaggcaccgaagatactgctaaggaagatgccgccaatcgaaaactagcaaagctgtataaagtctccaatggcgccgggacgatgtctgtgtcactggtggctgacgagaatcctttcgctcagggcgcactgaagtcggaagattgttttatcctggaccatggtaaagatggcaaaatttttgtctggaaaggcaagcaagcaaataccgaggaaagaaaagcggctctcaaaactgccagtgacttcatcacgaagatggattatccaaagcagacccaggtctctgtgctgccagagggcggagagacccctctgttcaagcagtttttcaaaaattggagggaccccgatcagacggatggcctgggcctcagctaccttagcagccacattgccaatgtggagcgggttcccttcgacgccgcaacacttcacaccagcacggcaatggcggcccagcatggtatggacgatgatggtaccggacagaaacagatctggaggattgaaggctccaacaaggtcccagtagatccagcaacatacggccagttttatggtggagattcctacattattctgtataactatcgccatggcggccggcaggggcagataatctacaattggcagggagctcaatctacccaagacgaagtggccgcgtccgccattcttacagcacagctggacgaagagctgggtggtactccggttcagtcccgagtggtccagggcaaagagccagcccatcttatgagtctattcgggggaaagcccatgatcatatacaaaggtggcacaagccgcgagggcgggcaaacggccccagcctcaacccgcctctttcaggtgagagccaactccgccggggctacgagagcagttgaggtgctgccaaaagcaggggctctgaactctaacgacgcattcgtcctgaaaacaccgtctgcagcttatctgtgggttggaaccggagcgtctgaggcagagaaaacaggcgcacaggagttgttgcgcgtgttgagagcacagccagtgcaggtggctgaagggagtgaaccggatggcttttgggaggcacttggcggcaaggctgcctaccggactagccctagactcaaagataaaaagatggacgcccatcctcctagactattcgcctgttccaacaaaattggaaggttcgtcattgaagaggttccaggtgagctaatgcaggaagacctggcaactgatgacgtgatgctgttagacacttgggaccaggttttcgtttgggttgggaaggacagccaggaagaggagaaaacagaggccctcaccagcgccaagagatacatagagaccgatcccgccaatcgcgacagaagaactcctataaccgttgtgaagcagggctttgaaccgccatctttcgtgggctggtttctgggctgggatgacgattattggtctgtcgaccccctggatagagccatggcagaactggctgcatag

SEQ ID NO: 271424 - DNA, 2196 bp, Artificial Sequence
  derived and/or modified sequence
atggtggttgaacatcccgagttcctgaaggctgggaaggagcctgggctgcagatctggagagttgaaaagttcgatctggtgcccgtgcccacgaatctctacggcgatttctttaccggagacgcatacgtcatcctcaaaacagtacaactcaggaatggtaacctccagtacgacttacattactggcttgggaacgagtgttcacaggacgagtcaggggcagcagctatatttacagtgcagctggatgattatctgaatggtcgggctgtccagcacagagaagtgcagggctttgaaagtgcaaccttcttgggctattttaagagcgggttgaagtataaaaaaggcggagtggccagtggcttcaagcacgtggtgcccaacgaggtggtagtccaaagactgttccaagtgaaaggaaggcgtgtagtgcgggcgacagaagttccggtgtcctgggagtcatttaacaatggagactgctttatcttggatctcggtaataatattcatcagtggtgtggctctaatagtaatcgatatgaacgtctgaaggctacccaggttagcaaggggataagagacaacgaacgatcggggagggctcgagttcacgtcagtgaggagggaacggaaccagaggcaatgctgcaagtcttgggccctaagcctgccctccctgccgggactgaagacaccgcgaaagaggatgccgccaacagaaagctcgccaagctgtataaggtatctaacggggccgggaccatgtccgtgtctctcgtggccgacgagaatccttttgcacagggggcactgaagtccgaggattgctttatcctcgatcatggcaaagacggaaaaatctttgtttggaaaggaaagcaagccaatacagaggaacgcaaagctgccctgaagacagcatctgattttattaccaagatggattacccgaagcagacgcaggtaagcgttctccctgaaggtggcgaaacgccactgttcaagcagttttttaaaaactggcgagatcccgatcagactgatgggctggggctgtcctacttgtccagccacatcgcgaatgtggagcgtgtgccatttgatgcagccacattgcacacctctaccgccatggccgcccaacatggcatggacgacgacggtactgggcaaaagcagatttggcggatagaaggaagcaacaaggtgcccgtagaccccgccacttatgggcagttttacgggggggactcctatattatcctgtacaattaccgtcacggcgggaggcagggtcaaatcatctacaattggcagggggctcagtctacgcaggatgaggtcgccgccagcgctattctcaccgcccagctcgatgaggaacttggcggaacccccgtacagtcgcgcgtcgtgcaggggaaagagcctgcccacttaatgtcactctttggtggtaagcctatgatcatctataaaggcggcacgtcaagagagggtgggcagaccgctccagcaagcacccggctatttcaggttcgggcaaactccgcaggcgcgacccgagccgtggaggtcctgccaaaggcgggggccctgaactccaatgacgccttcgttctgaaaacaccctccgctgcctatctgtgggtgggcactggtgcaagcgaggcggaaaagacaggagcccaggaactcctacgggtgctcagggcccagcccgtccaggtggctgaaggcagtgaaccagacggcttttgggaggcactcggcggcaaggctgcttaccgcacaagcccccggctgaaagataagaagatggatgctcacccaccacgactctttgcttgctccaacaagataggcaggttcgtgatagaagaagtccccggggagttaatgcaggaggatctggccactgacgacgttatgctgctcgatacttgggaccaggtcttcgtgtgggtggggaaagactctcaagaagaggagaaaacggaagcccttacatcggccaagcgctatatcgaaaccgatccagccaatcgcgaccgaagaacccctattaccgtggtgaagcaggggtttgagccacccagcttcgttggatggttcctgggatgggatgacgactattggtcagtcgaccctttggaccgtgccatggctgagctcgccgcgtag

SEQ ID NO: 271425 - DNA, 783 bp, Artificial Sequence
  derived and/or modified sequence
atggtcgtcgaacatccagaatttctgaaggcgggaaaggagccgggtcttcaaatctggcgcgttgagaagttcgatctagttccagtacccaccaacctgtacggggattttttcactggtgatgcttacgttatattgaagacagtccagctccgcaacgggaaccttcaatatgatcttcactactggttaggaaacgagtgctcccaagatgagagcggagccgctgccatttttaccgttcagctggacgactatctcaacggcagggcggtccagcatcgcgaggttcaggggttcgagtctgccactttccttggatattttaaaagtggattaaagtacaagaaaggcggcgtggcatccggtttcaagcacgtcgtacccaatgaggttgtcgtgcagcgattatttcaagttaaaggaagaagggtggtgagagctactgaagtgccggtgtcatgggaatcctttaataatggggactgcttcatccttgatctgggtaacaatatccatcagtggtgcggcagtaactccaatcggtacgagcggctgaaggcaacacaagtgagtaaaggaatccgagacaacgagaggagcgggcgggcccgtgttcatgtgtccgaggagggcactgaaccagaggctatgctgcaagtgctcggccctaagcctgctctgccagcagggacagaagacacggccaaggaagatgccgccaacagaaagctggccaaactgtataaagtcagcaatggcgcgggcaccatgagctag

SEQ ID NO: 271426 - DNA, 2196 bp, Artificial Sequence
  derived and/or modified sequence
atggtggtggaacatccagaatttctgaaggccggcaaggaaccagggctccaaatctggcgggttgaaaagttcgacctggtgccagtccctactaatctttacggcgactttttcactggggatgcctatgtgattctcaaaacagtgcagctcagaaatggcaacctacagtacgatctgcactactggctggggaacgagtgttctcaggatgaaagtggggccgcagccatcttcacagtgcagctggacgactacttgaatgggagggcagtgcagcaccgcgaagtgcaggggttcgagtcggccacctttctggggtactttaagtcgggcctcaagtacaagaaaggtggcgtggcgtccggatttaaacatgtcgttcccaacgaagtggtggtccagaggctgtttcaggttaaggggcgtagagtggtccgagccacagaagttcccgtgagctgggagtcatttaataatggagattgcttcatcctggacctgggaaacaatatccaccagtggtgcggatccaatagcaatcggtacgaaagactcaaggctactcaggtgtccaaaggcatccgtgataacgagaggagtggcagggcaagagttcacgtcagcgaggaaggcactgagcccgaggcaatgctgcaggttcttggccctaaacctgccttgccggcagggacagaggataccgcaaaggaagacgctgccaataggaaactggctaagctgtacaaagtgagcaatggagcaggcactatgtcagtctctttggttgcagacgagaatccatttgctcagggtgctctgaaaagtgaagactgtttcatacttgatcacgggaaggacggcaaaatctttgtctggaaaggaaagcaagccaacactgaggaaagaaaggcggctctgaaaacggcttccgattttataaccaagatggattatccaaaacagacacaggtctccgtgctgcccgaagggggggagactcctctatttaagcagttcttcaaaaattggcgcgaccctgatcagacagacggcctgggactctcttatctgtcaagccacatcgctaacgtcgaaagagtcccattcgacgcagccactttgcacaccagcacggccatggctgctcaacacggaatggatgacgacggaacggggcagaagcagatttggagaattgaagggtctaataaggtgccagtggatccagccacatacggacagttctacggcggggattcatacataattctgtacaactacaggcatggcggtcgccagggccagatcatttataactggcagggtgcccaatcgactcaggacgaggttgctgcatctgccatactgacagcccagctggacgaagagcttggagggacaccggtgcagtccagggttgtgcagggtaaagaacccgctcacctgatgagcctttttggcggcaagcctatgattatttacaaaggcggcacaagccgagagggcggtcagaccgccccggccagtaccagactgttccaggtccgagccaatagcgcgggagccacccgggcagtcgaggtgctgcccaaggccggcgctctgaattctaacgacgcatttgtgctgaaaaccccctcagctgcctatttgtgggtcgggaccggcgcttctgaagctgagaaaaccggggctcaggaactcctgagggttctgcgtgcacaaccggttcaggtggcagagggaagcgagccggatggcttctgggaagctttggggggcaaggcagcctatagaacctcacctaggctcaaggataaaaagatggatgcccatcctcctaggttgttcgcctgcagcaataaaatcggcaggtttgtcattgaggaagtgcccggtgaattaatgcaggaggacctggctaccgacgacgtcatgctattggacacatgggatcaggtctttgtctgggtggggaaggacagccaggaggaggagaaaacagaagcactcacgagcgctaagcggtatatagaaaccgaccctgctaatcgagaccgaagaacccccattacagtggtgaaacagggatttgaacctccgtcctttgtcggatggttcctggggtgggacgacgattattggtcggtcgatccactggaccgcgccatggctgaactggctgcttag

SEQ ID NO: 271427 - DNA, 2118 bp, Artificial Sequence
  derived and/or modified sequence
atggtggtggagcatcctgaattcctgaaagctggtaaggaaccagggctccagatttggcgggttgaaaaattcgacttggtgccagttccaaccaacctgtacggggacttttttaccggtgacgcttacgtcatcctcaagactgtgcagctgagaaacgggaatttgcagtatgacttgcactactggcttggaaacgagtgcagccaggatgaaagtggggccgccgcaatctttaccgtgcagcttgatgactatttaaaatataagaaaggcggagtggcttccggatttaaacacgtcgtgcctaatgaggtggtagtccagagactttttcaggtgaagggtaggcgagtggttagagcaaccgaagttcctgtgagttgggagtctttcaacaacggagactgtttcatacttgacctaggtaacaacatacaccagtggtgcgggagtaactcgaaccggtacgagagactgaaggccacccaggtgtcaaaggggatccgtgacaacgagaggtccgggcgggccagggttcacgtgagcgaggagggtaccgaacctgaggcaatgctgcaggtcttagggccaaagcctgctttacccgcaggcaccgaggatactgcaaaggaggatgctgcaaaccggaaactggccaaactctacaaagtgagcaatggggctggaacgatgtccgtgagtttggtggccgacgagaatccatttgcacagggggccctcaaatctgaagattgttttattctggatcacgggaaagatggcaagatcttcgtgtggaagggaaaacaagcaaacaccgaggagcgcaaagccgcgctcaagacggcgtccgattttatcactaagatggactacccaaaacagacacaggttagtgtgctgccagagggtggggaaaccccactcttcaagcagttttttaagaactggagggatccggatcaaactgacggcctggggttatcatatctctcatctcacatcgccaacgtggaaagagtcccatttgatgcagctaccctacacacttcaaccgcaatggcggcccagcacgggatggatgacgacggaacaggtcagaaacaaatctggaggattgaaggatctaacaaggtgcctgtggatccggccacatacggacagttctatggtggagacagttacatcattctgtacaattatcgccacggtggaagacaaggacaaataatatacaattggcagggtgctcaaagcactcaggacgaggtggcagccagtgctattctgacagcacagctggacgaagaactcggcgggacccctgtgcagtcaagggtcgtccagggtaaagaaccagcccatctgatgagcctgttcgggggaaaacctatgatcatctataaaggcgggacaagccgcgagggggggcagaccgcaccagctagcacccgccttttccaggtcagagccaacagcgctggtgcgacccgggctgtggaagtgctgccaaaagctggcgcccttaacagcaacgacgcttttgtactcaagactccatccgccgcttacctgtgggtggggacgggcgctagcgaggccgaaaagacaggcgcacaggagctgctgcgagtgcttcgcgctcagcctgtgcaggtagcagagggctctgaacccgatggcttttgggaagccctcggcggaaaggctgcctaccgaacctccccccgtctgaaggataaaaagatggacgcacaccctcctagactgttcgcgtgttctaacaagatcggccgattcgtgatcgaggaagttccaggcgagctcatgcaggaagacctcgccactgatgatgttatgctgctggacacgtgggatcaggtctttgtctgggtcgggaaggatagtcaggaggaggagaagaccgaggcgctgacttccgctaagaggtacatcgaaaccgaccctgcaaaccgagatcggcgcacgcccatcacggtggtgaaacaaggtttcgagcctccctcctttgttggatggtttctgggttgggacgacgattactggtctgtcgatcctcttgatcgcgccatggctgaactggctgcctag

SEQ ID NO: 271428 - DNA, 2196 bp, Artificial Sequence
  derived and/or modified sequence
atggtggtggagcaccctgagttcctgaaggccggcaaggagcccggcctgcagatctggagggtggagaagtttgacctggtgcctgtgcccaccaacctgtatggagacttcttcaccggagatgcctacgtgatcctgaagacagtgcagctgagaaatggaaacctgcagtatgacctgcactactggctgggcaatgaatgttcccaggatgagagcggggctgctgccatcttcaccgtgcagctggatgactacctgaatggccgggctgtgcagcaccgggaggtgcagggctttgaaagtgccaccttcctgggctacttcaagagcggcctgaagtacaagaagggcggcgtggccagcggcttcaagcacgtggtgcccaatgaggtggtggtgcagaggctcttccaggtgaagggccggcgggtggtgcgggccacagaggtgcctgtgtcctgggagagcttcaacaatggagactgcttcatcctggacctgggcaacaacatccaccagtggtgtggcagcaacagcaacagatatgaaaggctgaaggccacccaggtgtccaagggcatccgggacaatgaaagaagtggccgggcccgggtgcacgtgtctgaggagggcacagagcctgaggccatgctgcaggtgctgggccccaagccagccctgcctgctggaacagaggacacagccaaggaggatgctgccaacaggaagctggccaagctgtacaaggtgtccaatggagctggcaccatgtctgtgtccctggtggctgatgagaacccctttgcccagggcgccctgaagtctgaggactgcttcatcctggaccacggcaaggatggcaagatctttgtgtggaagggcaagcaggccaacacagaggagaggaaggccgccctgaagacagccagtgacttcatcaccaagatggactaccccaagcagacccaggtgtctgtgctgcctgagggcggggagacccccctcttcaagcagttcttcaagaactggagggaccctgaccagacagatggcctgggcctgagctacctgagcagccacatcgccaacgtggagcgggtgccctttgatgctgccaccctgcacaccagcacagccatggccgcccagcacggcatggatgatgatggcaccggccagaagcagatctggagaattgagggcagcaacaaggtgcctgtggaccctgccacctacggccagttctacggcggggacagctacatcatcctgtacaactacagacatggaggccggcagggccagatcatctacaactggcagggcgcccagagcacccaggatgaggtggccgccagcgccatcctgacagcccagctggatgaggagctgggcggcacccctgtgcagagccgggtggtgcagggcaaggagcccgcccacctgatgagcctgtttggaggcaagcccatgatcatctacaagggcggcaccagccgggagggcggccagacagccccagccagcaccaggctcttccaggtgcgggccaacagcgctggggccaccagggctgtggaggtgctgcccaaggccggggccctgaacagcaatgatgcctttgtgctgaagaccccatctgctgcctacctgtgggtgggcactggagccagcgaggccgagaagacaggagcccaggagctgctgcgggtgctgcgggcccagcctgtgcaggtggccgagggcagcgagccagatggcttctgggaggccctgggcggcaaggccgcctaccgcaccagcccccggctgaaggacaagaagatggatgcccaccccccccggctgtttgcctgcagcaacaagattggccgcttcgtcatcgaggaggtgcctggagagctgatgcaggaggacctggccacagatgatgtgatgctgctggacacctgggaccaggtgtttgtgtgggtgggcaaggacagccaggaggaggagaagacagaggccctgaccagcgccaagcgctacatcgagacagatcctgccaacagagacaggaggacccccatcaccgtggtgaagcagggctttgagccccccagctttgtgggctggttcctgggctgggatgatgactactggagcgtggaccccctggaccgggccatggccgagctggccgcctag

SEQ ID NO: 271429 - DNA, 2148 bp, Artificial Sequence
  derived and/or modified sequence
atggtggtggagcaccctgagttcctgaaggccggcaaggagcccggcctgcagatctggagggtggagaagtttgatgcctacgtgatcctgaagacagtgcagctgagaaatggaaacctgcagtatgacctgcactactggctgggcaatgaatgttcccaggatgagagcggggctgctgccatcttcaccgtgcagctggatgactacctgaatggccgggctgtgcagcaccgggaggtgcagggctttgaaagtgccaccttcctgggctacttcaagagcggcctgaagtacaagaagggcggcgtggccagcggcttcaagcacgtggtgcccaatgaggtggtggtgcagaggctcttccaggtgaagggccggcgggtggtgcgggccacagaggtgcctgtgtcctgggagagcttcaacaatggagactgcttcatcctggacctgggcaacaacatccaccagtggtgtggcagcaacagcaacagatatgaaaggctgaaggccacccaggtgtccaagggcatccgggacaatgaaagaagtggccgggcccgggtgcacgtgtctgaggagggcacagagcctgaggccatgctgcaggtgctgggccccaagccagccctgcctgctggaacagaggacacagccaaggaggatgctgccaacaggaagctggccaagctgtacaaggtgtccaatggagctggcaccatgtctgtgtccctggtggctgatgagaacccctttgcccagggcgccctgaagtctgaggactgcttcatcctggaccacggcaaggatggcaagatctttgtgtggaagggcaagcaggccaacacagaggagaggaaggccgccctgaagacagccagtgacttcatcaccaagatggactaccccaagcagacccaggtgtctgtgctgcctgagggcggggagacccccctcttcaagcagttcttcaagaactggagggaccctgaccagacagatggcctgggcctgagctacctgagcagccacatcgccaacgtggagcgggtgccctttgatgctgccaccctgcacaccagcacagccatggccgcccagcacggcatggatgatgatggcaccggccagaagcagatctggagaattgagggcagcaacaaggtgcctgtggaccctgccacctacggccagttctacggcggggacagctacatcatcctgtacaactacagacatggaggccggcagggccagatcatctacaactggcagggcgcccagagcacccaggatgaggtggccgccagcgccatcctgacagcccagctggatgaggagctgggcggcacccctgtgcagagccgggtggtgcagggcaaggagcccgcccacctgatgagcctgtttggaggcaagcccatgatcatctacaagggcggcaccagccgggagggcggccagacagccccagccagcaccaggctcttccaggtgcgggccaacagcgctggggccaccagggctgtggaggtgctgcccaaggccggggccctgaacagcaatgatgcctttgtgctgaagaccccatctgctgcctacctgtgggtgggcactggagccagcgaggccgagaagacaggagcccaggagctgctgcgggtgctgcgggcccagcctgtgcaggtggccgagggcagcgagccagatggcttctgggaggccctgggcggcaaggccgcctaccgcaccagcccccggctgaaggacaagaagatggatgcccaccccccccggctgtttgcctgcagcaacaagattggccgcttcgtcatcgaggaggtgcctggagagctgatgcaggaggacctggccacagatgatgtgatgctgctggacacctgggaccaggtgtttgtgtgggtgggcaaggacagccaggaggaggagaagacagaggccctgaccagcgccaagcgctacatcgagacagatcctgccaacagagacaggaggacccccatcaccgtggtgaagcagggctttgagccccccagctttgtgggctggttcctgggctgggatgatgactactggagcgtggaccccctggaccgggccatggccgagctggccgcctag

SEQ ID NO: 271430 - DNA, 783 bp, Artificial Sequence
  derived and/or modified sequence
atggtggtggagcaccctgagttcctgaaggccggcaaggagcccggcctgcagatctggagggtggagaagtttgacctggtgcctgtgcccaccaacctgtatggagacttcttcaccggagatgcctacgtgatcctgaagacagtgcagctgagaaatggaaacctgcagtatgacctgcactactggctgggcaatgaatgttcccaggatgagagcggggctgctgccatcttcaccgtgcagctggatgactacctgaatggccgggctgtgcagcaccgggaggtgcagggctttgaaagtgccaccttcctgggctacttcaagagcggcctgaagtacaagaagggcggcgtggccagcggcttcaagcacgtggtgcccaatgaggtggtggtgcagaggctcttccaggtgaagggccggcgggtggtgcgggccacagaggtgcctgtgtcctgggagagcttcaacaatggagactgcttcatcctggacctgggcaacaacatccaccagtggtgtggcagcaacagcaacagatatgaaaggctgaaggccacccaggtgtccaagggcatccgggacaatgaaagaagtggccgggcccgggtgcacgtgtctgaggagggcacagagcctgaggccatgctgcaggtgctgggccccaagccagccctgcctgctggaacagaggacacagccaaggaggatgctgccaacaggaagctggccaagctgtacaaggtgtccaatggagctggcaccatgtcctag

SEQ ID NO: 271431 - DNA, 2118 bp, Artificial Sequence
  derived and/or modified sequence
atggtggtggagcaccctgagttcctgaaggccggcaaggagcccggcctgcagatctggagggtggagaagtttgacctggtgcctgtgcccaccaacctgtatggagacttcttcaccggagatgcctacgtgatcctgaagacagtgcagctgagaaatggaaacctgcagtatgacctgcactactggctgggcaatgaatgttcccaggatgagagcggggctgctgccatcttcaccgtgcagctggatgactacctgaagtacaagaagggcggcgtggccagcggcttcaagcacgtggtgcccaatgaggtggtggtgcagaggctcttccaggtgaagggccggcgggtggtgcgggccacagaggtgcctgtgtcctgggagagcttcaacaatggagactgcttcatcctggacctgggcaacaacatccaccagtggtgtggcagcaacagcaacagatatgaaaggctgaaggccacccaggtgtccaagggcatccgggacaatgaaagaagtggccgggcccgggtgcacgtgtctgaggagggcacagagcctgaggccatgctgcaggtgctgggccccaagccagccctgcctgctggaacagaggacacagccaaggaggatgctgccaacaggaagctggccaagctgtacaaggtgtccaatggagctggcaccatgtctgtgtccctggtggctgatgagaacccctttgcccagggcgccctgaagtctgaggactgcttcatcctggaccacggcaaggatggcaagatctttgtgtggaagggcaagcaggccaacacagaggagaggaaggccgccctgaagacagccagtgacttcatcaccaagatggactaccccaagcagacccaggtgtctgtgctgcctgagggcggggagacccccctcttcaagcagttcttcaagaactggagggaccctgaccagacagatggcctgggcctgagctacctgagcagccacatcgccaacgtggagcgggtgccctttgatgctgccaccctgcacaccagcacagccatggccgcccagcacggcatggatgatgatggcaccggccagaagcagatctggagaattgagggcagcaacaaggtgcctgtggaccctgccacctacggccagttctacggcggggacagctacatcatcctgtacaactacagacatggaggccggcagggccagatcatctacaactggcagggcgcccagagcacccaggatgaggtggccgccagcgccatcctgacagcccagctggatgaggagctgggcggcacccctgtgcagagccgggtggtgcagggcaaggagcccgcccacctgatgagcctgtttggaggcaagcccatgatcatctacaagggcggcaccagccgggagggcggccagacagccccagccagcaccaggctcttccaggtgcgggccaacagcgctggggccaccagggctgtggaggtgctgcccaaggccggggccctgaacagcaatgatgcctttgtgctgaagaccccatctgctgcctacctgtgggtgggcactggagccagcgaggccgagaagacaggagcccaggagctgctgcgggtgctgcgggcccagcctgtgcaggtggccgagggcagcgagccagatggcttctgggaggccctgggcggcaaggccgcctaccgcaccagcccccggctgaaggacaagaagatggatgcccaccccccccggctgtttgcctgcagcaacaagattggccgcttcgtcatcgaggaggtgcctggagagctgatgcaggaggacctggccacagatgatgtgatgctgctggacacctgggaccaggtgtttgtgtgggtgggcaaggacagccaggaggaggagaagacagaggccctgaccagcgccaagcgctacatcgagacagatcctgccaacagagacaggaggacccccatcaccgtggtgaagcagggctttgagccccccagctttgtgggctggttcctgggctgggatgatgactactggagcgtggaccccctggaccgggccatggccgagctggccgcctag

SEQ ID NO: 271432 - DNA, 2196 bp, Artificial Sequence
  derived and/or modified sequence
atggtggtggagcaccccgagttcctgaaggccggcaaggagcccgggctccagatatggcgcgtggagaaattcgacctcgtgcctgttcccaccaatttgtatggggatttttttacaggcgacgcttatgtaattctcaagacagtccagcttaggaatgggaacctccagtacgatcttcactattggctcggtaacgaatgctctcaagacgagtctggtgccgccgccatcttcaccgttcagctggatgactacctcaatgggcgagcagtgcagcacagggaagtacagggcttcgagtctgccacgtttctgggatactttaaaagtggcctgaaatacaagaaaggtggagttgccagtgggttcaagcacgtggtgcccaacgaagttgtcgtgcagaggttgttccaggtgaaagggcgtagagtcgtgagggccactgaagttcctgtgtcatgggaaagttttaataacggggactgtttcattctggacctgggcaataacattcatcagtggtgtggctccaatagtaatagatacgaacggctaaaagcgacccaagtcagcaaaggtatccgcgacaatgaaaggtctggccgcgccagggtccacgtaagtgaagaggggacggaacccgaggccatgctgcaggtgcttggacccaaacctgcgctacctgcgggaacagaggatacagcgaaagaggacgcagccaacaggaaactggccaagctttacaaagtgtctaacggggctgggacaatgagtgttagcttggtggctgacgagaatccctttgctcagggtgcccttaaatctgaggactgtttcatcctggatcacggaaaagatggcaagatctttgtatggaaaggaaagcaagcaaacactgaagagaggaaagctgctctcaagaccgctagcgacttcataacgaaaatggactacccaaagcagactcaggtttctgttctacccgaggggggagaaacgcctctcttcaaacagttttttaaaaactggcgtgaccccgaccagaccgatggcctaggtctgagctatctctcatctcacatcgccaatgtcgaaagagtgccattcgacgcagcaacattgcatacttcaacagccatggcagcccagcatggaatggacgatgacggtacaggacagaagcagatatggcgtatcgaaggctccaacaaggttcccgttgaccctgccacttacggacaattttacggcggtgactcttacattatcctctataattatcggcacggagggcgccaggggcagattatatacaactggcaaggtgcgcaaagcacccaagatgaggtagctgcttctgcaatcttgacggcccaactggatgaagagctgggcgggacaccagttcagagtagagttgttcaagggaaagagcctgctcacttgatgtccctcttcggaggaaaacccatgattatttataaggggggcacttcacgggaggggggtcagactgccccagcaagcacccgcctcttccaggtgcgcgcgaattccgcaggcgctacccgagctgtagaggtgctgccaaaagcaggagcattgaactctaacgacgcctttgtgctcaagacgccctcagctgcctatctgtgggtgggtacgggggcgtcggaagcagaaaaaacgggagcacaggagctgttgcgggtgctaagggcacaaccagttcaggtagctgagggcagtgaacccgacggattttgggaggcactggggggcaaggctgcttacagaacatctccacggctgaaggataaaaaaatggacgcacacccacccaggctgttcgcgtgctctaacaaaataggcagattcgttattgaggaggtgcccggagagctgatgcaggaggacctggcgaccgacgacgtgatgctgctggatacttgggaccaggtgttcgtctgggtgggaaaggattctcaggaggaggagaagacagaggcactcacatctgccaagagatacatcgaaaccgatcctgcaaacagggatagacgcacccctatcacagttgtgaagcaaggctttgagcccccctcgttcgtgggctggtttctggggtgggacgacgattactggtctgtcgatcccttagacagggctatggctgaactggcagcatag

SEQ ID NO: 271433 - DNA, 2196 bp, Artificial Sequence
  derived and/or modified sequence
atggtggtggagcaccccgagttcctgaaggccggcaaggagcccggactccagatctggcgcgttgagaagtttgatcttgttcccgtgcccacaaacctatatggcgacttctttacaggcgatgcttacgtgatattaaagaccgtgcaactgaggaatggaaatctacaatacgacctccattattggctgggtaatgaatgttctcaggacgagtcgggcgccgccgcgatcttcacggtgcagctcgacgattatctgaacggacgggctgtgcagcacagggaggtgcaggggttcgagtcagcaactttcctgggctacttcaaaagtgggctcaaatacaagaaaggtggggtggcaagtgggttcaaacacgtggtgcctaatgaggtcgttgtgcagagactgtttcaggtgaaaggtcgaagagttgtgcgggcaactgaggtccccgttagttgggaatcttttaataatggggactgcttcattctggacctgggaaacaacatccaccagtggtgtgggtctaacagtaaccggtacgaaagactgaaggcgactcaagtctccaaaggcattcgtgataacgaaagatctgggcgcgctcgcgtacatgttagcgaggaaggcacagagcccgaagctatgctgcaggttctcggaccaaagcctgctttgccagctggcacggaggacactgcaaaagaggacgccgccaatcgaaagctcgctaaattgtacaaggtctcaaatggggccggcactatgtcagtgagcctggtagccgacgagaatccatttgcccagggcgctctaaagagtgaggattgtttcatcctcgaccatggtaaggatgggaagatatttgtttggaaggggaagcaagcaaacacagaggaacgtaaggctgccttaaagaccgcatctgacttcattaccaagatggattacccgaagcagacccaggtctcagtcctccccgagggcggagagactcccctcttcaaacagttcttcaaaaattggcgggatcccgaccagacagatggattaggacttagctacctgagctcacacattgccaatgttgagcgcgtgcctttcgacgccgctaccctgcacacctccaccgctatggcagcacagcacggcatggacgacgacgggactggtcagaagcagatttggcgcatcgagggcagcaacaaagtgccggtggacccagcgacctacggacaattctatggtggagactcgtacataatcctttataactacagacatggtgggcgacaaggccaaatcatttacaactggcagggcgcccagtctacccaagatgaggtcgctgcttccgcaatcttaacagcacagctcgatgaggaactgggcggtacacctgtgcaaagtcgtgtcgtgcagggaaaagaacccgcacacctcatgtccctcttcggcgggaagccgatgatcatctacaaagggggcacaagccgggagggcgggcagaccgcccccgcctccacgaggctgttccaggtgcgcgcaaattcagccggggctaccagagccgttgaggtattgcctaaagctggagctctcaacagcaacgacgcattcgtgctcaagacgccctcagctgcctacctgtgggtgggaactggcgccagcgaggccgagaaaacgggagctcaggaacttttgagggtgctgagggcccagcccgtgcaggttgccgaagggtccgagcctgacggattctgggaggccctgggcggcaaagccgcttatcgcacttcgccgagactgaaagacaaaaagatggatgcccatcctccacgcttgtttgcctgctctaacaaaatcggcagattcgtgatcgaagaagtgcccggtgaactcatgcaggaagacttggcaaccgacgacgtgatgctgttagacacgtgggaccaggtcttcgtttgggtcggtaaagactcgcaagaggaggagaaaactgaggccttaacttctgcgaagcgttatatcgaaacagatcctgccaatagagacagaaggactccaattactgtggtcaagcagggtttcgagccaccctcatttgtgggctggttcctggggtgggatgatgactattggagcgtggatcctctggaccgtgccatggcagaacttgcagcctag

SEQ ID NO: 271434 - DNA, 2196 bp, Artificial Sequence
  derived and/or modified sequence
atggtggtggagcaccccgagttcctgaaggccggcaaggagcccggacttcagatctggagagtggaaaaattcgatttagtaccagtgccgaccaatctgtatggagacttctttactggggacgcgtacgtgattcttaagaccgtacagctgagaaatggcaacctgcagtatgacctccactattggctgggcaatgaatgtagtcaggacgagagcggagccgctgcaatattcacggtccagttagatgactatcttaacgggagagctgtacaacatcgagaggttcagggcttcgagagcgctacttttttggggtactttaagagcggccttaagtacaagaaaggcggggtcgcttccggtttcaaacatgtggtgcctaacgaagtggtcgtacaaagattgtttcaggtgaaaggccgcagagtcgtcagggccaccgaagtgcctgtttcctgggaatcttttaacaatggtgattgttttattctggatctggggaataacatccatcagtggtgtggctcgaacagtaaccgatacgagcgcttaaaggccacccaggtgtccaagggcattcgtgataatgaacgttccggccgcgcgcgtgttcacgtgtctgaagaaggcacagaaccagaggctatgttgcaggtgctcggccccaaacccgccctgcccgcaggcacagaggacaccgcaaaagaagatgctgccaaccgcaaacttgccaaattgtataaggtgtccaacggcgctggtacaatgagtgttagcctcgtggcggacgagaacccatttgcacagggtgcgctcaaaagcgaagattgtttcatcctggaccacggaaaagacggcaaaatcttcgtgtggaagggcaagcaggccaatacagaggaacgtaaggccgctcttaagacagccagcgattttattaccaaaatggattaccccaagcagactcaggtttccgtcctcccagaaggcggcgaaacccctctctttaagcagttttttaagaactggcgggatcccgatcagacagacggcctcggactctcatacttgtccagtcacattgcgaatgtcgagagggtgcctttcgatgcggctacactgcacacttcaaccgccatggctgcccagcatggcatggacgacgacggcactgggcagaagcagatttggcggattgaggggagtaataaggttccggtggaccccgcaacttacgggcagttttacggaggggactcctacatcattctgtataactatcgccatgggggtcgtcagggtcaaatcatctacaactggcagggggcacagagcacacaggatgaagtcgctgcttctgctatacttaccgctcagttggacgaggagcttggcggtacacccgtgcagtcccgggtagtgcagggaaaagaacccgcccacctgatgagccttttcgggggtaaaccaatgatcatctataagggtggaacctcgcgcgaaggcggacagaccgccccagcttctaccagattgttccaagtccgcgcgaatagcgccggcgctaccagagccgtggaggtgttgccaaaggccggcgctctgaactccaacgacgcctttgtgctaaagactccctcagctgcctacctgtgggtaggaaccggggcctccgaggccgagaagaccggagcccaagaactgctgagggttctgcgcgcgcaaccggtccaggttgcagagggcagcgagcccgatggtttttgggaagctctaggcggcaaagccgcctaccggacctccccaagactgaaggataagaagatggatgcgcatccccccaggttattcgcatgttccaataaaattggtagattcgtcatcgaggaagtcccaggggagcttatgcaagaggacctggctacagacgatgtcatgctgctcgacacctgggatcaggtttttgtgtgggtgggtaaggacagtcaggaggaggaaaaaaccgaggcactcaccagtgcaaaacgatacatagagaccgaccctgccaatcgagatagacgtactcctatcacagtggtgaagcagggtttcgagccaccaagtttcgtcggctggtttctggggtgggacgacgattattggagcgtcgatccattggatagagcaatggcagaactggcagcatag

SEQ ID NO: 271435 - DNA, 2148 bp, Artificial Sequence
  derived and/or modified sequence
atggtggtggagcaccccgagttcctgaaggccggcaaggagcccgggctgcaaatttggagagtggagaagtttgatgcatacgtgatcctgaagactgtgcagctgagaaatggcaatctgcaatatgacttgcactactggctcggcaacgaatgtagccaggacgagagcggcgctgctgccatttttaccgtccagctggacgattacctaaatggccgggccgttcagcacagagaagtacaaggcttcgagtcggctaccttcctcggctacttcaagtccggcctgaaatacaaaaaggggggtgtggcctccggcttcaaacacgttgtgccaaatgaggttgttgttcagagactatttcaggtaaaagggcgacgcgtggttcgagctacagaagtgccagtgagctgggaatcctttaacaatggcgactgctttattctagatcttggaaataatatacaccagtggtgtggatctaattccaaccgctacgagcggttaaaggcaactcaggtgtccaagggcattagggataatgaacgaagcggcagagccagggtgcatgtgtccgaggagggaacagaaccagaggccatgttgcaggtgttgggaccgaaacctgcgctgcccgcaggcaccgaagatacagcaaaagaagatgccgccaacagaaagcttgcaaaactttacaaagtgtctaatggagccggaactatgagcgtatcgctggtcgccgatgagaacccatttgcacaaggcgcattgaagagcgaagactgttttatcctggaccatggaaaagacggcaagatctttgtctggaagggaaagcaagcgaatacagaggaacggaaagcggcactgaaaaccgcctctgattttatcactaagatggattatccgaagcagacccaggtgtccgtgctgcccgaaggaggagagactcccctgtttaaacagttttttaagaactggcgagatcccgaccagacggacggcctgggactgagctacctgagcagccatattgccaatgttgagagggtgcccttcgatgctgctacgctgcatacttctactgcaatggccgcccagcacggtatggacgacgacggaacaggacagaagcaaatctggagaatcgaaggaagcaataaggttcccgtggatccggcgacatatggtcagttttatgggggagatagttatattatactatacaattaccgccatggtggcaggcaggggcaaattatttacaattggcagggtgcacaatcaacgcaagacgaagtggcagctagcgctatcttaacagcccagttggacgaggagctgggcgggactccggtgcaatccagggtcgtgcaagggaaggagccagcccatctgatgagcttgttcggagggaagccgatgatcatatataaggggggaacatcaagagaaggcggccagaccgcccctgccagcacccgactttttcaggtccgcgccaactccgccggtgcaactcgggctgtggaagtgttacccaaagcaggagccctgaatagtaatgatgcgttcgtcttgaaaacacccagcgcagcctatctgtgggtgggaacaggggcttccgaggctgaaaaaactggcgcccaggagctgctacgtgtgctgcgcgcccagcccgtccaggtggccgaaggaagtgagcccgacggattttgggaggctcttggagggaaggccgcctataggacatcacctcggctgaaagacaaaaagatggatgcccatccccctcggctcttcgcctgctctaataaaatcggccgctttgtaatagaggaggttcctggtgagctgatgcaggaagatctggcaacggacgacgtcatgctccttgacacatgggaccaggttttcgtgtgggttggtaaggactcccaggaggaagagaagacagaggcactaacatcagccaagagatacatcgagacagaccctgccaatcgggacagacgaaccccaattactgtggtgaagcagggtttcgagcccccatcatttgttggctggttcctgggatgggacgatgattactggagcgtcgaccctctggacagggcaatggctgagttggctgcttag

SEQ ID NO: 271436 - DNA, 2196 bp, Artificial Sequence
  derived and/or modified sequence
atggtggtggagcaccccgagttcctgaaggccggcaaggagcccggcctgcagatatggcgcgttgaaaaattcgacctggtccctgtcccaacaaacctctacggagacttttttacaggggatgcatacgtcatcctcaagaccgtccagttaagaaacggcaacctgcagtatgacctccattattggctgggcaacgagtgctctcaggacgaatcgggcgcagcagcgattttcactgtacagctggacgactacctgaacggccgtgccgtgcaacaccgcgaagttcaggggttcgaaagcgctaccttcctcggctattttaaaagtggactcaaatataaaaaaggcggcgtcgcatccggtttcaagcatgtggtgccaaacgaagtcgtcgtgcagaggctctttcaagtcaagggaagaagagtggttagagcaacagaggttcctgtttcctgggaatcgttcaataatggcgattgttttatcctggatctggggaacaatatccatcaatggtgtgggagcaacagcaatcggtacgaaagactcaaggctacccaggtgtccaaaggtattagggataacgaaaggtctgggagagctcgggtgcatgtgagcgaggagggtaccgaaccagaggctatgttgcaggtcttaggcccaaagccagcactgccagctgggacagaggacacggctaaagaggacgcggctaaccgcaagctagccaagctctataaagtctcaaatggcgctggtaccatgagtgtgagcctggtagcagacgagaatcctttcgcgcaaggagccctgaagagcgaggattgcttcatcctggatcatggaaaagacggaaaaatcttcgtgtggaaaggaaaacaggcaaacacagaagaacggaaggcagcacttaaaactgcaagtgacttcattaccaaaatggactatccaaagcaaactcaggtgagcgtgttgcccgagggaggagagacacctctgtttaagcagttctttaagaattggcgcgaccccgatcagaccgacggcctcggactctcctacctctcgagccacattgccaacgtggaacgcgtcccatttgatgcggcaacacttcacacttccactgcaatggccgcccaacatggcatggacgacgacgggaccggccaaaaacaaatctggagaatcgagggctctaataaggtccccgttgatccagccacctatggccagttctatggaggtgactcctatatcattctctataactatcggcacggcggtcggcaaggtcagatcatctacaattggcaaggcgctcagtccacccaggacgaggtggctgcctctgctatcttgactgcccagctagacgaagagctgggtggaacaccagtgcagtccagagtggttcagggtaaggagcctgctcatttgatgagccttttcggcgggaagcccatgattatctacaaggggggcacaagcagagagggcggacagactgcgcctgcctcgactcgactattccaagtgcgggctaactcagccggagctacacgggccgtcgaggtcctgccaaaggcgggagcccttaattctaacgacgcgtttgtgctaaagacccctagtgctgcgtacctgtgggtcggcaccggagcctctgaggctgaaaagactggcgctcaggaactgctcagggtcttacgcgcccagcctgtacaggtggctgagggaagcgagcctgatgggttttgggaagctctgggcggaaaggcagcgtacagaacctctccccgactgaaagataagaaaatggatgctcaccccccccgcctttttgcatgcagtaacaaaatcggccgctttgtgatcgaagaagtccctggagagttgatgcaggaagaccttgcaaccgacgacgtgatgctcttggatacatgggaccaagttttcgtgtgggtgggaaaagatagccaggaggaggaaaagacagaggccctgacgtcagcaaagaggtacatcgaaaccgatcctgcaaaccgcgatcgccgcaccccaataaccgtggttaaacaagggtttgaaccaccttcattcgtgggttggttcctgggatgggatgatgattattggtcagtggaccccctggaccgggccatggccgagttagctgcatag

SEQ ID NO: 271437 - DNA, 783 bp, Artificial Sequence
  derived and/or modified sequence
atggtggtggagcaccccgagttcctgaaggccggcaaggagcccggcctgcaaatttggcgagttgagaagttcgatttagtccctgtcccaacgaacctttacggtgacttctttacaggggacgcatatgtgatcctgaaaaccgttcagctgagaaatggaaacctgcaatacgacctccactactggcttgggaacgaatgctctcaggatgagagtggagctgccgcgatcttcaccgtccaactggatgattacttaaacggaagggccgtccagcaccgcgaggtgcaaggcttcgaatctgcaacatttctgggatattttaagagtggtttgaagtacaagaaggggggtgtggcctctggattcaagcatgttgtacctaacgaggtggtggtgcagaggctttttcaggtcaaaggacgacgggtagtgagagctactgaagttcccgtcagttgggagagtttcaacaatggagattgctttattcttgacctcggaaacaacattcatcagtggtgtggaagtaattctaatcggtatgaaaggctaaaggcaacccaggtctcaaaggggattcgcgacaatgagcgttcaggcagagcccgcgtacacgtgagtgaagaggggactgagccggaagctatgctccaggtacttggtcccaagccagccctgcctgcaggcacagaagatactgcaaaggaagacgcagcaaataggaaattagcgaagttatataaagtctcaaacggtgctggcactatgtcttag

SEQ ID NO: 271438 - DNA, 2196 bp, Artificial Sequence
  derived and/or modified sequence
atggtggtggagcaccccgagttcctgaaggccggcaaggagcccgggctgcagatctggcgggttgaaaagttcgatcttgtgcctgtgccaacgaacctttacggtgattttttcactggtgatgcctacgtgatactcaagactgtacagcttagaaacgggaacctgcagtatgatcttcactactggctgggcaacgaatgctcccaggatgaatccggagccgctgctatattcaccgtacagctcgatgattatcttaatggtcgcgccgtccagcaccgcgaggtgcagggattcgaaagcgccactttcttaggttattttaaaagcggactgaagtataagaaaggcggggtcgcttctgggttcaagcatgtcgtccccaacgaagtcgtggtgcagaggttgttccaggtgaaagggagacgagtagtgcgcgccaccgaggtgccagtcagctgggagagttttaataatggtgattgttttattttagatcttggaaacaatattcaccagtggtgcggctccaattcaaaccggtacgagaggctgaaagctacccaggtgtcaaagggcatcagagataacgaaaggtcgggacgagcccgcgttcatgtctcagaagagggtacagagcctgaagcaatgctccaggttttgggccctaagcctgctttaccagcaggaactgaagatactgcaaaggaagacgcggccaaccgtaagctggccaaactgtacaaagtgagtaacggagccgggacaatgtctgtgtccctggttgctgatgaaaacccctttgcccaaggtgccttaaaatccgaggactgttttatcctggaccatggtaaagatggaaaaatcttcgtgtggaaaggcaagcaggccaatactgaggaaaggaaagccgcgctaaagacagcgagtgacttcattacaaagatggattatcccaaacagacacaagtaagcgtcctgccggagggaggtgagacgccacttttcaagcagttctttaaaaattggcgagacccggatcaaacagatggcctgggcttgagctatctgtcttctcatatcgctaacgtggaaagagtgccatttgatgccgctaccctgcacacctctactgcaatggccgcacagcatgggatggacgatgacggcaccggacagaagcagatttggagaattgagggttctaataaggtccctgtggaccctgctacctacggacagttttatggcggcgatagctatataatcctgtacaattacagacatggaggccgccaaggtcaaatcatttataattggcagggcgcccagtcaacacaggatgaagttgcggccagcgccatactaactgcacaactggatgaggagctgggcgggacccccgttcaatcgagagtcgtacagggcaaagagccagctcacttgatgtctctcttcggtggaaagcctatgatcatctataagggggggacttctcgcgagggaggacagacggcaccagcttctacccggctgttccaagtccgtgctaatagcgctggcgcaacgcgtgctgttgaggtgctcccaaaggccggagccttgaatagcaatgacgcatttgtattaaaaactcctagcgcagcgtatctctgggttggtactggcgctagtgaagccgaaaagaccggggctcaggaattattgagggttttgcgggcccaacctgtgcaggtggctgaaggaagcgagcctgacgggttttgggaggctctcggtggcaaggcagcctaccgtacctctccccgccttaaggacaagaaaatggacgcccaccccccaagactgttcgcctgtagcaacaagataggccggttcgtcatcgaagaggtgcccggcgagctcatgcaggaagatctggcgactgatgacgttatgctcttagatacgtgggatcaggtgtttgtctgggtgggcaaagattcacaggaggaagagaagaccgaggctctaactagtgccaaaaggtacattgaaacagacccagcaaacagggatcgaaggaccccaatcacagtggtgaagcagggatttgagcccccctccttcgtgggctggttcctgggttgggacgacgactattggtctgttgatcctttggatcgtgctatggcggagcttgctgcctag

SEQ ID NO: 271439 - DNA, 2118 bp, Artificial Sequence
  derived and/or modified sequence
atggtggtggagcaccccgagttcctgaaggccggcaaggagcccgggctacaaatctggcgggtggagaaatttgacttagtgccggtgccaaccaacttgtatggagatttttttaccggggacgcgtacgttatcctgaagactgtgcagttgaggaacggcaacttgcagtatgacctccactattggctaggaaatgagtgttctcaggatgagagcggtgcggctgcaatcttcaccgttcaactagatgattatctcaagtacaagaaaggaggagtagcaagtgggtttaagcatgtggttccaaatgaggttgtggttcagcgcctattccaggtaaaggggcgccgggtagtgcgcgccacagaggtgcctgttagttgggaatctttcaataacggagattgttttatactagatttaggcaacaacattcatcaatggtgcggtagtaacagcaatcgatatgagagactcaaagccactcaggtctcgaaaggcatacgggataacgagagaagtgggcgggctcgtgtgcatgtgagcgaggagggaaccgagcccgaggcgatgctccaggtcctgggcccaaaaccggctcttcctgctggaactgaggacaccgcgaaagaagatgccgcaaatagaaagctcgctaaattgtataaggtgagcaacggggccggcacaatgtctgtgtcacttgtcgctgatgagaatccctttgcacaaggtgcactgaagtccgaagattgcttcattcttgaccatggcaaggacggtaagattttcgtgtggaagggcaaacaggccaatacagaagagaggaaagcggccctcaaaaccgcatccgacttcatcaccaaaatggactacccaaagcaaacgcaagtttccgtcctgcctgaggggggggaaactcctctgttcaaacaattctttaaaaattggcgagatccagaccagactgacggccttggactgagctacctaagttcccacatagccaatgtggagagagtgccttttgacgcagccaccctgcatacaagtaccgcgatggccgcccagcatggcatggacgatgacggtacaggacaaaagcagatatggcgcattgaaggctccaataaggtacctgtcgacccggctacctacggacagttctacggaggcgatagctacatcatactgtataactaccgacacggggggcgacaggggcagattatttacaattggcagggagctcagtctacccaggacgaagtggcagctagcgcaatcctgacagctcaactggacgaggagctaggaggcacacccgtgcagagtagggtcgtccaagggaaggaacccgcccacttgatgagcctgttcgggggtaagcctatgattatctacaaaggtggcacatcaagggagggaggccaaaccgcgcctgcaagcacccgcctgttccaggtgagagctaattctgcaggggccacgagagctgtggaagttttgcccaaagccggggcccttaacagtaacgacgctttcgtgctgaagaccccatccgccgcctatttgtgggtcggaactggggcttcagaagccgaaaagaccggtgctcaggagttgctgagggtcctgcgtgcacagccggtccaggtggcagaggggtccgaacccgatggcttctgggaagccttggggggaaaagcagcttacagaacttcccccagactgaaagataaaaaaatggatgctcatccccccagactcttcgcctgctcaaacaaaatcggtagatttgtgatcgaggaggtgcctggagaactcatgcaagaggaccttgccacggatgacgtaatgctcctggatacctgggaccaggtcttcgtatgggtagggaaagatagccaggaagaagagaagacagaggctttgaccagcgccaaaagatatattgaaaccgaccccgcgaacagagatcgtcgaactccgattaccgtggtgaagcaaggttttgagcccccttcttttgtgggatggtttctgggatgggacgacgattattggtcggtggaccccctggaccgcgccatggccgaactggccgcctag

SEQ ID NO: 271440 - DNA, 2196 bp, Artificial Sequence
  derived and/or modified sequence
atggtagtggaacacccagaattcttaaaggcaggtaaggagcccggtctccagatctggcgggtggagaagttcgatctggttccggtgcccaccaacctgtacggggacttcttcacaggtgacgcctatgttatcctgaagactgtgcagttacgcaacgggaatctccaatacgatctccactattggctcggcaatgaatgctcccaggacgagagtggagccgcagcaatcttcacagtccaattagacgactatctgaatgggagagccgtgcagcaccgagaagttcaaggctttgaaagtgccacctttctgggatactttaaatcaggactcaagtacaaaaaaggcggagtcgcttcaggatttaagcacgtggtgcctaacgaagtggtggtccaaaggttgtttcaggtgaaaggacgccgtgtggtgcgggcaaccgaagtgccggtgagttgggagtcctttaataatggcgactgctttattctcgatttggggaacaatatccaccagtggtgtggctccaacagtaacagatacgagcggctgaaagcaactcaggtctccaagggaatccgagataacgagagatccggcagggccagggtccacgtgtcagaggagggcacggagcccgaggcaatgctgcaggtgctggggccaaagcctgccttgccggctgggactgaggatacagctaaggaagatgctgctaatagaaaactcgccaagctctacaaggtgagtaatggggctggaactatgagcgtgtccctagtcgctgatgagaaccctttcgcccaaggggcactgaaaagcgaggactgctttattttagaccacggaaaggacgggaagatttttgtgtggaagggaaaacaggcaaacacagaagagagaaaagctgctttgaagacggcttcagactttattaccaaaatggactaccctaagcagactcaggttagtgtgttgccagaaggcggtgaaactccactctttaagcagttttttaaaaactggcgggaccctgatcaaacagacggtctggggctgagctatctgtcgtctcacatagcaaacgtggagcgtgtgccatttgacgccgcaaccctccatacctcaacagccatggcggctcagcacggaatggacgatgatgggaccggccaaaaacagatctggaggatagagggatctaataaggtaccagttgaccccgcaacctatggacagttctacggaggggatagctatatcatcctttataactacagacatggcggacgccagggacaaataatctataactggcagggagcccagtcgacgcaggatgaagtcgcagccagcgccatactgactgctcagctggatgaggagttaggtggtacacccgtacagtcaagggtggtacaaggcaaggaaccggcacacctgatgagccttttcgggggtaagccgatgatcatttacaaaggcggaacttcacgcgaaggcggtcagactgctccggcttcgactaggctttttcaggtgagggccaacagcgccggtgctacaagagccgtggaggtcttgccaaaggcgggtgccctaaacagcaacgacgcattcgtgctaaaaacaccgtccgccgcttatttgtgggtgggcaccggggctagtgaggccgaaaagacgggggcacaggaactgctgcgcgtgctgcgggcacaaccagtgcaggtggctgagggtagcgaacccgacgggttttgggaagctctgggcggtaaagcagcatatcggacaagccctcgactgaaagataaaaagatggatgcgcaccccccaagactgtttgcctgcagcaataagattggcaggttcgtaatcgaggaggtgcctggcgagctgatgcaggaggatctggccaccgacgatgtgatgctactcgacacctgggaccaggtgtttgtctgggttggcaaggattcccaggaggaggagaagaccgaagcactgacctctgctaaacgatatatagagacagaccccgctaatagagacaggagaacacctattacagtggtaaagcaggggtttgagcctccatcgtttgtgggatggtttctgggttgggatgatgactattggagtgtggatcccctggaccgggcaatggcggaacttgccgcttag

SEQ ID NO: 271441 - DNA, 2196 bp, Artificial Sequence
  derived and/or modified sequence
atggtggtcgaacatcccgagtttctcaaggccggaaaagagccaggcctccagatatggagagtcgaaaaatttgacttggttccagtcccaaccaacttgtacggagattttttcactggcgatgcctatgtcatactaaagactgtgcagttgcgaaacggaaatctgcaatacgatcttcactattggctgggcaatgagtgcagccaggacgagtccggtgcagcggctatatttaccgtgcagctggatgactacctgaatggaagagcagtccagcaccgagaagttcaggggtttgaatccgccactttcttaggctatttcaaatcgggcctaaagtacaagaaaggcggtgtcgcgtccggcttcaagcacgttgtgcccaacgaggtggtcgtgcagaggctgtttcaggtcaaggggaggcgggtagtacgggcaacggaagtcccagtgagttgggagtcgttcaataatggggactgcttcatcctggacctggggaacaacattcaccagtggtgtggctccaactccaacaggtatgagcgcttgaaggctacgcaggtcagcaaggggattcgggataatgagaggagtggaagggcgagggttcatgtgagtgaagagggaaccgaaccagaggccatgcttcaggtccttgggcctaagcctgcgttaccagctggtaccgaggacaccgccaaggaggatgctgctaataggaagttagctaaactttataaagtctcgaacggtgccggaaccatgtctgtttctcttgtggccgacgaaaacccctttgctcagggggctctcaagtctgaggactgctttatcctagatcatgggaaggacggtaagattttcgtttggaagggaaagcaggctaataccgaggaacgaaaggcggcactgaaaacagcttcagatttcatcactaaaatggactatcctaaacaaactcaagtgagcgtgctgcccgagggcggagagaccccattgtttaaacagtttttcaaaaactggcgtgacccagaccagaccgatgggcttggactctcctacctgtcttctcacattgccaatgtggaacgcgtgccctttgatgccgcaacactccacacatccaccgccatggccgctcaacacggcatggacgacgacgggaccgggcagaagcagatatggcgtatcgaaggaagcaacaaggttccggtcgatccggctacatatggccagttttacggcggagattcctatataatcctatacaattatcggcatggtggtaggcaggggcagattatctacaattggcagggcgcacagtcaacccaggacgaggtggccgcaagcgccatcctgaccgcccagctggacgaggaactgggcggaactccagtgcagtcccgtgtagtgcagggaaaagaacccgcacatctcatgtctctgttcggaggtaagcccatgataatctacaaggggggaacatcccgcgagggaggacaaacagcccctgcctctacccggctgttccaagtgagggccaactccgcaggagccacccgggcagtggaggtgctccccaaagccggtgcacttaactcaaatgatgcctttgttttaaaaaccccctccgccgcttatctctgggtgggaacaggtgcgagtgaggcagaaaaaaccggagctcaagagctcctcagggtcttgcgtgcacagcccgttcaggtcgccgaagggagcgagcctgacggattctgggaggcactaggcggtaaagccgcttaccgtaccagcccacggttgaaagataagaaaatggacgctcatccccctcggctgtttgcatgctccaataaaatcggacgatttgtgatcgaggaagtgcccggagagctgatgcaggaggacctggccactgacgacgtgatgctactggacacatgggaccaggtattcgtgtgggtcggaaaggactcccaggaagaggagaagacagaagcactgactagcgctaagcggtatattgagaccgatcctgcaaatagggacaggagaactccgattaccgtggttaagcagggatttgaacccccttccttcgtaggctggttcttaggctgggacgatgactattggagcgtggacccactggaccgcgctatggcagagctggccgcatag

SEQ ID NO: 271442 - DNA, 2196 bp, Artificial Sequence
  derived and/or modified sequence
atggtcgtggagcatcccgagtttctcaaggctgggaaggaaccgggtctacagatttggcgagtggaaaaattcgatctggtgcccgtgccgaccaacttgtatggggattttttcactggcgatgcttacgtaattctgaagacagttcagttacggaatggcaatctgcagtatgatctgcactattggctcggcaacgagtgttcccaggatgagagcggggcagctgcaatctttaccgttcaactcgacgactaccttaatggaagggccgtgcagcaccgcgaagtccaggggttcgaatcagccacttttctggggtactttaaaagcgggctgaagtataaaaaaggcggtgttgcctctggattcaagcacgtggtgcctaatgaggtcgtggtgcagcgcctcttccaggttaagggccgaagagtcgtgcgtgctactgaggtgcctgtcagttgggaaagttttaacaatggcgactgctttattctggatttgggcaataatatccaccagtggtgcggctcaaatagcaatcgttatgagaggcttaaggcgacccaagtatctaagggtatcagggacaacgaacggtctggacgagcaagagtgcatgtatctgaggagggcaccgagcccgaagcaatgctgcaggtactgggtcccaaaccagctctccctgcgggaaccgaagatactgcgaaggaggacgccgctaatagaaagctggccaaactatataaagtttcaaatggcgcaggcactatgtctgtgagcctggttgccgacgaaaatcccttcgcccagggagctctaaagtccgaggattgcttcatactcgaccacgggaaggatgggaagattttcgtatggaagggtaagcaggctaatacagaggaaaggaaggccgcactgaaaaccgcctctgacttcatcactaagatggactaccccaaacagacgcaggtctccgtgctgccagaggggggtgagacaccactatttaaacaattcttcaaaaactggcgcgatcccgaccaaaccgacgggctgggcctgtcttatttgagcagtcatatagccaatgtagaacgcgtgcccttcgatgcagccaccttgcacacctctacggcaatggccgctcagcacggcatggatgatgacggcactggccaaaaacagatctggagaattgaaggttccaacaaagttcccgtcgaccctgccacctacggccaattctacgggggagattcttatattattctatacaactatcgtcacgggggtaggcagggacaaataatatataactggcagggcgctcagtccacccaagatgaggttgcggcaagcgcaattttaacggcacagctggacgaagaattaggaggcactccagtgcaatcccgcgtcgttcagggcaaagagccggctcatctgatgtcccttttcgggggtaaacctatgatcatatacaagggaggcacctctcgcgaaggtggtcagactgcaccagcatcaacccgacttttccaggtcagggcaaatagcgccggagcaacccgcgcagtggaggtgctgcctaaagcaggggcattaaactccaatgacgcatttgtgctgaagacaccatcagcagcgtacttatgggtcgggacaggggctagtgaagctgaaaagactggagcccaggagttgctcagggtgcttagggcacagcctgtgcaagtggccgaggggtcagagcccgacggattctgggaggcactgggtggtaaagctgcatacaggacaagcccgaggcttaaggacaagaaaatggacgcacacccgcctagactgtttgcatgtagtaataagatcggtcgcttcgttatcgaggaagtgcctggtgaactgatgcaagaagatctggcgacagacgatgtaatgctcctggacacctgggaccaggtttttgtctgggtgggcaaggactcacaggaagaggagaaaaccgaggccctaacatccgctaagagatacatcgagactgatccagctaatcgtgaccgtaggacaccaatcacggttgtgaagcaagggtttgagcccccttcctttgtgggctggttcctcggatgggatgatgactactggtccgtagaccccctggaccgcgctatggccgaactggctgcatag

SEQ ID NO: 271443 - DNA, 2148 bp, Artificial Sequence
  derived and/or modified sequence
atggtcgtggagcaccctgagtttctgaaggccggaaaagagcccggtctgcagatatggcgagtggaaaagttcgatgcttacgttatcctgaagacagtgcagctaagaaatggcaacttacagtacgatctccactactggctcggcaacgagtgctcccaggatgagagcggcgctgcggctatttttaccgtgcagctcgatgactacctcaatggcagagcggtgcagcaccgagaggtacagggattcgagtcggcaacgttcctgggttacttcaagagcggtcttaagtataaaaagggcggagttgcatctggattcaagcacgtagtgccaaatgaagttgtagtacagaggcttttccaagtgaaaggacgcagggtggtgagagccactgaggttccagtatcctgggaaagctttaacaatggcgattgtttcatccttgacttggggaataatattcatcagtggtgcggcagcaacagcaaccggtatgaacggctgaaggcgacacaggtgtcaaaaggcatcagggacaatgaaagatccggtcgggcaagagtgcacgtctccgaggagggcaccgaaccagaagccatgttacaggtactgggcccaaaacctgctctacctgccggaactgaggacaccgctaaggaggacgctgccaaccggaaacttgccaaactttacaaggtatcgaacggagcaggcacaatgagcgtgagtctggtggcagatgaaaaccccttcgcacagggcgcattgaaaagcgaggattgttttatcctggaccacggcaaggacggaaagatcttcgtgtggaaaggtaaacaagctaatactgaggaacggaaggccgctctgaagacagcttcagacttcattacaaagatggactaccccaaacagacccaggtctctgtgctgcccgaaggcggagaaacccctctcttcaagcagtttttcaagaattggagagatcccgatcaaaccgatgggctgggcttgtcgtacctttcttcgcatatcgctaatgttgaacgcgttccatttgacgccgctaccttgcacacctccaccgctatggctgcacagcacggtatggatgacgacgggacaggacaaaaacagatatggcgaatcgaaggctctaacaaagtcccggtggaccccgctacctacggccagttttatggcggagatagctacatcattctgtacaattatcgccatgggggtcgacagggccagattatttacaattggcaaggcgcacaaagcacacaggacgaagtggcagctagcgccatcctgaccgcccagcttgacgaggagctcggaggcactccagtccagtctagggttgtgcaggggaaagagcctgctcatctgatgagcttgtttggcggtaaacctatgataatctataagggcggtacctctagggaaggagggcagactgcacctgccagtacacggctgtttcaggttcgagcgaatagcgccggagctacccgggctgtcgaggtgctgccaaaggctggtgctctgaattccaatgacgcttttgtactgaagacccctagcgctgcctatctgtgggtgggaaccggagcttctgaagccgagaagaccggggcacaggagctacttagagtgctccgggcacagcccgttcaggtggctgagggatccgagccagacggcttctgggaagctttagggggtaaggcggcttatagaacctcccctcgcctgaaggataagaaaatggatgcccaccctcctagactgttcgcatgttctaataagatcggcaggttcgtaatcgaggaggtgcccggtgaacttatgcaggaagacctggccaccgatgatgtgatgctgcttgacacatgggaccaagtgttcgtatgggttggtaaggatagtcaggaagaggaaaaaacggaggccctaacttccgctaagcggtatatcgagaccgatccagcaaaccgggaccgcagaactcctatcactgtcgtcaaacaaggtttcgaacccccttcctttgtaggatggttcctcggttgggatgatgactattggagtgtggaccccttggaccgagccatggctgaactggccgcatag

SEQ ID NO: 271444 - DNA, 2196 bp, Artificial Sequence
  derived and/or modified sequence
atggtggttgagcaccccgagttcttaaaggcaggaaaagagcccggtttgcagatctggagagtggaaaaattcgatctggttccagtgccaacgaatctgtacggagattttttcaccggagatgcttatgtgatcctgaagaccgtgcaactccgaaacggaaatctgcaatacgacctgcattactggttagggaacgaatgctcgcaagatgagagtggagctgctgccatcttcaccgtgcaactggatgattacctaaacggtcgggctgtccagcatagggaggtgcagggattcgagagcgccactttcctgggttatttcaaatcaggactcaagtataaaaagggtggagttgcctctgggtttaaacacgtggtccccaacgaggtagttgtgcaacggctgttccaggttaaggggcgaagagtggttagggctacagaagttccagtgtcttgggaaagctttaacaatggcgattgctttatcctcgacctaggaaacaacatccatcagtggtgcggcagtaatagtaatcgatacgagcggctcaaggccacgcaggtcagcaaaggtatccgcgacaatgagagatccggaagggctagggtgcatgtttcggaggaaggtacagagcccgaagcaatgctgcaagtactggggccaaagcctgccctccctgcgggaaccgaagacacagccaaggaggacgccgctaacagaaaactagctaagctctacaaagtgtctaacggcgcaggaacaatgtccgtttccctcgttgcagacgaaaacccctttgcccagggcgcactaaagtctgaggactgttttatcttggatcatgggaaagacggcaagatattcgtctggaaaggcaaacaggcgaacacagaagagaggaaagccgcacttaagacagcgagcgacttcatcaccaaaatggactaccccaagcagacgcaagtgagcgtgctccccgagggcggtgagacccccctgtttaaacagtttttcaagaactggcgtgaccccgatcaaaccgacggcttgggcctgagctatctctccagccacattgcaaatgtcgagcgggtaccttttgatgctgccaccctccacacgtcgacggcgatggccgctcagcatggcatggacgatgatggcaccggtcagaagcagatttggcggatcgaaggatctaacaaggtgccggtggatccggctacttacgggcagttctacggaggggactcttacatcatcctctacaattataggcatggagggaggcagggacaaatcatatataactggcagggtgcccagagcacgcaagatgaagtggctgccagtgctattctcacagcccagctcgacgaggagctcgggggtacaccagttcagtcacgtgtcgttcagggcaaggagcccgcacatctaatgagcctattcgggggaaagccaatgattatctacaagggaggcacatctagagagggcggtcagaccgccccagcttcaacacggttattccaggtgcgggcaaactccgctggtgctaccagagccgtggaggtattacccaaagccggtgctctgaacagcaacgacgcattcgtgctcaagactccttcagccgcatacctgtgggtgggcactggagcgagtgaggcagaaaagaccggggctcaagaactcctgcgggtgctaagagcccagcctgtgcaagtagcagaggggtcagaacctgatggcttctgggaggcacttggaggcaaggctgcataccggacctctcctcgtctgaaggacaagaagatggacgcccaccccccaagactgttcgcctgcagcaataaaattgggagattcgtaatcgaggaagtccccggtgagctgatgcaagaggacttggctactgacgatgttatgctcctggacacatgggatcaggtcttcgtttgggtgggaaaggactcacaggaagaagagaaaactgaggcgctgacctccgctaagcgctacatagaaaccgatcccgctaatcgggatcgcagaacgcccatcaccgtggtgaaacagggattcgagcctccctcgttcgtgggctggttcctgggctgggacgatgactactggagtgtcgacccccttgatagagccatggccgaacttgcagcatag

SEQ ID NO: 271445 - DNA, 783 bp, Artificial Sequence
  derived and/or modified sequence
atggtggtcgagcatccggagttccttaaggcgggaaaagaacccggactgcaaatctggcgcgtggaaaagttcgatctagtacccgtcccaacgaatttgtatggcgactttttcactggagatgcctatgtgatactgaagactgtgcagcttcgcaacggaaacctccaatatgacctacattactggctcgggaatgagtgtagccaggatgagtccggggcagctgcgatattcaccgttcagctggacgattatttgaacggtcgtgctgtgcagcacagggaggtacaggggttcgagtctgctacattcctcggatatttcaagagcgggttgaaatataagaagggaggagtcgctagcggatttaagcatgtcgtgcccaatgaagtagtagtacagaggctgttccaggtgaaaggcaggcgggtggtgagggcgacggaggtgccggtgtcttgggaatcatttaataatggagattgcttcatcctcgacctggggaacaatatccatcagtggtgcgggtctaactctaaccggtatgagaggctgaaggctacgcaggtcagtaaaggaatccgggataacgaaagatcaggcagggccagggtgcacgtgagcgaggaggggacggagccagaagccatgttacaagtgctcggccctaaaccagctctgcctgcagggactgaagacactgccaaagaagatgcagccaataggaagctggccaagctgtataaggtctccaatggcgctggcactatgtcatag

SEQ ID NO: 271446 - DNA, 2196 bp, Artificial Sequence
  derived and/or modified sequence
atggtggtggaacaccctgaatttcttaaggcaggaaaggagcccggtctccagatctggagggttgaaaaatttgatttggtgcccgtgcccactaacctgtacggtgatttctttacgggcgatgcctacgtcatacttaagaccgtgcagctgagaaacgggaacctgcagtacgatttgcactattggctgggtaatgaatgctcacaggatgagtcaggcgctgccgctatttttaccgtacagctggatgattatctgaatggcagggcagttcagcaccgcgaagtgcaaggtttcgagagcgcaacattcttggggtatttcaaaagtgggctgaagtacaagaagggaggagtcgcctcaggattcaagcacgttgtcccaaatgaagtggtggtgcagcggctgtttcaggtcaaggggaggagagttgtacgagccactgaggtaccagtgtcttgggaaagcttcaacaacggggattgcttcattctggaccttggcaataacatccatcagtggtgcggaagcaacagcaaccggtacgagcgcctcaaagcaactcaggtgtccaaggggatccgagacaacgagcggagcggaagagctcgcgttcatgtgtctgaggaaggcacagagcctgaagccatgctgcaggtgctgggacctaaaccagccttgccagctgggactgaagacacggctaaggaggacgctgcgaatagaaaactcgctaaactgtataaggtcagtaatggcgctggcacaatgagtgtgtccttggtggccgacgagaaccctttcgcccaaggagcgctgaagtccgaagattgtttcatcctggaccacggcaaggacggcaagatatttgtttggaagggtaagcaggccaatacagaggagcgcaaggctgcccttaaaaccgcttccgactttattaccaagatggattacccaaaacaaacgcaagtatcagtcctaccagaaggaggcgaaactcccctgttcaagcagtttttcaaaaactggcgcgaccccgaccaaaccgatgggttaggcctcagttacctctcttctcatattgccaatgtggaacgcgttcccttcgacgccgcaactttgcacacctctaccgctatggctgcccaacacgggatggatgacgatggcaccggccagaagcagatctggagaattgagggcagtaacaaggtgcccgtggaccccgcaacatatggtcagttctatggcggtgatagctatattattttatacaactaccgacacggaggccgtcaagggcagattatctataattggcagggagcgcaaagtacccaggacgaggttgcagcatctgcaatcctgacagcccaactggatgaggagttagggggtacccctgtgcaatcacgggtcgtgcagggcaaggagcccgcacatctcatgtccctcttcggcggaaagccgatgataatctacaaagggggaaccagtagggaagggggacaaaccgcccctgcttcaacccgtctgtttcaggtacgtgccaactcggctggcgctacaagggccgttgaggttttgccaaaagctggcgctctgaactctaatgatgcctttgttctgaaaactccgtcagccgcttacctctgggttgggactggcgcttccgaggccgagaagactggggctcaggaattgcttcgggtcttgagggcccagcccgtccaggtcgccgagggatcggaacctgatggcttctgggaggcactcggcggtaaggctgcttatagaacatccccccgtcttaaggataaaaagatggacgctcatcctccaagattattcgcctgttccaacaaaattgggcgttttgtcattgaggaggttccaggagagcttatgcaggaggatctcgccaccgatgatgtcatgttgcttgatacttgggatcaggtgttcgtttgggtaggtaaggatagccaagaggaggagaagaccgaggccttgaccagcgctaagcgctacattgagaccgatcccgctaatcgtgatcgacgcacgccaataactgtcgttaaacagggcttcgagcctccatcgttcgtcggctggtttttgggctgggatgatgactattggagtgtagaccccctggatcgggctatggcggagttagccgcatag

SEQ ID NO: 271447 - DNA, 2118 bp, Artificial Sequence
  derived and/or modified sequence
atggtggtggagcaccctgagttcctgaaggcgggtaaagagcccggtttgcagatctggcgcgtggagaaattcgacctggtgcccgttccgacgaatctttacggcgatttttttaccggggacgcctacgtaatcctgaaaactgtccagctgaggaacggcaaccttcagtatgacctccactattggctggggaatgaatgcagtcaggatgaaagtggtgcggcagctatattcacagtgcagcttgatgactacctgaaatacaaaaagggtggtgtcgctagcggcttcaagcatgtcgttccgaatgaagtggttgtgcagaggctttttcaggtgaaaggacgccgtgtggtccgggcaacagaagtaccagtatcctgggaatcttttaacaatggggactgttttatactcgatctggggaacaatatccatcagtggtgcggctcaaattcaaacaggtatgagagattaaaggcaacacaggtgtctaagggtatccgagacaacgagcgctccggcagagcgagagttcacgtttccgaggaaggtacagagccagaggccatgctacaggtactggggccaaagccagccttgcctgccggtacagaggacacagctaaggaagatgcggctaatcgcaaactcgcgaaactttacaaggtttcaaatggagccggaacgatgagcgttagcctcgttgcagatgagaatccctttgcgcagggcgctctcaagtcggaagactgctttatcttagatcatggtaaagacgggaagatctttgtgtggaagggaaaacaggccaatacagaagagcgtaaggccgctcttaaaactgcttcagatttcattaccaagatggattaccccaagcaaactcaagtgtcagtgctgcctgaaggcggtgagacccccctgttcaagcagttctttaagaattggcgtgatccagatcagaccgatggcctcggactgtcgtatctctcttcacatatcgcgaatgttgaacgcgtgcccttcgacgccgctacacttcacacctctacagctatggcggcacagcacggcatggacgatgatggcacagggcagaagcagatctggcgaatagagggatctaacaaagttcccgtcgatcctgccacctatggtcagttctatggtggagatagttacatcatcctgtacaactacaggcacgggggacgccaagggcaaattatttacaactggcagggggcacagagcactcaagacgaagtggctgcatctgcaatcttgacagcccaactagacgaggagctggggggaacacctgtacagagccgggttgtccagggaaaggagcccgctcatctgatgagtctttttggagggaaacccatgattatctataaagggggaacctctagggaaggaggccagactgccccagctagtacacgcctttttcaggtgagagcaaattccgccggagccacccgcgcagtggaagtgttgccaaaagctggcgctctcaactccaatgatgcgtttgtgctaaagaccccctccgctgcttatctgtgggtgggaacaggggcttcagaggccgagaagacaggggcacaggagttattgagggtgctgcgcgcacagcccgtccaggtggccgaaggatctgagcctgatggcttttgggaagccctcggcggaaaagccgcataccgcactagtccaaggctcaaggacaaaaaaatggatgcacatcctccgagattgttcgcctgtagtaataagatcggacgcttcgtaatcgaggaggtgcccggagaactcatgcaggaagacctggccacagacgacgttatgctgctcgatacctgggaccaggtgttcgtgtgggtgggtaaggactctcaggaagaggaaaaaaccgaagcactgacatcagccaaacgctacatcgaaacggatcccgcaaatagggacaggcgcactcccatcaccgtggtgaaacagggctttgagcctccctctttcgttggatggtttctgggctgggacgatgactattggtcagtagacccgcttgaccgagccatggcagagttggccgcatag

SEQ ID NO: 271448 - DNA, 2196 bp, Artificial Sequence
  derived and/or modified sequence
atggtggtggaacacccagaattcttgaaagctgggaaggagccagggttacagatctggagagtggagaagttcgacctggtgccagtacccactaacctgtatggggatttctttacaggagatgcgtatgtcattctgaagaccgtgcaattgcgtaacggaaatttacagtatgacctccactactggttgggcaatgagtgcagccaggatgaatcaggagccgccgcgattttcacggtgcaactcgatgattacctgaacgggagagctgtgcagcatagagaggtccagggattcgaatctgcgaccttccttggttacttcaaaagcgggcttaaatacaaaaaggggggagtcgcatctggctttaagcatgtggtacctaatgaggtggttgttcagagactgtttcaggtaaaaggacgtagggtggtgagggctactgaggtaccagtttcttgggagagctttaataacggcgattgcttcattttagatctgggtaacaacatacaccagtggtgtggctcgaattcaaatcgatacgagaggttaaaggcaacccaggtgtccaagggcatcagagacaacgaacgatcgggaagggcgagagttcacgtatcagaggagggtactgaaccagaggcaatgttgcaagtgttgggccctaagccggcactacctgcagggaccgaggatacagctaaagaagatgcggcaaataggaagctagcaaaactgtacaaggtctctaacggcgcgggcaccatgtccgtaagtcttgtcgcagatgaaaatccttttgcacagggagccctaaaaagcgaagattgtttcatcctcgaccatggaaaagacggaaagatttttgtctggaagggcaagcaagcaaatacagaagaacgcaaagccgctttaaagaccgcttcagatttcatcaccaaaatggattaccccaaacagacgcaggtcagtgtcttgccagagggaggcgaaactcctttattcaagcaattctttaagaattggagagacccggaccagacggatggcctgggattgtcctacctgtcctctcacattgctaacgttgagagagtgccttttgacgccgcaaccctccacacatcgactgccatggctgcccagcatgggatggacgacgacggcactggccagaagcagatctggaggattgagggctcgaataaggtgcctgtcgatccagctacatacgggcagttctacggtggggatagctatataatcctgtacaattataggcacggcgggcggcagggacagatcatctataactggcaaggagctcaatcaacccaggacgaagtggccgccagcgcaattttaacggctcagttagacgaagagctcggcggaacacctgtgcagtctagagtcgtccaaggaaaggagccagcccacctgatgagtctgtttggtggcaagcccatgattatctacaaaggtggaacctctagagaaggcggccagaccgcacccgctagcacccgactgttccaggtacgggcaaacagtgcaggcgcgacgagagccgtggaagtcttacctaaagccggggcattaaattctaacgacgcatttgtgcttaagactcccagcgcagcctacctctgggtgggcactggtgcctccgaagctgagaagaccggagcccaggagctgctgagggtgctgcgggctcagccagttcaagtggccgagggctcggaaccggacggcttctgggaggcgcttggagggaaagctgcgtaccgaaccagtcccagacttaaggataaaaaaatggacgctcaccccccccgactattcgcatgttctaacaaaatcggcagattcgtcatcgaggaagtacccggggagctgatgcaggaggatctggccactgacgacgtgatgctcctcgatacttgggatcaggtgtttgtttgggtcgggaaagactcccaagaggaagagaagaccgaggcgctgacctcagcaaagcggtacatcgagacagatccggccaacagggacagaaggacaccgattacagtggtgaagcagggattcgaacccccttccttcgtcgggtggtttctggggtgggatgacgattactggtcggtcgaccccctcgatagagccatggccgaactggccgcttag

SEQ ID NO: 271449 - DNA, 2196 bp, Artificial Sequence
  derived and/or modified sequence
atggtggtcgagcacccagagtttctgaaggccggaaaagaacccgggctccaaatctggagagtggaaaaatttgatttagtccccgttcccaccaatctgtacggagatttcttcacgggggatgcatacgtaattctgaaaactgtgcaactgcgaaacggtaacttgcagtatgacctccactattggttgggaaacgagtgctcccaagatgagagcggggccgcagcaatcttcacagtccaacttgacgactatctcaacggaagggccgtgcagcaccgcgaagtccaaggattcgagtccgccacatttttagggtacttcaagtctggcttgaagtacaagaagggaggggttgcaagcggatttaaacacgtggtgcctaatgaagtggtggtgcaaaggttattccaggtcaagggtagacgggtcgttcgagccactgaagttcctgtatcctgggagagctttaataatggggattgcttcattcttgaccttggcaataacatccaccagtggtgtgggagtaacagtaatcggtatgagagactcaaagccacacaagtctcaaagggcataagagataatgaaagaagcggacgagcccgggtgcatgtgtccgaggaaggaaccgagcccgaagcaatgctccaagtcctagggccaaaacccgcccttcctgcagggaccgaagacacggcaaaagaagatgcagcaaatcgaaaactggcgaagttgtataaagtgagtaacggggccgggacaatgtctgtgagcctcgttgcagatgaaaatcccttcgcccagggggccctgaagagtgaagactgtttcatcctggatcatggtaaggatggcaagatcttcgtgtggaaaggcaaacaggccaatacagaggagcgcaaagcggccctgaagactgcttctgattttataaccaagatggactatcctaaacagacacaggtgagcgtactgcctgagggtggcgaaactccactcttcaaacagttttttaaaaactggcgggaccccgatcagacagacggcctgggactctcgtacctctcgtcccacatcgctaatgtggaaagggtgccattcgatgccgctactctgcatactagtacagcgatggccgcccaacacggcatggacgatgacggaaccggccaaaaacaaatttggcggattgaagggtctaacaaagtgcctgtggatcctgctacatacggtcagttctacggaggcgactcttacataattttatataattaccgccacggaggacggcagggacaaatcatctataactggcagggcgcccagtccacccaggatgaggtagccgcaagtgcaatcttgactgcacagcttgacgaagaattgggtggaaccccagtccagtcgcgcgtcgtacagggaaaggaacccgctcacctgatgtccctgttcgggggtaaaccaatgattatatataagggtggaacttctagagagggaggacaaaccgcccctgctagtactcggcttttccaggtgcgggctaattccgctggggccactcgagcagttgaggtgctgcctaaggccggcgctctgaactccaatgatgcttttgtcttaaagacacccagcgctgcgtacttgtgggtgggtaccggggcatctgaagccgaaaaaacaggtgcccaggaactcttgcgcgtcttgagggctcagccggttcaggtcgccgaggggagcgaacccgacggattttgggaggccctcggaggtaaagctgcatacaggacctccccacgacttaaggacaagaaaatggacgctcaccccccccggctgttcgcctgcagtaacaaaattggtcgatttgtgatcgaagaagttccaggtgaacttatgcaagaggatctcgcaacggacgacgtgatgctgctggacacttgggaccaggtgtttgtgtgggtcgggaaggattcccaagaggaagaaaaaaccgaagcactaacatctgctaagcgatacatagagactgatcctgctaacagagaccgccggactccaattaccgtcgttaaacaaggtttcgagccaccatcttttgttggttggttcctcggctgggacgatgattactggtctgttgatccgctcgatcgcgctatggccgagctggcagcctag

SEQ ID NO: 271450 - DNA, 2196 bp, Artificial Sequence
  derived and/or modified sequence
atggttgttgaacatcctgagttcctgaaggctgggaaggaacccggattacagatctggagggtggagaaatttgatttagtacccgttccgaccaacctatacggggactttttcacaggtgacgcttacgtgattttgaaaactgttcaactgaggaatggaaacttgcagtatgacctgcactactggcttggcaatgagtgttcacaagatgaatctggcgctgcagctattttcacggttcagcttgacgactacttgaacggcagagcggtccaacacagagaggtgcagggcttcgaatccgcaacctttctcgggtacttcaaatctggtctgaagtataaaaaaggaggtgtggctagtggattcaaacatgtcgtcccgaacgaagtcgtggtgcagcggcttttccaggtgaagggacgaagagtagttagggcaacagaggtacctgtgagctgggagtcctttaacaacggcgattgctttattctagatctcggtaacaatattcatcaatggtgtgggtccaatagcaatcggtatgagcggcttaaggctacccaggttagcaagggtataagagataatgaacggtctggacgcgctagagtccacgtgtccgaggaggggaccgagcccgaagcaatgctgcaagtactggggccgaagcctgctctcccagctggaactgaggacacagctaaggaggatgccgctaatcgcaaactcgcaaaactgtacaaggtgtccaacggagctggaacgatgtccgtctctctggtggccgacgagaatccctttgcacagggagccctcaaatctgaagactgttttatactggatcacggcaaggacggcaaaatattcgtgtggaaaggcaagcaggccaataccgaagaacggaaggctgcactgaaaactgcatccgattttatcaccaagatggactaccccaaacagacacaggtgtcagtgcttcctgagggaggagagacgcctctgtttaaacagttcttcaagaattggagagatcccgaccagacagacggattgggtttatcctatttaagcagtcatattgccaacgtggagagagtcccatttgacgccgccacactgcatacaagcactgccatggccgctcaacatggtatggacgatgatggaacaggtcagaagcagatctggagaattgaaggctccaataaggtccccgtcgatcctgctacctatggacagttctatggcggagattcctacatcatcctgtataattataggcatggggggagacaaggacaaattatatacaattggcagggagctcaatctacccaggatgaggtcgcagccagcgccatccttactgctcagctagatgaagaacttggtgggacgcccgtgcagagtcgggtggtccaagggaaagaacccgcccatctcatgtctctgtttggtgggaaacctatgattatatacaagggtggaacatccagggaaggaggccagaccgcacccgcatccacgaggctctttcaagtgagagctaattctgccggcgccacacgggctgttgaggttctccccaaggccggggccctgaatagcaatgatgctttcgttctcaaaactccaagtgccgcctatctctgggtcggaacgggggcctcagaggctgaaaaaactggggctcaagagttgctgcgcgtactcagagcacaaccagtccaggttgctgaaggctctgagcctgatggcttttgggaagcactgggagggaaggctgcctaccggacctccccaagactgaaagataagaagatggatgcccaccccccaagactattcgcttgtagcaataagatcgggaggtttgtaatagaggaggtccccggggagttaatgcaagaagacctggctactgacgacgtaatgttgcttgatacgtgggaccaggttttcgtgtgggtgggaaaagatagccaagaagaggagaagactgaggccctaacctctgccaagagatatatcgagacagacccagctaatagagaccgcaggactcccatcactgtcgtgaagcaggggtttgaaccaccgtctttcgtcggatggttcttgggctgggacgatgactattggagtgtggaccccctcgacagagccatggccgaactggctgcgtag

SEQ ID NO: 271451 - DNA, 2148 bp, Artificial Sequence
  derived and/or modified sequence
atggtggtggagcacccggagtttttgaaggcgggaaaagagccgggtttgcagatctggcgtgttgagaagttcgatgcgtatgtcatcttgaagactgtccaacttcgtaacggcaacttgcagtacgatctccactactggctcggcaatgaatgcagtcaggacgagagcggcgctgccgcaatcttcacagtacagctggacgactacctgaacggccgggccgtgcagcatcgggaggtgcaaggatttgagagtgcaacatttcttggttatttcaaaagtggactgaaatacaagaagggaggcgtggcatctggttttaaacacgtggtgcccaatgaggtcgtcgttcaacgcctgtttcaggtgaagggcaggagggttgttagggcaactgaagtgcccgtttcgtgggaatcattcaataacggagactgctttatactggatctggggaacaatattcatcagtggtgtggatccaatagcaatcgttatgaacgtcttaaggctactcaagtgtcaaaagggattcgagataatgagaggtccggtagggcccgggtgcacgttagcgaggaaggcactgagcccgaggctatgcttcaggtgttggggcccaagcccgccctcccagctggaaccgaggatacagcaaaagaggatgcagcaaatcgcaagctggcaaaactgtataaagtgtccaacggcgccggcacaatgagcgtcagcctggtcgcagatgaaaatccattcgcccagggggccctaaagtccgaggactgttttattctggatcatggaaaagacggaaaaattttcgtctggaaggggaagcaggctaacaccgaagaaaggaaggccgctttaaaaacagcgtcagattttatcactaagatggattaccccaaacagacacaggtgagcgtgttgcccgaaggtggcgaaacacccctcttcaaacagttcttcaaaaattggagagacccagaccaaaccgacggcttggggctctcttacctgtcaagccacattgctaacgttgaaagggttccctttgatgctgctacactccatacaagtacggctatggcagcccagcacggaatggatgacgacggcaccgggcaaaagcaaatttggcgtattgaggggagcaataaggtgcccgtagacccagcaacctacggacagttttatggaggcgactcttatatcattttatacaactatagacacggaggacgacagggccagatcatctacaactggcagggggcacagagtacacaggacgaggttgcagccagtgccatcttgacagctcagttggacgaagagctcggaggcacacccgtgcaaagcagggtcgtacagggtaaggagcctgctcaccttatgagtctttttggtggcaaacctatgatcatatacaaagggggtacttctagggagggaggccaaacagccccagctagtactagactgtttcaggtccgcgccaattctgcgggtgccacgagggcagttgaggtgctgccaaaggctggagctttaaacagcaacgacgcatttgtgttgaagactcctagcgcagcttatttgtgggtgggcaccggagccagcgaggcagagaagacaggcgcccaggaacttctgagagtacttagggcacagccggtgcaggtggccgaaggatcagagcccgacggattctgggaagccctgggaggaaaggccgcgtacagaacctcacccaggttgaaagacaaaaaaatggacgcccaccccccccgattatttgcctgcagtaacaagattggtagattcgtgattgaggaggtccctggggagctcatgcaggaagatctcgctacggacgacgttatgcttctggatacttgggatcaggtctttgtttgggtgggaaaagacagccaggaggaggagaagaccgaggccctgacatctgccaagcggtatatagagacagatcctgccaaccgcgaccggagaacccccatcacagtcgttaagcagggttttgagcccccctcttttgtggggtggtttctagggtgggatgatgattactggagcgtggacccccttgatcgagcgatggccgaactcgcggcctag

SEQ ID NO: 271452 - DNA, 2196 bp, Artificial Sequence
  derived and/or modified sequence
atggtagtagaacatcctgaatttttaaaggcaggcaaggagcctggacttcaaatttggcgagtcgagaagtttgacctagtgccagtcccgacaaacctgtatggtgatttctttactggcgatgcatatgtcatcttgaaaacagtgcagctgcggaacggtaacttgcaatatgacctccactattggctaggtaacgagtgctcacaggatgagtcaggcgccgctgccatatttaccgtgcagctcgacgattatctgaacggcagggctgtacagcatcgggaggtccagggctttgagtccgcaacctttctaggctatttcaaatccggtctcaagtataagaaggggggtgtagctagtggattcaagcatgtggttccaaatgaagtagtcgtgcagaggctctttcaagtaaaaggaaggcgggtggtgagggcaacagaagtgcccgtgagctgggaaagcttcaataacggcgactgtttcatcctggacttgggaaacaatatccatcaatggtgtggaagtaatagtaataggtacgagcggctgaaagccacacaagttagcaaaggtatcagagataatgaaagaagcggcagggcgcgagtccatgtctcagaagagggaaccgagccagaagctatgctgcaggtcttgggtccgaagcctgccctccccgccggcacagaagacaccgctaaagaggatgctgcaaaccgcaaactggctaagctctataaggtctcaaatggggccgggacaatgtctgtatccctggtggcagacgagaatcccttcgctcaaggggcactgaaatctgaggactgctttatccttgaccacggcaaggatggcaaaatctttgtttggaagggcaagcaagccaataccgaggaaagaaaggcggccttgaagaccgcgagcgactttatcaccaagatggactatcccaaacagacccaggttagtgtgctgcctgagggaggtgagacacctcttttcaaacagttttttaaaaattggagagaccccgaccagacagacggactcggcctatcttatttgtctagccacattgctaatgtggagcgcgtgcctttcgacgctgctacgttgcacacttctacagccatggctgcccagcacggaatggacgacgacggtaccgggcagaaacaaatttggaggatcgagggttcgaataaagtacctgtggacccggcaacctacggacagttttacggaggagattcttacattatcctctacaactaccgccacggtggtaggcaaggtcagataatctacaattggcagggcgcccagagtacgcaggacgaagtggctgccagtgcaatccttactgcgcagctggatgaggaactcggcggaacacccgtccagtcccgtgtcgtgcagggaaaggaacccgcccatctgatgagtctgtttgggggcaaacccatgataatttataaaggggggacttccagggagggcggccagacggcccctgcaagcactagattatttcaggttcgcgccaattctgccggagccacccgggccgtggaggtattgcccaaggccggggcactaaactcgaatgacgccttcgtgctgaaaacaccgtcagctgcttatctttgggtaggaactggcgcctccgaggccgaaaaaacgggagctcaggagctcttgagagtgctgagggcgcagccagtacaggtagccgaagggtcagaacctgatggcttttgggaagctctgggagggaaggcggcttatcgaacctctccgcgcctgaaggacaagaagatggacgcacaccccccacgcctctttgcctgcagcaataagattggacgattcgttattgaagaggtgccaggggaactcatgcaagaagatctcgccacagacgatgtaatgcttctggatacttgggaccaggttttcgtgtgggtgggtaaggatagccaagaagaggaaaaaacagaagctttgacaagcgcaaaaagatatatcgagaccgaccctgctaacagagaccgacgaaccccaatcaccgttgtgaaacaggggttcgagcccccctcattcgtgggctggttcttaggatgggacgacgactactggtctgttgaccctttagatagagctatggccgaactggctgcttag

SEQ ID NO: 271453 - DNA, 783 bp, Artificial Sequence
  derived and/or modified sequence
atggtcgtagaacaccctgaatttctgaaagctgggaaagaaccaggcctacagatctggcgcgtcgagaagttcgatcttgtgccagtgcctactaatctctatggcgatttttttacgggcgatgcctatgtgatactgaaaactgtacagctaaggaacggcaacctgcagtacgatttacattattggcttggaaatgagtgctcccaggacgagtccggcgctgcggctattttcacagtccaattggacgactacctgaatggacgggcagtccagcaccgtgaagtccaaggctttgagagcgctacatttctgggatatttcaagtccggtctcaaatataaaaaaggaggcgtggctagcggatttaaacacgttgtgcctaacgaggtcgtagtccagcggctattccaggttaaaggcagaagggtggtacgcgcaacagaagtgcctgtgtcttgggaatcttttaacaatggcgactgttttatcctcgatctcggcaataatattcaccagtggtgcggtagcaactctaataggtacgagcgtcttaaggccacgcaggtttccaaaggaatccgggacaatgaaaggtctgggcgtgcacgtgtgcacgtgagcgaggaaggtacagagccagaggctatgcttcaggtcctaggtccgaaaccagcactgccagctggaaccgaggatacagccaaagaagatgccgccaaccggaaactcgctaagctctataaagtgagtaacggtgccggaaccatgagctag

SEQ ID NO: 271454 - DNA, 2196 bp, Artificial Sequence
  derived and/or modified sequence
atggtcgtcgaacaccctgagtttctgaaagcaggtaaggaacctggactgcaaatttggagagtggaaaagtttgacctggtacccgtaccgaccaacctctatggggacttttttaccggcgatgcttatgtaattctgaaaaccgtgcaattgcggaatggtaacttacagtatgatctacactattggttgggaaatgagtgctctcaggatgagtccggcgctgccgcaatctttacagttcagctagacgattacttgaacggcagggccgtgcaacatcgtgaggtgcagggtttcgaatctgcaacctttctcgggtactttaagtctggactgaagtacaaaaaaggcggcgttgcctccggctttaaacacgtcgtgcccaatgaagtcgtagtgcagcggctgtttcaagttaaagggcgccgcgtggttagagcgactgaagtaccggtgtcatgggaatcattcaacaatggagattgctttattttggatcttgggaataatattcaccagtggtgtggctccaattccaacaggtatgaaaggcttaaagccacccaggtcagcaaaggaattcgcgataacgaacgatctggacgcgcccgcgttcatgttagtgaggaggggaccgagccagaggccatgctgcaggtactgggcccaaagcccgctcttcccgcagggactgaagataccgccaaagaggatgccgccaacagaaagttggcaaaactgtataaggtcagtaacggagccggtactatgtctgtgagtcttgtagcagacgaaaacccttttgctcaaggcgccctgaaaagcgaagattgttttattttggatcacggaaaagacggtaaaattttcgtgtggaaaggaaagcaggccaataccgaggagaggaaagccgccctgaaaacagccagtgattttataacgaaaatggactacccgaaacaaactcaagtttcagtgctaccggaagggggtgagacaccgttgtttaagcagttcttcaaaaattggcgcgaccccgaccaaacggatggattgggcttatcgtacttgagtagccacatagccaatgttgaacgtgttccttttgatgctgccaccctccatactagcaccgctatggccgcacagcatggaatggatgacgacggtaccggacaaaaacagatctggcggatcgagggatcaaataaggtccccgtggaccccgcaacttacggccagttttacggtggggattcctatatcattttatacaactatagacacggcggccggcagggccagatcatttataactggcagggggcgcagagcactcaggatgaagtcgccgcatccgcaatactaaccgctcagctggatgaggagcttggcggaaccccagtgcagagcagggtcgtacaggggaaggaacctgcccacctcatgtcactcttcggaggcaaacccatgatcatctataaaggcgggaccagccgcgagggcggacaaactgccccagcgtccaccaggttgtttcaggtccgcgcaaattccgctggagcaacacgagcagttgaagtgctgccaaaggcgggggccctgaactcaaacgacgccttcgtattaaaaacccctagcgcggcgtacttgtgggtagggacaggagccagcgaagccgagaagacaggagcccaggaacttcttagggtgctgagggcgcagccagtgcaggtagctgagggctcagaacccgatggtttttgggaggcccttggcgggaaggcagcttacagaacatcaccccggctcaaggataaaaaaatggatgcacatccacctcgactctttgcctgctccaataagatcgggagattcgtgatcgaagaggtaccgggcgagttgatgcaggaggaccttgccactgatgatgtgatgctgctggatacttgggaccaggtgtttgtgtgggtgggcaaggactcacaagaggaggaaaagacagaagcactgacatctgccaagcgatacatcgagacagacccagcaaacagagatagacgcactcccattaccgtggtgaagcaggggttcgagccaccctctttcgtgggatggttcctcggatgggacgacgactactggagcgtcgaccctctcgatagagcgatggctgagctcgccgcttag

SEQ ID NO: 271455 - DNA, 2118 bp, Artificial Sequence
  derived and/or modified sequence
atggtcgtcgaacatcctgaattcctcaaagcagggaaggaacctggccttcagatatggagggtagaaaagtttgacttagtgcccgtacccactaatctgtacggcgacttttttaccggcgacgcatatgtgatcctgaagaccgtccaattaagaaatggcaacctgcaatacgaccttcactactggctagggaacgagtgctcacaggatgaatccggtgctgctgcaatttttactgtgcagttggacgattacctgaaatacaaaaaaggaggagtagcatcaggcttcaagcatgtggtgcctaacgaagtggtggtgcagcgcctgttccaggtcaaaggccggagagtggtcagagccaccgaggttcccgtttcttgggagtcctttaataacggagattgcttcatcttggatctgggaaacaatattcaccaatggtgtgggagtaatagtaataggtacgagaggctcaaagcaacacaagtctcaaagggcatacgcgataacgagcgcagcggtcgggctagagtgcatgttagcgaggagggaacggagcccgaagccatgctccaggtcctgggccccaagcccgctcttccagccggtaccgaagatactgccaaggaagacgccgccaacaggaagcttgctaaactgtacaaggtttcaaacggggccggcacaatgtccgtttccctagttgccgatgagaacccatttgcccagggggcactgaaaagcgaagactgtttcatcttagatcacggcaaggatggaaagatcttcgtttggaagggcaaacaggctaatacagaggagagaaaagctgccctgaagacagcgtctgacttcattactaaaatggactatccgaaacagacccaggtcagcgtgctgcccgagggcggagagaccccactttttaaacagtttttcaaaaattggcgggacccagatcagaccgacggtctaggactaagttatttaagctctcatattgcaaatgtggagagagtcccctttgacgccgccacactccacacatctaccgctatggctgcacaacatggaatggatgacgacggaaccggacagaaacagatctggcgcattgaaggatcaaataaagtaccagtcgacccagctacgtacgggcagttctacggaggcgattcttacatcattctctataattatagacacggaggcaggcagggacagatcatctacaattggcaaggcgctcagagcactcaggacgaggtggcagcctctgctatcctaactgcacagttggacgaagagttaggtggaactcctgtgcaaagtcgggtcgtgcaaggcaaagaacccgcccatctgatgagtcttttcgggggcaagccgatgataatttataaagggggaacatccagggagggaggacagaccgcccctgcttcaacccgactgttccaagttcgagccaattccgcgggagccactcgcgctgtggaagtgctgcctaaggcaggggctctgaactcgaacgacgcatttgtgctgaagactccaagtgcagcgtatctctgggtgggcactggcgcatcagaggccgaaaaaactggcgcgcaggagctactgagggtactgcgtgctcagccggtgcaggttgccgagggcagcgagcccgatggattctgggaagcgttggggggcaaagccgcatatcgcaccagcccacgactcaaggataagaaaatggacgcccatcctcctagactgttcgcttgctctaataagatcgggaggttcgtaattgaagaagtccccggggagcttatgcaggaggatctggctaccgatgatgtgatgctgcttgatacatgggaccaggtgtttgtgtgggtgggaaaagactcccaggaggaagagaagacagaggccttgacgtcagccaagcgatacatcgagaccgatcctgccaatagggataggaggactcccataacagtggtgaagcagggattcgagccccccagtttcgtcggctggttcttgggttgggacgacgattactggagtgttgaccccctggatagagctatggcagaattagcagcatag

SEQ ID NO: 271456 - DNA, 2196 bp, Artificial Sequence
  derived and/or modified sequence
atggtcgtggaacaccccgagtttctaaaagccggtaaggagccgggattgcagatttggcgcgtggagaaattcgatctagtacctgttccgacaaatctgtacggggatttttttacaggagatgcttacgtaattctgaaaaccgtgcaactacgaaatggcaatctccaatacgaccttcactattggctgggtaacgagtgctcgcaggatgagtctggggcagcagctatattcaccgtgcagttggatgactacctcaatggaagggcggtacagcacagagaggtacaaggatttgaatccgctacgttcctgggctactttaagtccggtctcaaatataagaaggggggggtcgcttccggtttcaaacatgtcgtgcctaatgaggttgtcgtgcagaggctgtttcaagtaaaaggtcggagagtggtgcgcgctacagaggtgccggtgtcctgggaaagttttaataatggcgactgtttcattctggacctgggaaataacatccaccaatggtgcggttcaaatagcaataggtatgagagattgaaagccacacaggtgtctaaaggaatccgggataatgagagatcggggagagctagagtgcacgtatccgaggagggtaccgagcccgaggcgatgttacaggtattaggtcctaaacccgcactaccagctgggacagaagataccgcgaaagaagatgccgccaatcgaaaactagctaagctctataaagtgtcaaacggagctgggactatgagtgtgtcccttgtcgctgatgaaaatcccttcgctcagggtgcattaaagtcagaggactgctttattcttgaccacgggaaggatggtaaaatcttcgtctggaaaggtaaacaagccaatacggaagaaaggaaagccgccctcaagacggcaagcgactttatcacaaagatggactatccaaagcaaacccaagtgagcgtactgcctgagggaggagaaacccctctgttcaaacaattttttaagaattggcgcgaccctgaccagaccgacggtcttggcctatcttacctgtcttctcatatcgcgaatgtagagcgcgtcccttttgatgccgctactctgcacacctcaactgcgatggcagcacagcatggtatggatgatgatggcaccggccaaaaacagatctggcgcattgagggaagtaacaaggtgccggtggatccagccacatatggacagttttacggtggtgattcttatattattctctacaactacagacacggcggaaggcaaggtcagataatatataattggcagggtgcccagtctactcaagacgaggtggccgcttcagctatcctcactgcgcagctagatgaggaacttggaggtaccccggtgcagagcagagtggtccaaggaaaagagcccgctcacttaatgagtctctttggcggcaaacctatgattatctacaaagggggtacgtctcgggagggaggacagacagctccggcttcaactcggttgttccaggtgagggccaatagcgccggggccacaagagctgtcgaggtgttgcccaaggcaggcgccctaaactccaacgatgccttcgtgcttaaaacaccaagcgcggcatacttgtgggtaggaactggtgcatcagaagccgaaaagaccggggcacaagaactattacgcgtactgagagcacagcccgtgcaggtggctgaagggagcgagcccgatggattctgggaagcccttggcgggaaagccgcataccgcacctctccccgacttaaggataagaaaatggacgcccatcctccccgattgtttgcatgcagtaacaaaatcgggagatttgttatagaggaggttcccggagagcttatgcaagaggatctggcaacggacgacgtgatgcttttggacacctgggatcaagtttttgtatgggttggcaaagattcacaagaagaggagaagactgaggcattgacatctgctaagcggtacattgaaacagaccccgccaatagagatagacgcacacctataaccgttgtgaaacaaggctttgaacccccttcctttgtcggttggttcctcggatgggatgatgattactggtcggttgaccctcttgatcgcgcaatggccgaactggcagcctag

SEQ ID NO: 271457 - DNA, 2196 bp, Artificial Sequence
  derived and/or modified sequence
atggtggttgaacatcccgagttcctgaaggctggcaaggagcccggactccagatctggcgtgtcgagaagtttgacttggtaccagtgcctaccaacttgtatggcgacttcttcacaggggacgcctacgtaattttgaaaactgtgcaactaagaaacgggaatttgcagtatgacttacattattggcttggaaatgagtgttcgcaagacgagagcggggcagcagctattttcaccgtacagctggacgactacctgaacggaagggctgtgcaacatagagaggtccaaggctttgagtccgcaacattcctgggttatttcaaatctggcctaaaatacaagaagggcggcgtcgcatccgggtttaagcacgtcgtgcccaatgaggtagttgtgcagcggctctttcaagtgaaaggaaggcgggtggtaagagctacagaggttcctgtgtcctgggagtctttcaacaacggggattgtttcattctggacctaggtaacaacattcaccaatggtgtggctcaaacagcaacagatacgaacgactgaaggccacacaggtgtctaaaggcatccgagataacgagcgttccgggcgtgcacgagtgcacgtttcagaggagggaacagagccagaagctatgttgcaggtgcttggaccaaagccggcgctgcccgcaggaacagaagatactgccaaggaggacgcagccaatagaaaattagccaaattgtataaggtgtcaaatggcgcaggaacgatgtcagtaagtctagtggccgacgagaaccctttcgcccaaggggctctcaagtcagaagattgttttattctggatcacggaaaggatggaaaaatattcgtatggaaagggaagcaagccaataccgaagagaggaaggccgccctcaaaacagccagcgactttataactaaaatggactatccaaaacagacacaagtgtctgtattacccgaaggtggagaaacaccactttttaagcaattcttcaagaattggcgtgatcccgaccagacggatggactcggcctctcatacctgagctctcacattgcgaatgtcgaaagagtgccattcgatgcagctacactccacactagtacagcaatggcagcccaacacgggatggatgatgacggcacgggacagaaacagatatggagaatcgagggatcaaacaaggtgcccgtggatcccgccacttacggccaattctatggcggagatagttacattatcctttataattataggcacgggggaaggcagggacagattatctataattggcaaggagcccaatcaacacaggacgaagtggcagcttcggccattctgaccgctcagttggacgaagagctcggcggcactcctgtacagtcacgggtagttcaaggcaaggagccagcccatttgatgtcgctgttcggaggcaaaccaatgatcatctacaaaggggggacatcgcgcgagggtggacagacagcacccgcatcgactaggctgtttcaagtcagagccaatagtgcgggagccacaagagccgtggaagtcctacctaaagcaggagctcttaactcaaatgatgcttttgtgctgaaaacaccttcggctgcatatctctgggtcggtactggcgcttcggaagccgagaagaccggcgcgcaggagctcctacgggtgttaagagcgcaacccgtccaagtggccgagggcagcgaaccggatggtttttgggaggcgttgggaggtaaggccgcataccgtacgtcccccagattgaaggataaaaagatggacgcacacccgccaagactttttgcatgtagtaataaaatcgggcgttttgtgatcgaggaggtgccaggcgaacttatgcaggaggatttagctacagatgatgtcatgttgctggatacatgggaccaggtgttcgtgtgggttgggaaggactcgcaggaggaagaaaagaccgaagcactcacatcagccaaacggtacatcgagacagacccagctaatagagatcggaggactcccataactgtagtaaaacagggatttgaacctccttcttttgttggatggtttctagggtgggacgatgattattggagcgtcgatcccttggaccgggccatggcagaacttgcagcttag

SEQ ID NO: 271458 - DNA, 2196 bp, Artificial Sequence
  derived and/or modified sequence
atggtagttgagcaccctgaatttttaaaagcaggcaaggaacctggcctacagatctggcgagtggagaaatttgacttagtccctgtgcccaccaatctttatggcgactttttcactggagatgcgtatgttatcctgaaaacggtgcaacttcgaaacggaaatctgcaatacgacctgcactactggctaggcaacgaatgtagtcaagatgagtcgggggccgctgctatcttcaccgttcagttagacgattacttaaatggtcgggccgtccagcatcgggaggtccagggatttgaatcagcaacatttctagggtacttcaagtccggtctgaaatacaaaaagggaggagttgctagcggttttaaacacgtggtgccaaatgaagtggtggtacaacgcctgtttcaagtgaagggccggagggtggtgagggcaacagaggtcccagtgtcttgggagagctttaacaatggggactgcttcatacttgaccttggcaataacattcaccagtggtgtggtagtaactccaatagatacgaacgtctgaaggcaacacaggtaagtaaaggcatcagagataacgagcgttcagggcgggctcgggtgcatgttagcgaggagggtaccgaaccagaggctatgttacaggtgttggggcccaagcccgcactccctgcaggcacagaagacacagcaaaggaggatgccgccaataggaaattagctaaactgtacaaggtctcaaatggagccgggacaatgtccgtctcgctagtagccgatgagaacccatttgcccagggagctttaaaatcggaagactgctttatcctcgatcacgggaaagatggcaagatctttgtttggaagggcaaacaggccaacacagaggaacggaaggcagccctaaaaaccgcatcagattttataaccaaaatggattacccgaagcagacccaggtgtctgtgttacccgagggtggcgaaactccactgtttaagcaattctttaagaattggcgcgaccccgatcagaccgacggactgggactttcttatctctcctcccacattgcaaacgtggaacgagtccctttcgacgccgcgacccttcacacctcaaccgcaatggccgcccagcacggtatggacgatgatggaaccggacagaaacagatttggcgcatagaaggatctaataaggtgcccgtagacccagcaacctacggtcaattttatggcggggactcctacataattctgtataactataggcacggaggacgtcaggggcagatcatctacaactggcagggagctcagagtacccaggacgaagttgcagcttcagccattctgacagcacagcttgacgaggaactgggtggcactccggtacagagcagagtggtccagggcaaagaacccgcccacttaatgtccctgtttggtggcaagccgatgattatttacaaaggcggaactagccgtgaaggaggacagacagccccagcctctactaggctgtttcaggtgagggctaactccgcaggcgctactagggcggtggaagtcctgcccaaggccggtgccctgaattccaatgatgcttttgtcctgaaaaccccatccgccgcttatctatgggtcggaactggtgcctctgaagcagaaaaaactggagcccaggaacttctcagagtgcttcgcgcacagcctgtccaagtggctgagggcagtgaacctgacggcttctgggaagccctgggtggaaaagccgcgtatcggacttcccctcggcttaaggacaaaaaaatggatgcacatcctccgagattattcgcatgttctaataaaatcggcagattcgtgattgaagaagtcccgggggaactgatgcaagaggatttagccacagatgatgttatgcttttagacacctgggatcaggtatttgtatgggtcggaaaggactcacaggaagaagagaaaactgaggctctgacttctgctaaaagatacatagaaacagatccagcaaacagagatcggcggacccccattaccgtagtcaaacaaggatttgaacctccatccttcgtaggctggtttctgggttgggatgatgactattggagcgttgatccactcgatcgagcaatggctgaactggctgcctag

SEQ ID NO: 271459 - DNA, 2148 bp, Artificial Sequence
  derived and/or modified sequence
atggtggtggagcacccagaattcttgaaggcaggcaaagagcccggactacagatctggcgcgttgaaaaatttgatgcatacgtcattttgaagacagttcaactgaggaacggtaatttacagtatgacctacactattggctggggaatgagtgttcacaggacgaatccggagccgcggcaatttttacagtgcagctggatgattatttgaatgggcgcgccgtgcagcaccgggaggtccaaggttttgagtccgcaacctttctggggtatttcaaatcaggcctgaagtataaaaaaggtggcgtggcatccggcttcaaacacgtagtacctaatgaggtggttgtgcagcgcttatttcaagttaaggggcggagggtggtccgagccacagaggtgccagtcagttgggaaagcttcaataacggcgactgtttcattttggatctgggaaataacatccaccagtggtgcggatcaaatagtaataggtacgagaggttaaaggcgactcaggtcagcaaggggattcgggacaacgagagatcaggcagggcccgagtgcacgtgagcgaggagggaacagagcctgaggctatgctgcaagttctaggtcctaagcccgctttgcccgccggaacagaagacactgccaaagaagacgccgccaatcgcaagctggccaaattatataaggtctcaaacggtgccggaacgatgagcgtgtcactggtagctgatgaaaacccctttgcacaaggtgcacttaaaagtgaggactgtttcattttggaccacggaaaagacggaaagatattcgtgtggaagggtaagcaggccaacaccgaggaacggaaggccgctttaaagactgcttctgattttattactaagatggactatcccaagcaaactcaggtttcagtcctgcctgaaggaggcgagacgcccctcttcaagcagttctttaagaattggcgagatcctgaccaaaccgacggtttagggctcagttacctgtcttcacatatcgccaatgttgaaagagtcccattcgatgcggccaccctccacactagcactgctatggcggctcaacacgggatggatgatgatggcacagggcagaagcagatttggcggattgaggggagcaacaaggtaccggtggaccccgcaacatatggacagttctatggtggcgatagttatataattctttacaattaccggcacggaggccggcagggtcagattatctacaattggcagggagctcagagtacgcaggatgaggttgccgcgtccgcaatcttaacagctcagctagacgaagaactgggcgggacgccagtgcaatcaagggtggtccaggggaaagagccagcacacctgatgtccctttttggagggaagcccatgattatttataagggtggtacgagcagagaaggaggacagaccgctcccgctagcacaagactattccaggtaagagcaaattccgctggagcaactagggccgtggaagtcttgcctaaggccggggctttgaacagtaacgacgctttcgtgctgaaaactcccagcgccgcttatctctgggtcggcaccggcgcctccgaagctgagaagactggagctcaagaacttctacgggtgttgagagcccagccagtgcaggttgcagaaggttccgagccggacggattttgggaagccttgggaggaaaagcggcttaccgaaccagtcctagactgaaagacaagaagatggatgcccacccaccaaggctattcgcatgcagcaacaaaattggacgctttgttattgaagaggttccaggcgagctgatgcaagaagacctggctactgatgatgtaatgctactggatacatgggatcaggtgttcgtttgggtaggaaaagacagccaagaggaagaaaaaacagaggccctcacgtccgctaagcgctatatcgagaccgacccagctaatagggaccgccgcactcccatcacagtcgttaagcagggatttgaacccccttccttcgtagggtggtttctgggatgggacgatgattactggagtgtcgaccctctggaccgtgctatggctgagctggctgcgtag

SEQ ID NO: 271460 - DNA, 2196 bp, Artificial Sequence
  derived and/or modified sequence
atggtggtagaacacccggaattcttgaaagcaggtaaggagcctgggctgcagatctggcgcgtggagaaattcgacctcgtacccgtcccaaccaatctctacggcgacttctttaccggggacgcttacgttatcctaaagacggtgcaactcaggaacggcaaccttcaatacgatctacactactggctgggtaatgagtgctcgcaggatgagagtggagcagccgcaatcttcaccgtgcagttagacgactacctaaacggccgagccgtgcagcatcgcgaagtgcagggctttgaatcagccacattccttggatacttcaagagtggactaaagtacaaaaaaggtggcgtggcatccggtttcaagcatgttgtgcctaatgaggtggtcgtgcaaaggttgttccaggtgaaaggacgaagagtagtgcgagcaaccgaggttcctgtgtcctgggaatcattcaacaacggagattgtttcattctcgacttgggaaacaacatacatcaatggtgcggctccaatagtaacagatacgaacgtcttaaagcaactcaggtgagtaaaggcattcgcgacaatgagcgaagcggcagggctcgcgtccacgtttccgaagagggtaccgaaccagaggcaatgctccaggtgctcgggccaaaacccgcacttcccgccggaactgaagacactgctaaggaagatgcagccaacagaaaactcgccaagttgtacaaggtttccaatggcgccgggacaatgtccgtctctttagttgccgatgagaacccattcgcacagggtgcattgaaaagcgaagattgtttcattttagatcacggtaaggacggcaagatattcgtgtggaaagggaaacaggccaatactgaagagagaaaggccgccctcaagacagcatccgactttattaccaagatggactacccaaaacaaacacaggtttctgtgctccctgaaggaggtgagactcccctgttcaaacagttctttaaaaattggagggatcccgaccagactgatggcctgggcctgagttatctctcctcgcacattgcgaatgtggaacgagtgccatttgatgcagctaccctccataccagcactgcaatggctgcgcagcatggaatggatgacgatgggactggacagaagcagatttggaggatcgagggaagcaataaagtccccgttgatccagcaacatatggccagttctacggcggcgattcctatataatcttatataactacagacacggcgggaggcagggccagataatctacaactggcagggagctcaaagtacgcaggatgaggtagcggccagcgccattcttacagcccagttggacgaggagttagggggcacaccagtgcagtcaagagtcgtgcaggggaaagagcccgcccacctgatgtctctcttcggtggcaagcctatgattatttataaggggggtactagcagagaaggcggacagaccgcccccgcaagcactagactttttcaagtaagagccaattctgcgggagccaccagagctgtggaggtactcccgaaagcaggtgcactgaatagcaacgatgcttttgtgctgaaaacgcctagtgccgcatatttatgggttggaacgggcgctagcgaagccgagaagactggagcgcaggaactgctcagagttctgcgggcccaaccagtgcaggtggccgaaggaagcgaaccggacggcttttgggaagcgcttgggggcaaagcagcgtaccgtactagtccccgcctcaaggataaaaaaatggatgctcatccgccaagactattcgcttgtagtaacaagatcggaagattcgtaatcgaagaggttccaggagaactaatgcaggaagaccttgccacagatgatgttatgctgttggacacatgggatcaagtttttgtctgggtggggaaggactcccaggaggaggagaaaaccgaggcactgacttccgccaaaagatatatcgagaccgacccggctaatagggaccgtaggacgccaatcactgtagttaagcaaggattcgaacctccctcgtttgttggctggtttctgggctgggatgacgattactggtcagtagatccccttgacagggcaatggccgaacttgccgcatag

SEQ ID NO: 271461 - DNA, 783 bp, Artificial Sequence
  derived and/or modified sequence
atggttgtagaacaccccgagtttctgaaagcgggtaaggaaccaggcctgcagatatggcgggtggagaaattcgatcttgtgcccgtgcctaccaatctctatggagacttctttactggcgacgcgtatgtgattctcaagacagtccaactccgcaatggaaacttacaatacgatctacactattggcttggaaacgaatgttcacaggatgagagcggcgctgctgctatcttcacagttcagctggacgactacctaaatgggagggcagttcaacaccgggaagtacagggctttgagagcgctacatttctgggatatttcaagtccggtctcaaatataaaaaaggaggcgtggctagcggatttaaacacgttgtgcctaacgaggtcgtagtccagcggctattccaggttaaaggcagaagggtggtacgcgcaacagaagtgcctgtgtcttgggaatcttttaacaatggcgactgttttatcctcgatctcggcaataatattcaccagtggtgcggtagcaactctaataggtacgagcgtcttaaggccacgcaggtttccaaaggaatccgggacaatgaacgaagtggaagggcgagagtgcacgttagcgaggagggcaccgaacctgaggctatgctgcaagttctaggccctaagccagcgctgcccgcaggaacggaggacacggccaaggaggatgccgctaaccgaaaactggccaaattatacaaggtgagcaacggagccggaacaatgtcttag

SEQ ID NO: 271462 - DNA, 2196 bp, Artificial Sequence
  derived and/or modified sequence
atggtagtggaacatcctgaatttttaaaagccggaaaagaaccaggcctgcagatttggcgcgtggaaaaatttgacctcgtgcctgttccaactaatttatatggagattttttcacgggtgacgcttatgtaatcctcaagacagtgcagctgagaaatggcaatctgcagtatgacctccattattggctcgggaatgaatgttcacaggacgagtctggggcggcagctatcttcacggtccaactggatgactatctgaatggcagagctgtacagcaccgcgaagtgcagggattcgagagcgctactttcctggggtatttcaagagcgggttaaaatacaagaaaggaggagttgcatcaggatttaaacacgtcgtgcctaacgaggtcgtggttcagcgtttgtttcaggtgaaaggacgcagggttgttagagccacagaagtgccagtctcgtgggaatcattcaataacggtgactgcttcatcctggatctgggcaataatattcaccagtggtgtggatcaaattcaaaccgttacgaacggcttaaggcgacacaggtctctaagggtattcgcgacaatgaaaggtccggacgggcccgcgtgcacgtgagcgaggagggaactgagccagaagccatgcttcaggtgttgggacctaaacccgccctgccggctggcactgaagacaccgcaaaggaagatgctgcgaacaggaagctcgcaaaactctacaaggtaagtaatggagcgggaaccatgtctgtgtccctggtggcagacgagaacccctttgcacaaggagcactgaagtcagaagactgctttatcctggatcacggtaaagatggaaaaatcttcgtatggaaaggtaaacaggcgaatactgaagagcggaaggctgccctgaagacagccagtgactttatcacgaaaatggattatcctaagcaaacccaggtgagtgtgctccccgagggcggcgagacccctctctttaaacagttcttcaagaattggcgtgatccggaccagacagatggacttggcctgtcatatctgagctcccacattgccaacgtagagagagtgccatttgatgcagccacattacataccagtaccgctatggcagcacaacacggaatggacgacgatggaacggggcagaaacaaatatggcgcattgagggctccaacaaggtccccgtagacccagccacctacggccagttttacggaggtgattcctacatcatactatacaactatcgacacggcggaaggcagggccagatcatatacaattggcagggtgcacagagtacccaggacgaggtcgcggcatctgcgattctgacagcgcagcttgatgaagaactgggaggcacccccgtacaaagccgcgtggtccaaggcaaagaaccagcacatctgatgtcactttttggaggcaaacccatgattatctacaaaggaggaacttcaagagaaggtggccagaccgctccagcatcaaccagactgtttcaggtgcgggccaacagcgctggcgccacaagagccgtggaggtgctgcccaaagcgggcgccttgaactctaatgatgcgttcgtcctgaaaaccccctcagcagcctacttgtgggtggggaccggagcatccgaagcagaaaagactggggcacaagagctccttcgcgtgttgagagcccaaccagttcaagttgccgaagggagcgagcctgacggcttttgggaggcattaggcggaaaagctgcttataggacgtcccccagactgaaggataagaagatggatgctcacccccccaggcttttcgcttgctcaaataagattggaaggtttgtcatagaagaggtacctggcgaacttatgcaggaagatttagctacagacgatgttatgctgctcgatacgtgggaccaagtgttcgtgtgggtcggcaaggacagccaggaagaagagaaaaccgaagcgttaacctctgcaaaaagatacatagaaactgatcccgcaaatagggatagacggacccccattacagtggtgaaacagggatttgaacccccatcttttgttggctggttcctcggctgggatgatgattattggagcgtggaccccctggacagagctatggcagagctggctgcttag

SEQ ID NO: 271463 - DNA, 2118 bp, Artificial Sequence
  derived and/or modified sequence
atggtcgtcgaacatcctgaattcctcaaagcagggaaggaacctggccttcagatatggagggtagaaaagtttgacttagtgcccgtacccactaatctgtacggcgacttttttaccggcgacgcatatgtgatcctgaagaccgtccaattaagaaatggcaacctgcaatacgaccttcactactggctagggaacgagtgctcacaggatgaatccggtgctgctgcaatttttactgtgcagttggacgattacctgaaatacaaaaaaggaggagtagcatcaggcttcaagcatgtggttcctaatgaagtcgtcgtgcagagactgtttcaagttaaagggaggagggttgtccgggccacagaggtgcccgtttcgtgggagagcttcaataatggcgactgttttattctagacttaggtaacaatatccaccagtggtgtggcagtaattctaatagatacgaaaggttaaaggcaacacaggtgtccaaagggattcgcgacaatgaacgatcaggacgcgccagagtccatgtaagtgaagagggtacagaaccggaggctatgctgcaggtgcttggccccaagcctgccttgcccgccggcacagaggacaccgctaaggaggacgcagcgaatagaaaattagccaaactttacaaagtgtctaacggcgcggggactatgtcagtgagcctggtggcagacgaaaacccattcgcacaaggtgcgttgaaaagcgaggactgtttcatcctagaccacggcaaggacggtaagatattcgtatggaaaggaaaacaggcaaatactgaggaaaggaaagccgccctcaagactgcgagtgacttcattaccaaaatggactacccaaagcagacccaagtctcagtattacccgaaggaggagagacacccttattcaagcagtttttcaagaactggagagatcctgaccagactgacggactcggcctgagctatttgagttctcacatcgccaatgtggagagagtgcccttcgacgctgcaacgctccatacttccacagctatggccgcccaacacggcatggatgatgacggcaccgggcagaaacaaatttggcggatagaaggttcaaacaaggttcctgttgatcccgctacatacgggcaattttatggtggcgactcgtacattatcctctacaactacagacacggcggcagacaggggcagatcatttacaactggcagggagcgcagagcacccaagacgaagtagccgcgtctgcgatattgaccgctcaactcgatgaagaacttggaggtactcctgtccaatcacgggtcgtccagggtaaagagccagcccatctcatgtctctttttgggggcaaacctatgatcatttataaaggcggcaccagccgggaaggaggccagaccgcccccgccagtaccagactcttccaggtgagggctaacagtgccggtgctacacgagcagtagaagtcctcccaaaagccggggcacttaactctaatgatgcctttgttctcaagacgcctagtgccgcctacctatgggtcggtaccggtgctagcgaggccgaaaagaccggagcccaagaattgctgagggttttaagagcacagcctgtccaagtggccgagggaagcgaacctgatgggttttgggaagccctagggggcaaggccgcgtatagaacaagcccccgcctcaaagataaaaaaatggacgcccaccctccccgactgttcgcttgctctaataagattggaagattcgtgattgaggaggtccctggggaacttatgcaagaggacctggcaacagatgatgtgatgctgctggatacatgggaccaagtgttcgtgtgggtgggaaaagatagccaagaagaggagaagacagaggcactcacttcggccaagagatacatagagacagatcccgcaaatcgggaccgcagaactcccatcaccgtggtcaaacagggatttgagccaccgagctttgtaggttggtttttgggatgggacgacgactactggtccgtggaccctttagacagagcaatggccgaacttgcagcctag

SEQ ID NO: 271464 - DNA, 2196 bp, Artificial Sequence
  derived and/or modified sequence
atggtggtggagcaccccgagttcctgaaggccggcaaggagcccggcctgcagatctggagagtggagaagttcgacctggtgcccgtgcccaccaacctgtacggcgacttcttcaccggcgacgcctacgtgatcctgaagaccgtgcagctgagaaacggcaacctgcagtacgacctgcactactggctgggcaacgagtgcagccaggacgagagcggcgccgccgccatcttcaccgtgcagctggacgactacctgaacggcagagccgtgcagcacagagaggtgcagggcttcgagagcgccaccttcctgggctacttcaagagcggcctgaagtacaagaagggcggcgtggccagcggcttcaagcacgtggtgcccaacgaggtggtggtgcagagactgttccaggtgaagggcagaagagtggtgagagccaccgaggtgcccgtgagctgggagagcttcaacaacggcgactgcttcatcctggacctgggcaacaacatccaccagtggtgcggcagcaacagcaacagatacgagagactgaaggccacccaggtgagcaagggcatcagagacaacgagagaagcggcagagccagagtgcacgtgagcgaggagggcaccgagcccgaggccatgctgcaggtgctgggccccaagcccgccctgcccgccggcaccgaggacaccgccaaggaggacgccgccaacagaaagctggccaagctgtacaaggtgagcaacggcgccggcaccatgagcgtgagcctggtggccgacgagaaccccttcgcccagggcgccctgaagagcgaggactgcttcatcctggaccacggcaaggacggcaagatcttcgtgtggaagggcaagcaggccaacaccgaggagagaaaggccgccctgaagaccgccagcgacttcatcaccaagatggactaccccaagcagacccaggtgagcgtgctgcccgagggcggcgagacccccctgttcaagcagttcttcaagaactggagagaccccgaccagaccgacggcctgggcctgagctacctgagcagccacatcgccaacgtggagagagtgcccttcgacgccgccaccctgcacaccagcaccgccatggccgcccagcacggcatggacgacgacggcaccggccagaagcagatctggagaatcgagggcagcaacaaggtgcccgtggaccccgccacctacggccagttctacggcggcgacagctacatcatcctgtacaactacagacacggcggcagacagggccagatcatctacaactggcagggcgcccagagcacccaggacgaggtggccgccagcgccatcctgaccgcccagctggacgaggagctgggcggcacccccgtgcagagcagagtggtgcagggcaaggagcccgcccacctgatgagcctgttcggcggcaagcccatgatcatctacaagggcggcaccagcagagagggcggccagaccgcccccgccagcaccagactgttccaggtgagagccaacagcgccggcgccaccagagccgtggaggtgctgcccaaggccggcgccctgaacagcaacgacgccttcgtgctgaagacccccagcgccgcctacctgtgggtgggcaccggcgccagcgaggccgagaagaccggcgcccaggagctgctgagagtgctgagagcccagcccgtgcaggtggccgagggcagcgagcccgacggcttctgggaggccctgggcggcaaggccgcctacagaaccagccccagactgaaggacaagaagatggacgcccacccccccagactgttcgcctgcagcaacaagatcggcagattcgtgatcgaggaggtgcccggcgagctgatgcaggaggacctggccaccgacgacgtgatgctgctggacacctgggaccaggtgttcgtgtgggtgggcaaggacagccaggaggaggagaagaccgaggccctgaccagcgccaagagatacatcgagaccgaccccgccaacagagacagaagaacccccatcaccgtggtgaagcagggcttcgagccccccagcttcgtgggctggttcctgggctgggacgacgactactggagcgtggaccccctggacagagccatggccgagctggccgcctag

SEQ ID NO: 271465 - DNA, 2148 bp, Artificial Sequence
  derived and/or modified sequence
atggtggtggagcaccccgagttcctgaaggccggcaaggagcccggcctgcagatctggagagtggagaagttcgacgcctacgtgatcctgaagaccgtgcagctgagaaacggcaacctgcagtacgacctgcactactggctgggcaacgagtgcagccaggacgagagcggcgccgccgccatcttcaccgtgcagctggacgactacctgaacggcagagccgtgcagcacagagaggtgcagggcttcgagagcgccaccttcctgggctacttcaagagcggcctgaagtacaagaagggcggcgtggccagcggcttcaagcacgtggtgcccaacgaggtggtggtgcagagactgttccaggtgaagggcagaagagtggtgagagccaccgaggtgcccgtgagctgggagagcttcaacaacggcgactgcttcatcctggacctgggcaacaacatccaccagtggtgcggcagcaacagcaacagatacgagagactgaaggccacccaggtgagcaagggcatcagagacaacgagagaagcggcagagccagagtgcacgtgagcgaggagggcaccgagcccgaggccatgctgcaggtgctgggccccaagcccgccctgcccgccggcaccgaggacaccgccaaggaggacgccgccaacagaaagctggccaagctgtacaaggtgagcaacggcgccggcaccatgagcgtgagcctggtggccgacgagaaccccttcgcccagggcgccctgaagagcgaggactgcttcatcctggaccacggcaaggacggcaagatcttcgtgtggaagggcaagcaggccaacaccgaggagagaaaggccgccctgaagaccgccagcgacttcatcaccaagatggactaccccaagcagacccaggtgagcgtgctgcccgagggcggcgagacccccctgttcaagcagttcttcaagaactggagagaccccgaccagaccgacggcctgggcctgagctacctgagcagccacatcgccaacgtggagagagtgcccttcgacgccgccaccctgcacaccagcaccgccatggccgcccagcacggcatggacgacgacggcaccggccagaagcagatctggagaatcgagggcagcaacaaggtgcccgtggaccccgccacctacggccagttctacggcggcgacagctacatcatcctgtacaactacagacacggcggcagacagggccagatcatctacaactggcagggcgcccagagcacccaggacgaggtggccgccagcgccatcctgaccgcccagctggacgaggagctgggcggcacccccgtgcagagcagagtggtgcagggcaaggagcccgcccacctgatgagcctgttcggcggcaagcccatgatcatctacaagggcggcaccagcagagagggcggccagaccgcccccgccagcaccagactgttccaggtgagagccaacagcgccggcgccaccagagccgtggaggtgctgcccaaggccggcgccctgaacagcaacgacgccttcgtgctgaagacccccagcgccgcctacctgtgggtgggcaccggcgccagcgaggccgagaagaccggcgcccaggagctgctgagagtgctgagagcccagcccgtgcaggtggccgagggcagcgagcccgacggcttctgggaggccctgggcggcaaggccgcctacagaaccagccccagactgaaggacaagaagatggacgcccacccccccagactgttcgcctgcagcaacaagatcggcagattcgtgatcgaggaggtgcccggcgagctgatgcaggaggacctggccaccgacgacgtgatgctgctggacacctgggaccaggtgttcgtgtgggtgggcaaggacagccaggaggaggagaagaccgaggccctgaccagcgccaagagatacatcgagaccgaccccgccaacagagacagaagaacccccatcaccgtggtgaagcagggcttcgagccccccagcttcgtgggctggttcctgggctgggacgacgactactggagcgtggaccccctggacagagccatggccgagctggccgcctag

SEQ ID NO: 271466 - DNA, 783 bp, Artificial Sequence
  derived and/or modified sequence
atggtggtggagcaccccgagttcctgaaggccggcaaggagcccggcctgcagatctggagagtggagaagttcgacctggtgcccgtgcccaccaacctgtacggcgacttcttcaccggcgacgcctacgtgatcctgaagaccgtgcagctgagaaacggcaacctgcagtacgacctgcactactggctgggcaacgagtgcagccaggacgagagcggcgccgccgccatcttcaccgtgcagctggacgactacctgaacggcagagccgtgcagcacagagaggtgcagggcttcgagagcgccaccttcctgggctacttcaagagcggcctgaagtacaagaagggcggcgtggccagcggcttcaagcacgtggtgcccaacgaggtggtggtgcagagactgttccaggtgaagggcagaagagtggtgagagccaccgaggtgcccgtgagctgggagagcttcaacaacggcgactgcttcatcctggacctgggcaacaacatccaccagtggtgcggcagcaacagcaacagatacgagagactgaaggccacccaggtgagcaagggcatcagagacaacgagagaagcggcagagccagagtgcacgtgagcgaggagggcaccgagcccgaggccatgctgcaggtgctgggccccaagcccgccctgcccgccggcaccgaggacaccgccaaggaggacgccgccaacagaaagctggccaagctgtacaaggtgagcaacggcgccggcaccatgagctag

SEQ ID NO: 271467 - DNA, 2118 bp, Artificial Sequence
  derived and/or modified sequence
atggtggtggagcaccccgagttcctgaaggccggcaaggagcccggcctgcagatctggagagtggagaagttcgacctggtgcccgtgcccaccaacctgtacggcgacttcttcaccggcgacgcctacgtgatcctgaagaccgtgcagctgagaaacggcaacctgcagtacgacctgcactactggctgggcaacgagtgcagccaggacgagagcggcgccgccgccatcttcaccgtgcagctggacgactacctgaagtacaagaagggcggcgtggccagcggcttcaagcacgtggtgcccaacgaggtggtggtgcagagactgttccaggtgaagggcagaagagtggtgagagccaccgaggtgcccgtgagctgggagagcttcaacaacggcgactgcttcatcctggacctgggcaacaacatccaccagtggtgcggcagcaacagcaacagatacgagagactgaaggccacccaggtgagcaagggcatcagagacaacgagagaagcggcagagccagagtgcacgtgagcgaggagggcaccgagcccgaggccatgctgcaggtgctgggccccaagcccgccctgcccgccggcaccgaggacaccgccaaggaggacgccgccaacagaaagctggccaagctgtacaaggtgagcaacggcgccggcaccatgagcgtgagcctggtggccgacgagaaccccttcgcccagggcgccctgaagagcgaggactgcttcatcctggaccacggcaaggacggcaagatcttcgtgtggaagggcaagcaggccaacaccgaggagagaaaggccgccctgaagaccgccagcgacttcatcaccaagatggactaccccaagcagacccaggtgagcgtgctgcccgagggcggcgagacccccctgttcaagcagttcttcaagaactggagagaccccgaccagaccgacggcctgggcctgagctacctgagcagccacatcgccaacgtggagagagtgcccttcgacgccgccaccctgcacaccagcaccgccatggccgcccagcacggcatggacgacgacggcaccggccagaagcagatctggagaatcgagggcagcaacaaggtgcccgtggaccccgccacctacggccagttctacggcggcgacagctacatcatcctgtacaactacagacacggcggcagacagggccagatcatctacaactggcagggcgcccagagcacccaggacgaggtggccgccagcgccatcctgaccgcccagctggacgaggagctgggcggcacccccgtgcagagcagagtggtgcagggcaaggagcccgcccacctgatgagcctgttcggcggcaagcccatgatcatctacaagggcggcaccagcagagagggcggccagaccgcccccgccagcaccagactgttccaggtgagagccaacagcgccggcgccaccagagccgtggaggtgctgcccaaggccggcgccctgaacagcaacgacgccttcgtgctgaagacccccagcgccgcctacctgtgggtgggcaccggcgccagcgaggccgagaagaccggcgcccaggagctgctgagagtgctgagagcccagcccgtgcaggtggccgagggcagcgagcccgacggcttctgggaggccctgggcggcaaggccgcctacagaaccagccccagactgaaggacaagaagatggacgcccacccccccagactgttcgcctgcagcaacaagatcggcagattcgtgatcgaggaggtgcccggcgagctgatgcaggaggacctggccaccgacgacgtgatgctgctggacacctgggaccaggtgttcgtgtgggtgggcaaggacagccaggaggaggagaagaccgaggccctgaccagcgccaagagatacatcgagaccgaccccgccaacagagacagaagaacccccatcaccgtggtgaagcagggcttcgagccccccagcttcgtgggctggttcctgggctgggacgacgactactggagcgtggaccccctggacagagccatggccgagctggccgcctag

SEQ ID NO: 271468 - protein, 1655 aa, Artificial Sequence
  derived and/or modified sequence
MGAMTQLLAGVFLAFLALATEGGVLKKVIRHKRQSGVNATLPEENQPVVFNHVYNIKLPVGSQCSVDLESASGEKDLAPPSEPSESFQEHTVDGENQIVFTHRINIPRRACGCAAAPDVKELLSRLEELENLVSSLREQCTAGAGCCLQPATGRLDTRPFCSGRGNFSTEGCGCVCEPGWKGPNCSEPECPGNCHLRGRCIDGQCICDDGFTGEDCSQLACPSDCNDQGKCVNGVCICFEGYAGADCSREICPVPCSEEHGTCVDGLCVCHDGFAGDDCNKPLCLNNCYNRGRCVENECVCDEGFTGEDCSELICPNDCFDRGRCINGTCYCEEGFTGEDCGKPTCPHACHTQGRCEEGQCVCDEGFAGVDCSEKRCPADCHNRGRCVDGRCECDDGFTGADCGELKCPNGCSGHGRCVNGQCVCDEGYTGEDCSQLRCPNDCHSRGRCVEGKCVCEQGFKGYDCSDMSCPNDCHQHGRCVNGMCVCDDGYTGEDCRDRQCPRDCSNRGLCVDGQCVCEDGFTGPDCAELSCPNDCHGQGRCVNGQCVCHEGFMGKDCKEQRCPSDCHGQGRCVDGQCICHEGFTGLDCGQHSCPSDCNNLGQCVSGRCICNEGYSGEDCSEVSPPKDLVVTEVTEETVNLAWDNEMRVTEYLVVYTPTHEGGLEMQFRVPGDQTSTIIQELEPGVEYFIRVFAILENKKSIPVSARVATYLPAPEGLKFKSIKETSVEVEWDPLDIAFETWEIIFRNMNKEDEGEITKSLRRPETSYRQTGLAPGQEYEISLHIVKNNTRGPGLKRVTTTRLDAPSQIEVKDVTDTTALITWFKPLAEIDGIELTYGIKDVPGDRTTIDLTEDENQYSIGNLKPDTEYEVSLISRRGDMSSNPAKETFTTGLDAPRNLRRVSQTDNSITLEWRNGKAAIDSYRIKYAPISGGDHAEVDVPKSQQATTKTTLTGLRPGTEYGIGVSAVKEDKESNPATINAATELDTPKDLQVSETAETSLTLLWKTPLAKFDRYRLNYSLPTGQWVGVQLPRNTTSYVLRGLEPGQEYNVLLTAEKGRHKSKPARVKASTEAEPEVDNLLVSDATPDGFRLSWTADEGVFDNFVLKIRDTKKQSEPLEITLLAPERTRDITGLREATEYEIELYGISKGRRSQTVSAIATTAMGSPKEVIFSDITENSATVSWRAPTAQVESFRITYVPITGGTPSMVTVDGTKTQTRLVKLIPGVEYLVSIIAMKGFEESEPVSGSFTTALDGPSGLVTANITDSEALARWQPAIATVDSYVISYTGEKVPEITRTVSGNTVEYALTDLEPATEYTLRIFAEKGPQKSSTITAKFTTDLDSPRDLTATEVQSETALLTWRPPRASVTGYLLVYESVDGTVKEVIVGPDTTSYSLADLSPSTHYTAKIQALNGPLRSNMIQTIFTTIGLLYPFPKDCSQAMLNGDTTSGLYTIYLNGDKAEALEVFCDMTSDGGGWIVFLRRKNGRENFYQNWKAYAAGFGDRREEFWLGLDNLNKITAQGQYELRVDLRDHGETAFAVYDKFSVGDAKTRYKLKVEGYSGTAGDSMAYHNGRSFSTFDKDTDSAITNCALSYKGAFWYRNCHRVNLMGRYGDNNHSQGVNWFHWKGHEHSIQFAEMKLRPSNFRNLEGRRKRA

SEQ ID NO: 271469 - DNA, 4968 bp, Artificial Sequence
  derived and/or modified sequence
atgggcgccatgacccagctgctggccggcgtgttcctggccttcctggccctggccaccgagggcggcgtgctgaagaaggtgatcagacacaagagacagagcggcgtgaacgccaccctgcccgaggagaaccagcccgtggtgttcaaccacgtgtacaacatcaagctgcccgtgggcagccagtgcagcgtggacctggagagcgccagcggcgagaaggacctggccccccccagcgagcccagcgagagcttccaggagcacaccgtggacggcgagaaccagatcgtgttcacccacagaatcaacatccccagaagagcctgcggctgcgccgccgcccccgacgtgaaggagctgctgagcagactggaggagctggagaacctggtgagcagcctgagagagcagtgcaccgccggcgccggctgctgcctgcagcccgccaccggcagactggacaccagacccttctgcagcggcagaggcaacttcagcaccgagggctgcggctgcgtgtgcgagcccggctggaagggccccaactgcagcgagcccgagtgccccggcaactgccacctgagaggcagatgcatcgacggccagtgcatctgcgacgacggcttcaccggcgaggactgcagccagctggcctgccccagcgactgcaacgaccagggcaagtgcgtgaacggcgtgtgcatctgcttcgagggctacgccggcgccgactgcagcagagagatctgccccgtgccctgcagcgaggagcacggcacctgcgtggacggcctgtgcgtgtgccacgacggcttcgccggcgacgactgcaacaagcccctgtgcctgaacaactgctacaacagaggcagatgcgtggagaacgagtgcgtgtgcgacgagggcttcaccggcgaggactgcagcgagctgatctgccccaacgactgcttcgacagaggcagatgcatcaacggcacctgctactgcgaggagggcttcaccggcgaggactgcggcaagcccacctgcccccacgcctgccacacccagggcagatgcgaggagggccagtgcgtgtgcgacgagggcttcgccggcgtggactgcagcgagaagagatgccccgccgactgccacaacagaggcagatgcgtggacggcagatgcgagtgcgacgacggcttcaccggcgccgactgcggcgagctgaagtgccccaacggctgcagcggccacggcagatgcgtgaacggccagtgcgtgtgcgacgagggctacaccggcgaggactgcagccagctgagatgccccaacgactgccacagcagaggcagatgcgtggagggcaagtgcgtgtgcgagcagggcttcaagggctacgactgcagcgacatgagctgccccaacgactgccaccagcacggcagatgcgtgaacggcatgtgcgtgtgcgacgacggctacaccggcgaggactgcagagacagacagtgccccagagactgcagcaacagaggcctgtgcgtggacggccagtgcgtgtgcgaggacggcttcaccggccccgactgcgccgagctgagctgccccaacgactgccacggccagggcagatgcgtgaacggccagtgcgtgtgccacgagggcttcatgggcaaggactgcaaggagcagagatgccccagcgactgccacggccagggcagatgcgtggacggccagtgcatctgccacgagggcttcaccggcctggactgcggccagcacagctgccccagcgactgcaacaacctgggccagtgcgtgagcggcagatgcatctgcaacgagggctacagcggcgaggactgcagcgaggtgagcccccccaaggacctggtggtgaccgaggtgaccgaggagaccgtgaacctggcctgggacaacgagatgagagtgaccgagtacctggtggtgtacacccccacccacgagggcggcctggagatgcagttcagagtgcccggcgaccagaccagcaccatcatccaggagctggagcccggcgtggagtacttcatcagagtgttcgccatcctggagaacaagaagagcatccccgtgagcgccagagtggccacctacctgcccgcccccgagggcctgaagttcaagagcatcaaggagaccagcgtggaggtggagtgggaccccctggacatcgccttcgagacctgggagatcatcttcagaaacatgaacaaggaggacgagggcgagatcaccaagagcctgagaagacccgagaccagctacagacagaccggcctggcccccggccaggagtacgagatcagcctgcacatcgtgaagaacaacaccagaggccccggcctgaagagagtgaccaccaccagactggacgcccccagccagatcgaggtgaaggacgtgaccgacaccaccgccctgatcacctggttcaagcccctggccgagatcgacggcatcgagctgacctacggcatcaaggacgtgcccggcgacagaaccaccatcgacctgaccgaggacgagaaccagtacagcatcggcaacctgaagcccgacaccgagtacgaggtgagcctgatcagcagaagaggcgacatgagcagcaaccccgccaaggagaccttcaccaccggcctggacgcccccagaaacctgagaagagtgagccagaccgacaacagcatcaccctggagtggagaaacggcaaggccgccatcgacagctacagaatcaagtacgcccccatcagcggcggcgaccacgccgaggtggacgtgcccaagagccagcaggccaccaccaagaccaccctgaccggcctgagacccggcaccgagtacggcatcggcgtgagcgccgtgaaggaggacaaggagagcaaccccgccaccatcaacgccgccaccgagctggacacccccaaggacctgcaggtgagcgagaccgccgagaccagcctgaccctgctgtggaagacccccctggccaagttcgacagatacagactgaactacagcctgcccaccggccagtgggtgggcgtgcagctgcccagaaacaccaccagctacgtgctgagaggcctggagcccggccaggagtacaacgtgctgctgaccgccgagaagggcagacacaagagcaagcccgccagagtgaaggccagcaccgaggccgagcccgaggtggacaacctgctggtgagcgacgccacccccgacggcttcagactgagctggaccgccgacgagggcgtgttcgacaacttcgtgctgaagatcagagacaccaagaagcagagcgagcccctggagatcaccctgctggcccccgagagaaccagagacatcaccggcctgagagaggccaccgagtacgagatcgagctgtacggcatcagcaagggcagaagaagccagaccgtgagcgccatcgccaccaccgccatgggcagccccaaggaggtgatcttcagcgacatcaccgagaacagcgccaccgtgagctggagagcccccaccgcccaggtggagagcttcagaatcacctacgtgcccatcaccggcggcacccccagcatggtgaccgtggacggcaccaagacccagaccagactggtgaagctgatccccggcgtggagtacctggtgagcatcatcgccatgaagggcttcgaggagagcgagcccgtgagcggcagcttcaccaccgccctggacggccccagcggcctggtgaccgccaacatcaccgacagcgaggccctggccagatggcagcccgccatcgccaccgtggacagctacgtgatcagctacaccggcgagaaggtgcccgagatcaccagaaccgtgagcggcaacaccgtggagtacgccctgaccgacctggagcccgccaccgagtacaccctgagaatcttcgccgagaagggcccccagaagagcagcaccatcaccgccaagttcaccaccgacctggacagccccagagacctgaccgccaccgaggtgcagagcgagaccgccctgctgacctggagaccccccagagccagcgtgaccggctacctgctggtgtacgagagcgtggacggcaccgtgaaggaggtgatcgtgggccccgacaccaccagctacagcctggccgacctgagccccagcacccactacaccgccaagatccaggccctgaacggccccctgagaagcaacatgatccagaccatcttcaccaccatcggcctgctgtaccccttccccaaggactgcagccaggccatgctgaacggcgacaccaccagcggcctgtacaccatctacctgaacggcgacaaggccgaggccctggaggtgttctgcgacatgaccagcgacggcggcggctggatcgtgttcctgagaagaaagaacggcagagagaacttctaccagaactggaaggcctacgccgccggcttcggcgacagaagagaggagttctggctgggcctggacaacctgaacaagatcaccgcccagggccagtacgagctgagagtggacctgagagaccacggcgagaccgccttcgccgtgtacgacaagttcagcgtgggcgacgccaagaccagatacaagctgaaggtggagggctacagcggcaccgccggcgacagcatggcctaccacaacggcagaagcttcagcaccttcgacaaggacaccgacagcgccatcaccaactgcgccctgagctacaagggcgccttctggtacagaaactgccacagagtgaacctgatgggcagatacggcgacaacaaccacagccagggcgtgaactggttccactggaagggccacgagcacagcatccagttcgccgagatgaagctgagacccagcaacttcagaaacctggagggcagaagaaagagagcctag

SEQ ID NO: 271470 - DNA, 4968 bp, Artificial Sequence
  derived and/or modified sequence
atgggggctatgacccagctgctggccggggttttcttggctttccttgccctagccaccgagggcggcgtactgaaaaaggttattaggcacaagaggcagtctggcgtcaatgctactttaccagaggaaaaccagcccgtggtgttcaaccacgtctataatatcaaactccctgtgggaagccagtgttctgtggatttggagagcgcatcaggagagaaggatctggcccctccatcggagccatctgagtcatttcaggagcacaccgttgacggcgagaatcagattgtgttcacacatcggattaacatccccaggcgcgcatgcggttgtgccgcagcccccgatgtgaaagagctgctgagtcgtcttgaagaactggagaacttagtcagttccctgagggagcagtgcacggcgggcgctggatgttgtctccaaccggcaacaggtcggcttgacaccagaccgttctgctctggtcgcgggaatttttccactgaagggtgtgggtgtgtatgtgaacctgggtggaaaggcccaaactgctcagagcccgaatgcccaggaaactgccacctcagaggccgatgtattgacggccagtgcatctgcgatgatggattcactggagaagattgctcacaactggcctgtccaagcgactgcaatgatcagggcaagtgcgtaaacggagtctgcatttgctttgaaggttatgccggcgcagactgctctcgcgagatttgcccagtgccatgctcagaagagcacggcacatgcgttgacggtctttgtgtttgccacgacggattcgctggagacgattgcaacaaacccttatgcttgaataattgttacaaccgcggccgatgcgttgaaaatgaatgtgtttgcgatgaaggcttcaccggcgaagattgcagcgaactgatttgccctaatgactgttttgaccgcgggcgttgcattaatgggacctgttactgtgaagaaggttttaccggagaagactgtggcaagcctacctgtccccacgcatgtcatacacaaggccggtgcgaggaaggtcagtgtgtgtgcgacgaggggttcgccggcgtggattgtagtgagaagagatgtcccgccgattgtcacaatcggggaaggtgcgttgacggccggtgcgagtgcgatgacggttttacaggcgcggactgcggagagctgaaatgtcccaacggctgtagcggtcacgggcgctgcgtgaacggccaatgtgtgtgtgatgaaggatatacaggagaggactgttctcaactcaggtgtcccaatgactgccattccaggggcaggtgcgtggaggggaagtgtgtctgcgaacagggcttcaagggttacgactgttctgatatgagttgccccaacgattgccaccaacacgggcggtgcgtaaacggcatgtgtgtgtgcgacgatggctatactggcgaggattgtagagacaggcagtgtcccagggattgttctaaccgaggactgtgtgtcgacggccagtgcgtctgcgaagacggttttaccggacccgactgtgccgagctgtcgtgccctaatgactgtcacggccaaggacggtgtgttaacggacagtgtgtttgtcatgagggctttatggggaaggattgcaaggagcaaaggtgtccctctgattgtcatggccaaggccgatgtgtcgacggccagtgcatttgccacgaaggttttaccgggttggactgcggacagcacagctgtccatctgactgcaataacctgggacaatgtgtgagtggcagatgtatttgcaacgaaggttactcaggggaggactgttccgaggtgagcccacctaaagatttggtggtgaccgaggttaccgaagagaccgtgaaccttgcatgggacaatgaaatgcgcgtcactgaatatctggttgtatacaccccgacgcatgaggggggcctggagatgcagttccgcgtgccgggtgaccagacatctactatcatccaagaattggagccaggagttgagtacttcataagggtctttgccattctggaaaacaaaaagtcaatcccggtatctgcacgcgtggctacatatctgccagcccccgaaggtctgaaattcaagagtattaaagaaacctctgtggaggtggagtgggaccctctggatattgcatttgaaacctgggagatcatttttcgaaatatgaacaaagaagatgaaggcgagattacaaaaagcctacgcaggcctgagacgagttatcgccagaccgggctggcaccaggtcaagagtacgagattagcttgcacatcgtgaaaaataacacacgaggaccaggacttaagcgcgtcacgacaaccagacttgacgctcctagccagatcgaggttaaggatgtgaccgatacaaccgcgctcataacctggtttaaaccattagccgagatagacgggattgaattgacttacgggataaaggatgtgcccggtgatcggaccactatagatctgacagaggatgagaatcaatatagcatcggtaatttaaagcctgacaccgagtacgaggtgagtctgattagtcggcgaggcgacatgtcctctaatcctgcaaaggagacatttacaacaggcctcgacgctcctcggaacttgcgccgggtgtcacagaccgataacagcatcactctcgagtggagaaatgggaaggctgccattgacagctatagaattaagtatgctcctattagcgggggcgaccacgccgaggtggacgtgccgaaatcccagcaagccaccacaaaaacaaccttgaccgggctgcgtcccggaaccgaatatggaatcggcgtcagcgctgtcaaggaagacaaagagtccaaccctgctacaattaacgctgcaaccgagctggacacacctaaggacttgcaggtgtctgagacagcggagacctctctgacattgctctggaaaacacccctggcaaagtttgatagatacagactgaactattctttaccaactggccagtgggttggcgtgcagctgcctagaaacacaacttcgtacgttcttcgggggctggaacctggacaggaatacaacgtgttactgaccgcagaaaagggacggcacaaatcaaaacctgctagagtgaaggcatcaaccgaggccgaacccgaagtggataatctgttagtcagcgacgctacccctgacggcttccgcttgtcctggacagcagacgaaggggtcttcgacaattttgtgctcaagattagagacactaaaaaacaaagtgagccacttgagatcactttacttgccccggaaaggaccagagacattactggtctgagagaagcgacagaatatgagatagagctctatggaatctccaagggccgtcgctcacagactgtgagcgcaatcgctacgacagctatgggctctccgaaagaggtgatattctcagacattaccgagaattccgcaacagtatcatggcgagctcccacagcacaagtcgaaagtttcaggatcacgtatgttcctatcacaggtggtacaccaagtatggtcacagtggacgggactaagacacagacacgcctggttaaactcataccaggcgtggagtacctggtttcgataatcgcgatgaaagggtttgaagagagcgaaccagtgtccggctcatttactactgcactcgacggacctagtggtctggtgacggccaatattaccgactcggaggctctggctcgctggcagcctgccatcgctaccgtggactcctacgtgattagttataccggggagaaagttcccgaaatcacccgcacggttagcggcaacacagtggagtatgccctgaccgacctggaacctgctactgagtacactctgcggatcttcgccgagaaggggccacagaagtcctcgacgattactgccaagtttactaccgacctcgactccccccgcgatcttacagctactgaggttcagagcgagacggcactgctgacatggaggcctccgcgtgccagtgtaacagggtatctcctggtgtacgaaagtgtggatggcacggttaaggaggttatcgtgggcccagacactacaagctactcattggccgatctcagcccaagcacacactacactgcaaagatacaggcactgaatggacctcttcggagtaacatgatccagaccatttttacaactattggtctgctgtaccccttccctaaggactgttcccaggctatgctcaatggagataccaccagcggactgtacactatttatctaaacggcgacaaagccgaggctctggaagtcttttgtgatatgacttccgacggcggggggtggattgtctttctacgacggaagaacggtcgcgaaaacttctatcagaactggaaagcatatgctgctggcttcggggataggcgagaggaattctggctgggcctagacaatttgaataaaataaccgcacaggggcagtatgagctgcgagtggatctgcgagaccacggagagacggcatttgccgtatatgataagttcagcgtcggtgacgcaaagacccgctataagcttaaggttgaaggatatagcggcaccgccggtgattcaatggcatatcacaatgggaggagttttagtacttttgataaggatacagattcagccatcactaattgcgccctgtcttacaagggtgccttttggtacagaaactgtcatcgggttaatctgatgggccggtacggggacaataatcattcgcagggggtcaactggtttcactggaaaggccacgagcattccatccagtttgcagaaatgaaactgaggccctcaaacttccggaacctggaggggaggcgaaagcgggcttag

SEQ ID NO: 271471 - DNA, 4968 bp, Artificial Sequence
  derived and/or modified sequence
atgggcgccatgacccagctgctggccggggtcttcctggccttcctggccctggccacagagggcggcgtgctgaagaaggtgatccgccacaagaggcagagcggcgtgaatgccaccctgcctgaggagaaccagcctgtggtgttcaaccacgtgtacaacatcaagctgcctgtgggcagccagtgcagcgtggacctggagagcgccagcggggagaaggacctggcccctccttctgagcccagcgagagcttccaggagcacacagtggatggagagaaccagatcgtgttcacccaccgcatcaacatcccccggcgggcctgtggctgtgccgccgccccagatgtgaaggagctgctgagccggctggaggagctggagaacctggtgagcagcctgcgggagcagtgcacagctggggccggctgctgcctgcagcctgccaccggccgcctggacacccggcccttctgcagcggccggggcaacttcagcacagagggctgcggctgtgtgtgtgagcccggctggaagggccccaactgcagcgagccagaatgtcctggcaactgccacctgcggggccgctgcattgatggccagtgcatctgtgatgatggcttcaccggggaggactgcagccagctggcctgccccagcgactgcaatgaccagggcaaatgtgtgaatggagtgtgcatctgctttgagggctacgccggggctgactgcagccgggagatctgccctgtgccctgcagcgaggagcacggcacctgtgtggatggcctgtgtgtgtgccatgatggctttgctggagatgactgcaacaagcccctgtgcctgaacaactgctacaacagaggccgctgtgtggagaatgaatgtgtgtgtgatgagggcttcaccggggaggactgcagcgagctgatctgccccaatgactgctttgaccggggccgctgcatcaatggcacctgctactgtgaggagggcttcaccggggaggactgtgggaagcccacctgcccccacgcctgccacacccagggccgctgtgaggagggccagtgtgtgtgtgatgagggctttgctggggtggactgcagcgagaagcgctgcccagctgactgccacaacagaggccgctgtgtggatggccgctgtgaatgtgatgatggcttcaccggggctgactgtggggagctgaagtgccccaacggctgcagcggccacggccgctgtgtgaatggccagtgtgtgtgtgatgagggctacaccggggaggactgcagccagctgcgctgccccaatgactgccacagccggggccgctgtgtggagggcaaatgtgtgtgtgagcagggcttcaagggctatgactgcagcgacatgagctgccccaatgactgccaccagcacggccgctgtgtgaatggcatgtgtgtgtgtgatgatggctacaccggggaggactgccgggaccggcagtgcccccgggactgcagcaacagaggcctgtgtgtggatggccagtgtgtgtgtgaagatggcttcaccggccctgactgtgccgagctgagctgccccaatgactgccacggccagggccgctgtgtgaatggccagtgtgtgtgccacgagggcttcatgggcaaggactgcaaggagcagcgctgccccagcgactgccacggccagggccgctgtgtggatggccagtgcatctgccacgagggcttcaccggcctggactgtggccagcacagctgccccagcgactgcaacaacctgggccagtgtgtgtctggccgctgcatctgcaatgaaggctacagcggggaggactgcagcgaggtgtccccacccaaggacctggtggtgacagaggtgacagaggagaccgtgaacctggcctgggacaatgagatgagggtgacagagtacctggtggtgtacacccccacccatgagggcggcctggagatgcagttccgggtgcctggggaccagaccagcaccatcatccaggagctggagcccggggtggagtacttcatccgggtgtttgccatcctggagaacaagaagagcatccctgtgtctgcccgggtggccacctacctgcctgcccctgagggcctgaagttcaagagcatcaaggagacctctgtggaggtggagtgggaccccctggacatcgcctttgagacctgggagatcatcttcaggaacatgaacaaggaggatgaaggagagatcaccaagagcctgcggcggcctgagaccagctaccggcagacaggcctggcccctggccaggagtatgagatcagcctgcacatcgtgaagaacaacacccggggccctggcctgaagagggtgaccaccacccggctggatgcccccagccagatcgaggtgaaggatgtgacagacaccacagccctgatcacctggttcaagcccctggccgagattgatggcatcgagctgacctacggcatcaaggatgtgcctggggacaggaccaccatcgacctgacagaagatgagaaccagtacagcatcggcaacctgaagccagacacagaatatgaggtgtccctcatcagccggcggggggacatgagcagcaacccagccaaggagaccttcaccaccggcctggatgcccccaggaacctgcggcgggtgtcccagacagacaacagcatcaccctggagtggagaaatggcaaggccgccatcgacagctaccgcatcaagtatgcccccatctctggaggagaccacgccgaggtggatgtgcccaagagccagcaggccaccaccaagaccaccctgaccggcctgcggcctggaacagaatatggaattggagtgtctgctgtgaaggaggacaaggagagcaacccagccaccatcaatgctgccacagagctggacacccccaaggacctgcaggtgtctgaaacagctgagaccagcctgaccctgctgtggaagacccccctggccaagtttgaccgctaccgcctgaactacagcctgcccaccggccagtgggtgggcgtgcagctgcccaggaacaccaccagctatgtgctgcggggcctggagcccggccaggagtacaacgtgctgctgacagctgagaagggccgccacaagagcaagccagcccgggtgaaggccagcacagaagctgagcctgaggtggacaacctgctggtgtctgatgccaccccagatggcttccggctgtcctggacagcagatgaaggagtgtttgacaactttgtgctgaagatccgggacaccaagaagcagagcgagcccctggagatcaccctgctggcccctgagaggacccgggacatcaccggcctgcgggaggccacagaatatgaaattgagctgtatggcatcagcaaaggaagaagaagccagacagtgtctgccatcgccaccacagccatgggcagccccaaggaggtgatcttcagtgacatcacagaaaattctgccaccgtgtcctggagggcccccacagcccaggtggagagcttccgcatcacctacgtgcccatcaccggcggcacccccagcatggtgacagtggatggcaccaagacccagacccggctggtgaagctgatccctggggtggagtacctggtgtccatcatcgccatgaagggctttgaggagagcgagcctgtgtctggcagcttcaccacagccctggatggccccagcggcctggtgacagccaacatcacagattctgaggccctggcccgctggcagcctgccatcgccaccgtggacagctatgtgatctcctacaccggggagaaggtgcctgagatcaccaggacagtgtctggcaacacagtggagtatgccctgacagacctggagcccgccacagagtacaccctgcgcatctttgctgagaagggcccccagaagagcagcaccatcacagccaagttcaccacagacctggacagcccccgggacctgacagccacagaggtgcagagcgagacagccctgctgacctggaggcctccccgggcctctgtgacaggctacctgctggtgtatgaatctgtggatggcaccgtgaaggaggtgattgtgggccctgacaccaccagctacagcctggccgacctgagccccagcacccactacacagccaagatccaggccctgaatggccccctgcggagcaacatgatccagaccatcttcaccaccatcggcctgctgtaccccttccccaaggactgcagccaggccatgctgaatggagacaccaccagcggcctgtacaccatctacctgaatggagacaaggccgaggccctggaggtgttctgtgacatgaccagtgatggcggcggctggatcgtgttcctgcggaggaagaatggccgggagaacttctaccagaactggaaggcctatgctgctggctttggagaccggcgggaggagttctggctgggcctggacaacctgaacaagatcacagcccagggccagtatgagctgcgggtggacctgcgggaccatggagaaacagcctttgctgtgtatgacaagttctctgtgggagatgccaagacccgctacaagctgaaggtggagggctacagcggcacagctggggacagcatggcctaccacaacggccgctccttcagcacctttgacaaggacacagattctgccatcaccaactgtgccctgagctacaagggggccttctggtacagaaactgccaccgggtgaacctgatgggccgctacggggacaacaaccacagccagggcgtgaactggttccactggaagggccacgagcacagcatccagtttgctgagatgaagctgcggcccagcaacttcaggaacctggagggccgcaggaagagggcctag

SEQ ID NO: 271472 - DNA, 4968 bp, Artificial Sequence
  derived and/or modified sequence
atgggcgccatgacccagctgctggccggcgtgttcctggccttcctggccttggcaacggaagggggcgtgctgaaaaaagtaatccggcacaaacgccaatccggcgtaaacgccacacttcccgaagagaaccagcctgttgttttcaaccatgtatacaacatcaaactccccgtggggagccagtgttctgtggacttggaatctgccagtggagagaaggacctggctcccccctcagaaccctccgaatcattccaggagcacacagtggacggagagaaccaaatcgtgtttacacatcgaatcaatattccacgtcgcgcctgtggttgcgccgccgccccagacgtgaaggagctgctgagcaggctcgaggaactcgaaaatctggtgtctagcctgagagaacaatgcactgccggagcggggtgttgcctccagccagcgactggcaggctggacaccagaccgttttgctccggaagaggaaacttttccactgaaggctgtggctgtgtgtgcgagcctgggtggaaggggcctaattgtagcgaacccgagtgccccggaaactgccacctccggggtcgctgcatagacggccagtgcatctgtgatgatggattcaccggggaggactgtagtcagctggcctgtccatcagattgcaacgaccagggtaaatgcgttaatggtgtctgtatttgtttcgaaggttacgcaggggctgattgctctcgggagatctgccccgttccatgctccgaggagcacggtacgtgtgtggatggcttatgtgtctgccacgatggcttcgctggagatgactgcaataagccactctgcctgaataactgttataatcgagggcgctgtgtggagaatgagtgtgtgtgcgatgagggatttactggcgaagactgtagtgagcttatctgccctaacgactgcttcgatcgtggccggtgcattaatggcacatgttactgtgaggaaggttttaccggggaagactgcggaaaacctacttgcccacacgcttgccacacgcagggccgttgtgaagaggggcagtgcgtgtgcgacgaaggctttgcaggagtggattgttccgaaaagcggtgtccagctgactgtcacaaccgggggcgctgcgtcgacggccggtgcgagtgcgacgacggcttcacgggagccgactgcggggaattgaagtgtcctaacggctgttcaggccatggcagatgcgtaaacggccagtgtgtgtgcgacgagggatatacgggtgaagactgttctcaactcaggtgtcctaatgactgccacagccggggtcgctgcgttgagggaaagtgtgtgtgcgagcaaggcttcaaaggatacgattgctcagacatgagttgccccaacgattgtcaccaacacggcagatgtgtgaacggcatgtgtgtctgcgacgacggatatacaggcgaagattgtcgggatcggcaatgcccaagggattgttccaacaggggtctctgcgtcgatgggcagtgcgtgtgcgaggacggcttcacgggacccgattgcgcagagttgtcatgccccaatgattgtcatggacagggccggtgcgttaatgggcagtgtgtatgccacgaaggcttcatggggaaagactgcaaagagcagagatgtccttctgactgccacggacaaggccgatgcgtggacggccagtgcatctgccatgagggcttcaccggactagattgcggccagcattcctgccccagcgactgcaataatctggggcagtgtgtgagcggtaggtgtatctgtaatgaagggtattcgggagaggattgttccgaagtttcccctcccaaggacctcgtggtcactgaggttactgaggagacagttaacttggcatgggacaacgaaatgcgtgtgacagagtatctggtcgtctatacacccactcacgaaggcggactggaaatgcagttccgcgtgccaggggaccagacgtccacgattatccaggaacttgaaccgggcgtggagtacttcatccgggtcttcgccatcttagagaacaagaagtctattcctgtgtctgccagagtggccacatatcttccggcccccgagggactgaagtttaagagcataaaagagacgtccgtggaggtagagtgggacccccttgatattgcgttcgagacttgggaaatcatttttcgcaacatgaataaagaagacgagggagagatcaccaaaagtctgaggcgtccagagacaagttatcgacagacagggctcgctccaggacaggagtatgagataagtcttcatatcgtgaagaataatactcggggacctgggttgaaaagggtaactaccacgcgcttagacgctcctagccagattgaagtgaaagacgtaactgacacaacggcgcttattacttggtttaagcctctggcagaaatcgatggaattgagttgacctacggaatcaaggatgtcccgggcgatcggacaactatagatctgacagaggacgagaatcagtactccattggtaacttgaagcccgataccgaatacgaggtttctctcatctctaggcgaggagatatgagttccaaccctgcaaaagagaccttcacaacaggacttgacgccccacggaaccttagacgcgtgagccagaccgacaatagcatcactctggagtggcgtaatggcaaagcagcaatcgatagctatcggatcaaatatgctccgataagtggaggcgatcacgccgaagttgatgtgcctaagtcccagcaagctactactaagactacactgacggggctgcggcctggcactgaatacggtatcggtgtgtcggccgtaaaagaggacaaggaaagtaatcctgctactattaatgccgctaccgagttggacacacctaaagacttacaggtctccgaaacagctgagacctccctgaccctgctatggaaaactcctctggccaagttcgaccggtaccggctgaactacagtctgccaactggtcagtgggttggagtccagctgccccgcaacacaacatcttacgtcttgcgaggcctggagcccggccaagaatataatgtgctgctcaccgctgagaaaggccggcataagagcaaaccagccagggtgaaagctagtacggaggctgagccagaagtggacaaccttctcgtctcagatgccaccccagatggcttccggctgagctggacggccgatgaaggcgtgttcgataactttgttctcaagatccgggatactaaaaagcaatcagaaccacttgaaatcacattgctagctcctgaacgcactcgagacatcaccggtttacgggaggctaccgaatatgaaatagaactatacggcatttctaagggacggcgctcccagaccgtgagtgccattgccacgacagctatgggtagccccaaagaggtgatttttagcgatataaccgaaaattccgcaaccgtatcgtggcgagcaccgacagcccaggtggagagtttccgaataacgtacgttcctattacaggcggcacaccctccatggtaaccgtggacggtaccaagacacaaactaggctggtgaaattaatccctggggtggagtacttagtatcaatcatcgcaatgaaagggtttgaggaaagcgaaccagtcagcggaagctttactactgccttggacgggccaagcggccttgttacagccaatattacagacagcgaagccctggcgcgttggcagcctgccatagccaccgttgatagttacgttatctcatacactggagaaaaggtgccagagattacacgaactgtgtcgggtaacacagtggaatatgctctcacagacctggagcctgcaacggagtatacgcttcggatctttgcagagaagggtcctcagaagtcgtccacgattaccgctaaattcaccacagacctggactcccctcgtgacctgacagccactgaggtgcagagcgaaacggccctcctaacatggagacccccaagggcttccgtcaccggctacctcctggtgtatgaatctgtggacggaaccgttaaggaagtgatcgtgggccccgacactacctcttactccctggccgatctgtctccctccacccactataccgccaaaattcaggcgctgaacgggcccctccggagtaatatgatccagaccattttcaccactatcggactcttatacccttttccgaaggactgttcccaggcaatgctcaatggcgataccacctccggtctttacaccatttaccttaacggtgacaaagcagaagcactcgaggtattttgtgacatgacatctgatggtggtggctggatagtgttcctgcgcaggaagaatgggcgggagaacttctaccagaactggaaagcctatgctgcggggtttggagaccgcagagaggagttttggctgggcttagataatctgaacaagattacagcccagggtcagtacgagctaagggtggatctgcgagaccatggtgaaactgcctttgctgtgtatgacaagtttagcgtgggcgatgctaaaactagatacaagctcaaggtggaaggctattccggtacagcaggtgacagcatggcctaccacaacggccggagttttagcactttcgacaaggatacagattccgctattaccaactgcgcactgtcttataagggcgctttctggtatcggaactgccatcgggtcaaccttatgggccggtatggcgataataatcacagtcaaggggttaactggtttcattggaaggggcacgaacactccattcagttcgcagagatgaagctgcgtccctccaactttcgtaatctggaggggcggcgcaaaagagcctag

SEQ ID NO: 271473 - DNA, 4968 bp, Artificial Sequence
  derived and/or modified sequence
atgggagcgatgacccagcttcttgccggagtgttcctcgccttcctggctctggctactgaaggaggtgtactgaagaaagtaatcaggcataaacgccagtccggcgtaaatgcaactctcccagaagaaaatcagcctgtagtcttcaatcacgtctacaatatcaaactgccagtggggtcacagtgttccgtggatctggaatctgcttcaggagagaaggatttggctccccctagcgagccctccgaatccttccaagagcacaccgtcgatggcgagaatcaaatcgtgtttacgcaccggataaacattccaagaagagcctgtggctgtgccgctgccccagacgtaaaggagctgctgagcaggctggaggaactggaaaatctggtgtcgtctttacgggaacagtgtacagccggagcgggttgctgtctgcagcctgccactggaaggctggacactagacccttctgcagcggtcggggaaatttcagtactgaggggtgcggatgcgtatgtgagccaggttggaagggtcccaattgcagtgaacctgagtgtcccggtaattgccatctccgaggaaggtgcattgacggtcagtgtatttgcgacgatggcttcactggggaggactgttcacagctggcctgcccttctgattgcaacgaccaggggaagtgcgttaatggggtctgcatctgtttcgaaggctacgccggtgccgactgtagccgcgaaatctgtccagtgccttgttctgaggaacacggcacatgcgtagatgggctgtgcgtgtgtcatgacggttttgcaggggacgactgcaataagcctctctgcctcaataactgttacaatcgaggacggtgtgtcgagaatgagtgcgtttgtgatgaagggttcacaggagaggactgcagtgagttaatatgccccaatgactgcttcgaccgcggtcggtgcattaacgggacctgctattgcgaggagggattcacaggggaggattgcggcaagcctacgtgccctcatgcatgccacactcaggggaggtgcgaagaagggcagtgtgtgtgcgacgaaggttttgcgggtgtggattgttccgagaagcggtgccctgccgactgtcataatcggggtcggtgtgtagacggacgttgcgaatgcgatgatggctttacaggggctgattgcggggaactcaagtgcccgaacgggtgctctggccacgggaggtgcgtaaacgggcagtgtgtgtgcgacgaaggctatactggcgaggactgtagtcaactgcggtgcccaaacgattgccatagtaggggaagatgtgtggagggcaaatgcgtctgtgagcaggggttcaagggttacgattgttccgacatgtcttgccccaatgactgccaccagcatggtcggtgcgttaatgggatgtgtgtgtgcgatgatggttacaccggtgaagattgccgagatcgccagtgtcctcgtgactgttccaacaggggtctctgcgtggacggtcagtgcgtctgcgaggacggctttactggtccagactgcgctgagctgagctgtcctaacgattgccacggacaaggaaggtgtgtaaacggacagtgtgtatgccatgagggattcatggggaaagactgcaaggagcagagatgtccttctgactgccatggacagggtcggtgtgtagatggccagtgcatttgtcacgaaggcttcactggccttgactgtggtcaacatagttgcccatccgactgcaataatcttggccaatgtgtgtccggtcggtgtatatgcaacgaggggtatagcggcgaggattgctccgaggtgtcaccacccaaggaccttgtggtgacggaggtgacagaagagacagtgaatctggcctgggacaatgagatgcgggtgactgaatatctggtcgtgtatacaccaacacacgagggagggctggaaatgcagtttagggttcctggcgaccagacttctaccatcatccaagagctggagccgggtgtagaatattttataagagtgttcgccatactggagaataagaaatcaattccagtttctgctagagtggccacatatctgccggcacctgaagggctgaaattcaaaagcatcaaagagacttcagtggaggtcgagtgggatcccttagacatcgcgttcgagacctgggaaatcatttttcgcaacatgaacaaggaagatgagggcgaaattaccaagtccctgagaaggcccgagacctcctaccgccagaccggcttggcccctggccaggagtatgagatttctctccacatcgtgaagaataatacgagggggccaggcctgaagcgtgtgaccaccaccagactggacgccccttcgcaaattgaagtaaaggatgtaaccgataccacagcgctgattacctggtttaaaccgctggccgagattgacggcattgagctcacctacggcataaaagacgtgcccggagatcgtacaacaattgacctgacagaggacgagaatcagtatagcatcgggaacctcaagcctgataccgagtacgaggtgtctctgatttccagacgcggagatatgtcatcaaatccagctaaggagacctttactaccggactggacgccccacggaaccttaggcgcgtcagtcagacggacaacagcattactcttgagtggcgcaatggcaaggctgccatcgactcctatcgcataaaatatgcacccatcagcggaggagaccatgcagaagttgatgtcccaaaaagccagcaggccaccaccaagactacgctaaccgggttgcgcccagggacggaatatgggataggcgtgtcagcagtgaaagaggataaggaatccaaccccgcaactataaacgccgctaccgagcttgatacccccaaagatttgcaggtgtccgagaccgccgaaacaagcctgacgttactttggaagacccctctggctaagttcgatcggtatcgactgaattattcccttccaacagggcagtgggttggggtccagctgcctaggaacactacaagttatgtgcttcgtggcctggagccaggacaggagtacaacgtcttgctaacagcggagaaaggaaggcataagagcaaacccgctagggtaaaagctagtacagaggccgaaccggaagtagacaacctactggtgagtgacgctacaccagacggattcaggctgtcctggaccgcggatgagggggtgttcgacaatttcgtcctcaaaatccgagacaccaagaaacagtcagagcctctggagattacactgttagcacctgaacggacgcgcgatattaccggactcagagaggctacagagtacgaaatagagctctacgggatttccaagggaagacgctcacagactgtgtcagccattgctacgactgcaatgggcagtcctaaggaggtgatcttctctgacatcacggagaattctgccacggtgtcttggagggcccctactgcccaggttgaaagcttcagaattacatacgtccctattaccgggggtacgccctccatggttactgtggacggaacaaaaacacagacccgactggtgaaactcattccgggtgttgaatacctggtctccataattgctatgaagggatttgaggagagcgagcccgtctcagggagtttcaccactgccttggatgggccttccggtctggtcacagctaatatcaccgattccgaagcactggccaggtggcagcccgctatcgctaccgtggacagttatgttattagctataccggggagaaggtgcccgaaatcaccaggacagttagcggaaacaccgtggaatacgctttaaccgatctggagcccgcaactgaatacacgctaagaatctttgccgagaagggtccgcagaaaagctccaccattacagcgaagttcactactgacctagactcccccagggacctgactgcaaccgaagtgcagtcagagacggccctgctcacctggcgaccgccaagggccagcgtgacgggctacctcctcgtctacgagtcagttgacggaacagttaaggaagttattgtgggacccgatacgacttcctactcccttgccgatctgtccccctccactcattatacggccaagatacaggccttgaatggccctctccgttctaatatgattcaaacaatctttacaacgatcggccttctctaccctttcccaaaggactgttcccaggcaatgctgaacggagatactacgtcaggtctgtatacgatctatctgaacggcgataaggctgaagccctcgaagtcttttgcgatatgacttccgatgggggagggtggattgtattcctcaggagaaagaacgggagggagaacttctatcagaattggaaggcatacgccgctgggttcggtgacagacgtgaggagttctggctcgggctggataatcttaataagattaccgctcagggacagtatgagcttcgcgtggacctgcgtgatcacggcgaaaccgcctttgcagtgtacgataagttctcggtgggagacgctaagactagatataaactcaaagtggagggctacagcggcacagcaggggattctatggcatatcataacggtcgaagcttctccacattcgacaaagacaccgattccgccattactaattgcgctctctcctataagggcgcattttggtacagaaattgccacagggtgaacttaatgggcagatatggggataataaccactcacaaggagttaactggttccattggaaaggacatgaacacagtatccagttcgccgagatgaaattgcgcccaagcaacttcagaaatctcgaaggtcgcaggaagcgcgcttag

SEQ ID NO: 271474 - DNA, 4968 bp, Artificial Sequence
  derived and/or modified sequence
atgggagccatgactcagttgctggctggcgtctttctggcctttttagcgttagccacagaagggggagtgcttaagaaggtgatcagacataagagacagagtggtgtgaatgccactctcccagaggagaatcagcctgttgttttcaatcacgtgtacaatattaagctgcctgtagggagccaatgttccgtggacttggagagcgcaagcggtgaaaaagatctggctccccccagcgagccttctgagtcttttcaggaacacacagtggatggcgagaaccagatcgtgttcacccaccgcatcaatatacctaggcgggcttgtgggtgcgccgctgccccagacgtaaaagagttactgagtaggctagaggaactcgagaaccttgtgtcatcacttagagagcagtgcaccgccggggccggttgttgcctgcagcctgccaccggacggctcgacaccaggccattctgctccggtaggggcaatttctccacagaaggttgcggatgtgtatgcgaacccggatggaagggcccaaactgttccgaacctgagtgccctggcaattgccaccttcgcggcaggtgtattgacggccaatgcatctgtgacgatggctttacaggggaagattgtagtcagctcgcttgcccatctgattgcaacgaccagggaaagtgcgtgaatggtgtttgtatttgtttcgaggggtatgctggcgctgattgttcccgcgagatatgcccagtcccatgttccgaagaacatggaacctgtgttgatgggttgtgcgtctgtcatgacggatttgccggagatgactgcaacaaacctctgtgtttaaataactgctacaatagaggaaggtgtgtagaaaacgaatgtgtttgcgacgagggcttcactggcgaggactgtagcgagctgatttgccccaatgattgtttcgatagaggcaggtgtattaacggaacctgttattgcgaggaaggctttactggcgaagattgtgggaaacccacttgtccacatgcttgccacacccagggtcggtgcgaagaaggacaatgcgtatgtgacgagggcttcgccggggtggattgtagcgaaaaaaggtgcccagcagactgtcacaataggggcaggtgtgttgacgggaggtgcgaatgtgacgacgggtttaccggggccgattgtggagaactcaaatgtcctaacggctgctctgggcacggaagatgtgtgaacggccagtgcgtttgcgacgagggttacaccggcgaagattgcagtcagctgcgctgcccaaacgattgtcactcacggggaagatgcgtcgaaggcaagtgcgtttgtgagcaagggtttaaaggctatgactgttctgatatgtcgtgtccaaatgattgccaccagcatgggagatgtgtaaacgggatgtgtgtgtgtgacgacggatatacaggtgaggactgtcgtgatcgccagtgtccccgggactgctccaacaggggcctttgtgtggatggccaatgcgtctgtgaggacggatttacaggaccagactgtgccgaactgtcctgccccaatgactgtcatgggcagggaagatgcgtgaacggccagtgtgtgtgccacgaggggttcatggggaaagattgtaaggaacaacggtgtccgagcgactgtcacggtcaaggcaggtgtgtggatggtcagtgcatatgtcatgagggatttacagggctcgactgcggacaacacagttgtccttcagactgcaataacttaggccaatgcgtttcaggccgctgcatatgcaatgagggctattccggcgaggattgtagtgaggtctcaccccccaaggacctcgttgtcacagaggtgaccgaggagaccgtgaatctagcttgggataatgagatgcgagtcacggagtacttggtagtgtatacgccaactcacgagggcggcttggagatgcagttcagagtccccggcgatcagacttccacaattattcaagagctggaacctggagtagagtattttattagggtattcgcaatcctcgaaaataagaaatctataccagtgtctgctcgggtggctacttatctgccggcccctgagggcctgaagtttaaatccatcaaggagacaagtgtggaggtggagtgggatcctcttgacatagcctttgaaacttgggagattatttttagaaacatgaataaggaggacgagggggaaattaccaaaagcctgcggcgtcctgaaacctcttatcgacagacaggactcgccccaggtcaagagtacgagattagcctgcatatcgtcaagaataacacccgggggccaggtttgaagcgtgtcacgactactagactggatgcaccctctcagatagaggtcaaagacgtcaccgacacaacggctctgattacctggttcaaacctctcgcagaaatcgatggtattgaattgacctacggaattaaagacgtcccaggggatagaaccaccattgacctaaccgaggacgagaaccaatacagtattggtaatctcaagccagataccgagtatgaggtctcattgatttcccggagaggcgatatgtcatctaacccagctaaggaaacctttaccacaggactggatgcgcctcggaatctgcgccgagtttcacagacagacaattccatcacactggagtggcggaacggaaaagctgcgatcgatagctaccggatcaaatacgctcccatttcaggtggggaccacgctgaagtcgatgtgcccaagtcccagcaggccaccaccaagactaccctgacgggtctccgccccggtacagaatacggcatcggggtgtctgcagtgaaagaagataaagagagtaatcctgctacaatcaatgccgctactgagctcgacaccccaaaggatttacaggtgtctgagaccgctgaaacgagcttgacactgctgtggaaaacccccctggccaagtttgataggtaccgactgaattactcactgcctactggccaatgggtcggcgtgcagttgcctaggaatacaacgtcttacgttctccgtggcctagagccaggccaggaatacaacgtactgctgaccgctgagaagggaagacacaagagtaagcctgctcgggtcaaggcaagcactgaagccgagccagaggtagataacctgctcgtttccgatgcgacaccagacggtttccggcttagttggactgccgatgaaggggttttcgacaacttcgtactgaagataagagatacaaagaaacagtctgagcctctagaaattactctcctcgctccagaaaggacccgcgatataactggactacgggaggctactgagtacgaaatcgaactgtatgggatcagcaaaggtcgccgcagccaaaccgtcagtgccatcgcgaccacggcgatggggtcccccaaggaggtgatattttcagatatcacagaaaattccgcgacagtttcatggcgggctccaacagcccaagtcgagagctttcggatcacctacgtccccatcaccggtgggacacccagtatggtcacagtggatggaaccaaaacacagaccaggcttgttaaactgatcccaggagtggagtatctggtctctattatcgctatgaaggggttcgaagagtccgaacccgtcagcggatcttttacaaccgctctggatggccctagcggccttgtgaccgccaacattacagacagcgaggcactggcaagatggcagcctgctatagcaactgtagatagttatgttataagctacacgggagagaaagtgcctgaaattactagaacggtgtccgggaatacagtggagtatgccctgactgatctggagcccgcaaccgagtatactctgagaattttcgcagagaagggcccccagaagagctctacaatcactgctaagtttaccacggacctcgatagtcctagggaccttaccgctactgaggtccagtctgaaaccgcactgctaacatggagaccacctcgggcctccgtgacaggctatctgctggtgtatgaatccgttgacggcacagtgaaggaggtcatcgttggcccagacacaactagttattcgctggctgatctatcaccgtccacccactatacagctaagattcaggcattgaacggaccactgagatcaaacatgatacagacaatcttcaccacgatcgggctgttatacccgtttccgaaggactgctctcaagctatgctcaatggagacacgacgtcaggcctgtacactatttacttgaatggagacaaggcagaagcgcttgaagtgttctgtgacatgactagtgacggtggaggatggatagtattcctccggcgaaaaaatggccgcgaaaatttttatcagaactggaaggcctatgccgccggtttcggcgatcggcgggaagagttctggttgggcctggacaacttgaacaagatcacagctcagggccagtatgaattacgggtggacctaagagaccacggagagactgcctttgcagtgtatgacaagtttagtgtgggcgacgctaagactcgatataaactgaaggtggagggatattccggaactgccggggacagtatggcttatcacaacggccgttcattctctactttcgataaggataccgactccgccattacaaactgtgctctgtcttataagggtgcattctggtaccgaaattgtcatcgggtgaaccttatgggccgctacggagacaacaatcattctcagggcgttaattggttccactggaagggacatgagcactctattcagtttgcagagatgaaacttcgacctagcaactttaggaatcttgaagggcgacgcaaacgggcttag

SEQ ID NO: 271475 - DNA, 4968 bp, Artificial Sequence
  derived and/or modified sequence
atgggagccatgacccagctgcttgccggcgtgttcctcgccttcttagctctggcaaccgaggggggggtgctcaaaaaagtcattagacataagagacagtccggagtgaacgctacccttcctgaagaaaaccagcctgtagtcttcaaccacgtctataacataaaactgcctgtaggctctcaatgctctgtagacctcgagagcgcatctggggagaaggacctggcaccaccaagcgaaccttctgagtccttccaggaacacaccgtagacggggaaaaccagatcgtattcacacaccgaatcaacatcccacggcgagcttgtgggtgcgctgccgctccagatgtgaaagaacttcttagccgactggaagaattggaaaacctcgtttcatcccttagggagcaatgcaccgcgggagccggctgctgcctgcaacccgcaactggcagactcgacactcgccccttttgctctggacgtgggaatttctctaccgagggctgcggctgcgtttgtgaacccggttggaaaggccctaattgctccgaacccgagtgtcccggcaattgccatctgaggggcaggtgtatagacggtcagtgtatatgtgacgacgggttcacaggggaggactgctctcagttagcgtgtccatctgactgtaatgatcaaggaaagtgcgtgaacggcgtctgcatctgttttgagggttatgccggagccgactgctcgagagagatatgtcctgtgccctgcagcgaagaacatgggacctgcgttgacggcctgtgtgtttgtcacgatgggttcgccggagatgactgcaacaaacccttatgtttgaataactgttacaatagaggacgttgcgtcgagaacgagtgtgtgtgtgatgaaggatttacaggggaagattgctctgaactgatttgtcccaacgattgttttgataggggtcgatgcatcaatggtacctgttactgtgaggagggcttcactggagaagattgcggaaaaccaacctgccctcatgcatgtcatacgcaaggccggtgtgaagagggccaatgcgtctgtgacgagggatttgccggcgtcgattgctctgaaaagaggtgtccggccgattgccacaatagagggaggtgcgtggatgggaggtgtgagtgtgacgacgggttcactggggctgactgcggcgaacttaaatgccctaatggatgtagcggacacggaagatgcgtgaatggacaatgcgtttgcgacgaaggttacacaggcgaggattgttctcaactcaggtgccccaatgactgccatagcagagggaggtgcgtggaaggcaagtgtgtttgcgaacagggatttaagggctatgattgtagcgatatgtcatgccctaatgactgtcatcagcatggacgatgcgtgaacggaatgtgcgtatgcgacgatggttacactggtgaggattgccgtgaccgccaatgtccacgagactgcagtaatcggggcctgtgtgtagatggccagtgtgtctgcgaagacggttttacagggccagactgtgctgagctgagttgtcccaacgattgtcacggacagggtaggtgcgtaaacggtcaatgcgtgtgccatgaaggatttatgggcaaagattgtaaggaacagagatgtcctagtgattgccacggccaaggaagatgcgttgatggccagtgtatctgtcacgagggatttacagggttggattgcggacagcacagctgtcccagcgattgtaacaacctgggacaatgtgtaagtgggcgctgcatttgtaatgaagggtacagtggtgaagattgttccgaagtgagccctccaaaggaccttgtcgttaccgaagtcaccgaagaaactgtgaatctggcttgggacaatgaaatgcgagtgactgagtatcttgtcgtgtatactcctacccacgaaggtggactggaaatgcagttcagagtacctggtgatcagacttcgaccattatccaagagcttgagcccggggtagaatatttcatccgcgtttttgcaatcctcgagaacaaaaaatcaatacccgtgagtgcacgcgtagccacctacctcccagcccctgagggcttaaagtttaaatcgataaaagaaacaagcgtagaagtggagtgggacccattggacatagcattcgagacctgggagatcatatttagaaacatgaataaagaggatgagggggaaattacaaagagcttacgacgccctgaaacaagctaccgacagaccgggttagctcccggtcaggagtacgagatctcattgcatatcgttaagaacaatacccgcggccccggactgaaacgagtcacgacgacccgcttggatgcaccttcacagatcgaagtgaaagacgtaacagacactacagccctgattacttggtttaaaccactggccgagatcgacggtatagagctcacgtacggcatcaaggacgtccccggggataggactaccatcgatctcactgaggacgagaaccagtactccatcggtaaccttaaacctgacacagaatacgaagtttcattgatcagccggagaggcgacatgtcttccaaccccgctaaagaaacatttaccaccggccttgacgcccccagaaatttaagacgagtaagccagacagataacagcatcaccttggaatggaggaacggcaaggctgctatcgatagttataggatcaagtatgctcccattagtggaggagaccatgcagaagtagatgtgccgaaaagtcagcaggcgactactaaaacgacactaaccgggctgagacctgggactgagtacggcattggagtcagcgccgtgaaggaagataaagagagcaaccctgccacgatcaacgctgccaccgagctggatacacccaaagacctacaggtgagtgagactgcagaaaccagtctgacattgctgtggaagactcctctcgccaaatttgacagatacaggttgaattatagtttgcccaccggacagtgggttggcgtgcaactccctagaaatactacatcatacgtcctcagagggctggaacctggtcaggaatacaatgttctgctcactgctgaaaagggccggcataagtccaaacccgctagagtgaaggcttctacagaagctgagcccgaagttgataacctcctcgtgtctgacgccaccccggatggctttcgcctgtcatggaccgcagatgaaggcgtctttgataatttcgttctgaagattcgtgatactaagaagcaatcagaacctctggagatcaccctcttagcacccgaacggacccgagacattactggccttagggaggcaactgagtatgaaatagagctatacgggatatctaaaggtcgacggtcacagacggtctccgccatcgctacgactgcaatgggtagccccaaggaggttatcttcagtgacatcacagaaaattcagctacggtgtcctggcgggcccccactgcccaagttgagtcattccgcataacctacgtccccattacagggggcacaccgagtatggtcactgttgacggcactaaaacccagacccgcctcgtgaaattaatccctggcgtggagtacctggtttccatcatagcaatgaaagggtttgaagaaagcgaacctgtgagtgggtctttcacaactgctctggatgggccatccggactggtcactgctaacattacagattccgaagccctggctaggtggcagccagccattgcgaccgtggatagctacgttatcagttatactggggaaaaggtcccagagatcacaaggacagttagtgggaataccgtcgaatacgcactgaccgacctcgagcccgcaaccgaatacaccctgagaatcttcgctgaaaaaggccctcagaaatcgtccacaataactgctaaatttactactgatctggattctccacgcgacctgactgccaccgaagttcaaagtgaaacggccctactgacctggagacccccaagggcaagcgttacaggatacctcctggtgtacgaatccgtcgatggcactgtgaaggaggtgatcgtggggcccgacaccacatcttactctctcgcagatctatctccaagcactcactacacagctaagatacaggcgttaaacggaccactccgtagcaacatgatacagacaatcttcacgaccatcggactcctgtaccccttccccaaggattgctcccaggccatgctgaatggcgatacgaccagtgggctttataccatttacttgaacggcgataaagcagaggctctcgaagtattttgcgacatgaccagtgacggaggcggctggattgtctttttacggaggaaaaatggaagagagaatttctatcagaattggaaagcttacgccgcaggttttggcgatcgacgcgaagagttttggctggggttggacaatctgaataaaataactgcccaaggacagtacgaacttcgggtggacctgcgagaccacggtgaaacagcatttgcggtgtatgacaaattttcagtaggggacgctaagactaggtacaagctcaaagttgagggatattcagggacagccggtgactcaatggcttaccataatggaaggtccttttcaacatttgacaaagatactgatagtgcgattaccaattgtgcactctcatacaagggcgccttttggtacagaaactgccatcgtgttaatctgatgggacgttatggtgacaacaatcacagccaaggtgtcaattggtttcactggaaaggtcatgagcacagtattcaattcgctgaaatgaagttgagaccctcaaacttccgcaacttagaaggccgccgtaagcgcgcttag

SEQ ID NO: 271476 - DNA, 5960 bp, Artificial Sequence
  derived and/or modified sequence
attacagaggaaggagctcgctatataagccagccaaagttggctgcaccggccacagcctgcctactgtcacccgcctctcccgcgcgcagatacacgcccccgcctccgtgggcacaaaggcagcgctgctggggaactcgggggaacgcgcacgtgggaaccgccgcagctccacactccaggtacttcttccaaggacctaggtctctcgcccatcggaaagaaaataattctttcaagaagatcagggacaactgatttgaagtctactctgtgcttctaaatccccaattctgctgaaagtgagataccctagagccctagagccccagcagcacccagccaaacccacctccaccatgggggccatgactcagctgttggcaggtgtctttcttgctttccttgccctcgctaccgaaggtggggtcctcaagaaagtcatccggcacaagcgacagagtggggtgaacgccaccctgccagaagagaaccagccagtggtgtttaaccacgtttacaacatcaagctgccagtgggatcccagtgttcggtggatctggagtcagccagtggggagaaagacctggcaccgccttcagagcccagcgaaagctttcaggagcacacagtggatggggaaaaccagattgtcttcacacatcgcatcaacatcccccgccgggcctgtggctgtgccgcagcccctgatgttaaggagctgctgagcagactggaggagctggagaacctggtgtcttccctgagggagcaatgtactgcaggagcaggctgctgtctccagcctgccacaggccgcttggacaccaggcccttctgtagcggtcggggcaacttcagcactgaaggatgtggctgtgtctgcgaacctggctggaaaggccccaactgctctgagcccgaatgtccaggcaactgtcaccttcgaggccggtgcattgatgggcagtgcatctgtgacgacggcttcacgggcgaggactgcagccagctggcttgccccagcgactgcaatgaccagggcaagtgcgtaaatggagtctgcatctgtttcgaaggctacgccggggctgactgcagccgtgaaatctgcccagtgccctgcagtgaggagcacggcacatgtgtagatggcttgtgtgtgtgccacgatggctttgcaggcgatgactgcaacaagcctctgtgtctcaacaattgctacaaccgtggacgatgcgtggagaatgagtgcgtgtgtgatgagggtttcacgggcgaagactgcagtgagctcatctgccccaatgactgcttcgaccggggccgctgcatcaatggcacctgctactgcgaagaaggcttcacaggtgaagactgcgggaaacccacctgcccacatgcctgccacacccagggccggtgtgaggaggggcagtgtgtatgtgatgagggctttgccggtgtggactgcagcgagaagaggtgtcctgctgactgtcacaatcgtggccgctgtgtagacgggcggtgtgagtgtgatgatggtttcactggagctgactgtggggagctcaagtgtcccaatggctgcagtggccatggccgctgtgtcaatgggcagtgtgtgtgtgatgagggctatactggggaggactgcagccagctacggtgccccaatgactgtcacagtcggggccgctgtgtcgagggcaaatgtgtatgtgagcaaggcttcaagggctatgactgcagtgacatgagctgccctaatgactgtcaccagcacggccgctgtgtgaatggcatgtgtgtttgtgatgacggctacacaggggaagactgccgggatcgccaatgccccagggactgcagcaacaggggcctctgtgtggacggacagtgcgtctgtgaggacggcttcaccggccctgactgtgcagaactctcctgtccaaatgactgccatggccagggtcgctgtgtgaatgggcagtgcgtgtgccatgaaggatttatgggcaaagactgcaaggagcaaagatgtcccagtgactgtcatggccagggccgctgcgtggacggccagtgcatctgccacgagggcttcacaggcctggactgtggccagcactcctgccccagtgactgcaacaacttaggacaatgcgtctcgggccgctgcatctgcaacgagggctacagcggagaagactgctcagaggtgtctcctcccaaagacctcgttgtgacagaagtgacggaagagacggtcaacctggcctgggacaatgagatgcgggtcacagagtaccttgtcgtgtacacgcccacccacgagggtggtctggaaatgcagttccgtgtgcctggggaccagacgtccaccatcatccaggagctggagcctggtgtggagtactttatccgtgtatttgccatcctggagaacaagaagagcattcctgtcagcgccagggtggccacgtacttacctgcacctgaaggcctgaaattcaagtccatcaaggagacatctgtggaagtggagtgggatcctctagacattgcttttgaaacctgggagatcatcttccggaatatgaataaagaagatgagggagagatcaccaaaagcctgaggaggccagagacctcttaccggcaaactggtctagctcctgggcaagagtatgagatatctctgcacatagtgaaaaacaatacccggggccctggcctgaagagggtgaccaccacacgcttggatgcccccagccagatcgaggtgaaagatgtcacagacaccactgccttgatcacctggttcaagcccctggctgagatcgatggcattgagctgacctacggcatcaaagacgtgccaggagaccgtaccaccatcgatctcacagaggacgagaaccagtactccatcgggaacctgaagcctgacactgagtacgaggtgtccctcatctcccgcagaggtgacatgtcaagcaacccagccaaagagaccttcacaacaggcctcgatgctcccaggaatcttcgacgtgtttcccagacagataacagcatcaccctggaatggaggaatggcaaggcagctattgacagttacagaattaagtatgcccccatctctggaggggaccacgctgaggttgatgttccaaagagccaacaagccacaaccaaaaccacactcacaggtctgaggccgggaactgaatatgggattggagtttctgctgtgaaggaagacaaggagagcaatccagcgaccatcaacgcagccacagagttggacacgcccaaggaccttcaggtttctgaaactgcagagaccagcctgaccctgctctggaagacaccgttggccaaatttgaccgctaccgcctcaattacagtctccccacaggccagtgggtgggagtgcagcttccaagaaacaccacttcctatgtcctgagaggcctggaaccaggacaggagtacaatgtcctcctgacagccgagaaaggcagacacaagagcaagcccgcacgtgtgaaggcatccactgaagccgaaccggaagttgacaaccttctggtttcagatgccaccccagacggtttccgtctgtcctggacagctgatgaaggggtcttcgacaattttgttctcaaaatcagagataccaaaaagcagtctgagccactggaaataaccctacttgcccccgaacgtaccagggacataacaggtctcagagaggctactgaatacgaaattgaactctatggaataagcaaaggaaggcgatcccagacagtcagtgctatagcaacaacagccatgggctccccaaaggaagtcattttctcagacatcactgaaaattcggctactgtcagctggagggcacccacagcccaagtggagagcttccggattacctatgtgcccattacaggaggtacaccctccatggtaactgtggacggaaccaagactcagaccaggctggtgaaactcatacctggcgtggagtaccttgtcagcatcatcgccatgaagggctttgaggaaagtgaacctgtctcagggtcattcaccacagctctggatggcccatctggcctggtgacagccaacatcactgactcagaagccttggccaggtggcagccagccattgccactgtggacagttatgtcatctcctacacaggcgagaaagtgccagaaattacacgcacggtgtccgggaacacagtggagtatgctctgaccgacctcgagcctgccacggaatacacactgagaatctttgcagagaaagggccccagaagagctcaaccatcactgccaagttcacaacagacctcgattctccaagagacttgactgctactgaggttcagtcggaaactgccctccttacctggcgacccccccgggcatcagtcaccggttacctgctggtctatgaatcagtggatggcacagtcaaggaagtcattgtgggtccagataccacctcctacagcctggcagacctgagcccatccacccactacacagccaagatccaggcactcaatgggcccctgaggagcaatatgatccagaccatcttcaccacaattggactcctgtaccccttccccaaggactgctcccaagcaatgctgaatggagacacgacctctggcctctacaccatttatctgaatggtgataaggctgaggcgctggaagtcttctgtgacatgacctctgatgggggtggatggattgtgttcctgagacgcaaaaacggacgcgagaacttctaccaaaactggaaggcatatgctgctggatttggggaccgcagagaagaattctggcttgggctggacaacctgaacaaaatcacagcccaggggcagtacgagctccgggtggacctgcgggaccatggggagacagcctttgctgtctatgacaagttcagcgtgggagatgccaagactcgctacaagctgaaggtggaggggtacagtgggacagcaggtgactccatggcctaccacaatggcagatccttctccacctttgacaaggacacagattcagccatcaccaactgtgctctgtcctacaaaggggctttctggtacaggaactgtcaccgtgtcaacctgatggggagatatggggacaataaccacagtcagggcgttaactggttccactggaagggccacgaacactcaatccagtttgctgagatgaagctgagaccaagcaacttcagaaatcttgaaggcaggcgcaaacgggcataaattccagggaccactgggtgagagaggaataaggcccagagcgaggaaaggattttaccaaagcatcaatacaaccagcccaaccatcggtccacacctgggcatttggtgagagtcaaagctgaccatggatccctggggccaacggcaacagcatgggcctcacctcctctgtgatttctttctttgcaccaaagacatcagtctccaacatgtttctgttttgttgtttgattcagcaaaaatctcccagtgacaacatcgcaatagttttttacttctcttaggtggctctgggaatgggagaggggtaggatgtacaggggtagtttgttttagaaccagccgtattttacatgaagctgtataattaattgtcattatttttgttagcaaagattaaatgtgtcattggaagccatccctttttttacatttcatacaacagaaaccagaaaagcaatactgtttccattttaaggatatgattaatattattaatataataatgatgatgatgatgatgaaaactaaggatttttcaagagatctttctttccaaaacatttctggacagtacctgattgtattttttttttaaataaaagcacaagtacttttgagtttgtt

SEQ ID NO: 271477 - protein, 1564 aa, Artificial Sequence
  derived and/or modified sequence
MGAMTQLLAGVFLAFLALATEGGVLKKVIRHKRQSGVNATLPEENQPVVFNHVYNIKLPVGSQCSVDLESASGEKDLAPPSEPSESFQEHTVDGENQIVFTHRINIPRRACGCAAAPDVKELLSRLEELENLVSSLREQCTAGAGCCLQPATGRLDTRPFCSGRGNFSTEGCGCVCEPGWKGPNCSEPECPGNCHLRGRCIDGQCICDDGFTGEDCSQLACPSDCNDQGKCVNGVCICFEGYAGADCSREICPVPCSEEHGTCVDGLCVCHDGFAGDDCNKPLCLNNCYNRGRCVENECVCDEGFTGEDCSELICPNDCFDRGRCINGTCYCEEGFTGEDCGKPTCPHACHTQGRCEEGQCVCDEGFAGVDCSEKRCPADCHNRGRCVDGRCECDDGFTGADCGELKCPNGCSGHGRCVNGQCVCDEGYTGEDCSQLRCPNDCHSRGRCVEGKCVCEQGFKGYDCSDMSCPNDCHQHGRCVNGMCVCDDGYTGEDCRDRQCPRDCSNRGLCVDGQCVCEDGFTGPDCAELSCPNDCHGQGRCVNGQCVCHEGFMGKDCKEQRCPSDCHGQGRCVDGQCICHEGFTGLDCGQHSCPSDCNNLGQCVSGRCICNEGYSGEDCSEVSPPKDLVVTEVTEETVNLAWDNEMRVTEYLVVYTPTHEGGLEMQFRVPGDQTSTIIQELEPGVEYFIRVFAILENKKSIPVSARVATYLPAPEGLKFKSIKETSVEVEWDPLDIAFETWEIIFRNMNKEDEGEITKSLRRPETSYRQTGLAPGQEYEISLHIVKNNTRGPGLKRVTTTRLDAPSQIEVKDVTDTTALITWFKPLAEIDGIELTYGIKDVPGDRTTIDLTEDENQYSIGNLKPDTEYEVSLISRRGDMSSNPAKETFTTGLDAPRNLRRVSQTDNSITLEWRNGKAAIDSYRIKYAPISGGDHAEVDVPKSQQATTKTTLTGLRPGTEYGIGVSAVKEDKESNPATINAATELDTPKDLQVSETAETSLTLLWKTPLAKFDRYRLNYSLPTGQWVGVQLPRNTTSYVLRGLEPGQEYNVLLTAEKGRHKSKPARVKASTAMGSPKEVIFSDITENSATVSWRAPTAQVESFRITYVPITGGTPSMVTVDGTKTQTRLVKLIPGVEYLVSIIAMKGFEESEPVSGSFTTALDGPSGLVTANITDSEALARWQPAIATVDSYVISYTGEKVPEITRTVSGNTVEYALTDLEPATEYTLRIFAEKGPQKSSTITAKFTTDLDSPRDLTATEVQSETALLTWRPPRASVTGYLLVYESVDGTVKEVIVGPDTTSYSLADLSPSTHYTAKIQALNGPLRSNMIQTIFTTIGLLYPFPKDCSQAMLNGDTTSGLYTIYLNGDKAEALEVFCDMTSDGGGWIVFLRRKNGRENFYQNWKAYAAGFGDRREEFWLGLDNLNKITAQGQYELRVDLRDHGETAFAVYDKFSVGDAKTRYKLKVEGYSGTAGDSMAYHNGRSFSTFDKDTDSAITNCALSYKGAFWYRNCHRVNLMGRYGDNNHSQGVNWFHWKGHEHSIQFAEMKLRPSNFRNLEGRRKRA

SEQ ID NO: 271478 - protein, 92 aa, Artificial Sequence
  derived and/or modified sequence
MGAMTQLLAGVFLAFLALATEGGVLKKVIRHKRQSGVNATLPEENQPVVFNHVYNIKLPVGSQCSVDLESASGEKDLAPPSEPSESFQEHTV

SEQ ID NO: 271479 - DNA, 4695 bp, Artificial Sequence
  derived and/or modified sequence
atgggcgccatgacccagctgctggccggcgtgttcctggccttcctggccctggccaccgagggcggcgtgctgaagaaggtgatcagacacaagagacagagcggcgtgaacgccaccctgcccgaggagaaccagcccgtggtgttcaaccacgtgtacaacatcaagctgcccgtgggcagccagtgcagcgtggacctggagagcgccagcggcgagaaggacctggccccccccagcgagcccagcgagagcttccaggagcacaccgtggacggcgagaaccagatcgtgttcacccacagaatcaacatccccagaagagcctgcggctgcgccgccgcccccgacgtgaaggagctgctgagcagactggaggagctggagaacctggtgagcagcctgagagagcagtgcaccgccggcgccggctgctgcctgcagcccgccaccggcagactggacaccagacccttctgcagcggcagaggcaacttcagcaccgagggctgcggctgcgtgtgcgagcccggctggaagggccccaactgcagcgagcccgagtgccccggcaactgccacctgagaggcagatgcatcgacggccagtgcatctgcgacgacggcttcaccggcgaggactgcagccagctggcctgccccagcgactgcaacgaccagggcaagtgcgtgaacggcgtgtgcatctgcttcgagggctacgccggcgccgactgcagcagagagatctgccccgtgccctgcagcgaggagcacggcacctgcgtggacggcctgtgcgtgtgccacgacggcttcgccggcgacgactgcaacaagcccctgtgcctgaacaactgctacaacagaggcagatgcgtggagaacgagtgcgtgtgcgacgagggcttcaccggcgaggactgcagcgagctgatctgccccaacgactgcttcgacagaggcagatgcatcaacggcacctgctactgcgaggagggcttcaccggcgaggactgcggcaagcccacctgcccccacgcctgccacacccagggcagatgcgaggagggccagtgcgtgtgcgacgagggcttcgccggcgtggactgcagcgagaagagatgccccgccgactgccacaacagaggcagatgcgtggacggcagatgcgagtgcgacgacggcttcaccggcgccgactgcggcgagctgaagtgccccaacggctgcagcggccacggcagatgcgtgaacggccagtgcgtgtgcgacgagggctacaccggcgaggactgcagccagctgagatgccccaacgactgccacagcagaggcagatgcgtggagggcaagtgcgtgtgcgagcagggcttcaagggctacgactgcagcgacatgagctgccccaacgactgccaccagcacggcagatgcgtgaacggcatgtgcgtgtgcgacgacggctacaccggcgaggactgcagagacagacagtgccccagagactgcagcaacagaggcctgtgcgtggacggccagtgcgtgtgcgaggacggcttcaccggccccgactgcgccgagctgagctgccccaacgactgccacggccagggcagatgcgtgaacggccagtgcgtgtgccacgagggcttcatgggcaaggactgcaaggagcagagatgccccagcgactgccacggccagggcagatgcgtggacggccagtgcatctgccacgagggcttcaccggcctggactgcggccagcacagctgccccagcgactgcaacaacctgggccagtgcgtgagcggcagatgcatctgcaacgagggctacagcggcgaggactgcagcgaggtgagcccccccaaggacctggtggtgaccgaggtgaccgaggagaccgtgaacctggcctgggacaacgagatgagagtgaccgagtacctggtggtgtacacccccacccacgagggcggcctggagatgcagttcagagtgcccggcgaccagaccagcaccatcatccaggagctggagcccggcgtggagtacttcatcagagtgttcgccatcctggagaacaagaagagcatccccgtgagcgccagagtggccacctacctgcccgcccccgagggcctgaagttcaagagcatcaaggagaccagcgtggaggtggagtgggaccccctggacatcgccttcgagacctgggagatcatcttcagaaacatgaacaaggaggacgagggcgagatcaccaagagcctgagaagacccgagaccagctacagacagaccggcctggcccccggccaggagtacgagatcagcctgcacatcgtgaagaacaacaccagaggccccggcctgaagagagtgaccaccaccagactggacgcccccagccagatcgaggtgaaggacgtgaccgacaccaccgccctgatcacctggttcaagcccctggccgagatcgacggcatcgagctgacctacggcatcaaggacgtgcccggcgacagaaccaccatcgacctgaccgaggacgagaaccagtacagcatcggcaacctgaagcccgacaccgagtacgaggtgagcctgatcagcagaagaggcgacatgagcagcaaccccgccaaggagaccttcaccaccggcctggacgcccccagaaacctgagaagagtgagccagaccgacaacagcatcaccctggagtggagaaacggcaaggccgccatcgacagctacagaatcaagtacgcccccatcagcggcggcgaccacgccgaggtggacgtgcccaagagccagcaggccaccaccaagaccaccctgaccggcctgagacccggcaccgagtacggcatcggcgtgagcgccgtgaaggaggacaaggagagcaaccccgccaccatcaacgccgccaccgagctggacacccccaaggacctgcaggtgagcgagaccgccgagaccagcctgaccctgctgtggaagacccccctggccaagttcgacagatacagactgaactacagcctgcccaccggccagtgggtgggcgtgcagctgcccagaaacaccaccagctacgtgctgagaggcctggagcccggccaggagtacaacgtgctgctgaccgccgagaagggcagacacaagagcaagcccgccagagtgaaggccagcaccgccatgggcagccccaaggaggtgatcttcagcgacatcaccgagaacagcgccaccgtgagctggagagcccccaccgcccaggtggagagcttcagaatcacctacgtgcccatcaccggcggcacccccagcatggtgaccgtggacggcaccaagacccagaccagactggtgaagctgatccccggcgtggagtacctggtgagcatcatcgccatgaagggcttcgaggagagcgagcccgtgagcggcagcttcaccaccgccctggacggccccagcggcctggtgaccgccaacatcaccgacagcgaggccctggccagatggcagcccgccatcgccaccgtggacagctacgtgatcagctacaccggcgagaaggtgcccgagatcaccagaaccgtgagcggcaacaccgtggagtacgccctgaccgacctggagcccgccaccgagtacaccctgagaatcttcgccgagaagggcccccagaagagcagcaccatcaccgccaagttcaccaccgacctggacagccccagagacctgaccgccaccgaggtgcagagcgagaccgccctgctgacctggagaccccccagagccagcgtgaccggctacctgctggtgtacgagagcgtggacggcaccgtgaaggaggtgatcgtgggccccgacaccaccagctacagcctggccgacctgagccccagcacccactacaccgccaagatccaggccctgaacggccccctgagaagcaacatgatccagaccatcttcaccaccatcggcctgctgtaccccttccccaaggactgcagccaggccatgctgaacggcgacaccaccagcggcctgtacaccatctacctgaacggcgacaaggccgaggccctggaggtgttctgcgacatgaccagcgacggcggcggctggatcgtgttcctgagaagaaagaacggcagagagaacttctaccagaactggaaggcctacgccgccggcttcggcgacagaagagaggagttctggctgggcctggacaacctgaacaagatcaccgcccagggccagtacgagctgagagtggacctgagagaccacggcgagaccgccttcgccgtgtacgacaagttcagcgtgggcgacgccaagaccagatacaagctgaaggtggagggctacagcggcaccgccggcgacagcatggcctaccacaacggcagaagcttcagcaccttcgacaaggacaccgacagcgccatcaccaactgcgccctgagctacaagggcgccttctggtacagaaactgccacagagtgaacctgatgggcagatacggcgacaacaaccacagccagggcgtgaactggttccactggaagggccacgagcacagcatccagttcgccgagatgaagctgagacccagcaacttcagaaacctggagggcagaagaaagagagcctag

SEQ ID NO: 271480 - DNA, 279 bp, Artificial Sequence
  derived and/or modified sequence
atgggcgccatgacccagctgctggccggcgtgttcctggccttcctggccctggccaccgagggcggcgtgctgaagaaggtgatcagacacaagagacagagcggcgtgaacgccaccctgcccgaggagaaccagcccgtggtgttcaaccacgtgtacaacatcaagctgcccgtgggcagccagtgcagcgtggacctggagagcgccagcggcgagaaggacctggccccccccagcgagcccagcgagagcttccaggagcacaccgtgtag

SEQ ID NO: 271481 - DNA, 4695 bp, Artificial Sequence
  derived and/or modified sequence
atgggcgcgatgactcagcttttggctggcgtttttctggcatttcttgccctggcgactgagggcggagtcctcaaaaaagtgatccggcataagaggcagtccggggtaaacgccactctccccgaggagaaccaaccagtggtgtttaatcacgtatataacatcaagctccctgttgggagccagtgcagcgttgatttagagtccgctagtggcgaaaaggatctggctccacccagtgaaccatcagagtccttccaagaacatactgtcgacggcgaaaaccaaattgtgttcacccacaggattaatattccccggcgagcctgtggatgcgctgccgctcctgatgtgaaggagctgttgagccggctggaggagttggagaacctcgtgagttcgttaagagaacaatgtaccgccggcgcaggatgctgcctccagccggctaccggccgattggatacgcgacccttctgctctggccgtggaaacttttctactgaaggctgcggctgtgtttgcgagccaggatggaagggccctaactgcagcgagcctgagtgccctggcaactgccacttacgaggacgctgtattgacgggcagtgtatctgcgatgatggtttcacaggagaggattgtagccagttagcgtgtcccagcgattgtaacgatcaaggcaaatgcgtgaatggagtgtgcatctgtttcgagggatatgccggcgccgactgctctcgcgagatctgtcccgtgccctgcagcgaggaacacggcacctgcgtagatggactgtgcgtctgtcatgacggttttgccggtgatgactgtaacaaacctttgtgtctcaataattgctacaataggggcagatgtgtcgagaacgaatgcgtgtgtgacgagggttttaccggcgaagactgtagcgagctcatttgtccaaatgactgcttcgaccgggggaggtgcattaatggcacgtgctactgtgaagaaggcttcacaggcgaggactgcggtaagcccacctgcccgcatgcctgccacactcagggacggtgtgaagaggggcagtgcgtttgcgacgagggctttgcgggagtcgactgcagcgaaaaaaggtgcccagccgactgtcataatcgtgggcgctgcgtcgatggacgatgcgaatgtgatgatgggttcacgggagcagactgtggggagctgaaatgcccgaacggctgtagcggtcatggacggtgcgtgaacggacaatgcgtatgtgatgaaggatacaccggagaggattgttcccaacttagatgtcccaacgattgtcactctcgcggacggtgcgtcgaaggtaagtgcgtgtgcgagcaagggttcaaaggttacgactgctcggacatgagttgtccgaacgattgtcatcaacacggccgttgtgtaaatggaatgtgcgtgtgtgacgatggctacacgggagaggattgtagggaccggcagtgcccaagagattgcagcaaccgaggattatgtgtggacggccagtgcgtatgtgaagatgggtttacaggtcctgattgtgctgaactgtcgtgtcctaacgattgtcatggacaggggcgctgcgtcaacggacaatgcgtttgccatgagggctttatgggtaaggattgcaaggaacagcggtgtccaagcgattgccacggtcagggcaggtgtgtggacgggcaatgcatctgccatgaaggatttacaggactggactgtggacaacacagttgtccatctgattgtaataacctgggccagtgtgtgtcggggcgttgcatctgtaatgagggatactctggcgaggattgcagcgaagtaagccctcccaaggacttagtggtgacagaagttaccgaggaaactgtcaacttggcctgggataatgaaatgagggtaactgaatatttagtggtatacactcccacacacgaggggggcctagagatgcagttccgagttcccggcgatcaaacatctacaattatacaggaactcgagccaggggtcgagtatttcattcgagtcttcgctatcctggagaataaaaagtcaatcccggtctccgcgcgggtggccacatatctacccgcgcccgaagggctcaagttcaaaagcatcaaagagacatcagtggaagtggagtgggaccctctcgatattgctttcgaaacctgggaaatcattttccgtaatatgaataaggaagatgagggcgaaatcacaaaaagcctgagacgtcccgagacctcctaccgccagactggcctggcaccgggtcaggaatatgagattagccttcacatcgtcaaaaataatacaaggggtccaggtctaaagagggtaactaccacccgactcgacgctccctcccagatcgaagtgaaggatgtcaccgatacgacggcattaatcacttggttcaagcccttggcagaaattgacggcattgaactcacgtacggtatcaaagacgtaccaggagataggacaactattgatttgactgaagacgagaaccagtattcaatcggaaacctgaagccagacactgaatacgaagtgtctctcataagtaggagaggcgacatgtcatccaatcctgccaaagaaacttttaccaccggtttagatgcccccagaaacctgaggcgagtctcccagactgataactcaatcacattggaatggagaaacgggaaagcggctatcgactcttatagaatcaaatacgcccctatttccggaggagatcacgcggaggtggatgtcccaaagagtcaacaggctacaactaaaaccaccctgaccgggctgcgtcctggtaccgaatacggaatcggtgttagcgccgtgaaggaagacaaggagtccaatcccgcgactattaacgcagcaactgaactcgatactcccaaggatttgcaggtgagcgagaccgccgagacaagccttaccctcctctggaagaccccattggccaagttcgataggtatagactaaattatagcctgccgacgggtcagtgggtgggagtgcagttgccaaggaacactacatcctacgtgctgcgcggtctcgagccgggtcaggagtataatgtcctcctgactgcagagaagggccgccacaagtccaaacccgcccgtgtgaaggcatccaccgccatggggagccctaaggaggtcattttctctgacatcactgagaattcggccaccgtctcttggagagcacctaccgcacaagttgagtcctttcggataacttacgtgcccattaccggtggtacaccttctatggtaaccgtggatggaactaagacacaaaccaggttggttaagctgatccccggagtcgagtatttggtctccattatagctatgaaggggttcgaagagtccgagcctgtgtccgggtccttcacaacagctctggacggccccagcggcttggtgacagctaacattactgatagtgaggcccttgcgaggtggcagccagctattgccactgtagattcatacgttatatcctacaccggcgaaaaggtgcctgagatcacacggacagtgtcaggtaacaccgtggaatatgccctgactgacctagaaccggctacagagtacactctgcggattttcgccgagaaggggccccaaaagagttccaccatcaccgcaaaattcaccacagacctggattcccctcgggacctcaccgccactgaagttcagagtgaaacagctctgttgacttggcggcctccccgagccagcgtgaccggctacttgctagtgtacgagagcgtagacggtaccgtgaaggaggtcatcgtgggcccagacacgactagctattccctggcagacctgagccccagtacgcactatacagccaagattcaagcactgaacggccctctgcggtcaaacatgattcagacgattttcaccaccatcggcctcctctatccttttcctaaagattgttctcaggccatgttgaatggtgataccacttccggcttatatacgatttacttgaatggcgataaagcggaggccctcgaagtcttttgtgacatgacaagcgatggcggcggatggatagtgtttttgagaagaaaaaatgggagggagaatttctatcagaattggaaagcctatgccgcgggcttcggcgataggcgcgaggaattctggttggggctggacaatctgaataaaatcacggcacagggccagtatgagctgcgggttgatctgagggatcacggggaaactgctttcgctgtgtatgataagttcagtgtgggcgatgcaaaaactcgatacaagctcaaggtcgaggggtacagtggcaccgctggggatagcatggcctatcacaacgggcgcagcttttcaacatttgataaggacactgattcggcaattactaattgtgctctatcctacaaaggcgccttttggtacagaaattgtcatagagtgaatctgatggggcgctacggagacaataatcactcgcagggagttaattggttccactggaagggccacgaacatagcatccagttcgccgagatgaagttgcgtccctccaacttcagaaaccttgagggcaggcggaagcgagcctag

SEQ ID NO: 271482 - DNA, 279 bp, Artificial Sequence
  derived and/or modified sequence
atgggagccatgacccagcttcttgccggggtcttcctggcctttctggccctggccaccgagggtggcgtgctgaaaaaggtcatccgacacaaacggcaatctggcgtgaatgcaacactgccagaggagaaccagcccgttgtattcaatcatgtgtataacataaagctgcccgtgggctcccaatgcagtgtcgatcttgagtccgccagcggcgaaaaggacttagcacctccatcagagccatccgagagtttccaggagcacacggtctag

SEQ ID NO: 271483 - DNA, 4695 bp, Artificial Sequence
  derived and/or modified sequence
atgggcgccatgacccagctgctggccggggtcttcctggccttcctggccctggccacagagggcggcgtgctgaagaaggtgatccgccacaagaggcagagcggcgtgaatgccaccctgcctgaggagaaccagcctgtggtgttcaaccacgtgtacaacatcaagctgcctgtgggcagccagtgcagcgtggacctggagagcgccagcggggagaaggacctggcccctccttctgagcccagcgagagcttccaggagcacacagtggatggagagaaccagatcgtgttcacccaccgcatcaacatcccccggcgggcctgtggctgtgccgccgccccagatgtgaaggagctgctgagccggctggaggagctggagaacctggtgagcagcctgcgggagcagtgcacagctggggccggctgctgcctgcagcctgccaccggccgcctggacacccggcccttctgcagcggccggggcaacttcagcacagagggctgcggctgtgtgtgtgagcccggctggaagggccccaactgcagcgagccagaatgtcctggcaactgccacctgcggggccgctgcattgatggccagtgcatctgtgatgatggcttcaccggggaggactgcagccagctggcctgccccagcgactgcaatgaccagggcaaatgtgtgaatggagtgtgcatctgctttgagggctacgccggggctgactgcagccgggagatctgccctgtgccctgcagcgaggagcacggcacctgtgtggatggcctgtgtgtgtgccatgatggctttgctggagatgactgcaacaagcccctgtgcctgaacaactgctacaacagaggccgctgtgtggagaatgaatgtgtgtgtgatgagggcttcaccggggaggactgcagcgagctgatctgccccaatgactgctttgaccggggccgctgcatcaatggcacctgctactgtgaggagggcttcaccggggaggactgtgggaagcccacctgcccccacgcctgccacacccagggccgctgtgaggagggccagtgtgtgtgtgatgagggctttgctggggtggactgcagcgagaagcgctgcccagctgactgccacaacagaggccgctgtgtggatggccgctgtgaatgtgatgatggcttcaccggggctgactgtggggagctgaagtgccccaacggctgcagcggccacggccgctgtgtgaatggccagtgtgtgtgtgatgagggctacaccggggaggactgcagccagctgcgctgccccaatgactgccacagccggggccgctgtgtggagggcaaatgtgtgtgtgagcagggcttcaagggctatgactgcagcgacatgagctgccccaatgactgccaccagcacggccgctgtgtgaatggcatgtgtgtgtgtgatgatggctacaccggggaggactgccgggaccggcagtgcccccgggactgcagcaacagaggcctgtgtgtggatggccagtgtgtgtgtgaagatggcttcaccggccctgactgtgccgagctgagctgccccaatgactgccacggccagggccgctgtgtgaatggccagtgtgtgtgccacgagggcttcatgggcaaggactgcaaggagcagcgctgccccagcgactgccacggccagggccgctgtgtggatggccagtgcatctgccacgagggcttcaccggcctggactgtggccagcacagctgccccagcgactgcaacaacctgggccagtgtgtgtctggccgctgcatctgcaatgaaggctacagcggggaggactgcagcgaggtgtccccacccaaggacctggtggtgacagaggtgacagaggagaccgtgaacctggcctgggacaatgagatgagggtgacagagtacctggtggtgtacacccccacccatgagggcggcctggagatgcagttccgggtgcctggggaccagaccagcaccatcatccaggagctggagcccggggtggagtacttcatccgggtgtttgccatcctggagaacaagaagagcatccctgtgtctgcccgggtggccacctacctgcctgcccctgagggcctgaagttcaagagcatcaaggagacctctgtggaggtggagtgggaccccctggacatcgcctttgagacctgggagatcatcttcaggaacatgaacaaggaggatgaaggagagatcaccaagagcctgcggcggcctgagaccagctaccggcagacaggcctggcccctggccaggagtatgagatcagcctgcacatcgtgaagaacaacacccggggccctggcctgaagagggtgaccaccacccggctggatgcccccagccagatcgaggtgaaggatgtgacagacaccacagccctgatcacctggttcaagcccctggccgagattgatggcatcgagctgacctacggcatcaaggatgtgcctggggacaggaccaccatcgacctgacagaagatgagaaccagtacagcatcggcaacctgaagccagacacagaatatgaggtgtccctcatcagccggcggggggacatgagcagcaacccagccaaggagaccttcaccaccggcctggatgcccccaggaacctgcggcgggtgtcccagacagacaacagcatcaccctggagtggagaaatggcaaggccgccatcgacagctaccgcatcaagtatgcccccatctctggaggagaccacgccgaggtggatgtgcccaagagccagcaggccaccaccaagaccaccctgaccggcctgcggcctggaacagaatatggaattggagtgtctgctgtgaaggaggacaaggagagcaacccagccaccatcaatgctgccacagagctggacacccccaaggacctgcaggtgtctgaaacagctgagaccagcctgaccctgctgtggaagacccccctggccaagtttgaccgctaccgcctgaactacagcctgcccaccggccagtgggtgggcgtgcagctgcccaggaacaccaccagctatgtgctgcggggcctggagcccggccaggagtacaacgtgctgctgacagctgagaagggccgccacaagagcaagccagcccgggtgaaggccagcacagccatgggcagccccaaggaggtgatcttcagtgacatcacagagaacagcgccaccgtgtcctggagggcccccacagcccaggtggagagcttccgcatcacctacgtgcccatcactggaggcacccccagcatggtgacagtggatggcaccaagacccagacccggctggtgaagctgatccctggggtggagtacctggtgtccatcatcgccatgaagggctttgaggagagcgagcctgtgtctggcagcttcaccacagccctggatggccccagcggcctggtgacagccaacatcacagacagcgaggccctggcccgctggcagcctgccatcgccaccgtggacagctatgtgatctcctacacaggagagaaggtgcctgagatcaccaggacagtgtctggcaacacagtggagtatgccctgacagacctggagcccgccacagagtacaccctgcgcatctttgctgagaagggcccccagaagagcagcaccatcacagccaagttcaccacagacctggacagcccccgggacctgacagccacagaggtgcagagcgagacagccctgctgacctggaggcctccccgggcctctgtgacaggctacctgctggtgtatgagagcgtggatggcaccgtgaaggaggtgattgtgggccctgacaccaccagctacagcctggccgacctgagccccagcacccactacacagccaagatccaggccctgaatggccccctgcggagcaacatgatccagaccatcttcaccaccatcggcctgctgtaccccttccccaaggactgcagccaggccatgctgaatggagacaccaccagcggcctgtacaccatctacctgaatggagacaaggccgaggccctggaggtgttctgtgacatgaccagtgatggcggcggctggatcgtgttcctgcggaggaagaatggaagagagaacttctaccagaactggaaggcctatgctgctggctttggagacagaagagaggagttctggctgggcctggacaacctgaacaagatcacagcccagggccagtatgagctgcgggtggacctgcgggaccacggggagacagcctttgctgtgtatgacaagttctctgtgggagatgccaagacccgctacaagctgaaggtggagggctacagcggcacagctggggacagcatggcctaccacaacggccgctccttcagcacctttgacaaggacacagacagcgccatcaccaactgtgccctgagctacaagggggccttctggtacagaaactgccaccgggtgaacctgatgggccgctatggagacaacaaccacagccagggcgtgaactggttccactggaagggccacgagcacagcatccagtttgctgagatgaagctgcggcccagcaacttcaggaacctggagggccgcaggaagagggcctag

SEQ ID NO: 271484 - DNA, 279 bp, Artificial Sequence
  derived and/or modified sequence
atgggcgccatgacccagctgctggccggggtcttcctggccttcctggccctggccacagagggcggcgtgctgaagaaggtgatccgccacaagaggcagagcggcgtgaatgccaccctgcctgaggagaaccagcctgtggtgttcaaccacgtgtacaacatcaagctgcctgtgggcagccagtgcagcgtggacctggagagcgccagcggggagaaggacctggcccctccttctgagcccagcgagagcttccaggagcacacagtgtag

SEQ ID NO: 271485 - DNA, 4695 bp, Artificial Sequence
  derived and/or modified sequence
atgggcgccatgacccagctgctggccggcgtgttcctggccttcctcgctctcgcgaccgagggcggagtgctgaagaaggtaattcgccacaaacggcagtctggcgtcaacgccactcttcccgaagaaaatcagcccgtggtgttcaaccatgtgtataatatcaaactgccagtggggtcccagtgtagtgtggaccttgaatcggcttctggagagaaggacctggcccctcccagcgagccttctgagagcttccaggaacacactgtcgacggcgagaatcagatagtgttcacacaccgtattaacatcccacgccgcgcttgcggctgcgctgccgcccctgacgttaaagagctgctgtcaagactggaggaacttgaaaacctggtctcttcgctaagagaacaatgcacggctggtgcgggatgttgtctgcagccagcaaccggccgtctggatactagacccttttgcagcggacgggggaactttagcaccgagggctgtggatgcgtgtgcgaaccaggttggaagggacccaactgttccgagcccgagtgcccgggcaactgccacttacgtggtagatgcattgatggacaatgcatctgtgatgacggattcaccggcgaagactgcagccagttggcttgtccatctgactgcaacgaccagggaaagtgtgtgaacggggtgtgcatctgctttgagggttacgctggcgccgactgctctcgggagatatgcccagtcccatgcagcgaggagcacggtacctgcgtggatggactgtgtgtctgtcatgatgggttcgccggtgacgactgtaacaagcccctgtgcctcaacaactgctataacagagggagatgtgtggaaaatgagtgtgtttgcgatgagggattcactggtgaagattgctctgagcttatttgcccaaatgattgttttgatcggggacggtgtattaacggtacatgctactgtgaggagggtttcaccggagaagactgcggaaaacccacctgccctcacgcttgtcatactcagggccgatgcgaagagggccaatgtgtatgtgacgaagggttcgccggagtggattgtagcgaaaagagatgccccgccgactgccacaaccgcggacggtgtgtggacggtcggtgcgaatgcgacgacggtttcacaggggcagattgcggcgaattgaagtgcccaaacggctgttcaggacacggacgatgcgtaaacggtcagtgcgtttgcgatgaggggtacactggtgaggactgctctcagctcaggtgccccaatgattgccacagccgtgggaggtgcgtggagggcaagtgcgtgtgtgaacagggtttcaagggctatgactgttctgacatgtcttgccctaatgactgtcaccagcacggtcggtgcgttaatggaatgtgtgtctgtgacgacggatacactggtgaggactgtagggaccggcagtgccccagagattgctccaataggggcctttgtgtcgacggacaatgtgtgtgcgaagatgggtttacaggaccggactgcgcagagctcagttgtcccaacgattgccacgggcaggggcgctgcgttaatgggcaatgtgtgtgccacgaggggtttatgggcaaggattgcaaggagcagcgctgtcccagtgattgccacggacagggaaggtgcgttgacggacagtgtatatgccacgaagggtttactggattggactgcggtcagcactcatgcccatccgattgtaataatttaggccagtgtgtgagtgggagatgtatctgcaacgagggatacagcggcgaagactgctccgaggtgagtccccccaaggaccttgtggtgacagaggtcactgaggagactgtaaaccttgcctgggataatgagatgagagtgacagagtacctcgtcgtgtatacacccacccacgaaggaggtttggagatgcagttcagggtgcccggcgatcagacttcgacaataattcaggagctggaacctggggttgaatacttcatcagagtgttcgccatactagagaataagaagagtattcccgtgagcgccagggtcgcaacataccttcccgcgccagaaggccttaaattcaaaagtattaaagaaacctctgttgaagtcgagtgggaccctcttgacatcgcattcgagacttgggagattatcttcagaaacatgaacaaagaggatgaaggcgagatcactaagtcactacggcgtcccgaaactagttaccgccagactggcctggcccccgggcaagaatacgaaatatcccttcatattgtcaaaaacaatacaaggggccccggcctcaaacgagttacgaccaccagacttgatgcacctagccaaattgaggtaaaagatgtgactgataccaccgccctaatcacatggttcaaaccccttgccgagatcgatgggatagaactgacatacggaattaaggacgtgcccggggaccggaccacaatcgatctcactgaggatgaaaatcagtacagcattggaaacttaaagccagacactgaatacgaagtctcgttgatcagccgccgcggcgatatgagtagcaatccagcaaaagaaaccttcactacaggcctcgacgcaccccgaaacctccgccgggtctcgcaaaccgacaactcaatcactctagaatggcggaatggtaaagctgcaatagactcttatcgcattaagtacgcacctatttcgggcggagaccatgcagaagtcgacgtcccgaagtcccagcaggcaacgacaaagactacgcttacaggcttgagacccggaactgaatacggtataggcgttagcgcagttaaggaggataaggagtccaaccccgccaccattaatgccgcaaccgaattagacacacccaaagacctgcaagtttccgagacagcggaaaccagcctcaccctgttgtggaaaactcctctggccaagtttgataggtatcgtttaaactactctctgcccactggccagtgggtgggggtgcagctcccacggaataccacatcgtacgtactcagagggctggaacccggtcaggagtataacgttcttctgacagccgaaaaaggtaggcataagtcgaagccggccagagtgaaggccagcactgcaatggggtcgcccaaagaagtgatcttctctgacatcacggagaattctgcaactgtttcatggcgagccccaacagctcaagtcgaaagcttcaggatcacatacgtgcccataaccgggggaaccccaagtatggtgaccgttgacggcaccaagactcagacccgcttggtaaaattgattcccggcgttgagtacctagtctcaataatagcgatgaaagggtttgaagaatccgagcccgtgagtgggtcctttacaactgccctggacggtccttccggcttggtaacagcgaacattaccgactcggaggctctcgcaagatggcagcccgcgatcgcaaccgttgactcttatgttattagctacactggcgaaaaggtgcccgagatcactcggaccgtgagcggaaacaccgtggaatacgccctgactgatttggagccagcaactgagtataccctgagaatcttcgctgagaagggtcctcagaagagtagcaccataacagctaagtttactactgacctggattcacctcgagacctgaccgccaccgaagttcagtcagaaactgccttgctgacttggcgtccgcctcgggcatccgtgactggctatcttcttgtgtatgaatccgttgatggaacagtaaaggaagtcattgtaggcccggatacaactagctacagcctggccgacctgtcaccaagcacccactacaccgcaaagatccaggctctcaacggacctttgagatcaaacatgatccagacaatattcactactatcggattgctctacccatttcctaaagactgttcccaagctatgcttaatggagacactacctcgggactgtacactatttacctgaatggggacaaagcagaggccctcgaggtgttttgtgacatgactagcgacgggggcggttggatagttttcttgagacgaaaaaacggcagagaaaatttctaccaaaattggaaagcctacgccgctgggtttggtgaccgacgggaggaattttggttaggactggacaatctgaacaaaattactgcacaaggacagtatgaactgagggtcgacctgcgggatcacggcgagacagccttcgcggtgtacgataagttttccgtgggggacgccaagaccagatacaagctcaaggtggaaggctactccgggacagccggggacagcatggcctaccacaacggccgctctttcagcacattcgacaaggataccgacagcgccataacaaactgcgccttgtcgtacaaaggggctttctggtatcggaattgtcaccgcgtgaacctgatgggtaggtatggtgacaacaatcactcacaaggagttaattggttccactggaagggccatgaacatagtatccagttcgccgaaatgaagcttaggcctagcaactttcggaacctggagggccgcagaaagcgtgcatag

SEQ ID NO: 271486 - DNA, 279 bp, Artificial Sequence
  derived and/or modified sequence
atgggcgccatgacccagctgctggccggcgtgttcctggccttcctcgctctggcgacggaggggggggtattaaagaaagttatcaggcataagagacagagcggcgtcaatgcaaccctgcctgaagagaatcagcccgtcgtcttcaaccatgtttataatatcaaacttcctgtagggtctcagtgctccgtggatctggagagcgcgtctggggaaaaagacctcgcgcctccctcagagcccagcgaaagtttccaggagcacaccgtatag

SEQ ID NO: 271487 - DNA, 4695 bp, Artificial Sequence
  derived and/or modified sequence
atgggcgctatgactcagctgttggcaggcgtgttcttggcttttctggctctggctaccgagggtggcgtgctcaagaaggtaattcgacacaaaaggcagtccggggtgaacgcaacactgcctgaggaaaatcagccagttgtgtttaaccatgtttacaacattaagttgcctgtaggcagtcaatgcagtgtggatctggaatcagctagtggagaaaaggatctcgcaccaccgtccgagccaagcgagtcttttcaagaacatacagtcgatggcgaaaatcaaatcgtgtttacccatcgaatcaacatccccagaagggcctgtgggtgcgccgctgctccagacgtcaaagagttgctctctcggttggaagagcttgaaaacctggtgtcaagcctgcgagagcaatgcaccgccggtgcagggtgctgcttgcagccagcgactggcagactggatacccggccattttgtagtgggagaggaaactttagcaccgaggggtgcggctgcgtatgtgaaccaggatggaagggccctaactgctcggaaccagagtgtcctggtaattgtcatctaagaggacgctgcatcgatggccaatgcatctgtgatgacggctttacaggagaggattgcagtcagttggcttgtccctctgattgcaatgatcaaggaaagtgcgtgaatggggtctgcatctgtttcgagggatacgccggagccgactgctcccgtgagatttgtcctgtgccttgctctgaggagcatggcacctgtgtcgatggcctctgtgtgtgtcacgacggatttgctggggatgattgtaacaagcctctttgcctgaataactgttataatagaggtcggtgcgtcgagaatgagtgcgtctgtgacgagggctttacaggtgaggactgttccgagctcatctgtccaaatgattgcttcgatagaggccgatgcatcaacgggacttgctactgtgaggaaggctttaccggagaggactgtggcaaacccacttgcccccacgcctgccacacacaaggtcgctgcgaagagggacagtgtgtatgcgacgaggggtttgctggagtggattgttccgagaaaaggtgtcccgcagactgccacaaccggggaagatgtgtggacgggagatgcgagtgcgacgacgggttcactggggcagactgcggagaacttaaatgccctaatggctgtagtggtcatgggcgatgcgtgaatgggcagtgcgtgtgcgatgaaggatataccggggaggactgctcccagctgaggtgtcccaacgactgccatagtcggggaaggtgtgtggaggggaaatgcgtttgcgagcagggattcaagggctatgattgctctgatatgtcatgtccgaacgactgtcaccagcacggcaggtgcgtaaatggaatgtgcgtgtgcgatgacggctatactggcgaagattgccgggaccgtcagtgccctagagattgttccaaccgcggactctgcgtagacggccaatgcgtctgcgaagatggattcaccggaccagactgtgcggagctctcttgccctaatgactgccatggtcagggcaggtgtgtaaatggccagtgcgtgtgtcatgaaggctttatgggaaaggattgtaaagagcagcgttgtcccagcgactgccatgggcagggtagatgcgtggacggacaatgtatctgtcatgaaggcttcacgggcctcgattgtgggcaacacagctgcccttccgattgcaacaacctgggccagtgcgtgagcgggcgatgtatctgtaatgagggttattctggagaagattgctccgaggtgagcccccctaaagatctggtagtgaccgaggtcacggaagaaaccgtcaatcttgcctgggacaacgagatgagagtgacagaataccttgtggtttacaccccaacccacgaggggggtcttgagatgcagtttcgggtgcctggtgatcagacgagtacgatcatccaggaactggagcccggtgtcgagtactttattagggttttcgccatcttggaaaataagaagtctatccctgtatcagcacgcgtcgccacctatctgcctgctccagagggtctcaaatttaaaagcattaaggagaccagtgttgaggtcgaatgggatccactggatatcgcgtttgagacatgggaaattatattccggaatatgaataaagaggatgaaggtgaaattaccaagtctctgcgccgaccagagacctcctatcggcaaacgggactggccccaggacaggaatatgagatctcactccacattgtcaagaacaacactagaggtccaggcttgaaacgggttactactacacgcctcgatgcaccctcccagattgaagtgaaggatgtgaccgacacaaccgccctgatcacctggtttaaacctctggcagagattgatggcatcgagctcacctacgggatcaaagatgtacctggtgacagaaccaccatagacctcacagaagatgaaaatcagtactctatcggcaacttaaagccagacactgagtacgaggtgagtctgatcagtagacgcggagacatgtccagcaaccccgcaaaagaaactttcacaacagggttagatgcacctcgtaatctgcgccgagtttcgcagacagataattccatcactctagaatggaggaacgggaaggccgctattgattcttatcggatcaaatacgcaccaatctctggtggagaccacgctgaagtggatgtgccaaaaagccagcaagcaacgacgaagaccacactcactggcctcaggcccggaaccgagtacgggatcggcgtttcagccgtcaaggaagacaaggagtctaacccagccacaatcaatgccgctactgaactcgacactcccaaggatctccaagttagcgaaacggcggaaacctcccttaccctgctttggaagacgccattagcaaagttcgaccggtacagactgaattatagccttccgaccggacaatgggtgggagtccagctgcccagaaacacaacctcatatgtgctgagggggctggagccgggacaggaatataatgttcttttaaccgccgagaaaggtagacataaatctaagcctgccagagttaaggctagcacagcaatgggctcccccaaagaggtgattttctcagacattacagaaaattcggcaaccgtctcttggcgagccccaactgcccaggtagagtcttttcgcataacctacgtccctatcaccggcggaactccaagtatggtcactgtggatggaacaaaaacacagacgagactagtaaagcttatacccggtgtcgagtatctggtgtcaattattgcgatgaagggcttcgaggagagtgaacccgtgagtggcagtttcaccactgccctcgatggtccctccggactggtcaccgctaatattacagacagcgaggctcttgctagatggcaaccggcaattgccacggtagactcatacgtgatctcttatactggcgagaaggtccccgagattactcgcaccgtatctggcaatacggttgagtatgcactgacagatctcgaacctgccactgagtacacattgcggatctttgcggagaagggacctcagaaaagttcaactatcacagcgaagttcacaaccgatctcgacagcccaagagacctcaccgctacagaggtgcagtccgagaccgctcttcttacttggcggcctccgagagctagcgttacagggtacctgctcgtgtacgagagcgtcgatggcaccgtaaaagaggtcatcgtgggcccagatacaacatcctacagcctcgcagatttgtccccttcgactcactacactgcgaagatacaagctctcaacggccctctgagatccaatatgatacagactatctttactactatcgggctcttatatcccttccccaaggactgtagccaagcgatgctcaacggggataccactagtggactatatacgatttatctgaacggcgacaaggctgaggccttagaggtcttctgtgatatgaccagcgatggtgggggatggatcgtctttctgcggagaaagaatggccgagagaatttttaccagaactggaaagcctatgccgcagggttcggggacagaagggaggaattctggttaggcttggataacctcaacaagattacggctcaaggccagtatgagcttcgcgtggacttacgcgatcacggggaaactgcgtttgccgtctacgataagttctccgtgggagacgcaaaaacacgctacaagctgaaggtcgagggctatagcggaacagccggtgacagtatggcctaccacaacggtagaagctttagtactttcgacaaggacaccgatagtgccattaccaactgcgccctcagttacaaaggggcattttggtaccggaactgtcatagggtaaatctgatgggacgatacggggacaataaccactcacagggcgtcaactggtttcactggaagggccatgagcattccatccaattcgccgagatgaaactgagaccctccaatttccgaaacctcgagggcaggcgaaagcgcgcttag

SEQ ID NO: 271488 - DNA, 279 bp, Artificial Sequence
  derived and/or modified sequence
atgggggctatgacccaactccttgctggcgtattcctggcctttcttgccctcgccactgaaggcggtgtgttgaaaaaggtgatacgacacaagagacagtctggagtgaatgccactctgcccgaagagaaccagcctgtcgtattcaaccatgtatataacatcaagctgccagttggctcgcaatgttccgtggatctcgaaagcgcttccggggagaaagatttggctcccccatcggagccctctgagtctttccaggaacacactgtgtag

SEQ ID NO: 271489 - DNA, 4695 bp, Artificial Sequence
  derived and/or modified sequence
atgggggctatgacccagctcctggcaggtgtttttctcgcgtttttagcgttagcaaccgagggaggagtgctcaaaaaggtcatccggcataagcggcagagcggcgttaatgcaacattgcccgaggaaaatcagcccgtggtcttcaatcatgtgtacaacattaaactgccagtgggatcacagtgctctgttgatcttgagagcgctagtggggagaaggacttagctccgccctctgagcccagcgagagcttccaggaacacaccgttgatggcgagaaccaaattgtgttcactcaccgaataaatatcccccgtcgggcgtgcggatgtgccgcggcacctgatgtgaaggaactactgtcccgtcttgaagagctcgagaacctggtgagctctctccgcgagcagtgcactgccggggccggatgctgtcttcagcctgccacggggagactggacacgcgaccattctgctcaggccggggtaattttagcactgaaggatgcgggtgcgtttgcgagccaggctggaaggggcctaattgctccgaacccgaatgccccggcaactgtcacctcagagggagatgtatcgacggccagtgcatctgcgacgacggtttcaccggagaagattgttcccaactagcatgtccaagcgactgtaatgatcagggcaagtgcgttaatggagtctgtatctgtttcgaaggctatgctggcgccgactgtagccgcgagatctgtcctgtgccatgtagcgaggagcatggcacttgcgtcgatggattgtgcgtgtgtcatgacggatttgcaggggatgattgtaataaacctctctgcttaaataactgttacaatagggggagatgtgtggaaaatgagtgcgtttgtgacgagggttttactggggaggattgctccgaactcatctgtcctaacgattgcttcgaccggggaagatgcattaacggcacatgctattgtgaagagggatttacaggcgaagattgcggcaagcccacctgcccgcatgcttgccatactcagggccgctgcgaagaaggtcagtgtgtgtgtgatgagggtttcgccggagtagattgcagcgagaagcgctgccctgccgattgtcacaacaggggcagatgcgtggatggaagatgcgaatgcgacgatggtttcacgggcgcagactgtggcgagctgaaatgtccaaatggatgttctgggcatggaagatgcgtgaatggtcagtgcgtctgcgacgaaggttacactggcgaagattgttctcagctcaggtgtcctaacgattgtcactcccgcgggcgctgcgtggaaggaaagtgcgtatgtgaacagggatttaaaggctatgattgcagcgatatgagctgccccaacgactgccatcagcatggtcgatgcgtgaatggcatgtgtgtctgtgatgacggttacaccggtgaagattgccgggaccggcagtgtcctagagattgcagcaatcgcggcctttgcgttgatggccaatgtgtgtgtgaggatggattcaccgggccagattgcgccgagctctcatgtccaaacgattgccatgggcaggggcggtgtgtcaacgggcaatgtgtgtgccatgaggggtttatggggaaggactgcaaggagcagaggtgtccgagtgactgtcacggtcagggacgctgtgtcgacgggcaatgcatctgccacgaggggtttacagggctcgactgcggccagcactcttgtccgtcagactgtaacaacctcggtcagtgtgtctctggccggtgcatttgcaacgagggctacagcggggaggattgttccgaggtgtcaccccccaaagatttggtggttacagaagttaccgaggaaactgtgaacctagcctgggataacgagatgagagtcactgagtacctggttgtgtacacaccgacccacgaaggtggactggagatgcagtttcgagtgccaggcgaccagacatctactattatccaggagcttgaacctggtgtggaatactttattcgcgtgttcgcgatactcgaaaacaaaaaaagcatcccagtgtccgcaagagtcgcaacgtacttacccgcacctgaggggctgaaatttaaatccatcaaagagacttcagtagaggtggagtgggacccattagacatcgctttcgagacttgggagatcatcttcagaaacatgaacaaagaggatgagggcgagattaccaagtctttaaggagaccagagacatcataccggcaaacaggtcttgctccaggccaggagtatgaaatcagtctccacattgttaaaaataatactcgaggcccaggtttaaaaagggttacaacaactcgtctggacgctccatcccaaatagaggtaaaagacgtaacagatacaactgcgctgattacatggtttaaaccactggcagagattgatggaatcgagttgacatacgggatcaaagacgtcccaggggatcggaccaccatcgatctcaccgaggacgaaaatcagtacagtatcggaaacttgaagcctgacactgagtatgaggtctccctcatcagccggcgcggggatatgtcttcaaatcctgctaaggagaccttcacaacaggcctggacgctcctcgaaacttgagaagggtgagtcagactgacaactccatcacattggagtggagaaatgggaaagcagcaattgacagctataggataaagtacgctcctatcagtggtggtgatcacgccgaggttgatgtgccaaaatcacagcaagcaaccactaaaacaacgttgaccggacttcgtccaggtacggaatatggaattggggtcagtgccgtcaaggaggacaaggagtccaatcctgctacaatcaacgcagcaacagagctcgatactcctaaggacctgcaggtgtctgagaccgccgaaacttccctcaccttgctgtggaagacccccctggctaaattcgatcgatatagactgaattacagcttgccaaccggacaatgggtgggagtgcagctgccaaggaacaccacctcatacgtcctacgaggcctggagcctggccaggaatataatgtgcttctgacagctgagaagggacgtcacaagtctaagcccgcaagagtcaaggccagtacagccatgggcagccctaaagaagtgatattcagtgacataacggaaaattcggctactgtatcttggcgcgccccaacagcgcaggtggagagcttcagaatcacgtacgtccctattaccgggggtacaccctccatggtgaccgtagacggcactaagacacagaccagactcgtgaagcttatccctggggtcgagtacctggtgagtataatagccatgaaggggttcgaagaaagcgaaccggtgagtggatcctttacgacagccctggacggccccagtggcctggtcaccgctaatattacagatagtgaagccctggctcggtggcagcccgccattgcaaccgtagacagctatgtgataagctacaccggggagaaggtgcccgagatcacaaggaccgtgtcaggaaacactgtggagtacgctctcactgacctcgaaccagccaccgaatacacgctgcgaatcttcgccgaaaagggccctcaaaaaagctctactattaccgccaaattcacaactgatcttgacagtcctcgggatttaacagccaccgaagttcaaagcgaaactgcccttttaacatggcgtccacccagagcatctgtgaccggatacctgctggtctacgagagcgtggatgggacagtgaaggaggtcattgtgggccccgacactacatcctattccctggcggacctatcacctagtactcattatacagcaaaaattcaagccctgaatggccccctgagaagtaacatgatccagacaattttcactacaataggccttctgtatccatttccaaaagattgttcacaggcaatgctgaatggggatacaacctcgggtctctacactatttatttaaacggggataaggcggaggccctggaggttttttgcgacatgacatccgatgggggaggatggatcgtgtttctccggcgaaagaacggcagggagaacttctaccagaattggaaagcatatgccgccggtttcggggatcgcagagaagaattttggctgggacttgacaatctgaacaaaatcactgcccaaggccagtacgagctgcgcgtggatttgcgagaccacggagaaactgccttcgcagtctacgataagttttcggttggggacgcaaagactaggtacaagctgaaagttgagggctatagtggaaccgccggagattccatggcctatcataacggacgatcgttctcaacctttgacaaggataccgactcggctatcacgaactgcgcgctgagctataaaggggccttctggtatagaaattgccatcgcgtgaacctcatgggtcgctatggtgacaacaatcacagccaaggcgttaattggtttcactggaagggtcatgagcatagcattcagtttgctgaaatgaaactgcggcctagcaatttcagaaatctagagggcagaagaaagcgcgcttag

SEQ ID NO: 271490 - DNA, 279 bp, Artificial Sequence
  derived and/or modified sequence
atgggtgcaatgacacagcttttggcaggcgtttttctcgcgttcctagccttggcgaccgaagggggagtccttaagaaagtgatccgacacaaaagacagtctggcgttaatgcaacactccctgaggagaaccaaccagtggtcttcaaccacgtatataatatcaagctgccagtgggatcccaatgctccgtggatctggaatctgcttcaggggagaaagacctggcgccgccttcagagccatctgaatccttccaggaacataccgtctag

SEQ ID NO: 271491 - DNA, 4695 bp, Artificial Sequence
  derived and/or modified sequence
atgggcgcaatgacgcagttactggctggggtcttcctggcctttctggcattggccacagaagggggggtgttgaagaaggttattcgacataaacgccaaagtggagttaatgcaaccttacctgaagaaaaccagcctgtcgtctttaaccatgtatataacattaagcttccagtgggcagccagtgcagtgttgatttagagtctgcaagcggggaaaaagacctagcacccccgtccgaacctagtgagtcgtttcaggagcatacggttgacggagagaatcaaattgttttcacccatagaatcaatatccctagacgcgcatgtggatgcgccgcagcccctgatgtcaaagaacttctgtcaaggctagaggaattggaaaacctggtaagctcattacgcgagcagtgtacagccggagccggatgctgtctgcaaccggccaccgggagattggatacgagaccattctgctccgggcggggtaacttttctaccgagggttgcggctgtgtgtgcgaacctggttggaagggtcctaactgcagcgaacccgaatgccctggcaattgtcacctcagaggtaggtgtatcgacggccaatgcatctgcgacgacggctttacgggagaggattgtagccaactcgcttgccccagcgattgtaacgatcaggggaaatgcgtgaacggcgtgtgcatttgtttcgaagggtatgccggagccgattgcagccgggaaatatgtcctgttccatgctcggaagaacacggtacatgtgtggatggtttatgtgtgtgtcacgatggtttcgccggagatgactgtaacaagccactttgtcttaataactgctacaataggggacgatgcgtagagaacgagtgcgtatgcgacgagggctttacaggcgaagattgttccgaattgatttgccctaatgactgcttcgataggggccggtgtatcaacggcacttgttattgcgaggaaggtttcacaggagaagattgtggcaagcctacctgcccgcacgcatgtcacacccaggggcggtgtgaggaaggccagtgtgtgtgcgatgaaggttttgcaggtgtggattgtagcgaaaagagatgtcccgccgactgccataataggggaagatgtgtggatggaaggtgtgaatgcgatgatgggttcactggcgccgactgcggagagcttaaatgccctaatggctgttcgggccatggccgatgtgtaaatggccagtgcgtttgcgacgagggatacacaggagaggactgctcacagttacggtgtccaaacgactgccacagtagggggaggtgtgtagagggcaaatgtgtatgtgaacagggtttcaaaggctacgattgctcagatatgagttgtccaaatgactgtcaccagcacggccgctgcgtaaatggcatgtgcgtatgcgacgacggttacacaggagaagattgtagagatagacagtgtcccagagattgcagcaacagaggtttatgtgttgacggacaatgtgtgtgcgaggacggctttacaggaccggactgtgcggaactctcctgccctaatgattgccatggtcagggaagatgcgtaaacggacaatgcgtgtgccacgagggcttcatgggcaaggactgtaaggaacagagatgcccctcggactgtcatgggcagggtcgctgtgtggacgggcagtgtatctgccacgaaggtttcaccgggctggattgcggacaacactcttgtccttccgattgtaacaacctgggacaatgtgtgtcagggagatgcatatgcaatgagggatatagtggcgaggattgtagtgaagtcagccctccaaaggacctggtggtaacagaggtgacggaggagacagttaatctggcctgggataatgaaatgcgagttactgagtacctcgtagtgtacacaccaacgcacgaaggcggactggaaatgcaatttcgcgttccaggggaccaaacatcaacaatcatacaggagctggaacccggcgttgagtattttattcgtgtgtttgcaatactcgagaacaaaaagagcatacctgtgtccgcccgcgttgcgacttatttgccagccccggaaggactaaaatttaaatctatcaaggaaactagtgtcgaggttgaatgggaccccttggatatagcgtttgagacgtgggagattatcttcaggaacatgaacaaggaagatgaaggagagattactaagagtttacgaaggcctgaaacctcctaccggcagaccggtttagccccaggacaggagtacgagatcagtttacatattgtcaagaacaatactcgggggcccggactcaagagagttaccactactcgccttgacgctcctagtcagatcgaagtaaaagatgttacagacacaactgctctgattacatggttcaagccactggccgaaatcgacggcatcgagctcacatatggaataaaggatgtgcccggcgatcggaccacaatcgaccttacggaagacgagaaccaatactccattggaaacctaaagccagacacagaatacgaggtgtcgctgatctcaaggcggggagatatgtcaagcaatccagctaaggagaccttcacaactggccttgatgctcctagaaacctcagaagggtgtcacagacagacaactccattaccctagagtggcggaacgggaaagctgccatagacagttatcgaatcaaatacgccccaatctcaggtggtgaccacgccgaagtcgatgtgccaaaatcccaacaggcgacgactaagactacactaaccggactgcgccctggcactgagtacggcattggcgtgagtgccgttaaagaagacaaagagtctaatccagcaacaatcaacgcggccacagagttagacaccccaaaagacttacaggtgagtgagacagctgaaacttctttaaccttactatggaaaacccctctcgcaaaattcgataggtaccggctgaattactctctgcccacaggacaatgggtgggcgttcagctacctcgcaataccacaagttacgttctaagggggctggaaccaggccaggagtataatgtcctgctcacagcagagaaaggccgtcataaatctaagccagccagggtgaaggctagcaccgcaatgggaagtcctaaagaagtgatcttctccgatatcaccgagaacagtgctactgtcagctggcgcgcccccaccgcacaggtcgaaagctttagaattacatacgtccccattactggcggaactcccagcatggttacagtggacggcaccaagacccagactcgcttggtaaagctcattccgggtgtcgaatacctagtgtcaataatcgccatgaagggttttgaagaatccgaacccgtgtcaggctcctttacgactgccctggacggacccagtggcctggtgacagcaaatattaccgactccgaagctctggcaaggtggcagccagccatcgcaactgtggattcctacgtgattagctacaccggcgaaaaagtccccgaaatcacacgaacagttagcggtaataccgttgagtatgcattgacagaccttgagccagctactgagtatacattgaggatctttgccgaaaaggggcctcagaaatcatctacgataacggcgaaatttactaccgatctggactccccacgagacctgacagcaacagaagttcagtccgagaccgcactgctgacttggagacctcctcgagcatccgtgacaggatacctgcttgtttatgagtccgtggatggcaccgtcaaggaggtaatagtcggtcccgataccacttcatacagcctagccgatttaagtccgtcaacccactatacagcaaagatacaggcactcaatggcccgctaagatccaacatgatacaaacaatttttaccacaattggtttgttataccccttccctaaagactgcagccaggccatgttgaacggagatactacatctggattgtacacgatttacttgaatggggataaggctgaagccctggaggtgttctgcgatatgactagtgatggcggaggttggattgtgttcctccgaaggaagaacggccgcgagaatttttaccaaaattggaaagcttatgccgctgggttcggagacaggagagaggagttctggctaggactagataacttgaataagataacagctcaaggacaatacgaattgcgggtggacctgcgggatcatggagagacagcctttgctgtttacgacaaattttccgttggggacgctaagacaagatacaaactgaaggtggaggggtatagcggaactgcaggggattctatggcctatcataatggccgatcgttctcaacctttgataaggatacagacagcgccatcactaactgtgctctgagctacaagggcgcattttggtaccgcaactgtcaccgagtcaacctgatgggccggtacggcgataacaatcattcacaaggcgtaaactggtttcattggaagggacatgaacacagtatacagtttgccgagatgaaactacgacctagcaacttccgtaacctcgagggacgtcgaaaacgcgcgtag

SEQ ID NO: 271492 - DNA, 5687 bp, Artificial Sequence
  derived and/or modified sequence
attacagaggaaggagctcgctatataagccagccaaagttggctgcaccggccacagcctgcctactgtcacccgcctctcccgcgcgcagatacacgcccccgcctccgtgggcacaaaggcagcgctgctggggaactcgggggaacgcgcacgtgggaaccgccgcagctccacactccaggtacttcttccaaggacctaggtctctcgcccatcggaaagaaaataattctttcaagaagatcagggacaactgatttgaagtctactctgtgcttctaaatccccaattctgctgaaagtgagataccctagagccctagagccccagcagcacccagccaaacccacctccaccatgggggccatgactcagctgttggcaggtgtctttcttgctttccttgccctcgctaccgaaggtggggtcctcaagaaagtcatccggcacaagcgacagagtggggtgaacgccaccctgccagaagagaaccagccagtggtgtttaaccacgtttacaacatcaagctgccagtgggatcccagtgttcggtggatctggagtcagccagtggggagaaagacctggcaccgccttcagagcccagcgaaagctttcaggagcacacagtggatggggaaaaccagattgtcttcacacatcgcatcaacatcccccgccgggcctgtggctgtgccgcagcccctgatgttaaggagctgctgagcagactggaggagctggagaacctggtgtcttccctgagggagcaatgtactgcaggagcaggctgctgtctccagcctgccacaggccgcttggacaccaggcccttctgtagcggtcggggcaacttcagcactgaaggatgtggctgtgtctgcgaacctggctggaaaggccccaactgctctgagcccgaatgtccaggcaactgtcaccttcgaggccggtgcattgatgggcagtgcatctgtgacgacggcttcacgggcgaggactgcagccagctggcttgccccagcgactgcaatgaccagggcaagtgcgtaaatggagtctgcatctgtttcgaaggctacgccggggctgactgcagccgtgaaatctgcccagtgccctgcagtgaggagcacggcacatgtgtagatggcttgtgtgtgtgccacgatggctttgcaggcgatgactgcaacaagcctctgtgtctcaacaattgctacaaccgtggacgatgcgtggagaatgagtgcgtgtgtgatgagggtttcacgggcgaagactgcagtgagctcatctgccccaatgactgcttcgaccggggccgctgcatcaatggcacctgctactgcgaagaaggcttcacaggtgaagactgcgggaaacccacctgcccacatgcctgccacacccagggccggtgtgaggaggggcagtgtgtatgtgatgagggctttgccggtgtggactgcagcgagaagaggtgtcctgctgactgtcacaatcgtggccgctgtgtagacgggcggtgtgagtgtgatgatggtttcactggagctgactgtggggagctcaagtgtcccaatggctgcagtggccatggccgctgtgtcaatgggcagtgtgtgtgtgatgagggctatactggggaggactgcagccagctacggtgccccaatgactgtcacagtcggggccgctgtgtcgagggcaaatgtgtatgtgagcaaggcttcaagggctatgactgcagtgacatgagctgccctaatgactgtcaccagcacggccgctgtgtgaatggcatgtgtgtttgtgatgacggctacacaggggaagactgccgggatcgccaatgccccagggactgcagcaacaggggcctctgtgtggacggacagtgcgtctgtgaggacggcttcaccggccctgactgtgcagaactctcctgtccaaatgactgccatggccagggtcgctgtgtgaatgggcagtgcgtgtgccatgaaggatttatgggcaaagactgcaaggagcaaagatgtcccagtgactgtcatggccagggccgctgcgtggacggccagtgcatctgccacgagggcttcacaggcctggactgtggccagcactcctgccccagtgactgcaacaacttaggacaatgcgtctcgggccgctgcatctgcaacgagggctacagcggagaagactgctcagaggtgtctcctcccaaagacctcgttgtgacagaagtgacggaagagacggtcaacctggcctgggacaatgagatgcgggtcacagagtaccttgtcgtgtacacgcccacccacgagggtggtctggaaatgcagttccgtgtgcctggggaccagacgtccaccatcatccaggagctggagcctggtgtggagtactttatccgtgtatttgccatcctggagaacaagaagagcattcctgtcagcgccagggtggccacgtacttacctgcacctgaaggcctgaaattcaagtccatcaaggagacatctgtggaagtggagtgggatcctctagacattgcttttgaaacctgggagatcatcttccggaatatgaataaagaagatgagggagagatcaccaaaagcctgaggaggccagagacctcttaccggcaaactggtctagctcctgggcaagagtatgagatatctctgcacatagtgaaaaacaatacccggggccctggcctgaagagggtgaccaccacacgcttggatgcccccagccagatcgaggtgaaagatgtcacagacaccactgccttgatcacctggttcaagcccctggctgagatcgatggcattgagctgacctacggcatcaaagacgtgccaggagaccgtaccaccatcgatctcacagaggacgagaaccagtactccatcgggaacctgaagcctgacactgagtacgaggtgtccctcatctcccgcagaggtgacatgtcaagcaacccagccaaagagaccttcacaacaggcctcgatgctcccaggaatcttcgacgtgtttcccagacagataacagcatcaccctggaatggaggaatggcaaggcagctattgacagttacagaattaagtatgcccccatctctggaggggaccacgctgaggttgatgttccaaagagccaacaagccacaaccaaaaccacactcacaggtctgaggccgggaactgaatatgggattggagtttctgctgtgaaggaagacaaggagagcaatccagcgaccatcaacgcagccacagagttggacacgcccaaggaccttcaggtttctgaaactgcagagaccagcctgaccctgctctggaagacaccgttggccaaatttgaccgctaccgcctcaattacagtctccccacaggccagtgggtgggagtgcagcttccaagaaacaccacttcctatgtcctgagaggcctggaaccaggacaggagtacaatgtcctcctgacagccgagaaaggcagacacaagagcaagcccgcacgtgtgaaggcatccactgccatgggctccccaaaggaagtcattttctcagacatcactgaaaattcggctactgtcagctggagggcacccacagcccaagtggagagcttccggattacctatgtgcccattacaggaggtacaccctccatggtaactgtggacggaaccaagactcagaccaggctggtgaaactcatacctggcgtggagtaccttgtcagcatcatcgccatgaagggctttgaggaaagtgaacctgtctcagggtcattcaccacagctctggatggcccatctggcctggtgacagccaacatcactgactcagaagccttggccaggtggcagccagccattgccactgtggacagttatgtcatctcctacacaggcgagaaagtgccagaaattacacgcacggtgtccgggaacacagtggagtatgctctgaccgacctcgagcctgccacggaatacacactgagaatctttgcagagaaagggccccagaagagctcaaccatcactgccaagttcacaacagacctcgattctccaagagacttgactgctactgaggttcagtcggaaactgccctccttacctggcgacccccccgggcatcagtcaccggttacctgctggtctatgaatcagtggatggcacagtcaaggaagtcattgtgggtccagataccacctcctacagcctggcagacctgagcccatccacccactacacagccaagatccaggcactcaatgggcccctgaggagcaatatgatccagaccatcttcaccacaattggactcctgtaccccttccccaaggactgctcccaagcaatgctgaatggagacacgacctctggcctctacaccatttatctgaatggtgataaggctgaggcgctggaagtcttctgtgacatgacctctgatgggggtggatggattgtgttcctgagacgcaaaaacggacgcgagaacttctaccaaaactggaaggcatatgctgctggatttggggaccgcagagaagaattctggcttgggctggacaacctgaacaaaatcacagcccaggggcagtacgagctccgggtggacctgcgggaccatggggagacagcctttgctgtctatgacaagttcagcgtgggagatgccaagactcgctacaagctgaaggtggaggggtacagtgggacagcaggtgactccatggcctaccacaatggcagatccttctccacctttgacaaggacacagattcagccatcaccaactgtgctctgtcctacaaaggggctttctggtacaggaactgtcaccgtgtcaacctgatggggagatatggggacaataaccacagtcagggcgttaactggttccactggaagggccacgaacactcaatccagtttgctgagatgaagctgagaccaagcaacttcagaaatcttgaaggcaggcgcaaacgggcataaattccagggaccactgggtgagagaggaataaggcccagagcgaggaaaggattttaccaaagcatcaatacaaccagcccaaccatcggtccacacctgggcatttggtgagagtcaaagctgaccatggatccctggggccaacggcaacagcatgggcctcacctcctctgtgatttctttctttgcaccaaagacatcagtctccaacatgtttctgttttgttgtttgattcagcaaaaatctcccagtgacaacatcgcaatagttttttacttctcttaggtggctctgggaatgggagaggggtaggatgtacaggggtagtttgttttagaaccagccgtattttacatgaagctgtataattaattgtcattatttttgttagcaaagattaaatgtgtcattggaagccatccctttttttacatttcatacaacagaaaccagaaaagcaatactgtttccattttaaggatatgattaatattattaatataataatgatgatgatgatgatgaaaactaaggatttttcaagagatctttctttccaaaacatttctggacagtacctgattgtattttttttttaaataaaagcacaagtacttttgagtttgtt

SEQ ID NO: 271493 - DNA, 734 bp, Artificial Sequence
  derived and/or modified sequence
ggaaggagctcgctatataagccagccaaagttggctgcaccggccacagcctgcctactgtcacccgcctctcccgcgcgcagatacacgcccccgcctccgtgggcacaaaggcagcgctgctggggaactcgggggaacgcgcacgtgggaaccgccgcagctccacactccaggtacttcttccaaggacctaggtctctcgcccatcggaaagatttctatagacacctagctgtgctttcttacaagaaaacatatccactggaccaaagcgcagcccccttcatgctgaagccacttcagtttgaaacgtaaaaaaaaataattctttcaagaagatcagggacaactgatttgaagtctactctgtgcttctaaatccccaattctgctgaaagtgagataccctagagccctagagccccagcagcacccagccaaacccacctccaccatgggggccatgactcagctgttggcaggtgtctttcttgctttccttgccctcgctaccgaaggtggggtcctcaagaaagtcatccggcacaagcgacagagtggggtgaacgccaccctgccagaagagaaccagccagtggtgtttaaccacgtttacaacatcaagctgccagtgggatcccagtgttcggtggatctggagtcagccagtggggagaaagacctggcaccgccttcagagcccagcgaaagctttcaggagcacacagtg

SEQ ID NO: 271494 - RNA, 279 nt, Artificial Sequence
  derived and/or modified sequence
augggugcaaugacacagcuuuuggcaggcguuuuucucgcguuccuagccuuggcgaccgaagggggaguccuuaagaaagugauccgacacaaaagacagucuggcguuaaugcaacacucccugaggagaaccaaccaguggucuucaaccacguauauaauaucaagcugccagugggaucccaaugcuccguggaucuggaaucugcuucaggggagaaagaccuggcgccgccuucagagccaucugaauccuuccaggaacauaccgucuag

SEQ ID NO: 271495 - DNA, 375 bp, Artificial Sequence
  derived and/or modified sequence
tgaagcgcctgcatcggcaactgcagcaccgccctggaggagctgaccgacgacatgaccgaggacttcctgcccgtgctgagagagtacatcctgtacagcgacagcatgaagagcgtgctgaagaagagagaccaggtgcaggccgagtacgaggccaagctggaggccgtggccctgagaaaggaggacagacccaaggtgcccgccgacgtggagaagtgccaggacagaatggagtgcttcaacgccgacctgaaggccgacatggagagatggcagaacaacaagagacaggacttcagacagctgctgatgggcatggccgacaagaacatccagtactacgagaagagcatcgccgacctgaagtag

SEQ ID NO: 271496 - DNA, 375 bp, Artificial Sequence
  derived and/or modified sequence
tgatcagcctgcatcggtaactgtagcaccgctctggaagaattgaccgatgacatgaccgaggactttctacctgtgttgcgcgaatatatcctctactccgactccatgaaaagcgttctgaaaaagcgtgaccaggttcaggctgagtacgaggccaagctggaggctgtggccttgcggaaggaggatcggcctaaagtgcccgcggacgttgagaagtgccaggaccgaatggaatgctttaacgccgacctgaaggccgacatggaacgctggcagaataacaagcggcaggactttcggcaactgttgatgggcatggccgataagaacatacagtattacgagaagagcattgcggacttgaagtag

SEQ ID NO: 271497 - DNA, 375 bp, Artificial Sequence
  derived and/or modified sequence
tgaagcgcctgcatcggcaactgcagcacagccctggaggagctgacagatgacatgacagaggacttcctgcctgtgctgcgggagtacatcctgtacagcgacagcatgaagtctgtgctgaagaagagggaccaggtgcaggccgagtatgaggccaagctggaggccgtggccctgaggaaagaagatcggcccaaggtgcctgcagatgtggagaagtgccaggacaggatggagtgcttcaatgctgacctgaaggctgacatggagcgctggcagaacaacaagaggcaggacttccggcagctgctgatgggcatggctgacaagaacatccagtactatgagaagagcattgctgacctgaagtag

SEQ ID NO: 271498 - DNA, 375 bp, Artificial Sequence
  derived and/or modified sequence
tgaagcgcctgcatcggcaactgcagcaccgccctggaggagctgaccgatgatatgacagaggatttcttgccggtgctcagagaatatattttgtacagcgattctatgaagagtgttcttaaaaaacgagaccaggtgcaggcagaatatgaggcaaagctcgaagctgtggcattgcggaaagaagaccggcctaaggtgccagccgacgtcgagaaatgtcaggacagaatggaatgttttaacgccgacctgaaagctgacatggagcgatggcaaaataataaaaggcaggacttccgacagcttctgatgggtatggcagacaaaaatattcagtactatgagaaatccatcgccgatttgaagtag

SEQ ID NO: 271499 - DNA, 394 bp, Artificial Sequence
  derived and/or modified sequence
tgtcagcttgcattgggaactgctctacagccttagaagagctgacagatgacatgacagaagacttcctacctgtgctcagggaatatattttatactctgactccatgaagagtgtattgaagaagagggaccaagttcaagcagagtatgaagccaaactggaagctgtggctctgcggaaggaagaccgccccaaggtaccggcggacgtcgagaaatgtcaggatcggatggagtgtttcaatgctgacctgaaagctgacatggagaggtggcagaacaacaagaggcaggacttccggcagctactcatggggatggctgacaagaacatccagtattatgagaagtccattgcagatctgaagtgatggcctagggagagagcagg

SEQ ID NO: 271500 - DNA, 375 bp, Artificial Sequence
  derived and/or modified sequence
tgaagtgcctgtattgggaactgttctacagccctcgaggagctgacagatgatatgaccgaagattttcttccagtactgcgcgagtatatactgtactccgactcaatgaagtctgttctgaagaaaagggatcaggtgcaggctgagtacgaagccaagctggaggccgtggcactgcgaaaagaagacagacctaaagttccagcggatgtggagaaatgccaagataggatggagtgtttcaatgcagatctcaaagctgatatggaaagatggcagaataacaagcggcaagatttccggcagcttctgatgggaatggcagacaagaacatacaatactatgagaagtctattgccgatcttaagtag

SEQ ID NO: 271501 - protein, 504 aa, Artificial Sequence
  derived and/or modified sequence
MSVEMDSSSFIQFDVPEYSSTVLSQLNELRLQGKLCDIIVHIQGQPFRAHKAVLAASSPYFRDHSALSTMSGLSISVIKNPNVFEQLLSFCYTGRMSLQLKDVVSFLTAASFLQMQCVIDKCTQILESIHSKISVGDVDSVTVGAEENPESRNGVKDSSFFANPVEISPPYCSQGRQPTASSDLRMETTPSKALRSRLQEEGHSDRGSSGSVSEYEIQIEGDHEQGDLLVRESQITEVKVKMEKSDRPSCSDSSSLGDDGYHTEMVDGEQVVAVNVGSYGSVLQHAYSYSQAASQPTNVSEAFGSLSNSSPSRSMLSCFRGGRARQKRALSVHLHSDLQGLVQGSDSEAMMNNPGYESSPRERSARGHWYPYNERLICIYCGKSFNQKGSLDRHMRLHMGITPFVCKFCGKKYTRKDQLEYHIRGHTDDKPFRCEICGKCFPFQGTLNQHLRKNHPGVAEVRSRIESPERTDVYVEQKLENDASASEMGLDSRMEIHTVSDAPD

SEQ ID NO: 271502 - DNA, 6564 bp, Artificial Sequence
  derived and/or modified sequence
cggggactggcctggcgccggcggcggcggagggggcgccgcgggcgggcgatgtgagcgcggcgctctggacagagtacgcttcatgtcagtagaaatggacagcagcagttttattcagtttgatgtgcccgagtacagcagcaccgttctgagccagctaaacgaactccgcctgcaggggaaactatgtgacatcattgtacacattcagggtcagccattccgagcccacaaagcagtccttgctgccagctccccatatttccgggaccattcagcgttaagtaccatgagtggcttgtcaatatcagtgattaaaaatcccaatgtgtttgagcagttgctttctttttgttacactggaagaatgtccttgcagctgaaggatgttgtcagttttctgactgcagccagctttcttcagatgcagtgtgtcattgacaagtgcacgcagatcctagagagcatccattccaaaatcagcgttggagatgttgactctgttaccgtcggtgctgaagagaatcccgagagtcgaaacggagtgaaagacagcagcttctttgccaacccagtggagatctctcctccatattgctctcagggacggcagcccaccgcaagcagtgacctccggatggagacgacccccagcaaagctttgcgcagccgcttacaggaggaggggcactcagaccgcgggagcagtgggagcgtttctgaatatgagattcagatagagggagaccatgagcaaggagacctattggtgagggagagccagatcaccgaggtgaaagtgaagatggagaagtccgaccggcccagctgttccgacagctcctccctgggtgacgatgggtaccacaccgagatggttgatggggaacaagttgtggcagtgaatgtgggctcctatggttctgtgctccagcacgcatactcctattcccaagcagcctcacagccaaccaatgtatcagaagcttttggaagtttgagtaattccagcccatccaggtccatgctgagctgtttccgaggagggcgtgcccgccagaagcgggctttgtctgtccacctgcacagtgacctgcagggcctggtgcagggctctgacagtgaagccatgatgaacaaccccgggtatgagagcagtccccgggagaggagtgcgagagggcattggtacccgtacaatgagaggttgatctgtatttactgtggaaagtccttcaaccagaaaggaagccttgataggcacatgcgactccatatgggaatcaccccctttgtgtgcaagttctgtgggaagaagtacacacggaaggaccaactggagtaccacatccggggccatacagatgataaaccattccgctgtgagatctgcgggaagtgctttccattccaaggtaccctcaaccagcacttgcggaaaaaccacccaggcgttgctgaagtcaggagtcgcattgagtcccccgagagaacagatgtgtacgtggaacagaaactagaaaatgacgcatcggcctcagagatgggcctagattcccggatggaaattcacacagtgtctgatgctcccgattaagatggtaaagaagtgcacccaaacaaagcacattaatcaatgcatatttgtgatttgctttgttgtaatctttggttttcccaaccatctggaaatctcttggtctcttggcagtttttctaaagtttctggatggaacacttcgttgtgtttatcctttcccctgccctccctccccgaaggagctcaaagcatgaagggcaacgcatccagggaaaacacaggctgacagtattcctctttggctgaactcttaatccaaaatctgccagtgatttagctatgccaactggttgaccctccattctctgccaagaggcatactctttctcattgtgtgcgctggcagcagtgcacttccacggagggagattaggatgccgtcagctgatacaaatgggtaaccttttctaatttaaaattccttttagggggtagttagacaatttatatatatatataataaaactattattatatatatagtatatatacattttcaaatttgattttattctggttgaggtgaatgtaagaggaatatataatttaatacaatgtgaacagggcttctgagtctatctcatccctacctaatatgttagggttttgccccttcatttcccttacaaaagaatgttagtaggtttatattaatcattgtgtccaaaagcaagcaaagcaaatcacagtgttcacagctctgcttcataacaaatacataaaccaaatgccataaaatttcttcaactctagttggaaaccgtttggaatttttgttagttgtccagcaggtaagctggatgacctgtggtgctgacctttttacatagtgtagtgttatattagccaaccccaaaggagcagtggttttcaaggtttttactggcctacaaatctaccttcattccgtactgtagaaacatacataccaggtaactaaatcgaatcactctctatcatgagttagtactcactcgcacttaaggaaagggatttgtagttctgtctacaaaattctccaagcagtgttgtggttttttttgtttttgttttttttctttctcttttcaaacagccagttcaggtgcacagcaactttttctacatgcagttcccagggaaactgcagaacttagaatttgtactttttgtaaagctatactctatgggaattgcaagcaatatatctatcttagtattgtgtgtgctaatgagagcctcagtggctcccccactctctcagtgtttcctgcttaaagaaccaacagtttaaaagccctctaagatactctgtgtgtcaccaaatctgtgtgtcaccattttttggtcatgtggtgctatttttgttaagtgtctttttaggtcagtatagttgtagaaaatgtgaaatctgatggtaataatgaattataattgttttcctctcttgagttcatagcttgaaaagagacctcaaaagcatgtgctggcaaacacgttactgtatgaaaacatacctgagtccatttgaataatgttttattagtactttcggaaatgtcttcagttctgtattgtgttcacatacacaaacaggctttacaagattgcttcggtactgtaaactctggcagagagtaattttgtaggcagtttggtggtgagtttgtgctgcaggctgcctgtgggatgtcagcgttctggtatctgcctgagaacctgggctctgagacgcacaaccagtgcacctccataggagaacagtgcagccacctaaaagaaaaacgaacgaaggaccagcctcagaggctagaagttaaaggaatacagaattagatgtttgctggttttctgtgcttttttggctcctaaaataccaatggtggatttgtttttgtttttgttttttgttttgagaaataaaaagtcattcaagccctttgtgtgtaatagcccccaggggtggcagctgtgcagtcgcatctctttggcacacaggatctgttcacgtgtgaactgctgcgctacacatcagtgttaactccctacagattacactctaatcccgctgctcccgaggagcggctttgctaaatcgggtatatagtatatgcctttttcctcgtcaaactgcctaagtaggggttcgttctctccctgaagcacttgttcaactcctgttaaagccgcgtgcctcaaggggaggctggaccccaagtgtttacccacttaaatatgttctggggtttcaggtaaatgtttgtgggtttttttttccttacatgaataagtttggttttgatttttttttaattgaatgcaaaaaatttgtgttgtgatacaaattaagtttgtgacaagaaatgcccaaatccaaggacataagaggtcaagctcagggaaggaacctccttttcactcaggcttggggcctccagcgaggtttccagagcattccatggtatgagagacagtgaggagggagggcacctggcgcgggcacttccagcgtcctggctcttggcattgtccgtcttaaccttatttacatggagttctttgtatttgtgaatctgtttaactggtttgagtttaccaaagagtgacttatccaaaattgtctttgacaaaaatatccattgctttgattgtacagttcaggttcaaacattgtaatgggactgttaaggggcagaaaattgattgagtttctctctaagaatcatgattccacattttgcaagttccacttgctcccattcgtgttgctaacactttaccctttccactgctcgcagtgttaagaatgaattctcaagccataacacagtactgtaaagttccgcagggcttcgagggaggcagcgcctaggccagcacggagctgtgtagcctctctgagcgttcgcactgtcatgcttcccaggggtgtgactggtgagagattaactccattcagatcgggcagcagcaattaattgtgccttgccgcatgaggatgtgtcaggaggattaacatgaccacagaaccgaaacattctctccctgaagttcacttcacgtctccgcagacgaagtacgctgtgtaactccttagagcaactctttttggaaagcaaagtccctatttctgtacagttttaggttaggtgtttcatttataacagatgcagaaatcaattaagataaagtgatatgtgaagaaatcttttacagtaaaatatatcctgaattcatataggcttgttcataattgagtctcttcttgagctaccttttcaatattagacaatgtgaagacagtgacagcgtccttttctagagatatttagcctgttattacaaactgtgaagacaaagaattttatacttttactaatgtttgtggttttaaacagttattttcattctaatcagttctctaccctctaatttctactaaagctgtaaatacatttagaaattatatttgtaaatacagtatatggagacaagttaattttttggtcagtggaaaaagcctcccaaccaattggccctgccttggcagttgtgttttttgttgttgttgttgttgttttagtttagtttttttttttaaacagcagaaaggatactgtcggttcactgttgagcagaatatactgtagaacgaaaatgataatttttaaatcttccagagcatgagtaaatgtcttttctaatgatagcaaatataaccaactctttgtttttcccttagcccagaccatatagacctgcgtattttgtgtgtggttttgtttttatttttgttcttacagcctagaccctaggaaaaatttgcaggaacacgaaacaagggctggggggaaaatcatctatgtgaatgagctttactttaaagagatcaatgtattttattttatcaactttttctcttagttactgtgatttttgttgttgttgtcctcgttattgttaaattctgtaatggtttcctgtgaagcctccactgaaagggactcaaatatgcaacacctaaactattttccaagggcacatgccccttgaatggtgcttctagactggtcagggttatttattaaattttatatatgaaagtattggggaattatgtaaattctttatatgaaactatctagttcataaatcatagatttcatattactcagtgcaactgaactaaaagttcagaaaagtcattcacattgttccaaatttgtaatggttgtcacatgtcacatgcgtctttttcagtaagtgccagagtgttcccactgtttctgcccagtgcttgacttctcggcccggaagagaacctgctttctctggtttccttcctgagtctggcacagacggggctattgtagttcttgatcaagtcctggagtcagccttgcctggctctccttgtagcagattcagtccacagacctcttgctgcccctcagtgacaagtatgctgtgaattcaacctttggacttgctgcccaagcctttggttgctgccctgactattgtaagaggtaaacttacctggtttgtttgagaatgaccattttcctaatgtgaaaaccatctctctcaccacttttattagtagggctaacatttttttccgttataaatggttgagcaatttgaatgacttaacacagtgtcattatcttgcaatataaactggtaacctcacaactccacacttcatcaccatatgaagtaaatgaagctagctaagcggatgctgtatcaactagtaacttgccattaaggattattttatagcatgaatttaagactatttattcaaatgatattttactcttgtattcactttgttttagatttgtgacatgaatatttcagtgctgcttaattttgttctgaattcttgtttcttgcttgtaaatggcttttttatggtataaataaagtcaatggacattgctgtttgtaaataaaaatgctgctagagcaaa

SEQ ID NO: 271503 - DNA, 6528 bp, Artificial Sequence
  derived and/or modified sequence
gaggagtcattggtgaatgatgcaaactctctctctccgcagagtacgcttcatgtcagtagaaatggacagcagcagttttattcagtttgatgtgcccgagtacagcagcaccgttctgagccagctaaacgaactccgcctgcaggggaaactatgtgacatcattgtacacattcagggtcagccattccgagcccacaaagcagtccttgctgccagctccccatatttccgggaccattcagcgttaagtaccatgagtggcttgtcaatatcagtgattaaaaatcccaatgtgtttgagcagttgctttctttttgttacactggaagaatgtccttgcagctgaaggatgttgtcagttttctgactgcagccagctttcttcagatgcagtgtgtcattgacaagtgcacgcagatcctagagagcatccattccaaaatcagcgttggagatgttgactctgttaccgtcggtgctgaagagaatcccgagagtcgaaacggagtgaaagacagcagcttctttgccaacccagtggagatctctcctccatattgctctcagggacggcagcccaccgcaagcagtgacctccggatggagacgacccccagcaaagctttgcgcagccgcttacaggaggaggggcactcagaccgcgggagcagtgggagcgtttctgaatatgagattcagatagagggagaccatgagcaaggagacctattggtgagggagagccagatcaccgaggtgaaagtgaagatggagaagtccgaccggcccagctgttccgacagctcctccctgggtgacgatgggtaccacaccgagatggttgatggggaacaagttgtggcagtgaatgtgggctcctatggttctgtgctccagcacgcatactcctattcccaagcagcctcacagccaaccaatgtatcagaagcttttggaagtttgagtaattccagcccatccaggtccatgctgagctgtttccgaggagggcgtgcccgccagaagcgggctttgtctgtccacctgcacagtgacctgcagggcctggtgcagggctctgacagtgaagccatgatgaacaaccccgggtatgagagcagtccccgggagaggagtgcgagagggcattggtacccgtacaatgagaggttgatctgtatttactgtggaaagtccttcaaccagaaaggaagccttgataggcacatgcgactccatatgggaatcaccccctttgtgtgcaagttctgtgggaagaagtacacacggaaggaccaactggagtaccacatccggggccatacagatgataaaccattccgctgtgagatctgcgggaagtgctttccattccaaggtaccctcaaccagcacttgcggaaaaaccacccaggcgttgctgaagtcaggagtcgcattgagtcccccgagagaacagatgtgtacgtggaacagaaactagaaaatgacgcatcggcctcagagatgggcctagattcccggatggaaattcacacagtgtctgatgctcccgattaagatggtaaagaagtgcacccaaacaaagcacattaatcaatgcatatttgtgatttgctttgttgtaatctttggttttcccaaccatctggaaatctcttggtctcttggcagtttttctaaagtttctggatggaacacttcgttgtgtttatcctttcccctgccctccctccccgaaggagctcaaagcatgaagggcaacgcatccagggaaaacacaggctgacagtattcctctttggctgaactcttaatccaaaatctgccagtgatttagctatgccaactggttgaccctccattctctgccaagaggcatactctttctcattgtgtgcgctggcagcagtgcacttccacggagggagattaggatgccgtcagctgatacaaatgggtaaccttttctaatttaaaattccttttagggggtagttagacaatttatatatatatataataaaactattattatatatatagtatatatacattttcaaatttgattttattctggttgaggtgaatgtaagaggaatatataatttaatacaatgtgaacagggcttctgagtctatctcatccctacctaatatgttagggttttgccccttcatttcccttacaaaagaatgttagtaggtttatattaatcattgtgtccaaaagcaagcaaagcaaatcacagtgttcacagctctgcttcataacaaatacataaaccaaatgccataaaatttcttcaactctagttggaaaccgtttggaatttttgttagttgtccagcaggtaagctggatgacctgtggtgctgacctttttacatagtgtagtgttatattagccaaccccaaaggagcagtggttttcaaggtttttactggcctacaaatctaccttcattccgtactgtagaaacatacataccaggtaactaaatcgaatcactctctatcatgagttagtactcactcgcacttaaggaaagggatttgtagttctgtctacaaaattctccaagcagtgttgtggttttttttgtttttgttttttttctttctcttttcaaacagccagttcaggtgcacagcaactttttctacatgcagttcccagggaaactgcagaacttagaatttgtactttttgtaaagctatactctatgggaattgcaagcaatatatctatcttagtattgtgtgtgctaatgagagcctcagtggctcccccactctctcagtgtttcctgcttaaagaaccaacagtttaaaagccctctaagatactctgtgtgtcaccaaatctgtgtgtcaccattttttggtcatgtggtgctatttttgttaagtgtctttttaggtcagtatagttgtagaaaatgtgaaatctgatggtaataatgaattataattgttttcctctcttgagttcatagcttgaaaagagacctcaaaagcatgtgctggcaaacacgttactgtatgaaaacatacctgagtccatttgaataatgttttattagtactttcggaaatgtcttcagttctgtattgtgttcacatacacaaacaggctttacaagattgcttcggtactgtaaactctggcagagagtaattttgtaggcagtttggtggtgagtttgtgctgcaggctgcctgtgggatgtcagcgttctggtatctgcctgagaacctgggctctgagacgcacaaccagtgcacctccataggagaacagtgcagccacctaaaagaaaaacgaacgaaggaccagcctcagaggctagaagttaaaggaatacagaattagatgtttgctggttttctgtgcttttttggctcctaaaataccaatggtggatttgtttttgtttttgttttttgttttgagaaataaaaagtcattcaagccctttgtgtgtaatagcccccaggggtggcagctgtgcagtcgcatctctttggcacacaggatctgttcacgtgtgaactgctgcgctacacatcagtgttaactccctacagattacactctaatcccgctgctcccgaggagcggctttgctaaatcgggtatatagtatatgcctttttcctcgtcaaactgcctaagtaggggttcgttctctccctgaagcacttgttcaactcctgttaaagccgcgtgcctcaaggggaggctggaccccaagtgtttacccacttaaatatgttctggggtttcaggtaaatgtttgtgggtttttttttccttacatgaataagtttggttttgatttttttttaattgaatgcaaaaaatttgtgttgtgatacaaattaagtttgtgacaagaaatgcccaaatccaaggacataagaggtcaagctcagggaaggaacctccttttcactcaggcttggggcctccagcgaggtttccagagcattccatggtatgagagacagtgaggagggagggcacctggcgcgggcacttccagcgtcctggctcttggcattgtccgtcttaaccttatttacatggagttctttgtatttgtgaatctgtttaactggtttgagtttaccaaagagtgacttatccaaaattgtctttgacaaaaatatccattgctttgattgtacagttcaggttcaaacattgtaatgggactgttaaggggcagaaaattgattgagtttctctctaagaatcatgattccacattttgcaagttccacttgctcccattcgtgttgctaacactttaccctttccactgctcgcagtgttaagaatgaattctcaagccataacacagtactgtaaagttccgcagggcttcgagggaggcagcgcctaggccagcacggagctgtgtagcctctctgagcgttcgcactgtcatgcttcccaggggtgtgactggtgagagattaactccattcagatcgggcagcagcaattaattgtgccttgccgcatgaggatgtgtcaggaggattaacatgaccacagaaccgaaacattctctccctgaagttcacttcacgtctccgcagacgaagtacgctgtgtaactccttagagcaactctttttggaaagcaaagtccctatttctgtacagttttaggttaggtgtttcatttataacagatgcagaaatcaattaagataaagtgatatgtgaagaaatcttttacagtaaaatatatcctgaattcatataggcttgttcataattgagtctcttcttgagctaccttttcaatattagacaatgtgaagacagtgacagcgtccttttctagagatatttagcctgttattacaaactgtgaagacaaagaattttatacttttactaatgtttgtggttttaaacagttattttcattctaatcagttctctaccctctaatttctactaaagctgtaaatacatttagaaattatatttgtaaatacagtatatggagacaagttaattttttggtcagtggaaaaagcctcccaaccaattggccctgccttggcagttgtgttttttgttgttgttgttgttgttttagtttagtttttttttttaaacagcagaaaggatactgtcggttcactgttgagcagaatatactgtagaacgaaaatgataatttttaaatcttccagagcatgagtaaatgtcttttctaatgatagcaaatataaccaactctttgtttttcccttagcccagaccatatagacctgcgtattttgtgtgtggttttgtttttatttttgttcttacagcctagaccctaggaaaaatttgcaggaacacgaaacaagggctggggggaaaatcatctatgtgaatgagctttactttaaagagatcaatgtattttattttatcaactttttctcttagttactgtgatttttgttgttgttgtcctcgttattgttaaattctgtaatggtttcctgtgaagcctccactgaaagggactcaaatatgcaacacctaaactattttccaagggcacatgccccttgaatggtgcttctagactggtcagggttatttattaaattttatatatgaaagtattggggaattatgtaaattctttatatgaaactatctagttcataaatcatagatttcatattactcagtgcaactgaactaaaagttcagaaaagtcattcacattgttccaaatttgtaatggttgtcacatgtcacatgcgtctttttcagtaagtgccagagtgttcccactgtttctgcccagtgcttgacttctcggcccggaagagaacctgctttctctggtttccttcctgagtctggcacagacggggctattgtagttcttgatcaagtcctggagtcagccttgcctggctctccttgtagcagattcagtccacagacctcttgctgcccctcagtgacaagtatgctgtgaattcaacctttggacttgctgcccaagcctttggttgctgccctgactattgtaagaggtaaacttacctggtttgtttgagaatgaccattttcctaatgtgaaaaccatctctctcaccacttttattagtagggctaacatttttttccgttataaatggttgagcaatttgaatgacttaacacagtgtcattatcttgcaatataaactggtaacctcacaactccacacttcatcaccatatgaagtaaatgaagctagctaagcggatgctgtatcaactagtaacttgccattaaggattattttatagcatgaatttaagactatttattcaaatgatattttactcttgtattcactttgttttagatttgtgacatgaatatttcagtgctgcttaattttgttctgaattcttgtttcttgcttgtaaatggcttttttatggtataaataaagtcaatggacattgctgtttgtaaataaaaatgctgctagagc

SEQ ID NO: 271504 - protein, 867 aa, Artificial Sequence
  derived and/or modified sequence
MRELVNIPLVHILTLVAFSGTEKLPKAPVITTPLETVDALVEEVATFMCAVESYPQPEISWTRNKILIKLFDTRYSIRENGQLLTILSVEDSDDGIYCCTANNGVGGAVESCGALQVKMKPKITRPPINVKIIEGLKAVLPCTTMGNPKPSVSWIKGDSPLRENSRIAVLESGSLRIHNVQKEDAGQYRCVAKNSLGTAYSKVVKLEVEVFARILRAPESHNVTFGSFVTLHCTATGIPVPTITWIENGNAVSSGSIQESVKDRVIDSRLQLFITKPGLYTCIATNKHGEKFSTAKAAATISIAEMLFISSFSKPQKDNKGYCAQYRGEVCNAVLAKDALVFLNTSYADPEEAQELLVHTAWNELKVVSPVCRPAAEALLCNHIFQECSPGVVPTPIPICREYCLAVKELFCAKEWLVMEEKTHRGLYRSEMHLLSVPECSKLPSMHWDPTACARLPHLAFPPMTSSKPSVDIPNLPSSSSSSFSVSPTYSMTVIISIMSSFAIFVLLTITTLYCCRRRKQWKNKKRESAAVTLTTLPSELLLDRLHPNPMYQRMPLLLNPKLLSLEYPRNNIEYVRDIGEGAFGRVFQARAPGLLPYEPFTMVAVKMLKEEASADMQADFQREAALMAEFDNPNIVKLLGVCAVGKPMCLLFEYMAYGDLNEFLRSMSPHTVCSLSHSDLSMRAQVSSPGPPPLSCAEQLCIARQVAAGMAYLSERKFVHRDLATRNCLVGENMVVKIADFGLSRNIYSADYYKANENDAIPIRWMPPESIFYNRYTTESDVWAYGVVLWEIFSYGLQPYYGMAHEEVIYYVRDGNILSCPENCPVELYNLMRLCWSKLPADRPSFTSIHRILERMCERAEGTVSV

SEQ ID NO: 271505 - DNA, 2604 bp, Artificial Sequence
  derived and/or modified sequence
atgagggaactggtcaacatccctctggttcacatcttaaccctggtcgcattcagcgggaccgaaaaactccctaaggccccggtcattacgacccccctggagacggtggacgccttggtggaagaagttgccacatttatgtgcgccgtagagtcttacccgcagcccgagatttcctggacgagaaataagatcttaattaagttattcgacacaagatattcaatcagagagaatggccagctgttaaccattttgtcagtcgaggatagtgatgacggaatttactgctgcactgccaacaacggggtaggtggtgctgtagagagctgtggagcattacaagttaagatgaagcccaagattacccggccccccataaacgtcaagatcatcgaaggcctcaaggccgtgttgccctgcaccaccatgggaaaccccaaacccagtgtgtcctggatcaaaggagactccccattgcgggagaatagccggattgcagttctggaatcgggatctctgagaatccacaacgttcagaaagaggacgcaggccagtacagatgtgttgccaaaaacagtctgggaaccgcctactcaaaggtggttaagctcgaggtcgaggttttcgctcgaatattgagggctcccgaatcccacaacgtgacttttggttctttcgtcacgctacattgcacagctactggtatccctgtccccacaatcacttggatcgagaatgggaacgccgtctcatctggctctatccaggagagtgtcaaagaccgggttatcgactctagactacagctattcatcaccaaacccggcctgtacacatgcattgctacgaataaacatggagaaaagtttagcacggccaaggccgctgcaaccatttccatcgccgagatgttgtttatctcctcattttctaaaccacaaaaggacaataaagggtactgtgcccagtaccgcggcgaagtctgcaatgctgttctggccaaggacgccctggtgttcctcaacacctcttatgctgatcctgaagaggcccaggaacttctcgtccacaccgcgtggaacgagcttaaagtggttagccctgtgtgcaggccagccgcagaggccctactgtgtaatcacatcttccaggagtgtagccctggtgtggtgcctacacccattccgatttgtagggaatactgtctggcggtgaaggaattattttgtgccaaggaatggctcgtgatggaggagaaaacccatcgaggtttgtaccgttcagagatgcacctgttgtctgtgcctgagtgttccaagctgccgtccatgcactgggatccaactgcctgtgcaagactgcctcacctggccttcccacctatgactagctccaagccatctgtggatatcccaaatctgcccagcagcagctctagtagtttcagcgtgtctcctacttactctatgaccgtcatcatctctattatgtcttcatttgctatctttgtgcttctgaccataactaccctttactgctgtcggagacgaaaacagtggaagaataagaagagggaaagcgctgccgtcaccctgactacacttccctctgagctgctgctggatcgactgcacccgaatcctatgtatcagcggatgcccttacttctgaacccaaagttgctctcccttgagtatccaaggaataacatagagtacgttcgtgatattggggagggcgccttcgggcgggtgtttcaggccagagccccaggtttgctgccctacgaacccttcacaatggtggctgtgaagatgctaaaggaagaggccagcgccgacatgcaggccgactttcagagagaagccgctttgatggctgagttcgataaccctaatatagtaaagctgctgggggtctgtgcagtgggaaagcccatgtgcctcctcttcgagtatatggcctacggagatttgaatgagttcttgaggagtatgtcccctcacacagtgtgttcactttctcatagtgatctgagtatgagggcacaggttagttccccaggacccccaccactgagttgcgccgaacagctgtgcattgcgcggcaggtggcagcaggtatggcttatttgtccgagcgcaagttcgttcatagggatttagctacaaggaactgcctcgtgggagaaaatatggtggttaagattgctgactttggcctaagcaggaacatctatagcgccgactattacaaggcgaacgagaatgacgccattccaatccgctggatgcctccggaaagcatcttttacaaccgctataccaccgaaagtgacgtgtgggcctacggcgtcgtactctgggagattttcagttacggtttgcagccgtattatggaatggcacatgaggaggtgatatactatgtgcgcgatggaaatatcctttcctgtcccgaaaattgtcctgtggagttgtataatttgatgaggctgtgttggtctaaactcccggccgaccggccttctttcacctccatccatcgcattttagaaaggatgtgtgaacgggcggagggcacagtcagtgtatag

SEQ ID NO: 271506 - DNA, 2604 bp, Artificial Sequence
  derived and/or modified sequence
atgagggagctggtgaacatccccctggtgcacatcctgaccctggtggccttctctggaacagagaagctgcccaaggcccctgtgatcaccacccccctggagaccgtggatgccctggtggaggaggtggccaccttcatgtgtgctgtggagagctacccccagcctgagatctcctggaccaggaacaagatcctgatcaagctgtttgacacccgctacagcatcagagaaaatggccagctgctgaccatcctgtctgtggaggacagtgatgatggcatctactgctgcacagccaacaatggagtgggcggcgctgtggagagctgtggggccctgcaggtgaagatgaagcccaagatcacccggccccccatcaacgtgaagatcatcgagggcctgaaggctgtgctgccctgcaccaccatgggcaaccccaagcccagcgtgtcctggatcaagggggacagccccctgcgggagaacagcagaattgctgtgctggagagcggcagcctgcgcatccacaacgtgcagaaggaggatgctggccagtaccgctgtgtggccaagaacagcctgggcacagcctacagcaaggtggtgaagctggaggtggaggtgtttgcccgcatcctgcgggcccctgagagccacaacgtgaccttcggcagctttgtgaccctgcactgcacagccaccggcatccctgtgcccaccatcacctggattgaaaatggaaatgctgtgagcagcggcagcatccaggagagcgtgaaggacagagtcatcgacagccggctgcagctgttcatcaccaagccaggcctgtacacctgcatcgccaccaacaagcacggggagaagttcagcacagccaaggccgccgccaccatcagcattgctgagatgctgttcatcagcagcttcagcaagccccagaaggacaacaagggctactgtgcccagtacagaggagaggtgtgcaatgctgtgctggccaaggatgccctggtgttcctgaacaccagctatgctgaccctgaggaggcccaggagctgctggtgcacacagcctggaatgagctgaaggtggtgtcccctgtgtgcaggcctgctgctgaggccctgctgtgcaaccacatcttccaggagtgcagccctggggtggtgcccacccccatccccatctgccgggagtactgcctggccgtgaaggagctgttctgtgccaaggagtggctggtgatggaggagaagacccaccggggcctgtacagaagtgagatgcacctgctgtctgtgcctgaatgttccaagctgcccagcatgcactgggaccccacagcctgtgcccggctgccccacctggccttcccccccatgaccagcagcaagcccagcgtggacatccccaacctgcccagcagcagcagcagcagcttctctgtgagccccacctacagcatgaccgtcatcatcagcatcatgagcagctttgccatctttgtgctgctgaccatcaccaccctgtactgctgcagaagaaggaagcagtggaagaacaagaagcgggagagcgctgctgtgaccctgaccaccctgcccagcgagctgctgctggaccggctgcaccccaaccccatgtaccagaggatgcccctgctgctgaaccccaagctgctgagcctggagtaccccaggaacaacattgaatatgtgcgggacattggagagggcgccttcggccgggtcttccaggcccgggcccctggcctgctgccctatgagcccttcaccatggtggccgtgaagatgctgaaggaggaggccagcgctgacatgcaggccgacttccagcgggaggccgccctgatggccgagtttgacaaccccaacatcgtgaagctgctgggcgtgtgtgctgtgggcaagcccatgtgcctgctgtttgagtacatggcctacggggacctgaatgagttcctgcgctccatgagcccccacacagtgtgcagcctgagccacagcgacctgtccatgagggcccaggtgagcagccctggccccccacccctgagctgtgccgagcagctgtgcatcgcccggcaggtggccgccggcatggcctacctgtctgagaggaagtttgtgcaccgggacctggccaccaggaactgcctggtgggggagaacatggtggtgaagattgctgactttggcctgagcaggaacatctacagcgctgactactacaaggccaatgaaaatgatgccatccccatccgctggatgcctcctgagagcatcttctacaaccgctacaccacagaaagtgatgtgtgggcctacggcgtggtgctgtgggagatcttctcctatggcctgcagccctactacggcatggcccacgaggaggtgatctactacgtgagagatggcaacatcctgagctgcccagagaactgccctgtggagctgtacaacctgatgaggctgtgctggagcaagctgcctgctgaccggcccagcttcaccagcatccaccgcatcctggagaggatgtgtgaaagagctgagggcaccgtgtctgtgtag

SEQ ID NO: 271507 - DNA, 3321 bp, Artificial Sequence
  derived and/or modified sequence
gctgacacaaacagtcattagcagacaacccttttgcaacaaagtatgctttaaaatgtaaactgtggagccattttccttgcgttgtccagaaggaacttcgtcctgcgtgagcctggattaatcatgagagagctcgtcaacattccactggtacatattcttactctggttgccttcagcggaactgagaaacttccaaaagctcctgtcatcaccactcctcttgaaacagtggatgccttagttgaagaagtggctactttcatgtgtgcagtggaatcctacccccagcctgagatttcctggactagaaataaaattctcattaaactctttgacacccggtacagcatccgggagaatgggcagctcctcaccatcctgagtgtggaagacagtgatgatggcatttactgctgcacggccaacaatggtgtgggaggagctgtggagagttgtggagccctgcaagtgaagatgaaacctaaaataactcgtcctcccataaatgtgaaaataatagagggattaaaagcagtcctaccatgtactacaatgggtaatcccaaaccatcagtgtcttggataaagggagacagccctctcagggaaaattcccgaattgcagttcttgaatctgggagcttgaggattcataacgtacaaaaggaagatgcaggacagtatcgatgtgtggcaaaaaacagcctcgggacagcatattccaaagtggtgaagctggaagttgaggtttttgccaggatcctgcgggctcctgaatcccacaatgtcacctttggctcctttgtgaccctgcactgtacagcaacaggcattcctgtccccaccatcacctggattgaaaacggaaatgctgtttcttctgggtccattcaagagagtgtgaaagaccgagtgattgactcaagactgcagctgtttatcaccaagccaggactctacacatgcatagctaccaataagcatggggagaagttcagtactgccaaggctgcagccaccatcagcatagcagaaatgttgttcatttcttctttcagtaaaccacagaaagataacaaaggctactgcgcccagtacagaggggaggtgtgtaatgcagtcctggcaaaagatgctcttgtttttctcaacacctcctatgcggaccctgaggaggcccaagagctactggtccacacggcctggaatgaactgaaagtagtgagcccagtctgccggccagctgctgaggctttgttgtgtaaccacatcttccaggagtgcagtcctggagtagtgcctactcctattcccatttgcagagagtactgcttggcagtaaaggagctcttctgcgcaaaagaatggctggtaatggaagagaagacccacagaggactctacagatccgagatgcatttgctgtccgtgccagaatgcagcaagcttcccagcatgcattgggaccccacggcctgtgccagactgccacatctagcattcccaccaatgacgtcctcaaagccaagtgtggacattccaaatctgccttcctcctcctcttcttccttctctgtctcacctacatactccatgactgtaataatctccatcatgtccagctttgcaatatttgtgcttcttaccataactactctctattgctgccgaagaagaaaacaatggaaaaataagaaaagagaatcagcagcagtaaccctcaccacactgccttctgagctcttactagatagacttcatcccaaccccatgtaccagaggatgccgctccttctgaaccccaaattgctcagcctggagtatccaaggaataacattgaatatgtgagagacatcggagagggagcgtttggaagggtgtttcaagcaagggcaccaggcttacttccctatgaacctttcactatggtggcagtaaagatgctcaaagaagaagcctcggcagatatgcaagcggactttcagagggaggcagccctcatggcagaatttgacaaccctaacattgtgaagctattaggagtgtgtgctgtcgggaagccaatgtgcctgctctttgaatacatggcctatggtgacctcaatgagttcctccgcagcatgtcccctcacaccgtgtgcagcctcagtcacagtgacttgtctatgagggctcaggtctccagccctgggcccccacccctctcctgtgctgagcagctttgcattgccaggcaggtggcagctggcatggcttacctctcagaacgtaagtttgttcaccgagatttagccaccaggaactgcctggtgggcgagaacatggtggtgaaaattgccgactttggcctctccaggaacatctactcagcagactactacaaagctaatgaaaacgacgctatccctatccgttggatgccaccagagtccattttttataaccgctacactacagagtctgatgtgtgggcctatggcgtggtcctctgggagatcttctcctatggcctgcagccctactatgggatggcccatgaggaggtcatttactacgtgcgagatggcaacatcctctcctgccctgagaactgccccgtggagctgtacaatctcatgcgtctatgttggagcaagctgcctgcagacagacccagtttcaccagtattcaccgaattctggaacgcatgtgtgagagggcagagggaactgtgagtgtctaaggttgaagacgttcaaataaaatgctgcagtttcctctcagactctgtgagccaggggaatcctacaccagaggcccaacaagacccacataggaaagagtaagagtaaacatgagtagtgtgttgtttgcttcccagggagagcaaagacagtgcaaaacccatgtggtagacggacccattgaaagccagtgattggaaacacaggctaggaaatgtgtcagataatggagacaactattcttcttcatgaaggtttgtaatacacactgcacagggaagaatgtcatcctgttcagtttccaaagtagctggtcacagagtaaagctctgctgtattaaattttaatatgaaatgggattcagagcttcattttttaattgagttaattcctgtccattgtgaaagtagcttaatcgtcatgtaagacacttaggtgaagtacagaaaactaaaaagaaggaaaagccactcattctgtctccccccaaagacgagtcttagtgttttattaaatctttcttgcatttaatgcataattttatatttgtttgtattctgcagagttgtggttacattttattgataga

SEQ ID NO: 271508 - DNA, 2604 bp, Artificial Sequence
  derived and/or modified sequence
atgcgggagctggtgaacatccccctggtgcacatcctgaccctggtcgccttcagcggcacagaaaagttgccaaaagcccccgtgattacgaccccactcgagaccgttgacgctcttgtggaagaggttgccacattcatgtgcgctgtagagtcatacccccagccagagattagctggacccgtaacaaaatcctgattaaactgtttgataccaggtacagcatacgtgagaatggacagctgctgacaattctttctgtcgaagactctgacgacggtatttattgctgcacagctaacaatggggtcgggggggccgtggaatcctgtggtgctcttcaggtcaagatgaagccgaagattactagacccccgataaatgtaaaaataatcgagggcctcaaagctgtgttaccgtgcacaactatggggaacccaaaaccttctgtgtcctggatcaagggggacagtcctttacgcgaaaattcgaggatcgctgttcttgagagcggttcactgcggattcataatgtgcagaaagaggacgccgggcagtatagatgcgttgcaaagaattccctcggaacggcctacagtaaagtcgtcaagttggaggtcgaagtttttgcccgaatccttagggctcctgaatcccacaatgtgaccttcggaagcttcgtgacacttcactgcacagccaccggcatccccgtgcccaccatcacatggatcgagaacgggaatgccgtctcttctggtagcattcaagagagcgtgaaagatagagtgatcgacagccgcctccagttatttataacaaaaccggggttgtatacctgcatagccacaaacaagcacggggagaaattctccacagctaaggccgccgctacaatctccatcgcagaaatgctgttcatctcttccttttctaagccccagaaagacaacaaaggatattgcgctcagtatcgcggcgaagtctgcaatgctgtgcttgccaaggacgccttggtgttcctgaatacatcgtacgccgatcccgaggaggcccaagaactgctagtgcacaccgcctggaatgaactgaaggtagtgtctccggtttgtaggccagccgccgaagctctgctgtgcaatcatatcttccaggaatgtagtccgggcgtggtgcccaccccaattcctatctgtagagaatattgcttggccgttaaggagctgttctgcgctaaggaatggctggtcatggaagagaagactcatcggggcctctatcggagcgagatgcacctgctctctgtcccagaatgctccaaacttccaagcatgcattgggatcccaccgcctgtgcgcgcctaccccacttggccttccccccaatgacctcatctaaaccgagtgtggatatccccaatcttccctcctcgtcttctagttccttcagtgtaagtccaacgtactctatgactgtgataatatcaatcatgtcttcgttcgccatttttgtcctgctgacgatcacgaccctttactgttgcaggcgtaggaagcagtggaagaacaaaaaacgcgagtcggccgcggttaccttaacaacgctcccatctgagctgctgctggaccgccttcatcctaaccccatgtaccagcgaatgcccctcctactcaatccaaagctgctgtcacttgaatacccccggaacaatatcgaatatgtgcgcgacataggcgagggggcgtttggtcgcgtctttcaagcacgtgcccccggacttctgccctatgaacctttcactatggtggccgtgaagatgctgaaggaagaggccagtgcagatatgcaggccgactttcagcgcgaggcagcattgatggctgaattcgacaacccaaacatcgtaaaactcctgggagtgtgtgctgtaggcaagcctatgtgcctgttgtttgaatacatggcatatggagacttaaatgagtttctcaggtcaatgtccccacacactgtgtgttctctcagccattctgacctgagcatgcgggcgcaagtttccagcccagggccacccccattgtcctgcgcagaacagctgtgtatcgctcggcaggtggcagcgggaatggcgtatttgagtgaacgaaaattcgtccatcgcgacctggccactcgcaactgcctggtgggcgaaaatatggtcgtcaaaattgctgacttcgggctgtctcgaaacatatattctgccgactactataaagccaacgaaaacgacgccattcccatacgatggatgcccccagagagcatattctataacaggtataccacggaaagcgacgtgtgggcctatggcgtggtgctgtgggaaatcttctcctatggcttacagccgtattatggcatggcccacgaggaagttatctactatgtgagagacggtaacatcctgtcttgtccagaaaactgtcctgtggagctgtataatttaatgagactgtgctggtcaaagctcccggccgataggcccagcttcacgagcattcacaggatcttggaacgcatgtgtgagagagctgaaggaactgtgtccgtttag

SEQ ID NO: 271509 - DNA, 2604 bp, Artificial Sequence
  derived and/or modified sequence
atgcgcgagctagtgaatatccccctggtacacattctgacactggttgctttctccgggacagaaaagctgccgaaggctcctgtcataactacacctttagagaccgttgacgcgctcgtggaagaagtggccacatttatgtgcgctgttgaaagttatccgcagcccgaaatcagctggacccggaacaaaattctcatcaagctgtttgacacccgatactcaattcgggagaatggacaactcctgaccatcctctctgtagaggactccgatgatggtatttactgctgtactgctaacaatggggtgggcggagccgtggagagttgtggtgctttgcaggtgaaaatgaagcccaaaattactagaccgccaatcaacgtgaagatcatagagggacttaaagcggtattgccctgtacaactatgggtaatcccaaaccatcagtctcatggattaaaggagatagccccttacgagagaactccaggatcgccgtgctggagtcaggaagccttaggattcacaatgtccagaaagaggacgcaggccagtacaggtgcgtcgccaaaaacagcctgggtacagcttactccaaagtggttaagttagaagtggaggtcttcgctaggattctcagagccccagaaagccacaatgtcacctttggttccttcgtgaccctgcactgtacggccacgggaattcccgttcctaccatcacatggattgagaatggaaacgccgtgtcatccggaagtattcaggaatctgtgaaagatagggtcatcgattctcgcctacaactatttattacaaaacccggtctgtatacgtgtattgccaccaacaaacacggggagaagtttagcactgctaaggcggctgccaccatctccatagccgagatgttgtttattagctccttctcaaaacctcaaaaggacaacaaaggatactgcgcccagtatcgaggagaggtgtgtaatgcggttttggcaaaggacgcattagtgtttttgaacacttcatacgcagaccctgaagaagcccaggagctactcgttcacacagcttggaacgaactgaaggtggtatcccctgtgtgtcgtccagcagccgaagcccttctctgcaaccacatctttcaggagtgttcacccggagttgtgcccactccaatcccgatctgccgcgaatactgcttagctgtgaaagagttgttttgtgccaaggaatggctggtcatggaagaaaagactcatcgcggactctatcgctcagaaatgcatttacttagcgtgcctgaatgcagcaagctgccctccatgcattgggatcctaccgcctgcgcacgccttccgcacctcgcttttcctccaatgaccagcagtaagccatcagtggatatacctaatttgccctcctcttcctcgtcctcgttcagtgtctcgccaacgtatagcatgaccgtcattatctcgattatgtcatcgttcgccatattcgtcctgcttacgataaccactttatactgctgccgacgccgtaagcagtggaaaaataaaaagcgagagagcgctgccgttactctgaccaccctcccttcggaactgcttctcgatcgcctgcatcccaaccctatgtaccagcggatgcctctcctcctgaaccctaaactgttgtctcttgagtacccgcgtaataatattgagtatgtgagagatattggggagggcgcttttggcagagttttccaagccagggcgcctggactattaccctatgagcccttcaccatggtagctgtgaaaatgctcaaagaagaggcctcggcagatatgcaggccgactttcagcgggaagccgctttgatggccgagtttgataatcccaacattgtgaagctgctcggagtctgtgcagtgggcaagcccatgtgcctcctgttcgaatacatggcatatggagacctaaatgagttcctgcggagcatgtcaccccacaccgtgtgttccctgtcccactcggatcttagtatgcgggctcaggttagctccccgggtccgcctcccctgagctgtgctgaacagctgtgcattgccaggcaggttgccgcagggatggcatacttgagcgaacggaagtttgtacatcgggacctggccactcgcaactgcttggtcggggaaaacatggtagtgaagattgctgactttggcctgtctcgcaacatctattctgccgactattacaaggctaatgagaacgacgctattcctatcaggtggatgccacctgagagcattttctacaacaggtacactaccgagtctgatgtttgggcttatggtgtcgtgctgtgggagatcttttcctatgggcttcagccctactacgggatggctcatgaagaagttatctactatgtgcgagatggcaatatcctttcctgccctgagaactgtcctgtggagctgtataatctgatgcgcttgtgctggtctaaactgcccgctgaccgacccagctttacctccattcaccggattcttgaaagaatgtgcgagagggccgagggaacagtgtccgtatag

SEQ ID NO: 271510 - DNA, 2604 bp, Artificial Sequence
  derived and/or modified sequence
atgagagagctggtgaacatccccctggtgcacatcctgaccctggtggccttcagcggcaccgagaagctgcccaaggcccccgtgatcaccacccccctggagaccgtggacgccctggtggaggaggtggccaccttcatgtgcgccgtggagagctacccccagcccgagatcagctggaccagaaacaagatcctgatcaagctgttcgacaccagatacagcatcagagagaacggccagctgctgaccatcctgagcgtggaggacagcgacgacggcatctactgctgcaccgccaacaacggcgtgggcggcgccgtggagagctgcggcgccctgcaggtgaagatgaagcccaagatcaccagaccccccatcaacgtgaagatcatcgagggcctgaaggccgtgctgccctgcaccaccatgggcaaccccaagcccagcgtgagctggatcaagggcgacagccccctgagagagaacagcagaatcgccgtgctggagagcggcagcctgagaatccacaacgtgcagaaggaggacgccggccagtacagatgcgtggccaagaacagcctgggcaccgcctacagcaaggtggtgaagctggaggtggaggtgttcgccagaatcctgagagcccccgagagccacaacgtgaccttcggcagcttcgtgaccctgcactgcaccgccaccggcatccccgtgcccaccatcacctggatcgagaacggcaacgccgtgagcagcggcagcatccaggagagcgtgaaggacagagtgatcgacagcagactgcagctgttcatcaccaagcccggcctgtacacctgcatcgccaccaacaagcacggcgagaagttcagcaccgccaaggccgccgccaccatcagcatcgccgagatgctgttcatcagcagcttcagcaagccccagaaggacaacaagggctactgcgcccagtacagaggcgaggtgtgcaacgccgtgctggccaaggacgccctggtgttcctgaacaccagctacgccgaccccgaggaggcccaggagctgctggtgcacaccgcctggaacgagctgaaggtggtgagccccgtgtgcagacccgccgccgaggccctgctgtgcaaccacatcttccaggagtgcagccccggcgtggtgcccacccccatccccatctgcagagagtactgcctggccgtgaaggagctgttctgcgccaaggagtggctggtgatggaggagaagacccacagaggcctgtacagaagcgagatgcacctgctgagcgtgcccgagtgcagcaagctgcccagcatgcactgggaccccaccgcctgcgccagactgccccacctggccttcccccccatgaccagcagcaagcccagcgtggacatccccaacctgcccagcagcagcagcagcagcttcagcgtgagccccacctacagcatgaccgtgatcatcagcatcatgagcagcttcgccatcttcgtgctgctgaccatcaccaccctgtactgctgcagaagaagaaagcagtggaagaacaagaagagagagagcgccgccgtgaccctgaccaccctgcccagcgagctgctgctggacagactgcaccccaaccccatgtaccagagaatgcccctgctgctgaaccccaagctgctgagcctggagtaccccagaaacaacatcgagtacgtgagagacatcggcgagggcgccttcggcagagtgttccaggccagagcccccggcctgctgccctacgagcccttcaccatggtggccgtgaagatgctgaaggaggaggccagcgccgacatgcaggccgacttccagagagaggccgccctgatggccgagttcgacaaccccaacatcgtgaagctgctgggcgtgtgcgccgtgggcaagcccatgtgcctgctgttcgagtacatggcctacggcgacctgaacgagttcctgagaagcatgagcccccacaccgtgtgcagcctgagccacagcgacctgagcatgagagcccaggtgagcagccccggccccccccccctgagctgcgccgagcagctgtgcatcgccagacaggtggccgccggcatggcctacctgagcgagagaaagttcgtgcacagagacctggccaccagaaactgcctggtgggcgagaacatggtggtgaagatcgccgacttcggcctgagcagaaacatctacagcgccgactactacaaggccaacgagaacgacgccatccccatcagatggatgccccccgagagcatcttctacaacagatacaccaccgagagcgacgtgtgggcctacggcgtggtgctgtgggagatcttcagctacggcctgcagccctactacggcatggcccacgaggaggtgatctactacgtgagagacggcaacatcctgagctgccccgagaactgccccgtggagctgtacaacctgatgagactgtgctggagcaagctgcccgccgacagacccagcttcaccagcatccacagaatcctggagagaatgtgcgagagagccgagggcaccgtgagcgtgtag

SEQ ID NO: 271511 - protein, 838 aa, Artificial Sequence
  derived and/or modified sequence
MSSWIRWHGPAMARLWGFCWLVVGFWRAAFACPTSCKCSASRIWCSDPSPGIVAFPRLEPNSVDPENITEIFIANQKRLEIINEDDVEAYVGLRNLTIVDSGLKFVAHKAFLKNSNLQHINFTRNKLTSLSRKHFRHLDLSELILVGNPFTCSCDIMWIKTLQEAKSSPDTQDLYCLNESSKNIPLANLQIPNCGLPSANLAAPNLTVEEGKSITLSCSVAGDPVPNMYWDVGNLVSKHMNETSHTQGSLRITNISSDDSGKQISCVAENLVGEDQDSVNLTVHFAPTITFLESPTSDHHWCIPFTVKGNPKPALQWFYNGAILNESKYICTKIHVTNHTEYHGCLQLDNPTHMNNGDYTLIAKNEYGKDEKQISAHFMGWPGIDDGANPNYPDVIYEDYGTAANDIGDTTNRSNEIPSTDVTDKTGREHLSVYAVVVIASVVGFCLLVMLFLLKLARHSKFGMKDFSWFGFGKVKSRQGVGPASVISNDDDSASPLHHISNGSNTPSSSEGGPDAVIIGMTKIPVIENPQYFGITNSQLKPDTFVQHIKRHNIVLKRELGEGAFGKVFLAECYNLCPEQDKILVAVKTLKDASDNARKDFHREAELLTNLQHEHIVKFYGVCVEGDPLIMVFEYMKHGDLNKFLRAHGPDAVLMAEGNPPTELTQSQMLHIAQQIAAGMVYLASQHFVHRDLATRNCLVGENLLVKIGDFGMSRDVYSTDYYRVGGHTMLPIRWMPPESIMYRKFTTESDVWSLGVVLWEIFTYGKQPWYQLSNNEVIECITQGRVLQRPRTCPQEVYELMLGCWQREPHMRKNIKGIHTLLQNLAKASPVYLDILG

SEQ ID NO: 271512 - DNA, 2517 bp, Artificial Sequence
  derived and/or modified sequence
atgagctcgtggatccgatggcacggccccgctatggccagactgtgggggttctgttggttagttgtgggcttttggcgggccgccttcgcctgtcctacgtcatgcaagtgctcagcctcgaggatttggtgctctgatcccagcccgggaatcgttgccttcccgagactggagcccaatagcgtggatccagagaatattacagaaatctttatcgcaaaccagaaacgactggagatcatcaacgaggatgatgtcgaggcctatgtcggtcttagaaacctgactattgtagactccggcttgaagttcgtggcacacaaagccttcctgaagaattccaatcttcagcacatcaactttactcggaacaaattgacctctctcagtcgcaagcacttccggcacctggaccttagcgaattaattctggttggcaacccattcacctgttcttgcgatataatgtggattaagactcttcaggaggccaaatcctctccagatacacaggacctctactgcctaaacgagagtagcaaaaatatacctctggccaacctacagatccctaactgtggcctgccttccgcaaatcttgctgcaccaaatctgacagtggaagaggggaagtcaatcactctgagctgctccgtcgccggcgaccctgtgcccaatatgtattgggacgtgggaaatctggtttcaaagcatatgaatgagacctcgcacacacaggggtccttacgaatcaccaatatttctagtgatgattcaggcaagcaaataagttgcgttgcagaaaacttagtaggggaggatcaggactcagtaaacctcacagtacacttcgctccaaccattacatttctagaatccccgactagcgaccaccattggtgcatcccatttaccgtgaagggcaacccaaagcccgctctccagtggttttataatggcgcaattctcaatgaatcgaagtacatctgtactaaaattcatgtaactaatcacactgagtaccacgggtgtctccaattggacaaccccacacatatgaacaacggagactacaccctgatagctaagaacgagtacggcaaggacgagaagcagattagcgcccactttatggggtggccaggaatagatgatggcgccaatcctaactaccctgacgtaatttatgaggattatgggaccgctgccaacgatataggcgacacaaccaataggagcaatgagatacccagcaccgacgttacagacaaaactggacgggaacatctctccgtgtacgcggtggttgtgatagcttcagttgtcggcttttgcctcttagtcatgctattcctactgaagctcgccagacactccaaattcgggatgaaagatttttcctggtttggttttggcaaggtgaaaagcagacagggagtaggaccggcatcagtcatttctaacgacgacgattctgcttctccattgcaccacatttcaaatggctctaacactccatcctccagcgagggaggaccagacgctgtaattattggcatgaccaaaattccagtaattgagaatcctcagtacttcggaatcactaactctcagctgaagcctgacacgtttgtccagcatatcaaaagacacaatattgtcctaaagcgggaacttggagagggtgccttcggcaaggtgttcctcgctgagtgttacaacctgtgtccagaacaggacaaaatacttgtggcagtgaaaacccttaaggacgctagcgataacgcccgcaaagacttccacagggaggcggagttgttaaccaatctccagcatgagcatattgtgaagttctacggcgtctgtgttgaaggcgatcctctcatcatggtcttcgaatacatgaaacacggcgatctgaataaatttctgcgcgcccacggaccagatgccgtgcttatggccgaaggaaatccacccacagagctgacacagtcccaaatgctccatattgcgcagcagatagcagcaggaatggtctatcttgccagccagcactttgtgcacagagacttagccacaaggaactgcctggtaggagaaaatttactcgtgaagattggcgactttgggatgtcacgagacgtttattccaccgattactacagagtcggaggacatacgatgctcccaatccgttggatgcctcccgagagtatcatgtatcgaaagttcaccacggaatcagatgtgtggagcctaggggtcgtcctgtgggaaatctttacatacggaaagcagccctggtaccaactttcaaacaacgaagtaatcgagtgtataacccaggggcgagtgctccagagacctagaacatgcccacaggaggtctacgagctgatgttaggttgctggcagagggagccacacatgcgcaagaacatcaagggtatacacactttactgcagaacctcgccaaggctagcccggtctatctagacatcttgggctag

SEQ ID NO: 271513 - DNA, 2517 bp, Artificial Sequence
  derived and/or modified sequence
atgagttcttggatcagatggcatggtcctgcgatggctcgcctatgggggttctgttggctagtcgtcggcttctggcgtgcagccttcgcctgcccaacgtcttgtaagtgttccgccagcaggatctggtgttccgatccatctcctgggatagtggctttcccccggttggaaccgaattccgtcgatccggagaatatcactgaaatcttcatcgcaaatcagaaacgcctcgagattataaacgaagacgacgttgaggcctacgtgggcctcaggaacctgaccattgtcgacagcgggctcaagttcgtagcccacaaggccttccttaaaaacagtaatcttcagcacattaactttacgagaaacaagctaaccagcctgtccaggaaacacttcaggcacttagacctgtctgaattgattttggtcgggaacccgttcacctgttcatgtgatataatgtggatcaagactctccaagaagccaagtcctccccagatacccaagacttatactgcctcaacgagagctcaaagaacattccactggccaatcttcagattcccaattgtggactgcctagcgccaacctcgctgcaccaaatctgacggtggaagagggcaaaagtattaccctctcatgtagcgtagctggggatcctgtgccgaacatgtactgggacgtgggaaatctcgtgagcaaacacatgaacgagacctcccatacacaggggtctctccgtattacaaacatttcctccgacgattccggcaagcagatcagttgtgttgccgagaatctggtcggcgaggaccaagacagcgtgaaccttactgtacatttcgctccaacaatcacgtttctggaaagccctacgagtgaccaccattggtgcatcccattcaccgtcaaggggaaccctaagcctgcactgcagtggttttataatggcgccattctgaacgaaagtaagtatatatgcactaagattcacgtaaccaatcacaccgagtaccacgggtgcttacagctggataacccaacacatatgaataacggggattataccctcatagctaagaacgagtacggtaaggatgagaaacagatcagcgcccatttcatgggttggcctggaatcgatgatggcgcaaaccccaactatcccgatgtgatatacgaggactacggaactgcggccaacgatatcggtgacacaacgaatcgctccaacgagatccctagcacggatgtgacagacaagaccggccgtgagcacttatcagtgtacgcggtggttgttatcgcaagcgtggtgggtttttgccttttagtcatgcttttccttctgaaactcgcccggcactctaaatttgggatgaaggatttctcatggtttgggttcggcaaggttaagtctcgtcagggggttggtcccgcgagtgtgatctcaaatgatgatgactctgcctcaccccttcatcatatatcaaacggcagcaacacccccagttcttccgagggtggaccagacgcagtcatcattggaatgaccaagattcctgtgattgagaatccacagtattttggtatcaccaacagccagttgaaaccagatacctttgttcagcacataaaacggcacaatatcgtgcttaagagagagcttggagaaggagccttcgggaaagtgttcttggccgagtgttacaacctgtgccccgagcaggataaaatcctggtggcagttaagaccctgaaggacgctagtgataacgctcggaaggatttccacagggaagccgaattgctgacgaatctccagcacgaacacattgtgaagttttatggagtatgcgtcgagggagaccctctcattatggttttcgagtacatgaaacatggcgacttgaataagttcctcagggcccacggtcctgacgccgtgctgatggccgaggggaatccacctactgagctaactcagagccagatgctgcacatcgctcagcagatagcagcaggtatggtatatcttgcctcgcaacacttcgtgcatcgggacctagccacccgcaattgcctcgtgggtgagaatctgttggtgaaaattggagatttcggcatgtcgcgagacgtgtactccacggactactaccgggtagggggacataccatgctcccaattagatggatgccacctgaaagcattatgtatcgcaagttcactacggagtctgacgtgtggtctctcggcgttgtcctttgggaaatttttacctatggaaagcagccatggtaccaactgtcgaacaatgaggtgatcgagtgcatcacacagggacgggtgctgcaaaggccacggacctgcccacaggaggtttacgaattaatgcttggctgttggcaacgggagccccatatgcggaagaatattaagggcattcatacactccttcagaatttagctaaagcttcaccagtctatctggatattcttggttag

SEQ ID NO: 271514 - DNA, 2517 bp, Artificial Sequence
  derived and/or modified sequence
atgagctcctggatccgctggcacggccctgccatggcccggctgtggggcttctgctggctggtggtgggcttctggagggctgcctttgcctgccccaccagctgcaagtgcagcgccagccgcatctggtgcagcgaccccagccctggcatcgtggccttcccccggctggagcccaacagcgtggaccctgagaacatcacagagatcttcatcgccaaccagaagaggctggagatcatcaatgaagatgatgtggaggcctacgtgggcctgaggaacctgaccatcgtggacagcggcctgaagtttgtggcccacaaggccttcctgaagaacagcaacctgcagcacatcaacttcaccaggaacaagctgaccagcctgagcaggaagcacttccgccacctggacctgtctgagctgatcctggtgggcaaccccttcacctgcagctgtgacatcatgtggatcaagaccctgcaggaggccaagagcagcccagacacccaggacctgtactgcctgaatgaaagcagcaagaacatccccctggccaacctgcagatccccaactgtggcctgcccagcgccaacctggccgcccccaacctgactgtggaggagggcaagagcatcaccctgagctgcagcgtggccggggaccctgtgcccaacatgtactgggatgtgggcaacctggtgtccaagcacatgaatgagaccagccacacccagggcagcctgcgcatcaccaacatcagcagtgatgacagcggcaagcagatcagctgtgtggccgagaacctggtgggggaggaccaggacagcgtgaacctgactgtgcactttgcccccaccatcaccttcctggagagccccaccagtgaccaccactggtgcatccccttcaccgtgaagggcaaccccaagccagccctgcagtggttctacaacggggccatcctgaatgaaagcaagtacatctgcaccaagatccacgtgaccaaccacacagagtaccacggctgcctgcagctggacaaccccacccacatgaacaacggggactacaccctcatcgccaagaatgaatatggcaaggatgagaagcagatcagcgcccacttcatgggctggccaggcattgatgatggagccaaccccaactacccagatgtgatctatgaggactatggaacagctgccaatgacattggagacaccaccaacagaagcaatgagatccccagcacagatgtgacagacaagacaggccgggagcacctgtctgtgtatgctgtggtggtgattgcctctgtggtgggcttctgcctgctggtgatgctgttcctgctgaagctggcccggcacagcaagtttggcatgaaggacttctcctggtttggatttgggaaggtgaagagccggcagggcgtgggccctgccagcgtcatcagcaatgatgatgattctgccagccccctgcaccacatcagcaatggcagcaacacccccagcagcagcgagggcggcccagatgctgtgatcatcggcatgaccaagatccctgtgattgagaacccccagtacttcggcatcaccaacagccagctgaagccagacacctttgtgcagcacatcaagaggcacaacatcgtgctgaagcgggagctgggggagggcgccttcggcaaggtgttcctggccgagtgctacaacctgtgcccagagcaggacaagatcctggtggccgtgaagaccctgaaggatgccagtgacaatgccaggaaggacttccaccgggaggccgagctgctgaccaacctgcagcacgagcacatcgtgaagttctacggcgtgtgtgtggagggggaccccctcatcatggtgtttgagtacatgaagcacggggacctgaacaagttcctgcgggcccacggcccagatgctgtgctgatggccgagggcaaccccccaacagagctgacccagagccagatgctgcacatcgcccagcagattgctgctggcatggtgtacctggccagccagcactttgtgcaccgggacctggccaccaggaactgcctggtgggggagaacctgctggtgaagatcggggactttggcatgagcagagatgtgtacagcacagactactacagagtgggcggccacaccatgctgcccatccgctggatgcctcctgagagcatcatgtacaggaagttcaccacagaaagtgatgtgtggagcctgggcgtggtgctgtgggagatcttcacctacggcaagcagccctggtaccagctgagcaacaatgaggtgattgagtgcatcacccagggccgggtgctgcagaggcccaggacctgcccccaggaggtgtatgagctgatgctgggctgctggcagcgggagccccacatgaggaagaacatcaagggcatccacaccctgctgcagaacctggccaaggccagccctgtgtacctggacatcctgggctag

SEQ ID NO: 271515 - DNA, 2517 bp, Artificial Sequence
  derived and/or modified sequence
atgagcagctggatccggtggcacggccccgccatggcccggctgtggggcttttgttggctagtcgtgggcttctggagagcagcgtttgcgtgtccaacttcatgtaagtgttcagccagtcgaatttggtgtagtgaccctagccccggcatagtggcttttcctcgcctggagcctaacagcgtggatcccgagaacattacagaaatcttcatcgcaaaccaaaaaagactggagattataaacgaagacgatgttgaggcctacgtgggtctccgtaatctcacgattgtggactccgggctcaagttcgtggcacacaaggccttcctcaagaactccaacctccagcacataaactttaccaggaacaaactcacaagcctcagccgcaaacacttccgccatttggacctcagtgagctgattctagtgggcaacccattcacgtgttcttgtgacatcatgtggattaagactttacaggaggcgaagagttctccagatacacaggacttgtactgtcttaatgagtcatcaaagaacattccattggccaatcttcagatcccaaattgtgggctccctagtgcaaacctggccgcaccaaatctcaccgtggaagaaggaaagagtataaccctatcctgttctgtggccggcgatcctgtgcctaatatgtactgggacgtgggaaaccttgtgagtaagcacatgaacgagacgagtcacactcagggttctcttcgcattaccaacatctcatccgacgattctggcaaacagattagctgcgtcgctgagaatcttgtgggcgaggatcaggatagcgtgaatctcaccgtccacttcgcccccacaatcacttttctggagtctcctacctctgaccatcattggtgtattcctttcacagtgaagggaaaccctaaacccgcactgcagtggttttataacggtgctatcttaaatgaaagcaagtacatctgtacaaagattcatgtaaccaatcacacagagtaccatgggtgtctccagctggataaccctacccacatgaacaacggcgattacaccctgatcgccaaaaatgaatacggtaaggacgaaaagcaaatctctgcccatttcatggggtggcccggcatcgatgacggggcaaaccctaactaccccgatgtcatttacgaggattatggaacagctgctaatgatatcggcgatactacgaaccgtagcaatgaaattccgtccactgatgtgacagataaaaccggacgtgagcatctctcagtatatgcagttgtagtgatcgcctcagtagtggggttttgtctgctcgtgatgctttttctcctgaagttggcccggcactctaaattcgggatgaaagatttttcatggtttggcttcgggaaagtcaagtcgcggcagggcgtcggcccggcctctgtgatcagcaacgatgatgattcagccagccccctgcatcatatctccaatgggagtaatactcccagttcctctgagggaggaccggatgctgttataattggcatgaccaagattccagtcattgagaatcctcagtattttggcattactaatagccagctcaaacccgatacctttgtacagcacatcaagcgtcataatattgttcttaagcgtgaactaggggaaggagccttcggaaaggtatttttagccgagtgctataatttgtgccccgagcaggacaagatcctggttgccgtgaaaaccctcaaagatgcctctgacaacgctaggaaggatttccaccgcgaggctgaattattgactaacctccagcacgagcacatcgtgaaattttacggggtttgcgtagaaggcgaccctctgatcatggttttcgagtacatgaaacacggagatctgaacaaattcctcagagcccacggccccgatgccgtacttatggcggaaggtaaccctcccaccgagctgactcagagccaaatgttgcatatcgcccagcagattgctgccggtatggtgtatctggctagccaacacttcgtgcatagggatctagccaccaggaactgtctcgtcggggagaacctgcttgttaaaattggcgacttcggcatgtctagggatgtttattcaacagattattaccgggtgggtggtcatactatgctcccaatccggtggatgccgccagaaagcatcatgtaccgcaagtttacaacagaaagcgacgtttggtccctcggggtggtgctatgggaaattttcacctatggaaagcagccctggtatcagttaagtaataacgaggtgatcgagtgcattacgcaggggcgggtactccagagaccacggacatgtccccaagaagtgtacgagttgatgcttgggtgttggcagcgcgaacctcacatgaggaagaatatcaaaggcattcataccctccttcagaacctggccaaagcgtcccctgtttacttagacatcctgggttag

SEQ ID NO: 271516 - DNA, 2517 bp, Artificial Sequence
  derived and/or modified sequence
atgagcagctggatccggtggcacggccccgccatggcccggctgtgggggttctgctggctggtggttggattttggagggccgccttcgcgtgccccacctcttgtaaatgctctgctagcagaatttggtgctctgacccatctcctgggatcgtggcattccctcgtttagagcctaacagcgttgacccagagaacatcaccgagatcttcattgcaaatcagaagaggctggagatcattaatgaggacgatgtggaagcttacgttggcctaagaaatcttaccatagtcgacagtggactaaagttcgttgctcataaagcattcttgaagaacagtaatctgcagcacataaactttacacgtaacaagttgacatccctgagcaggaagcattttagacacctggatctttctgagctcatcctggtgggaaatccattcacgtgttcctgcgatataatgtggatcaagaccttgcaggaagctaaatcctccccagatacgcaggatctctattgtctgaatgaatctagcaagaatataccactggcaaatctgcagattcccaactgtgggctgcccagcgctaatcttgctgcacctaatctaactgtggaggagggcaagtctatcaccctgagttgctctgtggccggagatcctgtccctaatatgtactgggatgttggcaacctggtttccaagcatatgaacgaaaccagccacacccaaggttcccttagaatcacgaacatctctagcgatgatagcggtaagcagatatcctgcgtggcagagaatctggtaggtgaggatcaggattctgttaatctgactgtacatttcgccccaacgatcacttttttagagagccccacgagcgaccatcattggtgcataccattcaccgtgaaagggaacccaaaacctgccctccagtggttctataacggtgcaatcctgaatgagtcaaagtacatttgcaccaagattcacgtgaccaaccatacagagtaccacgggtgcttacagctggacaatcccacacacatgaacaacggcgattacaccctcatcgcaaagaatgagtacggaaaagatgagaagcaaatttcggcccactttatgggttggcccggcatagatgacggagctaatcccaactatcctgacgtcatctatgaggattacggaaccgctgctaatgatatcggcgacactaccaatcgctccaacgagattccgtccacagacgtaacagacaaaacagggcgcgaacatctcagtgtgtacgcggtggttgttatcgcctccgtcgttggcttttgccttctcgtgatgctttttctcctgaagctggctaggcatagtaaattcggcatgaaggacttctcctggtttggcttcggcaaggtgaagtctagacaaggcgtagggcctgcatctgttattagcaacgatgacgatagtgcaagtccactgcatcacataagcaacgggagtaacactccgtcctcctcagagggtggtcccgacgctgttattattgggatgaccaagatccctgtgattgaaaacccacagtatttcggtataaccaatagccagctgaaacctgatacctttgtacagcacataaagcgacacaacatcgtgttaaagcgtgagctgggagagggcgcattcggaaaagtgttcctggcagagtgttacaatctctgtcccgaacaagacaagattctggttgcggtcaagaccctgaaagacgcttccgacaatgctcgcaaagatttccacagggaagcggaactgctaactaatctccagcatgagcacatcgttaaattctatggggtgtgtgttgagggggacccgctgatcatggtgttcgagtacatgaagcacggcgacctgaacaaattcttgcgtgcgcacgggcccgacgctgtgttaatggccgaaggtaaccctcccacagagcttacacagagtcaaatgctgcacattgcccagcaaattgcagcaggcatggtgtatctcgcttcacagcactttgtacatcgcgatctcgctaccaggaactgcctggttggtgagaatctgttggtcaaaatcggagacttcggcatgtcccgtgacgtgtatagcacagattactatagggtcggaggccatacaatgctgccaatccgctggatgcctcctgaaagcatcatgtataggaaattcacaactgagagtgatgtgtggtctttaggggtggtgctgtgggaaatttttacttacgggaaacagccatggtatcagctgtcaaacaacgaggtgatcgagtgtatcacccaaggcagggtgttacagcggccaaggacctgtccccaggaggtgtatgagctgatgctgggctgctggcagagagaacctcacatgcgaaaaaatattaaaggaatccataccctcctgcaaaatctggccaaggcgagtccagtgtatctggacattcttggctag

SEQ ID NO: 271517 - DNA, 4057 bp, Artificial Sequence
  derived and/or modified sequence
ggagcaggagcctcgctggctgcttcgctcgcgctctacgcgctcagtccccggcggtagcaggagcctggacccaggcgccgccggcgggcgtgaggcgccggagcccggcctcgaggtgcataccggacccccattcgcatctaacaaggaatctgcgccccagagagtcccgggagcgccgccggtcggtgcccggcgcgccgggccatgcagcgacggccgccgcggagctccgagcagcggtagcgcccccctgtaaagcggttcgctatgccggggccactgtgaaccctgccgcctgccggaacactcttcgctccggaccagctcagcctctgataagctggactcggcacgcccgcaacaagcaccgaggagttaagagagccgcaagcgcagggaaggcctccccgcacgggtgggggaaagcggccggtgcagcgcggggacaggcactcgggctggcactggctgctagggatgtcgtcctggataaggtggcatggacccgccatggcgcggctctggggcttctgctggctggttgtgggcttctggagggccgctttcgcctgtcccacgtcctgcaaatgcagtgcctctcggatctggtgcagcgacccttctcctggcatcgtggcatttccgagattggagcctaacagtgtagatcctgagaacatcaccgaaattttcatcgcaaaccagaaaaggttagaaatcatcaacgaagatgatgttgaagcttatgtgggactgagaaatctgacaattgtggattctggattaaaatttgtggctcataaagcatttctgaaaaacagcaacctgcagcacatcaattttacccgaaacaaactgacgagtttgtctaggaaacatttccgtcaccttgacttgtctgaactgatcctggtgggcaatccatttacatgctcctgtgacattatgtggatcaagactctccaagaggctaaatccagtccagacactcaggatttgtactgcctgaatgaaagcagcaagaatattcccctggcaaacctgcagatacccaattgtggtttgccatctgcaaatctggccgcacctaacctcactgtggaggaaggaaagtctatcacattatcctgtagtgtggcaggtgatccggttcctaatatgtattgggatgttggtaacctggtttccaaacatatgaatgaaacaagccacacacagggctccttaaggataactaacatttcatccgatgacagtgggaagcagatctcttgtgtggcggaaaatcttgtaggagaagatcaagattctgtcaacctcactgtgcattttgcaccaactatcacatttctcgaatctccaacctcagaccaccactggtgcattccattcactgtgaaaggcaaccccaaaccagcgcttcagtggttctataacggggcaatattgaatgagtccaaatacatctgtactaaaatacatgttaccaatcacacggagtaccacggctgcctccagctggataatcccactcacatgaacaatggggactacactctaatagccaagaatgagtatgggaaggatgagaaacagatttctgctcacttcatgggctggcctggaattgacgatggtgcaaacccaaattatcctgatgtaatttatgaagattatggaactgcagcgaatgacatcggggacaccacgaacagaagtaatgaaatcccttccacagacgtcactgataaaaccggtcgggaacatctctcggtctatgctgtggtggtgattgcgtctgtggtgggattttgccttttggtaatgctgtttctgcttaagttggcaagacactccaagtttggcatgaaagatttctcatggtttggatttgggaaagtaaaatcaagacaaggtgttggcccagcctccgttatcagcaatgatgatgactctgccagcccactccatcacatctccaatgggagtaacactccatcttcttcggaaggtggcccagatgctgtcattattggaatgaccaagatccctgtcattgaaaatccccagtactttggcatcaccaacagtcagctcaagccagacacatttgttcagcacatcaagcgacataacattgttctgaaaagggagctaggcgaaggagcctttggaaaagtgttcctagctgaatgctataacctctgtcctgagcaggacaagatcttggtggcagtgaagaccctgaaggatgccagtgacaatgcacgcaaggacttccaccgtgaggccgagctcctgaccaacctccagcatgagcacatcgtcaagttctatggcgtctgcgtggagggcgaccccctcatcatggtctttgagtacatgaagcatggggacctcaacaagttcctcagggcacacggccctgatgccgtgctgatggctgagggcaacccgcccacggaactgacgcagtcgcagatgctgcatatagcccagcagatcgccgcgggcatggtctacctggcgtcccagcacttcgtgcaccgcgatttggccaccaggaactgcctggtcggggagaacttgctggtgaaaatcggggactttgggatgtcccgggacgtgtacagcactgactactacagggtcggtggccacacaatgctgcccattcgctggatgcctccagagagcatcatgtacaggaaattcacgacggaaagcgacgtctggagcctgggggtcgtgttgtgggagattttcacctatggcaaacagccctggtaccagctgtcaaacaatgaggtgatagagtgtatcactcagggccgagtcctgcagcgaccccgcacgtgcccccaggaggtgtatgagctgatgctggggtgctggcagcgagagccccacatgaggaagaacatcaagggcatccataccctccttcagaacttggccaaggcatctccggtctacctggacattctaggctagggcccttttccccagaccgatccttcccaacgtactcctcagacgggctgagaggatgaacatcttttaactgccgctggaggccaccaagctgctctccttcactctgacagtattaacatcaaagactccgagaagctctcgagggaagcagtgtgtacttcttcatccatagacacagtattgacttctttttggcattatctctttctctctttccatctcccttggttgttcctttttctttttttaaattttctttttcttttttttttcgtcttccctgcttcacgattcttaccctttcttttgaatcaatctggcttctgcattactattaactctgcatagacaaaggccttaacaaacgtaatttgttatatcagcagacactccagtttgcccaccacaactaacaatgccttgttgtattcctgcctttgatgtggatgaaaaaaagggaaaacaaatatttcacttaaactttgtcacttctgctgtacagatatcgagagtttctatggattcacttctatttatttattattattactgttcttattgtttttggatggcttaagcctgtgtataaaaaagaaaacttgtgttcaatctgtgaagcctttatctatgggagattaaaaccagagagaaagaagatttattatgaaccgcaatatgggaggaacaaagacaaccactgggatcagctggtgtcagtccctacttaggaaatactcagcaactgttagctgggaagaatgtattcggcaccttcccctgaggacctttctgaggagtaaaaagactactggcctctgtgccatggatgattcttttcccatcaccagaaatgatagcgtgcagtagagagcaaagatggcttccgtgagacacaagatggcgcatagtgtgctcggacacagttttgtcttcgtaggttgtgatgatagcactggtttgtttctcaagcgctatccacagaacctttgtcaacttcagttgaaaagaggtggattcatgtccagagctcatttcggggtcaggtgggaaagcc

SEQ ID NO: 271518 - DNA, 5608 bp, Artificial Sequence
  derived and/or modified sequence
aagacggattctcagacaaggcttgcaaatgccccgcagccatcatttaactgcacccgcagaatagttacggtttgtcacccgaccctcccggatcgcctaatttgtccctagtgagaccccgaggctctgcccgcgcctggcttcttcgtagctggatgcatatcgtgctccgggcagcgcgggcgcagggcacgcgttcgcgcacaccctagcacacatgaacacgcgcaagagctgaaccaagcacggtttccatttcaaaaagggagacagcctctaccgcgattgtagaagagactgtggtgtgaattagggaccgggaggcgtcgaacggaggaacggttcatcttagagactaattttctggagtttctgcccctgctctgcgtcagccctcacgtcacttcgccagcagtagcagaggcggcggcggcggctcccggaattgggttggagcaggagcctcgctggctgcttcgctcgcgctctacgcgctcagtccccggcggtagcaggagcctggacccaggcgccgccggcgggcgtgaggcgccggagcccggcctcgaggtgcataccggacccccattcgcatctaacaaggaatctgcgccccagagagtcccgggagcgccgccggtcggtgcccggcgcgccgggccatgcagcgacggccgccgcggagctccgagcagcggtagcgcccccctgtaaagcggttcgctatgccggggccactgtgaaccctgccgcctgccggaacactcttcgctccggaccagctcagcctctgataagctggactcggcacgcccgcaacaagcaccgaggagttaagagagccgcaagcgcagggaaggcctccccgcacgggtgggggaaagcggccggtgcagcgcggggacaggcactcgggctggcactggctgctagggatgtcgtcctggataaggtggcatggacccgccatggcgcggctctggggcttctgctggctggttgtgggcttctggagggccgctttcgcctgtcccacgtcctgcaaatgcagtgcctctcggatctggtgcagcgacccttctcctggcatcgtggcatttccgagattggagcctaacagtgtagatcctgagaacatcaccgaaattttcatcgcaaaccagaaaaggttagaaatcatcaacgaagatgatgttgaagcttatgtgggactgagaaatctgacaattgtggattctggattaaaatttgtggctcataaagcatttctgaaaaacagcaacctgcagcacatcaattttacccgaaacaaactgacgagtttgtctaggaaacatttccgtcaccttgacttgtctgaactgatcctggtgggcaatccatttacatgctcctgtgacattatgtggatcaagactctccaagaggctaaatccagtccagacactcaggatttgtactgcctgaatgaaagcagcaagaatattcccctggcaaacctgcagatacccaattgtggtttgccatctgcaaatctggccgcacctaacctcactgtggaggaaggaaagtctatcacattatcctgtagtgtggcaggtgatccggttcctaatatgtattgggatgttggtaacctggtttccaaacatatgaatgaaacaagccacacacagggctccttaaggataactaacatttcatccgatgacagtgggaagcagatctcttgtgtggcggaaaatcttgtaggagaagatcaagattctgtcaacctcactgtgcattttgcaccaactatcacatttctcgaatctccaacctcagaccaccactggtgcattccattcactgtgaaaggcaaccccaaaccagcgcttcagtggttctataacggggcaatattgaatgagtccaaatacatctgtactaaaatacatgttaccaatcacacggagtaccacggctgcctccagctggataatcccactcacatgaacaatggggactacactctaatagccaagaatgagtatgggaaggatgagaaacagatttctgctcacttcatgggctggcctggaattgacgatggtgcaaacccaaattatcctgatgtaatttatgaagattatggaactgcagcgaatgacatcggggacaccacgaacagaagtaatgaaatcccttccacagacgtcactgataaaaccggtcgggaacatctctcggtctatgctgtggtggtgattgcgtctgtggtgggattttgccttttggtaatgctgtttctgcttaagttggcaagacactccaagtttggcatgaaagatttctcatggtttggatttgggaaagtaaaatcaagacaaggtgttggcccagcctccgttatcagcaatgatgatgactctgccagcccactccatcacatctccaatgggagtaacactccatcttcttcggaaggtggcccagatgctgtcattattggaatgaccaagatccctgtcattgaaaatccccagtactttggcatcaccaacagtcagctcaagccagacacatttgttcagcacatcaagcgacataacattgttctgaaaagggagctaggcgaaggagcctttggaaaagtgttcctagctgaatgctataacctctgtcctgagcaggacaagatcttggtggcagtgaagaccctgaaggatgccagtgacaatgcacgcaaggacttccaccgtgaggccgagctcctgaccaacctccagcatgagcacatcgtcaagttctatggcgtctgcgtggagggcgaccccctcatcatggtctttgagtacatgaagcatggggacctcaacaagttcctcagggcacacggccctgatgccgtgctgatggctgagggcaacccgcccacggaactgacgcagtcgcagatgctgcatatagcccagcagatcgccgcgggcatggtctacctggcgtcccagcacttcgtgcaccgcgatttggccaccaggaactgcctggtcggggagaacttgctggtgaaaatcggggactttgggatgtcccgggacgtgtacagcactgactactacagggtcggtggccacacaatgctgcccattcgctggatgcctccagagagcatcatgtacaggaaattcacgacggaaagcgacgtctggagcctgggggtcgtgttgtgggagattttcacctatggcaaacagccctggtaccagctgtcaaacaatgaggtgatagagtgtatcactcagggccgagtcctgcagcgaccccgcacgtgcccccaggaggtgtatgagctgatgctggggtgctggcagcgagagccccacatgaggaagaacatcaagggcatccataccctccttcagaacttggccaaggcatctccggtctacctggacattctaggctagggcccttttccccagaccgatccttcccaacgtactcctcagacgggctgagaggatgaacatcttttaactgccgctggaggccaccaagctgctctccttcactctgacagtattaacatcaaagactccgagaagctctcgagggaagcagtgtgtacttcttcatccatagacacagtattgacttctttttggcattatctctttctctctttccatctcccttggttgttcctttttctttttttaaattttctttttcttttttttttcgtcttccctgcttcacgattcttaccctttcttttgaatcaatctggcttctgcattactattaactctgcatagacaaaggccttaacaaacgtaatttgttatatcagcagacactccagtttgcccaccacaactaacaatgccttgttgtattcctgcctttgatgtggatgaaaaaaagggaaaacaaatatttcacttaaactttgtcacttctgctgtacagatatcgagagtttctatggattcacttctatttatttattattattactgttcttattgtttttggatggcttaagcctgtgtataaaaaagaaaacttgtgttcaatctgtgaagcctttatctatgggagattaaaaccagagagaaagaagatttattatgaaccgcaatatgggaggaacaaagacaaccactgggatcagctggtgtcagtccctacttaggaaatactcagcaactgttagctgggaagaatgtattcggcaccttcccctgaggacctttctgaggagtaaaaagactactggcctctgtgccatggatgattcttttcccatcaccagaaatgatagcgtgcagtagagagcaaagatggcttccgtgagacacaagatggcgcatagtgtgctcggacacagttttgtcttcgtaggttgtgatgatagcactggtttgtttctcaagcgctatccacagaacctttgtcaacttcagttgaaaagaggtggattcatgtccagagctcatttcggggtcaggtgggaaagccaagaacttggaaaagataagacaagctataaattcggaggcaagtttcttttacaatgaacttttcagatctcacttccctccgacccctaacttccatgcccacccgtccttttaactgtgcaagcaaaattgtgcatggtcttcgtcgattaataccttgtgtgcagacactactgctccagacgtcgtttccctgataggtagagcagatccataaaaaggtatgacttatacaattaggggaagctaatggagtttattagctgagtatcaatgtctctgcgttgtacggtggtgatgggttttaatgaatatggaccctgaagcctggaaatcctcatccacgtcgaacccacaggactgtgggaagggcagaatcaatccctaagggaaaggaaacctcaccctgagggcatcacatgcactcatgttcagtgtacacaggtcaagtcccttgctctgggctctagttgggagagtggtttcattccaagtgtactccattgtcagtatgctgtttttgtttccttcactccattcaaaaagtcaaaatacaaaatttggcacagcatgccaacgggaggctgtgcccagaccaagcactggaagtgtgcttctaggcatagtcattggttttgcaaaaagagggctcaaatttaaatagaaatttacagctatttgaatggtcagatataccaagaaagaaaaatatttctgttcctcaagaaaacttgctaccctctgtgaggggaattttgctaaacttgacatctttataacatgagccagattgaaagggagtgattttcattcatcttaggtcatgttatttcatatttgtttctgaaggtgcgatagctctgttttaggttttgcttgcgcctgttaattactggaacaccttatttttcattaaaggctttgaaagccaattctcaaaaattcaaaagtgcaaattaacagaacaaaaggaaatccagtagcaactgcagtcaagcgagggagttgacaagataaaccttacgtccattcaagttatatgctggcctatgagagatgagagttgggtcgtttgttctctttgttgatgattt

SEQ ID NO: 271519 - DNA, 2517 bp, Artificial Sequence
  derived and/or modified sequence
atgtcaagttggatccgttggcacgggcctgccatggcacgactttggggcttctgctggctcgttgtgggattctggcgcgcagcattcgcgtgccctactagctgcaagtgctccgcgagtcgtatttggtgtagtgatccttcacccggaattgtggcattcccaagactcgagcctaactccgtggaccccgaaaatatcacagagatattcatcgccaaccagaaacgtctagaaatcattaatgaggatgatgtggaagcttacgtcgggctccgtaacctgacaatcgtggatagtggactgaaattcgtggcccataaggcttttctaaaaaactcaaatctccagcacattaattttacacggaataaactcacaagcctttcacgcaagcactttcgccacctggacttgtccgagctgatcctggtggggaacccgttcacttgctcctgcgatattatgtggatcaaaaccctacaagaggcgaaatctagtcccgacacccaggatttatattgcttgaatgagtcaagcaaaaacataccactcgcgaatttgcagatcccgaactgtggcctcccaagcgccaatctcgcagctcccaacctcacagttgaagagggtaagagcatcaccctctcctgttccgtggccggagatccagtccctaacatgtattgggacgtgggcaacctggtaagtaaacacatgaacgaaacctcacatactcaggggtctttgagaattaccaacatctcatctgacgattcaggcaaacaaatctcttgtgtagcagaaaatcttgtcggagaagaccaagattccgtaaatctcacggtacattttgcccctacaattactttcctggagagcccaacctcagatcaccattggtgtatcccattcacagttaaaggaaaccctaagccagcactgcagtggttttataacggcgcaatactgaacgagagcaagtacatttgtacgaaaatccacgtaacgaatcacacagaatatcacggatgcctccaactggataatcctacccacatgaataacggagattatacgctgatagctaaaaacgaatacggcaaagacgaaaagcaaatttctgcccactttatgggatggcccggaatcgacgacggggctaatcccaattatcctgacgtcatatatgaggactatggcacggcggcaaatgatatcggcgacaccaccaatcgcagtaacgaaatcccatctacggacgtgacagataagacaggcagagaacacctgagcgtgtacgctgtggtcgtcattgcctcagttgtaggattctgtttgctagtcatgttgttccttctcaagcttgctagacactccaagttcggtatgaaggacttttcctggttcggattcgggaaagtgaaatcaagacagggagtgggacccgcttccgtgattagcaacgacgatgattctgcatctccactgcatcacataagcaacggatctaacactccttctagctccgaaggcggacccgacgcggtcataatcgggatgactaagattcctgtcatcgagaacccccagtactttggaattacaaattcacagctcaagcctgataccttcgtccagcacattaagcgccacaacatcgtgctcaagcgcgagctgggcgagggtgcctttgggaaggtctttctggccgaatgttacaacttgtgcccagagcaggacaagattctggtggccgtcaagacgctcaaggacgcttctgataatgcccgaaaagacttccaccgcgaggccgaactgctgactaatctccagcatgaacatatagtgaagttctatggcgtttgtgttgagggcgatcccctgataatggtatttgagtatatgaaacatggggatctcaataaattcctccgcgctcacgggcctgatgcggttctgatggccgaggggaacccccctacagagctcacccaatctcagatgctccacattgcccagcaaattgcagcaggtatggtgtacctggcctctcagcatttcgtgcatcgagatttggccactcgaaactgcctggtgggagagaatctcctggtgaaaatcggggacttcggcatgtctagggacgtttattctactgactattatcgggtgggcggacacaccatgctgccgattcgttggatgcccccagagtcaattatgtatcgcaaatttaccaccgaatcagacgtgtggtcgttaggcgtggtcctatgggagatcttcacgtacggaaaacagccttggtatcagttatcaaataatgaggttattgaatgcatcacccaaggcagggtgcttcagcgcccaagaacctgtccccaggaggtgtatgaacttatgctaggttgttggcaaagggagccacatatgaggaagaacattaaaggaattcacacacttctgcagaatctggcgaaggcctcaccagtctacttggatatcctgggatag

SEQ ID NO: 271520 - DNA, 2517 bp, Artificial Sequence
  derived and/or modified sequence
atgtcgtcgtggattcgctggcatggtcccgctatggctcgcctctggggcttctgctggcttgtggtgggattttggcgagccgcatttgcatgtccaacatcctgtaaatgcagcgcttcgcgtatatggtgttccgacccgtcgcctggaatcgtggcattcccaagactggagccgaactcagtagaccctgagaacataacagagattttcatcgcaaatcagaaaaggctcgaaattatcaatgaagatgacgtcgaagcttatgttgggctcaggaacctgacgatagtggattcaggtctcaagttcgtggcccacaaggcattcctcaagaactcaaacctgcagcatatcaatttcactagaaataaactgacctcattgagtagaaaacacttcagacatctggatctcagtgaattgatcctcgtggggaaccccttcacttgctcctgcgatatcatgtggataaaaacactccaagaggctaagagttcaccagatacccaggatctgtattgtcttaatgagagtagcaaaaacatccccttggctaatctccaaatccctaactgcggattaccttccgccaacctagctgcccctaatctgactgtggaagaggggaagtcaattactttaagttgttctgtggcaggtgaccctgtgccaaacatgtattgggatgttggcaacctggtcagtaaacacatgaacgagacctctcacactcaaggttctctccgaatcactaacatctccagcgatgactcgggtaagcaaatttcctgtgttgctgaaaaccttgtcggcgaagaccaggacagcgtcaatctcacggtacactttgctccaacaatcacattcctggaatcccctacttcagaccatcactggtgtattccatttactgtgaagggaaaccccaaaccagcacttcagtggttctataacggcgcaattctgaacgaatccaagtatatctgcaccaagattcacgtgaccaaccatacggagtaccacggctgtctgcagttggacaatccaacgcatatgaataacggcgattacacactgatcgcaaaaaatgagtatgggaaggatgagaaacagatcagtgcccacttcatgggatggcccggaatcgacgacggcgctaatccaaattacccagacgttatctacgaggactatggaaccgcggctaacgatatcggtgataccaccaatcggagtaacgagatcccgtctactgacgtgaccgataaaaccgggcgtgagcacttgagtgtgtacgctgtggtcgtgatcgcatcggtggttggcttttgtttgctggttatgttattcctgctgaaactagcaagacattcaaaatttggcatgaaagatttttcctggtttgggttcggcaaggttaaatcacggcagggggtggggcctgcaagcgtgatctccaacgatgacgatagtgcttctccactgcaccacatttcaaacggatccaacaccccctcgtctagtgaaggcggacccgatgcggttatcatcggaatgaccaagatccccgtgatcgaaaatccacagtactttggaatcaccaattctcaattaaaacctgacacatttgtgcagcatattaagcggcacaatatcgtacttaaaagagaactgggcgagggcgctttcggcaaagtgttcctggcggagtgttacaacctgtgccctgagcaagacaagatactcgtagctgtgaaaaccctgaaagatgcatcagacaacgcccgaaaagattttcaccgcgaggctgagcttttgactaatctacagcacgagcacatcgtcaagttctatggagtgtgtgtcgagggggatcctctaattatggtgtttgaatatatgaagcatggggacttgaataaattcttacgggcacacggaccagacgccgttctgatggcagagggtaatccacctactgaactgactcagagtcagatgctgcatatcgcccaacagattgcggctggcatggtgtacctggcaagccaacactttgtgcaccgagatctcgcaaccaggaattgtcttgtgggagagaatctgctggtcaagatcggcgacttcggtatgagccgcgacgtttattccacagactactatcgagttgggggacacacgatgctgcccatcaggtggatgcctccagagtccatcatgtatcggaagtttacgacagaaagtgacgtgtggtcactgggcgtggtgctatgggaaattttcacatatggaaaacagccctggtaccagctcagtaataatgaggtgattgagtgtatcactcaggggagagtcttgcagagaccacgcacctgcccacaggaagtgtacgagttaatgttaggttgctggcagagggagccacatatgcgaaaaaatatcaaaggaatccacacattattgcagaacctcgccaaggcttctccagtttatctggacatcctgggctag

SEQ ID NO: 271521 - DNA, 2517 bp, Artificial Sequence
  derived and/or modified sequence
atgagcagctggatcagatggcacggccccgccatggccagactgtggggcttctgctggctggtggtgggcttctggagagccgccttcgcctgccccaccagctgcaagtgcagcgccagcagaatctggtgcagcgaccccagccccggcatcgtggccttccccagactggagcccaacagcgtggaccccgagaacatcaccgagatcttcatcgccaaccagaagagactggagatcatcaacgaggacgacgtggaggcctacgtgggcctgagaaacctgaccatcgtggacagcggcctgaagttcgtggcccacaaggccttcctgaagaacagcaacctgcagcacatcaacttcaccagaaacaagctgaccagcctgagcagaaagcacttcagacacctggacctgagcgagctgatcctggtgggcaaccccttcacctgcagctgcgacatcatgtggatcaagaccctgcaggaggccaagagcagccccgacacccaggacctgtactgcctgaacgagagcagcaagaacatccccctggccaacctgcagatccccaactgcggcctgcccagcgccaacctggccgcccccaacctgaccgtggaggagggcaagagcatcaccctgagctgcagcgtggccggcgaccccgtgcccaacatgtactgggacgtgggcaacctggtgagcaagcacatgaacgagaccagccacacccagggcagcctgagaatcaccaacatcagcagcgacgacagcggcaagcagatcagctgcgtggccgagaacctggtgggcgaggaccaggacagcgtgaacctgaccgtgcacttcgcccccaccatcaccttcctggagagccccaccagcgaccaccactggtgcatccccttcaccgtgaagggcaaccccaagcccgccctgcagtggttctacaacggcgccatcctgaacgagagcaagtacatctgcaccaagatccacgtgaccaaccacaccgagtaccacggctgcctgcagctggacaaccccacccacatgaacaacggcgactacaccctgatcgccaagaacgagtacggcaaggacgagaagcagatcagcgcccacttcatgggctggcccggcatcgacgacggcgccaaccccaactaccccgacgtgatctacgaggactacggcaccgccgccaacgacatcggcgacaccaccaacagaagcaacgagatccccagcaccgacgtgaccgacaagaccggcagagagcacctgagcgtgtacgccgtggtggtgatcgccagcgtggtgggcttctgcctgctggtgatgctgttcctgctgaagctggccagacacagcaagttcggcatgaaggacttcagctggttcggcttcggcaaggtgaagagcagacagggcgtgggccccgccagcgtgatcagcaacgacgacgacagcgccagccccctgcaccacatcagcaacggcagcaacacccccagcagcagcgagggcggccccgacgccgtgatcatcggcatgaccaagatccccgtgatcgagaacccccagtacttcggcatcaccaacagccagctgaagcccgacaccttcgtgcagcacatcaagagacacaacatcgtgctgaagagagagctgggcgagggcgccttcggcaaggtgttcctggccgagtgctacaacctgtgccccgagcaggacaagatcctggtggccgtgaagaccctgaaggacgccagcgacaacgccagaaaggacttccacagagaggccgagctgctgaccaacctgcagcacgagcacatcgtgaagttctacggcgtgtgcgtggagggcgaccccctgatcatggtgttcgagtacatgaagcacggcgacctgaacaagttcctgagagcccacggccccgacgccgtgctgatggccgagggcaacccccccaccgagctgacccagagccagatgctgcacatcgcccagcagatcgccgccggcatggtgtacctggccagccagcacttcgtgcacagagacctggccaccagaaactgcctggtgggcgagaacctgctggtgaagatcggcgacttcggcatgagcagagacgtgtacagcaccgactactacagagtgggcggccacaccatgctgcccatcagatggatgccccccgagagcatcatgtacagaaagttcaccaccgagagcgacgtgtggagcctgggcgtggtgctgtgggagatcttcacctacggcaagcagccctggtaccagctgagcaacaacgaggtgatcgagtgcatcacccagggcagagtgctgcagagacccagaacctgcccccaggaggtgtacgagctgatgctgggctgctggcagagagagccccacatgagaaagaacatcaagggcatccacaccctgctgcagaacctggccaaggccagccccgtgtacctggacatcctgggctag

SEQ ID NO: 271522 - protein, 477 aa, Artificial Sequence
  derived and/or modified sequence
MSSWIRWHGPAMARLWGFCWLVVGFWRAAFACPTSCKCSASRIWCSDPSPGIVAFPRLEPNSVDPENITEIFIANQKRLEIINEDDVEAYVGLRNLTIVDSGLKFVAHKAFLKNSNLQHINFTRNKLTSLSRKHFRHLDLSELILVGNPFTCSCDIMWIKTLQEAKSSPDTQDLYCLNESSKNIPLANLQIPNCGLPSANLAAPNLTVEEGKSITLSCSVAGDPVPNMYWDVGNLVSKHMNETSHTQGSLRITNISSDDSGKQISCVAENLVGEDQDSVNLTVHFAPTITFLESPTSDHHWCIPFTVKGNPKPALQWFYNGAILNESKYICTKIHVTNHTEYHGCLQLDNPTHMNNGDYTLIAKNEYGKDEKQISAHFMGWPGIDDGANPNYPDVIYEDYGTAANDIGDTTNRSNEIPSTDVTDKTGREHLSVYAVVVIASVVGFCLLVMLFLLKLARHSKFGMKGFVLFHKIPLDG

SEQ ID NO: 271523 - protein, 321 aa, Artificial Sequence
  derived and/or modified sequence
MWIKTLQEAKSSPDTQDLYCLNESSKNIPLANLQIPNCGLPSANLAAPNLTVEEGKSITLSCSVAGDPVPNMYWDVGNLVSKHMNETSHTQGSLRITNISSDDSGKQISCVAENLVGEDQDSVNLTVHFAPTITFLESPTSDHHWCIPFTVKGNPKPALQWFYNGAILNESKYICTKIHVTNHTEYHGCLQLDNPTHMNNGDYTLIAKNEYGKDEKQISAHFMGWPGIDDGANPNYPDVIYEDYGTAANDIGDTTNRSNEIPSTDVTDKTGREHLSVYAVVVIASVVGFCLLVMLFLLKLARHSKFGMKGFVLFHKIPLDG

SEQ ID NO: 271524 - DNA, 1434 bp, Artificial Sequence
  derived and/or modified sequence
atgtcttcctggattagatggcatggtccggccatggctagactgtggggcttttgctggctggtggtaggattttggagggccgcttttgcctgccctacctcctgtaaatgttctgccagccggatttggtgtagcgacccaagcccggggatcgtggcttttccccgactggagccaaatagcgtcgatccggaaaatatcaccgaaatttttatagcaaaccaaaaacgtctcgaaattatcaatgaggacgacgtcgaggcatatgtgggcctccggaatctcaccatcgttgacagtggcttaaaattcgtagcccataaagctttcctgaaaaattccaatcttcagcacattaattttacacggaacaaattaaccagcctgtcaagaaaacatttcaggcacctcgacctgtccgagctgatcctggttggcaaccccttcacctgcagttgcgacatcatgtggataaagacgttgcaggaagcaaagtcttcccctgacacgcaagacctttactgcctgaatgagagtagtaaaaatattcctctggcaaatcttcaaatccctaattgtggcctaccctccgccaatttagccgcaccaaacctgaccgtggaggaggggaaatccattacactgtcgtgctccgtggccggcgaccccgttcctaatatgtactgggacgtaggcaaccttgtgagcaaacacatgaacgaaaccagtcatacccagggctcccttcgcataacgaacattagcagtgacgatagcggaaaacagattagctgtgtggccgagaatttagttggtgaggatcaggattccgtaaaccttacggtacacttcgcccccacgattacgttcttagaatctcccacttccgaccatcactggtgtatacccttcacagtgaagggaaacccaaagcccgccctccagtggttctataatggcgcaattttgaacgagtccaaatatatttgcactaagatccatgtgactaatcatacagagtatcatggatgcctgcagctcgacaatccaacgcacatgaacaacggcgattataccttaattgccaaaaatgagtacggaaaagatgagaagcagatcagcgctcactttatgggctggcccggcattgatgacggagccaaccccaactacccagacgtcatctacgaggattatggaaccgctgcaaatgacattggagacacaactaatcgcagcaatgagatccccagcaccgatgtaaccgacaaaacagggcgcgagcacctcagtgtgtatgcagtcgtcgtgattgcttcagtggtgggattctgcttacttgtgatgctgtttcttctgaagctggccagacactctaagtttggaatgaagggttttgtgttattccataagattcctttggacggttag

SEQ ID NO: 271525 - DNA, 966 bp, Artificial Sequence
  derived and/or modified sequence
atgtggatcaagacactacaggaagctaagtcgtccccagacacccaagacttatattgcctaaatgagagtagcaagaatattccactcgctaacctacagattccaaattgcgggctgcccagtgccaatctcgccgcacctaacctaaccgtagaggagggaaaatctataacactttcctgctccgtggccggagatcctgtgccaaatatgtactgggacgtgggaaatttggtgtccaaacatatgaacgaaacgtcccacacgcaaggctctttaagaataactaatatctcctctgacgattccggcaaacagatatcctgtgtcgcggagaatttagttggcgaggatcaggatagcgttaatctaacagtacacttcgcccccacaattacgttcctggagagccctactagcgaccatcattggtgtattcccttcaccgtgaagggaaacccgaagccagcactgcagtggttctacaatggggctatccttaacgaatcaaagtacatctgtacgaagatccatgtgaccaaccacacagagtaccacggatgtctgcagctcgacaatccaactcacatgaacaacggagactatacactcatcgcaaagaatgagtacggaaaagacgagaaacagattagcgcccattttatgggatggcctggtatagatgatggagcgaacccaaactaccctgatgttatttacgaggattacggtacagccgccaatgatatcggagacaccaccaatcggtcaaatgagattcccagcaccgatgttactgacaagacggggagagagcacttaagcgtgtacgccgtggtggtgattgcctccgtggttgggttttgcctccttgtcatgctcttcctattaaaactggctagacactccaagtttggcatgaagggttttgttcttttccacaagatccctcttgatggctag

SEQ ID NO: 271526 - DNA, 1434 bp, Artificial Sequence
  derived and/or modified sequence
atgtctagctggattaggtggcacggacctgctatggctcgactgtggggcttctgttggttggtcgttggtttctggcgcgccgcattcgcttgtccaacaagttgcaagtgttccgcttcaaggatttggtgctcggatccttctcctggtatcgtggcttttcccaggctcgaacctaattccgtcgaccccgaaaacatcaccgaaatttttattgcgaatcagaagcgtctcgagatcatcaatgaggatgatgtggaagcctacgtagggttgcgtaacttaactatcgttgacagcgggcttaaattcgtggctcataaggcttttctgaagaatagcaacctccagcacatcaactttactcgcaataagcttacaagtttaagccgcaaacactttcgacacttagatttgtcggaactgattctggtaggcaatccctttacctgctcctgtgatattatgtggataaaaacactacaagaggccaaaagcagccccgacacacaggatctctactgcctgaatgaaagctccaaaaatataccactcgctaatctccagatccccaattgtggcctaccaagtgcgaatctggccgcgcccaacctgaccgtcgaagagggtaaaagcataacactgtcttgctccgttgctggcgacccagtgccaaacatgtactgggacgtgggaaacctcgtgtcaaaacatatgaacgaaacatcgcacacccagggctcgctgagaattactaacatctctagcgacgattccggaaagcagatatcttgcgttgccgagaacttggtgggagaggaccaagacagcgtcaacctcactgttcattttgcgccgacaataacgttcttggaaagccccaccagcgatcaccattggtgtattccttttactgtaaagggtaacccgaagcctgccctccaatggttctataatggcgctatcttgaacgagtccaagtacatttgcactaagatccacgtcactaaccacacagaataccacggctgcctgcagctggacaatcccacccatatgaataacggagactacactctcattgccaagaacgaatatggtaaagacgaaaagcagataagtgcccactttatggggtggccagggatcgatgacggagctaacccaaattacccagacgttatctatgaggattatgggacggctgccaatgatattggtgacaccaccaataggtccaacgagattccttcaacagacgttacagataagactggacgggagcacctatctgtttacgccgtggtggtgattgcttccgttgtgggcttctgcttactggtaatgctgttcctcctgaagctggcaagacattccaaatttggaatgaagggcttcgtactcttccataaaattcctttggatggctag

SEQ ID NO: 271527 - DNA, 1434 bp, Artificial Sequence
  derived and/or modified sequence
atgagctcctggatccgctggcacggccctgccatggcccggctgtggggcttctgctggctggtggtgggcttctggagggctgcctttgcctgccccaccagctgcaagtgcagcgccagccgcatctggtgcagcgaccccagccctggcatcgtggccttcccccggctggagcccaacagcgtggaccctgagaacatcacagagatcttcatcgccaaccagaagaggctggagatcatcaatgaagatgatgtggaggcctacgtgggcctgaggaacctgaccatcgtggacagcggcctgaagtttgtggcccacaaggccttcctgaagaacagcaacctgcagcacatcaacttcaccaggaacaagctgaccagcctgagcaggaagcacttccgccacctggacctgtctgagctgatcctggtgggcaaccccttcacctgcagctgtgacatcatgtggatcaagaccctgcaggaggccaagagcagcccagacacccaggacctgtactgcctgaatgaaagcagcaagaacatccccctggccaacctgcagatccccaactgtggcctgcccagcgccaacctggccgcccccaacctgactgtggaggagggcaagagcatcaccctgagctgcagcgtggccggggaccctgtgcccaacatgtactgggatgtgggcaacctggtgtccaagcacatgaatgagaccagccacacccagggcagcctgcgcatcaccaacatcagcagtgatgacagcggcaagcagatcagctgtgtggccgagaacctggtgggggaggaccaggacagcgtgaacctgactgtgcactttgcccccaccatcaccttcctggagagccccaccagtgaccaccactggtgcatccccttcaccgtgaagggcaaccccaagccagccctgcagtggttctacaacggggccatcctgaatgaaagcaagtacatctgcaccaagatccacgtgaccaaccacacagagtaccacggctgcctgcagctggacaaccccacccacatgaacaacggggactacaccctcatcgccaagaatgaatatggcaaggatgagaagcagatcagcgcccacttcatgggctggccaggcattgatgatggagccaaccccaactacccagatgtgatctatgaggactatggaacagctgccaatgacattggagacaccaccaacagaagcaatgagatccccagcacagatgtgacagacaagacaggccgggagcacctgtctgtgtatgctgtggtggtgattgcctctgtggtgggcttctgcctgctggtgatgctgttcctgctgaagctggcccggcacagcaagtttggcatgaagggctttgtgctcttccacaagatccccctggatggatag

SEQ ID NO: 271528 - DNA, 966 bp, Artificial Sequence
  derived and/or modified sequence
atgtggatcaagaccctgcaggaggccaagagcagcccagacacccaggacctgtactgcctgaatgaaagcagcaagaacatccccctggccaacctgcagatccccaactgtggcctgcccagcgccaacctggccgcccccaacctgactgtggaggagggcaagagcatcaccctgagctgcagcgtggccggggaccctgtgcccaacatgtactgggatgtgggcaacctggtgtccaagcacatgaatgagaccagccacacccagggcagcctgcgcatcaccaacatcagcagtgatgacagcggcaagcagatcagctgtgtggccgagaacctggtgggggaggaccaggacagcgtgaacctgactgtgcactttgcccccaccatcaccttcctggagagccccaccagtgaccaccactggtgcatccccttcaccgtgaagggcaaccccaagccagccctgcagtggttctacaacggggccatcctgaatgaaagcaagtacatctgcaccaagatccacgtgaccaaccacacagagtaccacggctgcctgcagctggacaaccccacccacatgaacaacggggactacaccctcatcgccaagaatgaatatggcaaggatgagaagcagatcagcgcccacttcatgggctggccaggcattgatgatggagccaaccccaactacccagatgtgatctatgaggactatggaacagctgccaatgacattggagacaccaccaacagaagcaatgagatccccagcacagatgtgacagacaagacaggccgggagcacctgtctgtgtatgctgtggtggtgattgcctctgtggtgggcttctgcctgctggtgatgctgttcctgctgaagctggcccggcacagcaagtttggcatgaagggctttgtgctcttccacaagatccccctggatggatag

SEQ ID NO: 271529 - DNA, 1434 bp, Artificial Sequence
  derived and/or modified sequence
atgagcagctggatccggtggcacggccccgccatggcccggctgtgggggttttgttggctagtggtcggtttctggagagccgcttttgcctgtcccaccagctgcaagtgttctgccagccgtatttggtgcagcgacccatcccctggcatcgtagcttttccacgtctggagcccaactccgttgatcccgagaacataacggagatcttcatcgcgaatcagaagcgtctcgaaatcatcaacgaggatgacgttgaagcttacgtaggcttgaggaatctcaccatcgtagacagcggactgaagttcgtcgcacacaaggcctttctgaaaaactcaaatctgcaacacatcaatttcacaaggaacaaactcacatctcttagtaggaagcatttccgtcatctggacttgtccgaactcatcctcgtggggaatcccttcacatgctcctgtgacattatgtggattaagactctgcaggaagcaaagagctcgcccgatacccaggacctctattgcttgaatgaatcttccaaaaacataccgctcgccaatctacaaatccctaactgcggactccccagcgccaatctggccgctcctaacctaacagtggaggagggaaagtccatcaccctaagctgttctgtggccggtgatccagtgcccaatatgtattgggatgtgggcaatcttgtgagcaagcacatgaacgaaaccagccatacccagggaagccttagaatcacaaacatatcttctgatgactcaggaaagcagatttcatgcgtagccgaaaacctcgttggagaggatcaggactccgtaaaccttaccgtccatttcgctccaaccattaccttcctggaatcccccacttctgaccatcactggtgcatcccctttacggtgaagggcaaccccaagccagccctgcagtggttctacaacggtgccatcctgaatgagtccaagtatatctgtactaaaattcatgtcactaaccatacggaataccatggttgccttcagttagataacccaacacacatgaacaacggagattacaccctgatcgccaaaaacgagtacggcaaggacgagaagcagattagcgcccactttatgggctggccgggtattgacgatggcgctaaccccaattaccctgatgtgatatatgaagattatggcacggcagctaatgatattggggacacgacaaaccgcagcaacgaaattccaagcacggacgttaccgacaagaccggcagagaacacttgagtgtctatgctgtagtagtgattgcctccgtcgtgggtttctgccttctagtaatgctgtttctcttgaagttggcacgccacagtaagttcggaatgaaaggttttgttctgttccataaaatccctctagatggttag

SEQ ID NO: 271530 - DNA, 966 bp, Artificial Sequence
  derived and/or modified sequence
atgtggatcaagaccctgcaggaggccaagagcagccccgacacccaggacctgtactgcctgaacgagagttcaaaaaatatcccactggccaacttacagattcccaattgtgggcttccgtctgctaaccttgccgcccctaacctgaccgttgaagaaggtaagagtattaccttatcctgcagtgttgcgggggatcccgtgcctaacatgtactgggacgtggggaacctggtttcaaagcacatgaatgagacttcacacactcaaggatctttgagaattaccaacataagcagtgatgactctggtaagcagatcagttgtgtcgctgagaaccttgtgggcgaggatcaggattccgtcaatctcacagtgcactttgcccctaccatcacatttctggaatcgcccactagcgatcaccactggtgtatccctttcacagtgaaagggaatccgaaacccgcgctgcagtggttctataacggtgccatcctgaatgagagtaagtacatctgtacaaagattcacgtcacaaatcacaccgagtatcatggctgccttcagttggacaaccccacccatatgaataacggcgattacactctgattgcaaaaaacgagtacggaaaggacgagaagcagattagtgcacatttcatggggtggcccggcattgacgacggagccaatccaaattatcctgatgtgatctatgaagattatggcacggcagcaaacgacattggggataccacgaatagaagtaacgagatcccttctactgatgtgaccgataaaaccggcagagaacacctctctgtttacgcagtggtcgtcatcgcaagcgtagtaggcttttgcctccttgtgatgctgttcctgttgaaactggctcgccacagtaaattcggaatgaagggctttgtcctgtttcacaaaatacccttggacggctag

SEQ ID NO: 271531 - DNA, 1434 bp, Artificial Sequence
  derived and/or modified sequence
atgagcagctggatccggtggcacggccccgccatggcccggctgtggggattctgttggttggtggttggtttctggcgcgccgctttcgcatgtccaacctcctgcaaatgcagcgccagtcgaatatggtgcagcgacccttctcccggcattgtggcattccccaggctggagcctaattcagtagatccagaaaacatcacagagatatttatcgctaaccaaaagcgcctcgagataattaacgaagacgacgtggaggcctacgtcggcctgcgcaatctgacgattgtggattcagggctgaaatttgtcgcccacaaggcattccttaaaaattctaaccttcaacatattaacttcacacggaataaattaaccagcctctctcgcaagcattttcgccacctggatcttagtgagctgatcctcgtggggaacccattcacgtgctcgtgcgacataatgtggatcaagactcttcaggaagctaagagtagccccgacacccaggatctctattgcctgaacgagtcaagcaaaaacattcccctagctaatttgcagataccaaactgtgggctgccctcagctaacctggctgcccctaacctgacagtcgaggaaggcaagagcattacactttcctgctctgtcgccggtgacccagtcccaaacatgtactgggatgtggggaatcttgtgtccaaacatatgaacgaaactagtcatactcaggggagcctcaggataacgaatatttctagcgacgatagcgggaaacagattagctgcgtggccgagaacctggtgggggaggatcaagactctgtgaatctgaccgtacattttgcccctaccattaccttcctggagtcacccacctcagaccaccattggtgcataccattcacggtaaaaggcaatcctaagcctgcactccaatggttttacaacggggctatcctgaacgagagcaagtacatttgtacgaagattcatgtgaccaatcacacagaataccacggttgcctgcaactggacaatcccacccacatgaataacggcgactataccttaatcgctaagaatgagtacggcaaggacgagaaacagatttctgcccactttatggggtggcctggcattgatgatggtgccaatcccaactacccagatgtaatctacgaagactatggcaccgcagcaaatgacattggcgacacaacaaaccgctccaacgagatacctagcaccgacgtgacagacaaaaccggacgtgagcacttgtctgtgtatgccgtggttgtcatagcatcagttgtgggtttctgtctcctcgtgatgttattcctactgaagctggctcgccattctaagttcggaatgaaaggcttcgtcctatttcataagatcccacttgatggttag

SEQ ID NO: 271532 - DNA, 6646 bp, Artificial Sequence
  derived and/or modified sequence
aagcgcagggaaggcctccccgcacgggtgggggaaagcggccggtgcagcgcggggacaggcactcgggctggcactggctgctagggatgtcgtcctggataaggtggcatggacccgccatggcgcggctctggggcttctgctggctggttgtgggcttctggagggccgctttcgcctgtcccacgtcctgcaaatgcagtgcctctcggatctggtgcagcgacccttctcctggcatcgtggcatttccgagattggagcctaacagtgtagatcctgagaacatcaccgaaattttcatcgcaaaccagaaaaggttagaaatcatcaacgaagatgatgttgaagcttatgtgggactgagaaatctgacaattgtggattctggattaaaatttgtggctcataaagcatttctgaaaaacagcaacctgcagcacatcaattttacccgaaacaaactgacgagtttgtctaggaaacatttccgtcaccttgacttgtctgaactgatcctggtgggcaatccatttacatgctcctgtgacattatgtggatcaagactctccaagaggctaaatccagtccagacactcaggatttgtactgcctgaatgaaagcagcaagaatattcccctggcaaacctgcagatacccaattgtggtttgccatctgcaaatctggccgcacctaacctcactgtggaggaaggaaagtctatcacattatcctgtagtgtggcaggtgatccggttcctaatatgtattgggatgttggtaacctggtttccaaacatatgaatgaaacaagccacacacagggctccttaaggataactaacatttcatccgatgacagtgggaagcagatctcttgtgtggcggaaaatcttgtaggagaagatcaagattctgtcaacctcactgtgcattttgcaccaactatcacatttctcgaatctccaacctcagaccaccactggtgcattccattcactgtgaaaggcaaccccaaaccagcgcttcagtggttctataacggggcaatattgaatgagtccaaatacatctgtactaaaatacatgttaccaatcacacggagtaccacggctgcctccagctggataatcccactcacatgaacaatggggactacactctaatagccaagaatgagtatgggaaggatgagaaacagatttctgctcacttcatgggctggcctggaattgacgatggtgcaaacccaaattatcctgatgtaatttatgaagattatggaactgcagcgaatgacatcggggacaccacgaacagaagtaatgaaatcccttccacagacgtcactgataaaaccggtcgggaacatctctcggtctatgctgtggtggtgattgcgtctgtggtgggattttgccttttggtaatgctgtttctgcttaagttggcaagacactccaagtttggcatgaaaggttttgttttgtttcataagatcccactggatgggtagctgaaataaaggaaaagacagagaaaggggctgtggtgcttgttggttgatgctgccatgtaagctggactcctgggactgctgttggcttatcccgggaagtgctgcttatctggggttttctggtagatgtgggcggtgtttggaggctgtactatatgaagcctgcatatactgtgagctgtgattggggaacaccaatgcagaggtaactctcaggcagctaagcagcacctcaagaaaacatgttaaattaatgcttctcttcttacagtagttcaaatacaaaactgaaatgaaatcccattggattgtacttctcttctgaaaagtgtgctttttgaccctactggacatttattgacttaattgcttctgtttattaaaattgacctgcaaagttaaaaaaaaattaaagttgagaacaggtataagtgcacactgaatagtctaatctacatgtaacacatattttagtgtgattttctatactctaatcagcactgaattcagagggtttgactttttcatctataacacagtgactaaaagagttaagggtatatataccatcactttgggacttggtagtattattaaaaggttatttccttcactgtcaataaaagtccaaatgtttagcttaggtctgagagtcaaacaatgttaaggattgtcttaaagttccttagccagcaaaacaaaacaaaacaaaacaaacaaatgaaaaacgtttaaaaagaagaagaagaaaaaaaacaagaacaagcagcaacagctgttttgttggggctatagatttaagttaggcatagtcaatttcagaataactaagagtggaatatatgcatatggtgaaattataaccttgcccttttttatttgccctctgcgatccacctgctttttagaagtctgccgagtgagaaggccacagtatctcatgctgtttgcattacagaactgcagcttttctactctgaaaaggcctgggagcagaatggctggcctgctgtgagcaggagaggagattctaagaaggatagtcccccctacaacatactgtcatactgctgggttttcatgggtaggaaagcttgtcctgaccccagcagcaaagaggtggcaggtcgctaatgaatatatgctttataatgtccttcttcattgctgagagggcagccttagagctgtggatttctgcatcccccctgagtctgacccatggacacctgtttcattcactttagcatcacagtgacctttgtatgctctgttcagtctgtgtcaggcagtatgcttgtcctgaagagaggtttggctatccccaccccaccccaccccaccctgttccttttttatcaggaggacttcagagccaggcctgcagcattttgtttgaaaacacaatcagctctgacagttagacatgcacacagacgccatagctggattggaaacattgatgttttaaaaatttattttttttggaaatagttgcacaaatgctgcaatttagctttaaggttctatagatttttaactagtccaacacagtcagaaacattgttttgaatcctctgtaaaccaaggcattaatcttaataaaccaggatccatttaggtaccacttgatataaaaaggatatccataatgaatattttatactgcatcctttacattagccactaaatacgttattgcttgatgaagacctttcacagaatcctatggattgcagcatttcacttggctacttcatacccatgccttaaagaggggcagtttctcaaaagcagaaacatgccgccagttctcaagttttcctcctaactccatttgaatgtaagggcagctggcccccaatgtggggaggtccgaacattttctgaattcccattttcttgttcgcggctaaatgacagtttctgtcattacttagattccgatctttcccaaaggtgttgatttacaaagaggccagctaatagcagaaatcatgaccctgaaagagagatgaaattcaagctgtgagccaggcaggagctcagtatggcaaaggttcttgagaatcagccatttggtacaaaaaagatttttaaagcttttatgttataccatggagccatagaaaggctatggattgtttaagaactattttaaagtgttccagacccaaaaaggaaaaataaaaaaaaaggaatatttgtacccaacagctagaaggattgcaaggtagatttttgttttaaaatggagagaagtggacagataaggccatttaatatatcaaagatcagttgacatctcctagggaatgatgaaaacagcaggctattagaaaattatttcatatagttctcgtgttcttttcttttttttaatccctgaagggatgatcagtaacatagcttctcttttctgtactctagaccaccccttttcatcattttgctttttatgtctcccataagaaatgtgctttttagagcttcctaatgcatgtgttgcattattgcagcattagaaaaggagaggtagcatttttgctgaaatcgggcctgtcactctccaataaaggttctggcacttcaatgccaggcaggtctcctaaatgaacagaatgatctgtgtgagccgatgcctgcccttccagaggggccactgtccccagccgcagccaactgtgtcccacaggaatgggagcctaggtttccaaatcttgtgattctttaggagaaacatgaaacctggatttcgtgtgaaatgtcccgattgttaaaaagttggctcaattatttttaaaacattttgtaagccaacaaaagtctgtgggctgccagtttattacttttgtcttaaaacatgatcattgttctctcacggtatccttctgtcttcccgttgcaaattcacttttctttcttcctgacattgccattgagggctttgttaccacaagctaagaaactgagtttaacagcccagttatctgcaacatgtcaattacctttgctcctctcctgtgattcccaccatgctgtgaccctcagctgtctccctttgctgggaattctgcaccaatgtctcccctcaacccattccctggttggtcctactcccgtgtggccagagacatcctagcaaatccttcctcctattatatctgacactaatttcttttcaacagcgctcatgtctcttggcccagtcaggtgctgccaggtttagataggaaagtacatgtcccattttcatgggtgcccttaatgtggtccacgtcctatatcttattatatttactcatggctcaatgggggcctccagagaccctctcaggctgctgagctagactaaggaatgcatccaccgtcatcacatgagacactgactctgtgacgacaaaagtacaaacagtctgaggctaagaaaggttcatctcacaacaggaaaaacaaatctcaacacacattagagataattgattcaggggttttctctcccagtctcccagcagggactgatttcatttctgacccactaggttttctttccagaaataggtagcaaggacaagaactaaacaatcccagccccacccagcaacacagaacacaggagtttgcttttggcttctcactctccaagtaaccctgaattaggcccagaatggctgaggcttggagcatctcctcagacagagcagaggcgacacctcttcaggggtgtgtggagtaaatagctcgaagagctgaagacagaaaaccagtttcacgccaggtgcgagagagagcataatggagggaagcccgctttctctctcctcttcttttctctttatttctttagagcacttgacttttttttctctctctctctagtattctaaactgaccccatgaccaactgagaatttatttttgtttcattggttgtttcacagaattagaacacacacgactttttattcctccattgcaaaatggaatcaagatactacacaagacctgtgctttcttcctttgcatgatttacacctccgcctgttttggtgctagctgtctagaacttctctcttggtttgaatctgattccttcacactacactagaagtttatttcatcttgttttgtctagactccagatacagagggacagctggactgaggacaagcaattccatctagcatagggtctctcagggttggtgcatccagccacatgggcagggccagtcacatctagtctatgtccccagagcccttggagttgcgcagcttagctgacttgactccaaggaaattagtacagaagtaaccactctattaagtgtgttctgctatgttcacatgcctgtagtacctgcaaaccatgccaggttcatctaaagacataggggaagattaaggactcttttggacagaccatgaattgaatttgctgccaggtgctgccagactgaatttggctgacagaactcccagcccaggaaagttccatgacaatgactgtcgcagaaggaaatttcccactaaagtcagtccattttcaagttttggtcttcagagacaaaagaacgtcccagccacctgattttgatggtgaggtaactctaagttgaattcaggctagtgttgcagtatagctttggcatgttcatgagtgagcacccagaatgtgttgaaccaacccccacccctaactactgactatgactgcagtgggtttttatggggaaaaaaagtgtgaaaagcaaaaagaaaggaacagagattttttatcacctttattgtaagacagtccatttatgaattgagtataaacacatacaaagtaacaagagattcctaagaaacgcaaatccttgagtttcacgcacttcatgttcaaccatttgctgtaatccagaggcagcctgtgaatcattctcatgccctgttttttttttttttttcctataatgttctgggtttaaaagccatcttttccacattttctgtaaataatggataatcattttaaaaatttttatttttagtgctgttttaacaatgtagatagatcataaatgtacttgctgaattcaatcatttttaacaagccaataaagtttgataattca

SEQ ID NO: 271533 - DNA, 1791 bp, Artificial Sequence
  derived and/or modified sequence
gagtgcgcatgcatttttccttccacagaaaacatacaaccatgtttctgccaacgtagttgaccaagataacctgttttttaattttcatcgcaaaccagaaaaggttagaaatcatcaacgaagatgatgttgaagcttatgtgggactgagaaatctgacaattgtggattctggattaaaatttgtggctcataaagcatttctgaaaaacagcaacctgcagcacatcaattttacccgaaacaaactgacgagtttgtctaggaaacatttccgtcaccttgacttgtctgaactgatcctggtgggcaatccatttacatgctcctgtgacattatgtggatcaagactctccaagaggctaaatccagtccagacactcaggatttgtactgcctgaatgaaagcagcaagaatattcccctggcaaacctgcagatacccaattgtggtttgccatctgcaaatctggccgcacctaacctcactgtggaggaaggaaagtctatcacattatcctgtagtgtggcaggtgatccggttcctaatatgtattgggatgttggtaacctggtttccaaacatatgaatgaaacaagccacacacagggctccttaaggataactaacatttcatccgatgacagtgggaagcagatctcttgtgtggcggaaaatcttgtaggagaagatcaagattctgtcaacctcactgtgcattttgcaccaactatcacatttctcgaatctccaacctcagaccaccactggtgcattccattcactgtgaaaggcaaccccaaaccagcgcttcagtggttctataacggggcaatattgaatgagtccaaatacatctgtactaaaatacatgttaccaatcacacggagtaccacggctgcctccagctggataatcccactcacatgaacaatggggactacactctaatagccaagaatgagtatgggaaggatgagaaacagatttctgctcacttcatgggctggcctggaattgacgatggtgcaaacccaaattatcctgatgtaatttatgaagattatggaactgcagcgaatgacatcggggacaccacgaacagaagtaatgaaatcccttccacagacgtcactgataaaaccggtcgggaacatctctcggtctatgctgtggtggtgattgcgtctgtggtgggattttgccttttggtaatgctgtttctgcttaagttggcaagacactccaagtttggcatgaaaggttttgttttgtttcataagatcccactggatgggtagctgaaataaaggaaaagacagagaaaggggctgtggtgcttgttggttgatgctgccatgtaagctggactcctgggactgctgttggcttatcccgggaagtgctgcttatctggggttttctggtagatgtgggcggtgtttggaggctgtactatatgaagcctgcatatactgtgagctgtgattggggaacaccaatgcagaggtaactctcaggcagctaagcagcacctcaagaaaacatgttaaattaatgcttctcttcttacagtagttcaaatacaaaactgaaatgaaatcccattggattgtacttctcttctgaaaagtgtgctttttgaccctactggacatttattgacttaattgcttctgtttattaaaattgacctgcaaagttaaaaaaaaattaaagttgagaacaggtataagtgcacactgaatagtctaatctacatgtaacacatattttagtgtgatt

SEQ ID NO: 271534 - DNA, 7111 bp, Artificial Sequence
  derived and/or modified sequence
gcgtcagccctcacgtcacttcgccagcagtagcagaggcggcggcggcggctcccggaattgggttggagcaggagcctcgctggctgcttcgctcgcgctctacgcgctcagtccccggcggtagcaggagcctggacccaggcgccgccggcgggcgtgaggcgccggagcccggcctcgaggtgcataccggacccccattcgcatctaacaaggaatctgcgccccagagagtcccgggagcgccgccggtcggtgcccggcgcgccgggccatgcagcgacggccgccgcggagctccgagcagcggtagcgcccccctgtaaagcggttcgctatgccggggccactgtgaaccctgccgcctgccggaacactcttcgctccggaccagctcagcctctgataagctggactcggcacgcccgcaacaagcaccgaggagttaagagagccgcaagcgcagggaaggcctccccgcacgggtgggggaaagcggccggtgcagcgcggggacaggcactcgggctggcactggctgctagggatgtcgtcctggataaggtggcatggacccgccatggcgcggctctggggcttctgctggctggttgtgggcttctggagggccgctttcgcctgtcccacgtcctgcaaatgcagtgcctctcggatctggtgcagcgacccttctcctggcatcgtggcatttccgagattggagcctaacagtgtagatcctgagaacatcaccgaaattttcatcgcaaaccagaaaaggttagaaatcatcaacgaagatgatgttgaagcttatgtgggactgagaaatctgacaattgtggattctggattaaaatttgtggctcataaagcatttctgaaaaacagcaacctgcagcacatcaattttacccgaaacaaactgacgagtttgtctaggaaacatttccgtcaccttgacttgtctgaactgatcctggtgggcaatccatttacatgctcctgtgacattatgtggatcaagactctccaagaggctaaatccagtccagacactcaggatttgtactgcctgaatgaaagcagcaagaatattcccctggcaaacctgcagatacccaattgtggtttgccatctgcaaatctggccgcacctaacctcactgtggaggaaggaaagtctatcacattatcctgtagtgtggcaggtgatccggttcctaatatgtattgggatgttggtaacctggtttccaaacatatgaatgaaacaagccacacacagggctccttaaggataactaacatttcatccgatgacagtgggaagcagatctcttgtgtggcggaaaatcttgtaggagaagatcaagattctgtcaacctcactgtgcattttgcaccaactatcacatttctcgaatctccaacctcagaccaccactggtgcattccattcactgtgaaaggcaaccccaaaccagcgcttcagtggttctataacggggcaatattgaatgagtccaaatacatctgtactaaaatacatgttaccaatcacacggagtaccacggctgcctccagctggataatcccactcacatgaacaatggggactacactctaatagccaagaatgagtatgggaaggatgagaaacagatttctgctcacttcatgggctggcctggaattgacgatggtgcaaacccaaattatcctgatgtaatttatgaagattatggaactgcagcgaatgacatcggggacaccacgaacagaagtaatgaaatcccttccacagacgtcactgataaaaccggtcgggaacatctctcggtctatgctgtggtggtgattgcgtctgtggtgggattttgccttttggtaatgctgtttctgcttaagttggcaagacactccaagtttggcatgaaaggttttgttttgtttcataagatcccactggatgggtagctgaaataaaggaaaagacagagaaaggggctgtggtgcttgttggttgatgctgccatgtaagctggactcctgggactgctgttggcttatcccgggaagtgctgcttatctggggttttctggtagatgtgggcggtgtttggaggctgtactatatgaagcctgcatatactgtgagctgtgattggggaacaccaatgcagaggtaactctcaggcagctaagcagcacctcaagaaaacatgttaaattaatgcttctcttcttacagtagttcaaatacaaaactgaaatgaaatcccattggattgtacttctcttctgaaaagtgtgctttttgaccctactggacatttattgacttaattgcttctgtttattaaaattgacctgcaaagttaaaaaaaaattaaagttgagaacaggtataagtgcacactgaatagtctaatctacatgtaacacatattttagtgtgattttctatactctaatcagcactgaattcagagggtttgactttttcatctataacacagtgactaaaagagttaagggtatatataccatcactttgggacttggtagtattattaaaaggttatttccttcactgtcaataaaagtccaaatgtttagcttaggtctgagagtcaaacaatgttaaggattgtcttaaagttccttagccagcaaaacaaaacaaaacaaaacaaacaaatgaaaaacgtttaaaaagaagaagaagaaaaaaaacaagaacaagcagcaacagctgttttgttggggctatagatttaagttaggcatagtcaatttcagaataactaagagtggaatatatgcatatggtgaaattataaccttgcccttttttatttgccctctgcgatccacctgctttttagaagtctgccgagtgagaaggccacagtatctcatgctgtttgcattacagaactgcagcttttctactctgaaaaggcctgggagcagaatggctggcctgctgtgagcaggagaggagattctaagaaggatagtcccccctacaacatactgtcatactgctgggttttcatgggtaggaaagcttgtcctgaccccagcagcaaagaggtggcaggtcgctaatgaatatatgctttataatgtccttcttcattgctgagagggcagccttagagctgtggatttctgcatcccccctgagtctgacccatggacacctgtttcattcactttagcatcacagtgacctttgtatgctctgttcagtctgtgtcaggcagtatgcttgtcctgaagagaggtttggctatccccaccccaccccaccccaccctgttccttttttatcaggaggacttcagagccaggcctgcagcattttgtttgaaaacacaatcagctctgacagttagacatgcacacagacgccatagctggattggaaacattgatgttttaaaaatttattttttttggaaatagttgcacaaatgctgcaatttagctttaaggttctatagatttttaactagtccaacacagtcagaaacattgttttgaatcctctgtaaaccaaggcattaatcttaataaaccaggatccatttaggtaccacttgatataaaaaggatatccataatgaatattttatactgcatcctttacattagccactaaatacgttattgcttgatgaagacctttcacagaatcctatggattgcagcatttcacttggctacttcatacccatgccttaaagaggggcagtttctcaaaagcagaaacatgccgccagttctcaagttttcctcctaactccatttgaatgtaagggcagctggcccccaatgtggggaggtccgaacattttctgaattcccattttcttgttcgcggctaaatgacagtttctgtcattacttagattccgatctttcccaaaggtgttgatttacaaagaggccagctaatagcagaaatcatgaccctgaaagagagatgaaattcaagctgtgagccaggcaggagctcagtatggcaaaggttcttgagaatcagccatttggtacaaaaaagatttttaaagcttttatgttataccatggagccatagaaaggctatggattgtttaagaactattttaaagtgttccagacccaaaaaggaaaaataaaaaaaaaggaatatttgtacccaacagctagaaggattgcaaggtagatttttgttttaaaatggagagaagtggacagataaggccatttaatatatcaaagatcagttgacatctcctagggaatgatgaaaacagcaggctattagaaaattatttcatatagttctcgtgttcttttcttttttttaatccctgaagggatgatcagtaacatagcttctcttttctgtactctagaccaccccttttcatcattttgctttttatgtctcccataagaaatgtgctttttagagcttcctaatgcatgtgttgcattattgcagcattagaaaaggagaggtagcatttttgctgaaatcgggcctgtcactctccaataaaggttctggcacttcaatgccaggcaggtctcctaaatgaacagaatgatctgtgtgagccgatgcctgcccttccagaggggccactgtccccagccgcagccaactgtgtcccacaggaatgggagcctaggtttccaaatcttgtgattctttaggagaaacatgaaacctggatttcgtgtgaaatgtcccgattgttaaaaagttggctcaattatttttaaaacattttgtaagccaacaaaagtctgtgggctgccagtttattacttttgtcttaaaacatgatcattgttctctcacggtatccttctgtcttcccgttgcaaattcacttttctttcttcctgacattgccattgagggctttgttaccacaagctaagaaactgagtttaacagcccagttatctgcaacatgtcaattacctttgctcctctcctgtgattcccaccatgctgtgaccctcagctgtctccctttgctgggaattctgcaccaatgtctcccctcaacccattccctggttggtcctactcccgtgtggccagagacatcctagcaaatccttcctcctattatatctgacactaatttcttttcaacagcgctcatgtctcttggcccagtcaggtgctgccaggtttagataggaaagtacatgtcccattttcatgggtgcccttaatgtggtccacgtcctatatcttattatatttactcatggctcaatgggggcctccagagaccctctcaggctgctgagctagactaaggaatgcatccaccgtcatcacatgagacactgactctgtgacgacaaaagtacaaacagtctgaggctaagaaaggttcatctcacaacaggaaaaacaaatctcaacacacattagagataattgattcaggggttttctctcccagtctcccagcagggactgatttcatttctgacccactaggttttctttccagaaataggtagcaaggacaagaactaaacaatcccagccccacccagcaacacagaacacaggagtttgcttttggcttctcactctccaagtaaccctgaattaggcccagaatggctgaggcttggagcatctcctcagacagagcagaggcgacacctcttcaggggtgtgtggagtaaatagctcgaagagctgaagacagaaaaccagtttcacgccaggtgcgagagagagcataatggagggaagcccgctttctctctcctcttcttttctctttatttctttagagcacttgacttttttttctctctctctctagtattctaaactgaccccatgaccaactgagaatttatttttgtttcattggttgtttcacagaattagaacacacacgactttttattcctccattgcaaaatggaatcaagatactacacaagacctgtgctttcttcctttgcatgatttacacctccgcctgttttggtgctagctgtctagaacttctctcttggtttgaatctgattccttcacactacactagaagtttatttcatcttgttttgtctagactccagatacagagggacagctggactgaggacaagcaattccatctagcatagggtctctcagggttggtgcatccagccacatgggcagggccagtcacatctagtctatgtccccagagcccttggagttgcgcagcttagctgacttgactccaaggaaattagtacagaagtaaccactctattaagtgtgttctgctatgttcacatgcctgtagtacctgcaaaccatgccaggttcatctaaagacataggggaagattaaggactcttttggacagaccatgaattgaatttgctgccaggtgctgccagactgaatttggctgacagaactcccagcccaggaaagttccatgacaatgactgtcgcagaaggaaatttcccactaaagtcagtccattttcaagttttggtcttcagagacaaaagaacgtcccagccacctgattttgatggtgaggtaactctaagttgaattcaggctagtgttgcagtatagctttggcatgttcatgagtgagcacccagaatgtgttgaaccaacccccacccctaactactgactatgactgcagtgggtttttatggggaaaaaaagtgtgaaaagcaaaaagaaaggaacagagattttttatcacctttattgtaagacagtccatttatgaattgagtataaacacatacaaagtaacaagagattcctaagaaacgcaaatccttgagtttcacgcacttcatgttcaaccatttgctgtaatccagaggcagcctgtgaatcattctcatgccctgttttttttttttttttcctataatgttctgggtttaaaagccatcttttccacattttctgtaaataatggataatcattttaaaaatttttatttttagtgctgttttaacaatgtagatagatcataaatgtacttgctgaattcaatcatttttaacaagccaataaagtttgataattcatctc

SEQ ID NO: 271535 - DNA, 1434 bp, Artificial Sequence
  derived and/or modified sequence
atgagctcatggattcgatggcatggccctgctatggctagactatggggtttctgctggcttgttgtcggattctggagagccgcttttgcgtgtccaacatcgtgcaagtgttcagcatctcgtatttggtgtagtgatccttcccccggtatcgtggccttccctcgccttgagcccaatagcgtcgaccccgagaacatcacggagatctttatagccaatcagaagagactcgaaatcattaatgaagatgacgtcgaggcctacgtgggtcttagaaatctgacaatcgttgattcaggcctcaaattcgttgcccacaaggcgttcctaaaaaattccaacctacagcacatcaactttactagaaataaattaacttctctttcaagaaagcattttcgccatctggatctttctgagctcattctggtgggaaacccgttcacatgctcatgtgatatcatgtggatcaaaacactgcaggaggccaagagctccccagacactcaagacctatactgtctgaacgagagttcaaagaacattcctttagccaacctacagattcctaactgcggtctgccatcagcaaacctcgcggcacctaatcttacggtagaggagggcaagtccatcacactgagttgcagcgtcgcaggagatcccgtgccaaatatgtattgggacgtcggcaatctggtgtcaaaacacatgaatgaaacatcccatacgcagggatctctccgcattaccaatatctctagtgacgactctggcaagcaaatttcatgcgtggcagaaaatctggttggcgaggaccaggatagcgtcaacctgactgttcattttgctcccacaattacgtttctggagtctcctaccagtgatcaccactggtgtatacccttcacagtgaagggtaatcccaagccggcactacagtggttttacaatggcgcaattctgaatgaatccaaatacatctgcacaaagatccacgtcacaaaccacaccgaataccacggctgtttacagctagacaaccccacacacatgaataacggagattatactcttattgctaaaaatgaatatggtaaggacgagaagcaaatttccgcacacttcatggggtggcctgggatcgatgacggcgctaacccaaactaccccgacgtcatatacgaggactatgggacagccgcaaatgatataggtgataccacaaacaggtcaaacgaaattccctccaccgacgtgaccgacaagacaggccgtgagcacttgtctgtttatgcagtggttgtcattgcctcagtggtcggcttttgtctgctggtaatgctgtttttgcttaaactggcacgtcattccaagttcggtatgaaagggtttgttcttttccataaaatacctctagatggatag

SEQ ID NO: 271536 - DNA, 966 bp, Artificial Sequence
  derived and/or modified sequence
atgtggataaaaactctccaagaggctaaatcctccccagatacccaggacctgtactgtctgaatgagtctagtaagaacatccccttggccaatttgcaaattcccaattgtggtctgccatcagccaatctggctgccccaaatttgaccgtcgaagagggcaagtcgataaccttatcgtgctcagtggccggtgatcctgtcccaaatatgtattgggatgtgggcaacctggtgtctaagcacatgaatgagacgagccacactcagggatccctgagaatcactaacatcagctcagatgattcaggaaaacaaattagctgcgtggctgagaacctggtgggcgaggaccaagatagcgttaacctgactgtccacttcgctccaacaatcacatttttggaatcccctacttctgatcatcactggtgcatccccttcaccgtgaaaggcaaccctaagcctgctctgcaatggttctataatggggctattctgaacgaatcaaaatatatttgcactaagattcacgtgacaaaccacaccgagtaccacggatgtctgcagctagataatccaacccatatgaacaatggtgattataccctcatcgcaaagaatgaatatggaaaggacgagaagcagatcagtgcccacttcatgggctggcccggtatcgatgacggtgctaacccgaactatccagatgtcatttatgaagattatggtacagccgctaacgacattggggatactactaatcgctccaacgagatcccatctacagacgtaacagacaagaccgggagagaacaccttagtgtgtacgctgtagtggtgatcgccagcgtcgttggcttttgcctgctagtgatgttattcctcctgaagctagctaggcattccaaattcggcatgaaaggtttcgtcctgtttcacaaaattcctctagacggctag

SEQ ID NO: 271537 - DNA, 1434 bp, Artificial Sequence
  derived and/or modified sequence
atgagttcatggatcaggtggcatggtccagcaatggccagactgtggggtttttgctggctcgtggtagggttctggagagcagccttcgcgtgccccacatcttgcaaatgcagtgctagtcgcatctggtgtagcgacccatcacccggaatcgtagcattcccacgcttagagcccaattcggttgatccggaaaacatcaccgaaatttttattgctaatcagaaaagactggagattatcaacgaggatgatgtggaggcctacgttggtttgcggaacctgactatcgtagattcaggcctgaagtttgttgcacataaggcctttctcaagaattcaaacctgcagcatatcaacttcacaaggaataagcttacatcactctctaggaaacactttcgccatcttgatctgtctgaactcatcctggtgggcaaccctttcacttgtagctgcgacatcatgtggattaagactttgcaagaggcaaagagcagtcctgatacccaagacctgtactgtctgaacgagtcaagcaagaatatccctctagctaatcttcagattccaaactgtggcttgccttcagcaaacctggctgctcctaatcttacagtggaggaagggaagtctatcactctgagctgctctgtggctggggaccctgtgccaaacatgtactgggacgttggcaacctggtgagcaaacacatgaacgaaactagccacacgcaagggtctttgagaatcaccaacatttctagcgatgactctggcaaacagatctcatgcgtagcagaaaatcttgtgggcgaggaccaagactctgttaatctgaccgtgcatttcgcacccacgattacatttctggagagtcctacttcagatcaccattggtgtattccgttcaccgttaagggcaatccaaagccagcactccagtggttttacaatggagccatcctgaacgagtccaagtacatatgtacgaagattcacgtcacaaatcacaccgaataccatgggtgtcttcaactcgataatcctactcatatgaacaacggcgactatacactgattgctaaaaacgaatacggtaaggacgagaagcagatatccgctcatttcatgggatggcctggaatagacgatggcgctaatcctaattatccagacgttatctatgaagactacggaacagccgctaacgacatcggggacaccactaaccgttctaacgaaatcccctcaactgatgttactgacaagaccggtagagagcacctgagcgtgtacgcagttgtcgtgattgcgagcgttgtgggcttttgccttctggtgatgctgttcttgttgaaacttgccaggcacagcaaatttgggatgaagggatttgttctgtttcataaaatcccactagatgggtag

SEQ ID NO: 271538 - DNA, 1434 bp, Artificial Sequence
  derived and/or modified sequence
atgagcagctggatcagatggcacggccccgccatggccagactgtggggcttctgctggctggtggtgggcttctggagagccgccttcgcctgccccaccagctgcaagtgcagcgccagcagaatctggtgcagcgaccccagccccggcatcgtggccttccccagactggagcccaacagcgtggaccccgagaacatcaccgagatcttcatcgccaaccagaagagactggagatcatcaacgaggacgacgtggaggcctacgtgggcctgagaaacctgaccatcgtggacagcggcctgaagttcgtggcccacaaggccttcctgaagaacagcaacctgcagcacatcaacttcaccagaaacaagctgaccagcctgagcagaaagcacttcagacacctggacctgagcgagctgatcctggtgggcaaccccttcacctgcagctgcgacatcatgtggatcaagaccctgcaggaggccaagagcagccccgacacccaggacctgtactgcctgaacgagagcagcaagaacatccccctggccaacctgcagatccccaactgcggcctgcccagcgccaacctggccgcccccaacctgaccgtggaggagggcaagagcatcaccctgagctgcagcgtggccggcgaccccgtgcccaacatgtactgggacgtgggcaacctggtgagcaagcacatgaacgagaccagccacacccagggcagcctgagaatcaccaacatcagcagcgacgacagcggcaagcagatcagctgcgtggccgagaacctggtgggcgaggaccaggacagcgtgaacctgaccgtgcacttcgcccccaccatcaccttcctggagagccccaccagcgaccaccactggtgcatccccttcaccgtgaagggcaaccccaagcccgccctgcagtggttctacaacggcgccatcctgaacgagagcaagtacatctgcaccaagatccacgtgaccaaccacaccgagtaccacggctgcctgcagctggacaaccccacccacatgaacaacggcgactacaccctgatcgccaagaacgagtacggcaaggacgagaagcagatcagcgcccacttcatgggctggcccggcatcgacgacggcgccaaccccaactaccccgacgtgatctacgaggactacggcaccgccgccaacgacatcggcgacaccaccaacagaagcaacgagatccccagcaccgacgtgaccgacaagaccggcagagagcacctgagcgtgtacgccgtggtggtgatcgccagcgtggtgggcttctgcctgctggtgatgctgttcctgctgaagctggccagacacagcaagttcggcatgaagggcttcgtgctgttccacaagatccccctggacggctag

SEQ ID NO: 271539 - DNA, 966 bp, Artificial Sequence
  derived and/or modified sequence
atgtggatcaagaccctgcaggaggccaagagcagccccgacacccaggacctgtactgcctgaacgagagcagcaagaacatccccctggccaacctgcagatccccaactgcggcctgcccagcgccaacctggccgcccccaacctgaccgtggaggagggcaagagcatcaccctgagctgcagcgtggccggcgaccccgtgcccaacatgtactgggacgtgggcaacctggtgagcaagcacatgaacgagaccagccacacccagggcagcctgagaatcaccaacatcagcagcgacgacagcggcaagcagatcagctgcgtggccgagaacctggtgggcgaggaccaggacagcgtgaacctgaccgtgcacttcgcccccaccatcaccttcctggagagccccaccagcgaccaccactggtgcatccccttcaccgtgaagggcaaccccaagcccgccctgcagtggttctacaacggcgccatcctgaacgagagcaagtacatctgcaccaagatccacgtgaccaaccacaccgagtaccacggctgcctgcagctggacaaccccacccacatgaacaacggcgactacaccctgatcgccaagaacgagtacggcaaggacgagaagcagatcagcgcccacttcatgggctggcccggcatcgacgacggcgccaaccccaactaccccgacgtgatctacgaggactacggcaccgccgccaacgacatcggcgacaccaccaacagaagcaacgagatccccagcaccgacgtgaccgacaagaccggcagagagcacctgagcgtgtacgccgtggtggtgatcgccagcgtggtgggcttctgcctgctggtgatgctgttcctgctgaagctggccagacacagcaagttcggcatgaagggcttcgtgctgttccacaagatccccctggacggctag

SEQ ID NO: 271540 - protein, 1590 aa, Artificial Sequence
  derived and/or modified sequence
MGRRGLGSVFVWASGNGGRSKDHCSCDGYTNSIYTISISSTAESGKKPWYLEECSSTLATTYSSGESYDKKIITTDLRQRCTDNHTGTSASAPMAAGIIALALEANPFLTWRDVQHVIVRTSRAGHLNANDWKTNAAGFKVSHLYGFGLMDAEAMVMEAEKWTTVPRQHVCVESTDRQIKTIRPNSAVRSIYKASGCSDNPNRHVNYLEHVVVRITITHPRRGDLAIYLTSPSGTRSQLLANRLFDHSMEGFKNWEFMTIHCWGERAAGDWVLEVYDTPSQLRNFKTPGKLKEWSLVLYGTSVQPYSPTNEFPKVERFRYSRVEDPTDDYGTEDYAGPCDPECSEVGCDGPGPDHCNDCLHYYYKLKNNTRICVSSCPPGHYHADKKRCRKCAPNCESCFGSHGDQCMSCKYGYFLNEETNSCVTHCPDGSYQDTKKNLCRKCSENCKTCTEFHNCTECRDGLSLQGSRCSVSCEDGRYFNGQDCQPCHRFCATCAGAGADGCINCTEGYFMEDGRCVQSCSISYYFDHSSENGYKSCKKCDISCLTCNGPGFKNCTSCPSGYLLDLGMCQMGAICKDGEYVDEHGHCQTCEASCAKCQGPTQEDCTTCPMTRIFDDGRCVSNCPSWKFEFENQCHPCHHTCQRCQGSGPTHCTSCGADNYGREHFLYQGECGDSCPEGHYATEGNTCLPCPDNCELCHSVHVCTRCMKGYFIAPTNHTCQKLECGQGEVQDPDYEECVPCEEGCLGCSLDDPGTCTSCAMGYYRFDHHCYKTCPEKTYSEEVECKACDSNCGSCDQNGCYWCEEGFFLLGGSCVRKCGPGFYGDQEMGECESCHRACETCTGPGHDECSSCQEGLQLLRGMCVHATKTQEEGKFWNEAVSTANLSVVKSLLQERRRWKVQIKRDILRKLQPCHSSCKTCNGSATLCTSCPKGAYLLAQACVSSCPQGTWPSVRSGSCENCTEACAICSGADLCKKCQMQPGHPLFLHEGRCYSKCPEGSYAEDGICERCSSPCRTCEGNATNCHSCEGGHVLHHGVCQENCPERHVAVKGVCKHCPEMCQDCIHEKTCKECTPEFFLHDDMCHQSCPRGFYADSRHCVPCHKDCLECSGPKADDCELCLESSWVLYDGLCLEECPAGTYYEKETKECRDCHKSCLTCSSSGTCTTCQKGLIMNPRGSCMANEKCSPSEYWDEDAPGCKPCHVKCFHCMGPAEDQCQTCPMNSLLLNTTCVKDCPEGYYADEDSNRCAHCHSSCRTCEGRHSRQCHSCRPGWFQLGKECLLQCREGYYADNSTGRCERCNRSCKGCQGPRPTDCLSCDRFFFLLRSKGECHRSCPDHYYVEQSTQTCERCHPTCDQCKGKGALNCLSCVWSYHLMGGICTSDCLVGEYRVGEGEKFNCEKCHESCMECKGPGAKNCTLCPANLVLHMDDSHCLHCCNTSDPPSAQECCDCQDTTDECILRTSKVRPATEHFKTALFITSSMMLVLLLGAAVVVWKKSRGRVQPAAKAGYEKLADPNKSYSSYKSSYRESTSFEEDQVIEYRDRDYDEDDDDDIVYMGQDGTVYRKFKYGLLDDDDIDELEYDDESYSYYQ

SEQ ID NO: 271541 - protein, 1560 aa, Artificial Sequence
  derived and/or modified sequence
NSIYTISISSTAESGKKPWYLEECSSTLATTYSSGESYDKKIITTDLRQRCTDNHTGTSASAPMAAGIIALALEANPFLTWRDVQHVIVRTSRAGHLNANDWKTNAAGFKVSHLYGFGLMDAEAMVMEAEKWTTVPRQHVCVESTDRQIKTIRPNSAVRSIYKASGCSDNPNRHVNYLEHVVVRITITHPRRGDLAIYLTSPSGTRSQLLANRLFDHSMEGFKNWEFMTIHCWGERAAGDWVLEVYDTPSQLRNFKTPGKLKEWSLVLYGTSVQPYSPTNEFPKVERFRYSRVEDPTDDYGTEDYAGPCDPECSEVGCDGPGPDHCNDCLHYYYKLKNNTRICVSSCPPGHYHADKKRCRKCAPNCESCFGSHGDQCMSCKYGYFLNEETNSCVTHCPDGSYQDTKKNLCRKCSENCKTCTEFHNCTECRDGLSLQGSRCSVSCEDGRYFNGQDCQPCHRFCATCAGAGADGCINCTEGYFMEDGRCVQSCSISYYFDHSSENGYKSCKKCDISCLTCNGPGFKNCTSCPSGYLLDLGMCQMGAICKDGEYVDEHGHCQTCEASCAKCQGPTQEDCTTCPMTRIFDDGRCVSNCPSWKFEFENQCHPCHHTCQRCQGSGPTHCTSCGADNYGREHFLYQGECGDSCPEGHYATEGNTCLPCPDNCELCHSVHVCTRCMKGYFIAPTNHTCQKLECGQGEVQDPDYEECVPCEEGCLGCSLDDPGTCTSCAMGYYRFDHHCYKTCPEKTYSEEVECKACDSNCGSCDQNGCYWCEEGFFLLGGSCVRKCGPGFYGDQEMGECESCHRACETCTGPGHDECSSCQEGLQLLRGMCVHATKTQEEGKFWNEAVSTANLSVVKSLLQERRRWKVQIKRDILRKLQPCHSSCKTCNGSATLCTSCPKGAYLLAQACVSSCPQGTWPSVRSGSCENCTEACAICSGADLCKKCQMQPGHPLFLHEGRCYSKCPEGSYAEDGICERCSSPCRTCEGNATNCHSCEGGHVLHHGVCQENCPERHVAVKGVCKHCPEMCQDCIHEKTCKECTPEFFLHDDMCHQSCPRGFYADSRHCVPCHKDCLECSGPKADDCELCLESSWVLYDGLCLEECPAGTYYEKETKECRDCHKSCLTCSSSGTCTTCQKGLIMNPRGSCMANEKCSPSEYWDEDAPGCKPCHVKCFHCMGPAEDQCQTCPMNSLLLNTTCVKDCPEGYYADEDSNRCAHCHSSCRTCEGRHSRQCHSCRPGWFQLGKECLLQCREGYYADNSTGRCERCNRSCKGCQGPRPTDCLSCDRFFFLLRSKGECHRSCPDHYYVEQSTQTCERCHPTCDQCKGKGALNCLSCVWSYHLMGGICTSDCLVGEYRVGEGEKFNCEKCHESCMECKGPGAKNCTLCPANLVLHMDDSHCLHCCNTSDPPSAQECCDCQDTTDECILRTSKVRPATEHFKTALFITSSMMLVLLLGAAVVVWKKSRGRVQPAAKAGYEKLADPNKSYSSYKSSYRESTSFEEDQVIEYRDRDYDEDDDDDIVYMGQDGTVYRKFKYGLLDDDDIDELEYDDESYSYYQ

SEQ ID NO: 271542 - DNA, 4773 bp, Artificial Sequence
  derived and/or modified sequence
atgggaaggcggggcctgggcagcgtttttgtttgggcctccgggaatggaggacggtccaaagaccactgttcttgtgacgggtacacaaacagtatatatacaatatcaatatccagcacagccgaaagcggcaagaagccgtggtaccttgaggagtgctcaagcaccctcgctacaacttactcatccggagaaagctacgacaagaaaatcattactaccgatctgcggcaacgttgtactgataatcacacgggcactagtgcttccgccccaatggccgcaggaatcatcgcactcgccctcgaagcaaatccctttttgacctggcgtgatgtgcagcacgtaatcgtacggacatcccgagccggtcacctgaacgccaacgattggaagacaaacgccgcaggattcaaagtttctcatctttacggatttggcttaatggacgcggaagccatggtgatggaggccgagaagtggaccaccgtgcccaggcagcacgtttgtgtcgagagcaccgatcggcagattaaaacaattaggccaaattctgcggtgcggtccatctacaaggcatcaggttgcagtgataaccccaacagacatgtcaattacttggaacatgttgttgtgcggattacgataacccacccaagaaggggtgacctcgccatctatctgacctctccgtccggcacaaggagtcagctcctggctaacagattgtttgaccactcaatggagggctttaagaactgggagttcatgaccattcactgctggggtgagagagcagccggggactgggtgctggaagtatatgacaccccgtcccaactgaggaacttcaaaacgcctggtaagttaaaagagtggagtctggtgctttacgggacgagcgtccagccctacagcccaactaacgagtttcctaaagtcgaacggttccgttattcaagggttgaggatcctacagacgattatggcactgaggactatgccgggccatgtgaccctgagtgttctgaggtcggctgtgatgggccaggcccagaccattgcaatgattgtcttcattattattataagcttaagaacaacaccaggatttgcgtgtcaagttgcccccctggccactatcacgctgacaagaaacggtgccgcaaatgcgccccaaactgcgaatcttgcttcggcagccatggggaccagtgcatgagttgcaaatatggctacttcctcaatgaggaaaccaatagttgcgttacccactgtccggatgggagctaccaggacactaagaaaaacctgtgcagaaagtgctccgagaattgtaaaacatgtactgagttccataactgcacggagtgtcgggatggactgagtctgcaggggagtcgatgctctgtctcctgcgaagatggcaggtactttaacgggcaggactgtcaaccctgccacaggttctgtgccacctgcgccggggcaggggctgacgggtgtattaactgtactgagggctatttcatggaagacggcagatgcgtgcaaagctgcagcatttcctactatttcgatcactctagcgaaaacggctacaaatcctgcaaaaaatgcgatatcagctgcttaacatgcaatggcccagggtttaagaactgtactagctgtccaagcggttacctacttgaccttggaatgtgccagatgggagctatttgtaaagacggcgagtacgtggatgaacacggacattgccagacctgtgaggcatcttgcgccaaatgtcagggtccaacccaggaagactgcacaacctgccccatgacaaggatattcgatgacgggagatgtgtgtccaattgtccctcgtggaaatttgagttcgagaatcagtgtcacccatgtcaccacacgtgccagagatgccagggctctggccccacccattgcacttcctgtggcgccgataactatggaagggagcacttcctctaccagggggagtgcggagactcctgccctgaaggccactatgctaccgaaggcaacacttgcttgccatgtcccgacaactgcgaactgtgccactccgtacatgtctgcactcgatgtatgaagggatatttcatcgctcccacgaaccatacctgtcaaaaactggagtgcggtcagggcgaagttcaggatccagactatgaagagtgcgtgccatgtgaagagggatgtctgggctgcagtcttgatgatccaggcacctgcacctcgtgtgctatgggctattaccgatttgaccatcattgctacaagacttgtcctgagaaaacttattctgaggaggttgaatgcaaggcttgtgactctaattgcgggagctgcgaccagaacggttgttactggtgcgaagaggggttcttcttgctggggggatcatgtgttcggaagtgcggtcctgggttttacggcgaccaagagatgggcgagtgtgagagctgccaccgtgcgtgcgagacctgtaccggcccaggccacgatgagtgcagttcctgtcaagaaggactgcagcttctgcggggcatgtgcgtgcacgcgacaaaaacccaggaggaggggaagttctggaatgaggctgttagcacagccaacctgtctgtggtgaagtccctgcttcaggagcgccggcgctggaaggttcaaattaaaagagacatcctgcggaaactccagccgtgccactcttcttgtaagacatgcaatggttcggccaccctctgcacttcttgcccaaagggcgcttatctcctagcacaggcatgcgtgagttcctgtccccaaggtacttggccaagtgtgagatctggctcttgtgagaactgcacggaggcatgtgccatatgttccggcgccgacctgtgtaaaaagtgccagatgcagcctggacatccactgtttctccacgagggccgctgctattctaaatgccctgaagggtcttatgccgaagatggtatatgtgaacgttgcagttctccttgtcgtacatgcgagggcaatgctacaaactgtcattcctgcgaaggtggtcatgttctccaccatggtgtgtgtcaggaaaattgtcccgaaaggcacgtggcagtgaaaggggtctgtaagcattgccccgagatgtgccaggactgcattcacgagaaaacttgtaaagaatgcacaccggagtttttcctccacgacgatatgtgccatcaatcatgcccccggggtttttatgccgactcacgccattgcgtaccctgtcacaaagactgtcttgaatgctccggccccaaggccgacgattgcgagctctgtctggagtcttcctgggtgctgtacgatggtctatgcctggaagaatgccccgcgggcacttattacgagaaggaaaccaaagagtgtcgcgactgtcataagagttgtcttacgtgctcgagcagcggtacctgtacgacctgccagaagggtctgattatgaacccgcggggctcttgtatggctaatgaaaaatgctcgccatcagaatactgggatgaggatgcgcccggctgtaaaccctgtcacgttaaatgttttcactgtatgggccccgccgaagatcagtgccaaacttgtccaatgaatagcctattattaaatacaacatgcgtgaaagactgccccgaagggtattacgccgatgaggactccaatcgttgtgcgcattgccactctagctgcaggacatgtgaaggcaggcactccagacagtgccactcctgtaggcctggctggttccagctgggcaaggagtgcctgttgcagtgtagagaggggtattatgccgacaactccactggccggtgcgagcggtgcaatcgctcgtgcaaaggttgtcagggacctcggcccacggactgcctcagctgcgaccggttcttcttccttttaagatccaaaggggagtgccatcgctcctgcccagaccactattatgtagagcagtcaacgcagacctgtgagagatgtcaccctacttgcgaccagtgcaaagggaaaggcgcactcaactgtctgtcatgtgtttggtcataccatctcatgggcgggatctgtacctctgattgcttagttggcgaatatagagtaggggaaggcgaaaaatttaattgcgaaaagtgtcatgagtcatgcatggagtgtaaaggaccgggggccaaaaactgcaccctgtgccccgcaaatctcgttctccatatggatgactctcactgtctacattgctgcaacactagcgaccctccatcagcacaagagtgctgcgactgtcaggacacaactgacgaatgtattcttaggaccagcaaagtgagacccgcaacagagcattttaaaaccgctctgtttattactagttccatgatgctggtactccttttgggtgctgcagtagtggtttggaagaaatctagggggagggtgcaaccagcggcaaaggccggatacgaaaaactcgccgatcctaataagtcatactcttcatacaaatcctcctatagagagtccacctcctttgaagaagaccaggtgatagagtatagggaccgggattatgatgaagacgacgacgacgatattgtgtacatggggcaggatggaactgtttaccgcaaattcaaatatggcttgctcgacgacgatgatatcgacgagctggaatacgacgatgagagctactcttattatcagtag

SEQ ID NO: 271543 - DNA, 4683 bp, Artificial Sequence
  derived and/or modified sequence
aactctatttacaccataagtatttctagcactgctgagagtggcaagaagccttggtatctggaggaatgctcttcaacgcttgcgactacatattccagcggagagtcgtatgacaaaaaaatcatcacaactgaccttaggcaacgatgtaccgacaaccatacagggacctcggccagcgctcctatggccgcgggcattattgccctggccttggaggctaacccatttttgacttggcgggacgtccagcacgttattgttagaacatcaagggccgggcacctgaatgctaacgattggaaaaccaatgcggccgggttcaaggtgtcccatttatacggcttcggactgatggacgcggaggctatggtgatggaggctgagaaatggaccaccgtccccagacagcatgtctgcgtggaatccacagaccggcagatcaagaccatccgccctaactctgctgtccgcagtatttacaaggcatcgggttgttccgataatcccaatagacatgtaaattatctcgaacacgttgtagtgcgcatcacaatcacccatccaaggcgtggcgatctggccatttacctgaccagtccaagcggcacgaggtctcagctcctggccaacaggctgttcgatcacagcatggaggggttcaaaaactgggaattcatgactattcactgctggggcgaacgcgcggccggggattgggtcttggaggtatacgacacaccctcacagctgcgcaatttcaaaacccctgggaagctgaaagaatggtcactggtgctgtacgggaccagtgtgcaaccgtattcgccaacaaacgaatttcccaaagtggaacgatttcgctatagtagagtcgaggatccaacggatgattatgggaccgaagattacgctggtccatgtgatccagagtgttccgaagtggggtgcgatgggccggggccagaccattgcaacgactgcctgcactattactacaagttaaagaacaacactagaatttgtgtgtcttcttgtcctcccggccactaccacgccgataagaaaaggtgccgaaagtgtgctcccaactgcgagtcttgtttcgggagccatggggaccaatgcatgtcctgcaaatatggatacttcttaaacgaagaaaccaacagctgcgttacgcactgtcctgatgggtcttatcaggacacaaaaaaaaacttgtgtaggaaatgcagcgaaaactgcaagacctgcactgagttccacaactgtactgagtgtcgggacggtctctccctgcagggttcccggtgcagcgtctcttgtgaggacggcagatactttaatggtcaagactgtcagccctgccatcggttctgcgctacctgtgctggcgcgggggccgatggctgcataaactgtactgagggctactttatggaagacggacgctgcgtgcagtcttgcagtatcagctattactttgatcatagctctgaaaatggatataagtcttgcaagaaatgcgacatcagctgcctaacatgcaacggtcctggattcaaaaattgcacaagttgcccttccggatacctgctggatctgggaatgtgccaaatgggcgccatctgtaaggatggggaatatgtagatgagcatggacattgtcagacttgcgaagccagctgtgccaagtgccaggggcctacccaggaggattgcactacatgccccatgacccgaatcttcgacgatggcagatgcgttagtaattgcccctcgtggaaattcgagtttgagaatcagtgccacccttgtcatcacacatgccagcgatgccaggggagcggcccaactcattgtactagttgcggagccgacaattatggcagggagcactttctgtaccagggagagtgcggggactcctgtcctgaaggacactacgccacggagggaaacacgtgtttgccgtgccctgacaactgcgaactctgccactcagtgcacgtgtgcacaagatgtatgaagggctatttcatagccccgacaaatcacacatgccagaaactggaatgcggccaaggcgaagtgcaggatccagattatgaagagtgcgtgccatgcgaggaagggtgcctgggatgctccctggacgaccctgggacgtgtacctcatgcgccatgggttactaccggttcgatcatcactgctacaagacttgtcctgagaaaacatactccgaggaagtggaatgcaaagcttgcgacagcaactgcggttcatgcgatcagaatggatgttactggtgcgaagagggctttttcctgttgggaggaagctgcgtaaggaaatgcggacccggcttctatggagaccaggagatgggggaatgtgagagctgtcaccgagcttgcgagacttgcacaggcccaggacacgacgaatgttccagttgccaggagggccttcagctcctgcgaggcatgtgtgttcatgcgaccaagacccaggaagagggaaagttctggaacgaggctgtctcaactgctaatttgagtgttgtgaaaagtttgcttcaagagcggcggaggtggaaagtccaaattaagagagacatcttgagaaagcttcaaccctgccacagctcatgtaagacttgcaacggcagcgccacactgtgcacttcatgccctaagggggcttatctactcgcgcaagcttgtgttagctcctgcccccagggtacttggccaagcgtgcgatccgggtcttgtgaaaactgtaccgaagcatgtgccatctgctccggagcagatctctgtaaaaagtgccagatgcagccaggacatcccctgttcctgcacgagggaagatgctactcaaagtgccccgagggcagctatgccgaggacggcatttgtgaacgctgctcaagcccctgtcggacatgtgagggcaatgccaccaactgtcatagctgtgaaggcggccacgtgctgcatcatggagtgtgtcaggaaaattgtcccgagagacatgtcgccgttaaaggtgtgtgcaagcactgccccgaaatgtgccaggattgtattcacgaaaaaacatgtaaagagtgtacccctgaattctttctgcacgacgacatgtgccatcagtcctgccccagagggttctacgccgactctaggcattgtgtcccgtgccataaagactgtcttgagtgttctggacctaaggctgatgactgtgagctttgtctggagtcttcatgggtgctgtatgatggcctgtgcctggaggagtgccccgctgggacatactacgagaaagagacaaaggagtgccgcgattgccataaatcttgtctgacatgctccagttcagggacctgcaccacttgccagaaaggcctgatcatgaacccgcgcggcagctgcatggctaatgagaagtgcagcccgtctgagtactgggacgaagacgccccaggctgcaagccatgtcacgtaaaatgcttccattgcatggggcccgctgaagatcagtgccaaacctgcccgatgaattcactactcttgaatacgacttgcgtcaaggattgcccggagggttattatgctgatgaggattccaacaggtgcgcacattgccactccagttgtcggacatgcgaaggacgccacagccggcagtgtcactcgtgcagacccgggtggtttcagctgggtaaggagtgcctcctacagtgccgggagggttactacgctgataattccaccggacgctgcgaacggtgcaaccgctcttgtaagggctgtcagggccccaggcctacagattgcctgtcatgcgatagatttttctttctactgaggagcaaaggggaatgtcataggtcctgccccgatcactactatgtagagcagtcgacacagacgtgcgaaaggtgtcatccaacttgcgaccagtgtaaaggcaagggcgccttgaattgtctgagttgtgtctggagctaccatttgatgggtggtatttgtaccagtgattgcttggtcggtgaataccgtgtaggtgagggtgagaaattcaattgcgaaaaatgccatgagtcgtgcatggaatgtaagggccccggagccaagaattgcacactgtgcccagccaatctggtgctacatatggacgactcacactgcctacactgctgcaatacttcagaccctccctcagcccaggaatgctgtgactgtcaggacaccacagacgagtgcattctgagaacctccaaggtccgacctgccactgagcattttaaaaccgctcttttcatcactagtagcatgatgttggtgctcctcctgggtgcagccgtagtagtatggaaaaagagtcggggacgggtccaaccagccgctaaagcgggctatgagaaattagcggacccaaataagtcatattctagctataagtcttcttatcgggaatccacgtcatttgaggaggaccaggttattgaatatcgagaccgcgattatgacgaagatgacgatgacgatatcgtgtatatggggcaggacggcacagtgtataggaaatttaagtacggccttttggatgacgatgatattgacgagctggagtacgacgatgaaagttattcttattaccagtag

SEQ ID NO: 271544 - DNA, 4773 bp, Artificial Sequence
  derived and/or modified sequence
atgggcagaagaggcctgggctctgtgtttgtgtgggccagcggaaatggaggccgcagcaaggaccactgcagctgtgatggctacaccaacagcatctacaccatcagcatcagcagcacagctgagagcggcaagaagccctggtacctggaggagtgcagcagcaccctggccaccacctacagcagcggggagagctatgacaagaagatcatcaccacagacctgcggcagcgctgcacagacaaccacacaggcaccagcgccagcgcccccatggccgccggcatcatcgccctggccctggaggccaaccccttcctgacctggagagatgtgcagcacgtgattgtgaggaccagccgggccggccacctgaatgccaatgactggaagaccaatgctgctggcttcaaggtgagccacctgtatggcttcggcctgatggatgctgaggccatggtgatggaggccgagaagtggaccaccgtgccccggcagcacgtgtgtgtggagagcacagaccggcagatcaagaccatccggcccaacagcgctgtgcgcagcatctacaaggccagcggctgcagcgacaaccccaacagacatgtgaactacctggagcacgtggtggtgcgcatcaccatcacccaccccaggagaggagacctggccatctacctgaccagccccagcggcaccaggagccagctgctggccaaccggctgtttgaccacagcatggagggcttcaagaactgggagttcatgaccatccactgctggggcgagagagctgctggggactgggtgctggaggtgtatgacacccccagccagctgaggaacttcaagacccctgggaagctgaaggagtggagcctggtgctgtatggcacctctgtgcagccctacagccccaccaatgagttccccaaggtggagcgcttccgctacagccgggtggaggaccccacagatgattatggaacagaagattatgccggcccctgtgaccctgagtgcagcgaggtgggctgtgatggccctggccctgaccactgcaatgactgcctgcactactactacaagctgaagaacaacacccgcatctgtgtgagcagctgccccccaggccactaccacgccgacaagaagcgctgcaggaaatgtgcccccaactgtgagagctgcttcggcagccatggagaccagtgcatgagctgcaagtatggctacttcctgaatgaggagaccaacagctgtgtgacccactgcccagatggcagctaccaggacaccaagaagaacctgtgcaggaagtgcagcgagaactgcaagacctgcacagagttccacaactgcacagagtgcagagatggcctgagcctgcagggcagccgctgcagcgtgtcctgtgaagatggccgctacttcaacggccaggactgccagccctgccaccgcttctgtgccacctgtgccggggccggggctgatggctgcatcaactgcacagagggctacttcatggaggatggccgctgtgtgcagagctgcagcatctcctactactttgaccacagcagtgaaaatggctacaagagctgcaagaagtgtgacatcagctgcctgacctgcaatggacctggcttcaagaactgcaccagctgccccagcggctacctgctggacctgggcatgtgccagatgggcgccatctgcaaggatggagaatatgtggatgaacatggccactgccagacctgtgaggccagctgtgccaagtgccagggccccacccaggaggactgcaccacctgccccatgacccgcatctttgatgatggccgctgtgtgagcaactgccccagctggaagtttgaatttgagaaccagtgccacccctgccaccacacctgccagcgctgccagggcagcggccccacccactgcaccagctgtggggctgacaactacggccgggagcacttcctgtaccagggagaatgtggggacagctgcccagagggccactacgccacagagggcaacacctgcctgccctgcccagacaactgtgagctgtgccacagcgtgcacgtgtgcacccgctgcatgaagggctacttcatcgcccccaccaaccacacctgccagaagctggagtgtggccagggcgaggtgcaggaccctgactatgaagaatgtgtgccctgtgaggagggctgcctgggctgcagcctggatgatcctggcacctgcaccagctgtgccatgggctactacagatttgaccaccactgctacaagacctgcccagagaagacctacagcgaggaggtggagtgcaaggcctgtgacagcaactgtggcagctgtgaccagaatggctgctactggtgtgaggagggcttcttcctgctgggcggcagctgtgtgaggaaatgtggccctggcttctatggagaccaggagatgggagaatgtgagagctgccaccgggcctgtgagacctgcaccggccctggccatgatgagtgcagcagctgccaggagggcctgcagctgctgcggggcatgtgtgtgcacgccaccaagacccaggaggagggcaagttctggaatgaagctgtgtccacagccaacctgtctgtggtgaagagcctgctgcaggagcggcggcgctggaaggtgcagatcaagagggacatcctgaggaagctgcagccctgccacagcagctgcaagacctgcaatggaagtgccaccctgtgcaccagctgccccaagggggcctacctgctggcccaggcctgtgtgagcagctgcccccagggcacctggcccagcgtgcgcagcggcagctgtgagaactgcacagaggcctgtgccatctgcagcggggctgacctgtgcaagaagtgccagatgcagcccggccaccccctcttcctgcacgagggccgctgctacagcaaatgtcctgagggcagctatgcagaagatggcatctgtgagcgctgcagcagcccctgcaggacctgtgagggcaatgccaccaactgccacagctgtgagggcggccacgtgctgcaccacggcgtgtgccaggagaactgcccagagcggcacgtggccgtgaagggcgtgtgcaagcactgcccagagatgtgccaggactgcatccacgagaagacctgcaaggaatgtaccccagagttcttcctgcatgatgacatgtgccaccagagctgcccccggggcttctatgctgacagccgccactgtgtgccctgccacaaggactgcctggagtgcagcggccccaaggcagatgactgtgagctgtgcctggagagctcctgggtgctgtatgatggcctgtgcctggaggagtgcccagctggcacctactatgagaaggagaccaaggaatgtcgggactgccacaagagctgcctgacctgcagcagcagcggcacctgcaccacctgccagaagggcctcatcatgaacccccggggcagctgcatggccaatgagaagtgcagccccagcgagtactgggatgaagatgcccctggctgcaagccctgccacgtgaagtgcttccactgcatgggccctgctgaggaccagtgccagacctgccccatgaacagcctgctgctgaacaccacctgtgtgaaggactgcccagagggctactatgcagatgaggacagcaacagatgtgcccactgccacagcagctgcaggacctgtgagggccgccacagccggcagtgccacagctgccggcccggctggttccagctgggcaaggagtgcctgctgcagtgccgggagggctactatgctgacaacagcacaggccgctgtgagcgctgcaacagaagctgcaagggctgccagggcccccggcccacagactgcctgagctgtgaccgcttcttcttcctgctgcggagcaaaggagagtgccacaggagctgcccagaccactactacgtggagcagagcacccagacctgtgagcgctgccaccccacctgtgaccagtgcaagggcaagggggccctgaactgcctgagctgtgtgtggagctaccacctgatgggcggcatctgcaccagtgactgcctggtgggggagtacagagtgggggagggggagaagttcaactgtgagaagtgccacgagagctgcatggagtgcaagggccctggggccaagaactgcaccctgtgcccagccaacctggtgctgcacatggatgacagccactgcctgcactgctgcaacaccagtgaccccccatctgcccaggagtgctgtgactgccaggacaccacagatgagtgcatcctgcggaccagcaaggtgcggcctgccacagagcacttcaagacagccctcttcatcaccagctccatgatgctggtgctgctgctgggcgctgctgtggtggtgtggaagaagagccggggccgggtgcagcctgctgccaaggccggctatgagaagctggccgaccccaacaagagctacagcagctacaagagcagctaccgggagagcaccagctttgaggaggaccaggtgattgagtacagagaccgggactatgatgaagatgatgatgatgacatcgtgtacatgggccaggacggcaccgtgtacaggaagttcaagtatggcctgctggatgatgatgacattgatgagctggagtatgatgatgagagctacagctactaccagtag

SEQ ID NO: 271545 - DNA, 4683 bp, Artificial Sequence
  derived and/or modified sequence
aacagcatctacaccatcagcatcagcagcacagctgagagcggcaagaagccctggtacctggaggagtgcagcagcaccctggccaccacctacagcagcggggagagctatgacaagaagatcatcaccacagacctgcggcagcgctgcacagacaaccacacaggcaccagcgccagcgcccccatggccgccggcatcatcgccctggccctggaggccaaccccttcctgacctggagagatgtgcagcacgtgattgtgaggaccagccgggccggccacctgaatgccaatgactggaagaccaatgctgctggcttcaaggtgagccacctgtatggcttcggcctgatggatgctgaggccatggtgatggaggccgagaagtggaccaccgtgccccggcagcacgtgtgtgtggagagcacagaccggcagatcaagaccatccggcccaacagcgctgtgcgcagcatctacaaggccagcggctgcagcgacaaccccaacagacatgtgaactacctggagcacgtggtggtgcgcatcaccatcacccaccccaggagaggagacctggccatctacctgaccagccccagcggcaccaggagccagctgctggccaaccggctgtttgaccacagcatggagggcttcaagaactgggagttcatgaccatccactgctggggcgagagagctgctggggactgggtgctggaggtgtatgacacccccagccagctgaggaacttcaagacccctgggaagctgaaggagtggagcctggtgctgtatggcacctctgtgcagccctacagccccaccaatgagttccccaaggtggagcgcttccgctacagccgggtggaggaccccacagatgattatggaacagaagattatgccggcccctgtgaccctgagtgcagcgaggtgggctgtgatggccctggccctgaccactgcaatgactgcctgcactactactacaagctgaagaacaacacccgcatctgtgtgagcagctgccccccaggccactaccacgccgacaagaagcgctgcaggaaatgtgcccccaactgtgagagctgcttcggcagccatggagaccagtgcatgagctgcaagtatggctacttcctgaatgaggagaccaacagctgtgtgacccactgcccagatggcagctaccaggacaccaagaagaacctgtgcaggaagtgcagcgagaactgcaagacctgcacagagttccacaactgcacagagtgcagagatggcctgagcctgcagggcagccgctgcagcgtgtcctgtgaagatggccgctacttcaacggccaggactgccagccctgccaccgcttctgtgccacctgtgccggggccggggctgatggctgcatcaactgcacagagggctacttcatggaggatggccgctgtgtgcagagctgcagcatctcctactactttgaccacagcagtgaaaatggctacaagagctgcaagaagtgtgacatcagctgcctgacctgcaatggacctggcttcaagaactgcaccagctgccccagcggctacctgctggacctgggcatgtgccagatgggcgccatctgcaaggatggagaatatgtggatgaacatggccactgccagacctgtgaggccagctgtgccaagtgccagggccccacccaggaggactgcaccacctgccccatgacccgcatctttgatgatggccgctgtgtgagcaactgccccagctggaagtttgaatttgagaaccagtgccacccctgccaccacacctgccagcgctgccagggcagcggccccacccactgcaccagctgtggggctgacaactacggccgggagcacttcctgtaccagggagaatgtggggacagctgcccagagggccactacgccacagagggcaacacctgcctgccctgcccagacaactgtgagctgtgccacagcgtgcacgtgtgcacccgctgcatgaagggctacttcatcgcccccaccaaccacacctgccagaagctggagtgtggccagggcgaggtgcaggaccctgactatgaagaatgtgtgccctgtgaggagggctgcctgggctgcagcctggatgatcctggcacctgcaccagctgtgccatgggctactacagatttgaccaccactgctacaagacctgcccagagaagacctacagcgaggaggtggagtgcaaggcctgtgacagcaactgtggcagctgtgaccagaatggctgctactggtgtgaggagggcttcttcctgctgggcggcagctgtgtgaggaaatgtggccctggcttctatggagaccaggagatgggagaatgtgagagctgccaccgggcctgtgagacctgcaccggccctggccatgatgagtgcagcagctgccaggagggcctgcagctgctgcggggcatgtgtgtgcacgccaccaagacccaggaggagggcaagttctggaatgaagctgtgtccacagccaacctgtctgtggtgaagagcctgctgcaggagcggcggcgctggaaggtgcagatcaagagggacatcctgaggaagctgcagccctgccacagcagctgcaagacctgcaatggaagtgccaccctgtgcaccagctgccccaagggggcctacctgctggcccaggcctgtgtgagcagctgcccccagggcacctggcccagcgtgcgcagcggcagctgtgagaactgcacagaggcctgtgccatctgcagcggggctgacctgtgcaagaagtgccagatgcagcccggccaccccctcttcctgcacgagggccgctgctacagcaaatgtcctgagggcagctatgcagaagatggcatctgtgagcgctgcagcagcccctgcaggacctgtgagggcaatgccaccaactgccacagctgtgagggcggccacgtgctgcaccacggcgtgtgccaggagaactgcccagagcggcacgtggccgtgaagggcgtgtgcaagcactgcccagagatgtgccaggactgcatccacgagaagacctgcaaggaatgtaccccagagttcttcctgcatgatgacatgtgccaccagagctgcccccggggcttctatgctgacagccgccactgtgtgccctgccacaaggactgcctggagtgcagcggccccaaggcagatgactgtgagctgtgcctggagagctcctgggtgctgtatgatggcctgtgcctggaggagtgcccagctggcacctactatgagaaggagaccaaggaatgtcgggactgccacaagagctgcctgacctgcagcagcagcggcacctgcaccacctgccagaagggcctcatcatgaacccccggggcagctgcatggccaatgagaagtgcagccccagcgagtactgggatgaagatgcccctggctgcaagccctgccacgtgaagtgcttccactgcatgggccctgctgaggaccagtgccagacctgccccatgaacagcctgctgctgaacaccacctgtgtgaaggactgcccagagggctactatgcagatgaggacagcaacagatgtgcccactgccacagcagctgcaggacctgtgagggccgccacagccggcagtgccacagctgccggcccggctggttccagctgggcaaggagtgcctgctgcagtgccgggagggctactatgctgacaacagcacaggccgctgtgagcgctgcaacagaagctgcaagggctgccagggcccccggcccacagactgcctgagctgtgaccgcttcttcttcctgctgcggagcaaaggagagtgccacaggagctgcccagaccactactacgtggagcagagcacccagacctgtgagcgctgccaccccacctgtgaccagtgcaagggcaagggggccctgaactgcctgagctgtgtgtggagctaccacctgatgggcggcatctgcaccagtgactgcctggtgggggagtacagagtgggggagggggagaagttcaactgtgagaagtgccacgagagctgcatggagtgcaagggccctggggccaagaactgcaccctgtgcccagccaacctggtgctgcacatggatgacagccactgcctgcactgctgcaacaccagtgaccccccatctgcccaggagtgctgtgactgccaggacaccacagatgagtgcatcctgcggaccagcaaggtgcggcctgccacagagcacttcaagacagccctcttcatcaccagctccatgatgctggtgctgctgctgggcgctgctgtggtggtgtggaagaagagccggggccgggtgcagcctgctgccaaggccggctatgagaagctggccgaccccaacaagagctacagcagctacaagagcagctaccgggagagcaccagctttgaggaggaccaggtgattgagtacagagaccgggactatgatgaagatgatgatgatgacatcgtgtacatgggccaggacggcaccgtgtacaggaagttcaagtatggcctgctggatgatgatgacattgatgagctggagtatgatgatgagagctacagctactaccagtag

SEQ ID NO: 271546 - DNA, 4773 bp, Artificial Sequence
  derived and/or modified sequence
atgggccggcggggcctgggcagcgtgttcgtgtgggccagcggcaacggcgggcggagtaaggatcattgcagctgcgacggatacaccaactctatctataccatcagcatctcctctacagcagaaagcggaaagaagccctggtacctggaggaatgttcttcaacattagccacgacttattcatctggagagtcttatgataagaaaatcataactactgatcttagacagcggtgcacagacaaccacacggggacttccgcttccgcacctatggccgctggcataattgcacttgccctcgaggccaacccattcctgacgtggcgcgacgttcagcacgtgatagtgagaaccagtcgggctggacaccttaacgcaaacgattggaaaaccaacgccgccggcttcaaggtgagccacctgtacgggtttgggttaatggacgccgaggcaatggttatggaggccgagaagtggaccacggtgcctagacagcatgtgtgcgtggagagtactgaccgacagatcaagacaatccgccccaatagcgcagtaaggtcaatctacaaggcctccggatgcagcgataatcctaacagacacgtaaattacctggaacacgtggtggtcaggattaccatcacccaccccagacgaggcgacctggctatctacctgacaagcccttcgggcaccaggtctcaactcctagcaaatcgcctttttgaccactccatggagggcttcaagaattgggagtttatgacaatccattgctggggggaacgggcagcaggggattgggtgcttgaggtttatgacaccccatcccagctccggaacttcaagacccctggtaagctcaaggagtggtccctggtgctttacggcacttccgtgcaaccttatagcccaactaacgagtttcctaaggtcgaaaggttccggtattcgcgcgtggaagaccccacagacgactacggcactgaggattacgctggaccgtgcgatcctgagtgcagtgaggttggttgtgacggccccggcccagaccattgtaacgactgcctgcactactattacaagctgaagaataacacaaggatctgcgtatcaagctgtcccccggggcactatcatgcagataagaaaagatgtcgaaaatgcgcacccaattgtgagtcgtgtttcggctcccacggagaccaatgcatgagttgtaagtatggatatttccttaacgaagagactaattcctgtgtgacccactgcccggacggctcttatcaggacaccaagaagaacctttgtcggaagtgttccgagaattgcaagacttgtaccgaattccacaattgtaccgagtgtcgcgacggactctctctccaaggatccaggtgctcagtcagctgtgaggacggccggtacttcaatggccaggattgccaaccttgtcatagattctgtgctacatgcgccggagctggcgcggatggctgcattaactgcactgagggctactttatggaagatggtcgatgtgtgcaatcatgctccatcagctattacttcgatcatagctctgaaaacggctacaaatcatgtaagaagtgcgacatttcgtgcctgacttgtaacggacctgggttcaaaaattgtaccagctgcccttcagggtaccttctggatttaggtatgtgccagatgggcgctatttgcaaggacggggaatacgttgacgagcatggccattgccagacctgcgaagcctcttgtgctaagtgccagggcccaacccaggaggattgcacaacttgcccaatgacaaggatcttcgacgacgggcgatgtgtgtctaattgccctagctggaagtttgagtttgaaaaccagtgtcatccttgccatcacacctgccagagatgccagggatcgggccccacccattgtactagctgcggcgccgataattatgggcgcgaacatttcctgtaccagggtgaatgtggcgactcctgccccgaaggccattatgctactgaggggaatacatgccttccctgtcctgataactgtgagctttgtcactccgtccatgtttgtacacggtgcatgaaagggtactttatcgcccccacaaaccacacctgtcaaaagctggaatgcggccaaggggaggtgcaggaccccgattatgaggaatgcgtgccgtgcgaggaaggttgtctcggttgcagcctagacgacccaggcacatgcacctcctgcgccatgggatattacagatttgatcatcactgttacaagacgtgtcctgaaaaaacttatagtgaagaagtggagtgcaaggcctgcgactctaattgcggtagctgtgatcagaatggttgctactggtgcgaagaggggttttttctcctgggtggcagttgcgtcagaaaatgcggcccggggttctacggcgatcaggaaatgggagaatgtgaaagttgccacagggcttgtgagacatgcacaggaccaggccacgatgaatgttcctcctgccaggaaggattgcagctcctgcgggggatgtgcgtgcatgctaccaagacccaggaggaagggaagttctggaacgaggccgtctccactgctaacttaagtgttgtgaaaagccttctccaagagcgaaggcgttggaaggttcagattaagagggatattctacgcaagctgcagccttgccacagcagctgtaagacttgcaatggctcagccaccctctgtacttcgtgtcccaagggggcttacctgcttgcacaggcgtgtgtctccagctgcccacagggaacctggccatccgtacgcagcggatcctgcgagaactgcactgaggcttgcgctatctgctctggggcagacctctgtaaaaaatgccagatgcaaccaggacatccactgttcctgcatgaagggcggtgttatagcaagtgtcccgagggtagttacgctgaggatgggatatgtgagcgctgttcctcaccttgtagaacctgcgaaggtaatgctactaattgccattcttgcgaagggggtcatgtgctgcaccacggtgtttgccaggaaaattgccctgagcggcatgtcgccgtgaagggcgtctgcaaacactgccccgagatgtgccaggactgtattcatgagaaaacatgtaaggaatgcacaccggaatttttcctccatgatgatatgtgtcaccagagctgcccacgcgggttctatgccgacagccggcactgcgttccatgccataaagattgtttggagtgctccggcccgaaggctgatgattgtgaactgtgtttggagagtagttgggtactctatgacggactgtgtttggaggaatgccctgcgggaacatactatgaaaaggaaacaaaggagtgcagggattgtcacaagagttgcctcacctgttccagcagtggtacttgcacaacatgccagaagggacttatcatgaatccaagagggtcttgcatggctaatgaaaagtgcagccctagcgaatactgggacgaagatgcaccgggttgtaaaccctgtcacgtgaagtgcttccactgcatgggcccagccgaagaccagtgccagacctgccccatgaattcgttgctactgaacacaacatgtgttaaagattgtcctgaagggtactacgccgatgaagatagcaacaggtgcgcacactgtcatagctcttgccgaacatgtgagggcagacatagtcgtcaatgtcatagttgcaggccaggctggtttcagcttgggaaagagtgtcttcttcagtgtcgcgaaggatactacgctgataattccacaggtcggtgcgagcgatgcaacaggtcgtgcaaaggatgtcaaggccctaggcccaccgactgcctctcatgcgatcgcttcttcttcctccttagatcaaagggcgaatgtcacagatcttgtcccgatcattattacgtggagcaaagcacacagacctgcgaacgctgtcacccaacttgcgaccagtgcaaaggcaagggtgccctaaactgtctttcttgcgtctggtcatatcacctcatgggcggaatctgtacctctgattgccttgtgggggagtatcgggtaggagagggtgagaagttcaactgtgagaaatgtcacgagtcttgtatggagtgtaagggacctggagctaagaattgtactctgtgtccagccaacctagtgcttcacatggacgattctcattgtcttcattgttgcaatacctcggacccccctagtgcccaggaatgctgcgactgccaggataccactgacgagtgcattctgaggacttcaaaggtacgccccgccacagagcacttcaagaccgccctgttcatcacctcttctatgatgctagtgctactgctgggggcagcggtagtggtgtggaagaagagtaggggcagagtgcaaccagcagctaaggccggttacgagaagctcgctgacccaaataagtcttattcatcctacaaaagcagttacagagaatctactagtttcgaagaggatcaagtcattgaatatcgcgatagagactatgacgaagacgatgacgacgacattgtatacatgggacaggatggaacagtgtataggaaatttaagtacggtctccttgacgatgacgacatcgatgagctggaatatgacgatgagagttacagttattatcagtag

SEQ ID NO: 271547 - DNA, 4683 bp, Artificial Sequence
  derived and/or modified sequence
aacagcatctacaccatcagcatcagcagcaccgccgagagcggcaagaagccctggtacttagaggagtgttcttctacactagctaccacctactctagcggcgaatcttatgataaaaagatcatcacgaccgacctcagacagcgatgcacggataatcatacaggtaccagcgctagcgctccaatggctgcagggattatagcattagcactggaagctaatccatttcttacttggagagacgttcagcacgtcattgtccgtacttctcgggccggacatcttaatgccaatgattggaaaaccaacgcggcaggctttaaggtaagccacctgtatggctttggcctgatggacgctgaggccatggtgatggaagctgagaagtggacaaccgtgcccagacagcatgtctgcgttgaatcgacggacagacagatcaagacaataagaccaaacagcgcggtgcggtccatttacaaggccagcgggtgcagcgacaatccaaacagacacgtcaattatttggaacatgtggtcgtgagaattacaatcacccaccccagacgcggtgatcttgctatctatcttacaagcccctccggaacaagatcacagcttcttgcaaaccgcttgtttgatcacagcatggagggattcaaaaactgggagttcatgacaattcattgctggggcgagcgtgcggccggggattgggtgctggaggtgtatgacactccaagccaactccgtaattttaagactcctggaaagctaaaggaatggtctctggtgctgtatggaacctctgttcaaccatacagccctacaaatgaattccccaaagtcgaacggtttagatactcacgggtagaggatccaactgacgattacggtactgaggactacgcaggcccatgcgatcctgagtgtagcgaggtgggatgcgatggcccgggtcccgaccactgcaacgattgtctccattattattacaaactgaagaataacacccgtatatgcgtctccagctgtccccccggccactatcacgccgacaagaagcggtgtagaaagtgtgccccaaactgtgaaagctgcttcggaagccacggcgatcaatgcatgagttgtaaatatggttatttcctaaatgaggaaaccaatagctgcgtgacccactgccctgacggcagctatcaagacaccaagaagaacctgtgtcgaaaatgtagcgaaaactgtaagacttgcaccgagttccacaactgtacagaatgcagggatggattatctctgcagggatcacgatgtagcgtcagctgcgaggacggcagatactttaacgggcaggactgtcaaccttgccaccggttctgtgctacctgtgcaggcgcaggggccgacggatgcatcaactgcacagaaggatacttcatggaagacgggaggtgcgtgcagtcatgctccatctcatactatttcgaccacagtagtgagaacgggtacaaaagttgtaaaaaatgtgacatctcgtgtctcacttgtaatgggcctgggtttaagaactgcacgagttgcccgtcgggttatttgttggacctgggcatgtgccagatgggcgccatctgtaaagacggggagtacgtggacgagcacggccattgccagacctgtgaggcatcttgcgcaaagtgtcaggggccaacacaggaggactgtaccacttgtccaatgacacggatctttgacgacggacgttgtgtgagcaactgtcctagttggaagtttgagttcgaaaatcaatgccacccatgccatcacacttgtcagaggtgtcaggggtctggacctacacactgcaccagctgcggtgccgacaactacgggcgcgaacattttctttaccagggcgaatgcggagacagttgtccagaaggccattatgccaccgagggcaatacgtgcttaccgtgtcccgataattgtgaactgtgccactctgtccacgtctgcacccggtgcatgaaggggtacttcatcgctccaaccaaccacacctgtcagaagttagagtgcggccagggcgaggtccaggaccccgactatgaggaatgcgttccatgcgaggaaggatgcctgggatgtagtctggatgacccaggaacctgtaccagctgcgcaatgggttattatcgctttgatcaccactgctacaagacctgtccagagaagacttattccgaggaggtggagtgcaaagcctgcgacagcaattgtggaagctgtgaccagaatggatgttactggtgtgaagagggatttttcctcctcggtggctcttgcgtgcggaagtgcgggcccggcttctatggtgaccaagagatgggggagtgtgagagctgccacagagcatgtgagacttgcaccggccctggccacgatgagtgttcctcctgtcaggaaggcctgcagctactgcgggggatgtgcgttcacgctacaaaaacacaagaggaggggaagttttggaacgaagcggtgtcaaccgccaacttatctgtggtcaaaagcctgttacaagaacggcggagatggaaggtgcagattaagcgggatatcctaaggaaactgcagccctgccactccagctgtaagacgtgtaacggctccgctactctgtgcacctcatgcccaaaaggggcttacctcctggctcaggcgtgtgtatcatcctgccctcaagggacatggccttctgtacgcagtggatcatgcgagaattgcacagaggcttgcgcaatttgctcaggggcagacctttgcaagaagtgccagatgcagcctggacaccctctgtttctgcacgaaggtcgttgctacagcaaatgcccagaggggagctatgccgaggacgggatttgcgagagatgttcttcaccatgccgcacctgtgagggaaacgccactaattgccactcttgtgaaggtggtcatgtgctgcaccatggagtgtgtcaggaaaattgtccggagcgccacgtggctgtcaaaggagtgtgcaagcactgtcctgaaatgtgtcaggattgcatccatgaaaagacctgtaaagagtgcacaccggaatttttcttgcacgacgacatgtgtcatcagtcttgccctagaggattctatgccgacagtaggcactgcgtgccatgtcacaaggactgtctcgaatgttcgggtcccaaggctgatgactgtgaactctgtcttgaaagctcctgggtcctgtatgacggcctatgcttggaggagtgccctgcaggaacttactacgagaaggagaccaaggaatgtcgggactgtcataaatcctgcctaacctgctcatcctctggcacctgcacaacatgtcaaaaaggactaattatgaatcctaggggctcgtgcatggcaaacgagaaatgtagccctagcgaatattgggacgaggatgcccctggatgcaaaccatgtcacgttaaatgcttccattgtatgggaccagctgaagaccagtgtcagacatgtccaatgaactctctgttgctaaataccacttgcgtaaaggactgccccgaagggtattatgccgatgaggattcgaaccgctgtgctcactgccactcttcgtgtcgaacatgcgaggggagacactcgaggcagtgtcattcttgtcgcccaggatggttccagctcggcaaagagtgtcttctgcaatgtcgggaggggtactacgccgacaatagcaccgggaggtgcgaacgctgcaaccggtcctgtaaaggctgccagggaccacgcccgactgactgtttatcttgcgaccggtttttcttccttctgagatccaagggcgagtgtcaccggagctgccctgatcattactacgtggagcagtccacccagacttgtgaacgatgccaccccacctgtgaccagtgtaagggtaagggggctttaaattgcttatcttgtgtgtggagttatcaccttatgggcgggatctgcacctcagattgcctggtgggggaatacagggtgggggaaggcgagaaatttaactgcgaaaaatgccacgagtcgtgcatggagtgtaagggacctggggccaagaattgcactctctgtcccgcgaatctcgtactgcacatggacgatagccactgtctgcattgttgcaatacgtcggacccccccagcgcgcaggaatgttgtgattgccaggatactacggacgagtgcatccttcgcacttctaaggttaggccagctacggagcattttaagactgcattgtttatcaccagctcaatgatgcttgtgctcctactgggagcagcggtggtcgtgtggaagaaaagtcgcggaagggttcagccagcggccaaggccggctacgaaaagctagctgatcctaataaatcatatagcagttataaatctagctatcgtgaatccacctcattcgaagaagatcaagttattgagtatcgagaccgcgactatgatgaggatgacgatgacgatatagtctatatgggccaggatggtaccgtgtatcgaaagttcaagtatgggcttctggatgacgacgatatagacgagctggagtacgatgacgagtcctattcttattatcaatag

SEQ ID NO: 271548 - DNA, 4773 bp, Artificial Sequence
  derived and/or modified sequence
atgggcagacggggattggggtcggtcttcgtgtgggcttcaggaaacggaggacgctcaaaagatcactgttcctgcgatggctatacgaacagcatttacacaatctctatttcctctactgctgagagtgggaagaaaccctggtacctggaggagtgctcatcaaccttggctacaacttactccagtggagaatcttacgataaaaagattataaccactgacctccgccagagatgtacagacaaccacactggcaccagcgcctccgcccctatggctgctgggattatcgccctggctctggaagcgaatcccttccttacctggcgtgatgttcagcatgtaattgtcagaacctctcgcgctggacatctcaatgctaatgactggaagactaacgccgcagggtttaaggtgtctcatctctacggcttcggcctgatggatgcagaagccatggtgatggaggctgagaagtggaccaccgtgccgagacaacatgtgtgcgtggagtcaacggaccgccagatcaaaacaattcggccaaacagtgctgttagatcaatctataaagcctctgggtgcagtgacaaccctaaccggcacgtgaactacttagaacacgtggtggttcgcatcactattacgcatccacgtcgaggcgacctcgccatctacctcacaagtccttctggaactcgcagccagctgcttgctaatcggctgtttgatcactctatggaagggttcaagaactgggagtttatgacgatacactgttggggtgagagggccgctggggactgggttctcgaggtgtacgacaccccaagtcagctgcgaaatttcaagacaccaggaaaactcaaggagtggagtttggtcttgtatggcacttctgtccaaccctattctccaacgaatgagttccctaaggtggagagattcagatactcccgggttgaggatccaacggacgactatgggactgaagattacgccggtccttgtgatcctgagtgcagcgaggtggggtgtgatggccctggcccagatcattgtaacgattgtttgcactattactacaagctgaagaataatacccggatatgcgtcagttcctgcccacccggacactatcacgctgacaagaaaaggtgccgtaaatgcgctccgaactgtgaaagttgctttggatcccacggagaccagtgcatgtcctgtaagtacggctactttctgaatgaagagaccaatagttgcgttacccattgtcctgatggctcatatcaggataccaaaaagaatctgtgtcgaaagtgctctgagaattgcaaaacatgcacagaatttcacaattgcacagaatgtagggatggtttgtcacttcaggggtcaaggtgcagtgtctcctgtgaggacgggcgatattttaatggacaagattgccagccctgccaccggttctgtgcaacttgtgcaggagccggtgcagatggctgcattaattgtaccgagggatattttatggaagacgggaggtgtgtccagtcctgtagcatctcttactatttcgaccactctagtgaaaacggatacaaatcttgtaagaaatgcgatatcagttgcctgacgtgcaatggacccggtttcaagaactgcactagttgtccttccggctacctgttagacttgggcatgtgccagatgggcgctatttgcaaagacggagagtatgtggatgagcacggtcactgtcagacatgcgaggctagttgcgcaaagtgtcagggtccaactcaggaagattgtacgacctgcccaatgaccagaatctttgatgatggaagatgcgtttccaactgcccttcgtggaagttcgaattcgagaaccagtgtcacccctgtcaccatacctgccaaaggtgtcagggcagtggaccaacacactgtactagttgcggagccgacaattatggcagggagcactttctttatcagggcgagtgtggggactcgtgccccgagggacactacgcgacagaggggaacacctgtttgccctgtccagacaattgcgaactttgccattccgtgcatgtatgtaccaggtgcatgaaggggtattttatcgcacccacgaaccatacctgccagaaactggagtgtgggcaaggtgaggtgcaggatcctgattacgaggagtgcgttccgtgtgaggagggctgcctcgggtgttcactggatgaccctggcacgtgtacatcttgcgctatgggatactatcgttttgaccatcattgttacaagacctgcccagagaagacatatagcgaagaagtggaatgtaaagcttgcgactctaactgtggaagttgcgatcagaatgggtgctattggtgcgaggagggcttcttcttactgggtgggtcctgcgtacgcaagtgcggtcccggattttacggcgatcaggaaatgggagagtgtgaatcctgtcacagggcctgtgaaacttgtactggtcctggtcacgatgaatgttcgagctgtcaggagggattgcaactgttacgtgggatgtgcgtgcacgctaccaaaacgcaggaagaagggaaattttggaacgaggctgtcagtactgctaacctgagcgtcgttaagtccctgctgcaggaacgcaggcggtggaaggtccagattaaaagggatatcttgcgtaagcttcagccgtgtcacagtagttgcaagacctgcaatggctctgcaacactgtgtacctcctgtcctaagggagcttatctgctggctcaagcatgcgtgtctagctgcccccaggggacctggccttccgtgagatctgggagctgcgagaactgtactgaagcgtgcgcaatctgctctggcgcagacttatgcaaaaaatgccaaatgcagccagggcaccccttgttcctccacgagggtcgttgctatagcaagtgcccagaaggctcatacgcggaggacggtatatgtgaaaggtgctctagcccatgccggacctgtgaagggaacgctacgaactgccacagttgtgagggaggacatgtgctgcaccacggcgtgtgtcaggaaaactgtcctgaacggcatgtcgcagtgaaaggagtttgcaaacattgccctgaaatgtgtcaggattgtattcacgaaaagacctgcaaggagtgtacccctgaattcttcctccatgatgatatgtgccaccaatcttgtccacgaggtttttacgccgatagcagacactgcgttccctgccacaaagattgcctggaatgtagcggtccaaaggccgacgactgtgagctgtgcctcgagagtagctgggttttgtatgatggcctctgtctggaagagtgccctgccggtacatattacgagaaggagacaaaagagtgtcgggactgtcataagtcctgcctgacctgcagttcctccggcacctgcactacatgccagaagggcctgatcatgaacccacgtggatcctgcatggccaatgaaaaatgctcccctagtgaatattgggacgaggacgcacccggatgtaaaccttgccacgtgaagtgtttccactgtatggggcctgccgaagaccagtgccaaacctgccctatgaactccctgctgttgaatacaacatgtgtgaaagattgccctgagggttattatgccgatgaggacagtaacagatgcgcacactgccactcttcctgtcggacatgtgagggcagacatagccggcagtgccacagttgtcgtccaggttggttccagctcggcaaggaatgtctgctgcagtgtcgagaaggctattacgccgacaactccaccggacgctgcgagagatgcaatcgttcttgcaagggctgccaagggcctcggcctaccgactgtctctcctgcgatcgcttctttttcctgctaagaagtaagggggagtgtcataggagctgtccggaccattattatgtggagcagagtactcagacctgcgaaagatgccatcccacatgtgaccagtgtaagggcaagggcgcactcaattgccttagctgtgtgtggagctaccacctgatgggcggaatctgcacctctgactgtttggtgggcgagtatagagttggcgagggcgagaaattcaattgtgagaaatgccatgaatcatgcatggagtgcaaagggccaggagcaaagaactgcacactgtgcccagccaatctcgttttgcacatggatgattcccattgcctccactgttgtaatactagtgatcctccaagcgcgcaggagtgctgtgattgccaggacacgaccgacgaatgcattctgagaacaagtaaagtccgcccagccaccgagcacttcaaaacggcactttttatcacatccagcatgatgctggtgctgttgctgggggcagctgtggtggtctggaaaaagtctagaggacgtgtgcaaccagccgctaaagccggatatgagaaactggcggatccaaacaaatcctactccagctacaagagttcctacagagagtcaacttcctttgaggaagaccaagtcatcgagtacagagacagggactacgacgaagacgacgatgacgacatcgtgtacatgggccaggatgggactgtgtacagaaaattcaaatacgggctgctggacgacgatgacatcgacgaactagagtacgacgacgagagttactcttattaccagtag

SEQ ID NO: 271549 - DNA, 4683 bp, Artificial Sequence
  derived and/or modified sequence
aacagcatttacaccatcagcatcagttcaactgcagagtcaggtaagaaaccatggtacctggaagagtgctccagtacgctcgcaacgacatactcctcgggggagtcctatgacaaaaagatcattactactgacctgcgacagcgctgtaccgataatcacacaggaacaagcgccagcgcccctatggcagcagggattatcgccctcgccctagaggcaaatcctttcctcacatggcgggatgttcagcacgtgatcgtgcggacgagccgtgctggccatcttaatgcaaatgattggaaaacaaatgccgctggcttcaaggtcagccatttgtatggcttcggccttatggatgcagaggccatggtcatggaggcagaaaaatggaccactgtccctcgtcaacacgtgtgtgtagagtccaccgaccggcagattaagactatccgacccaactctgccgtgcggagcatctacaaagccagcggatgtagtgataatcctaatagacacgtcaactacctcgaacatgtggtcgtccgaataactattacacatcctcgcagaggggatctcgctatctatctgactagtccatctggaacacggagtcagctgttagccaacagactcttcgatcactccatggaaggattcaaaaattgggaatttatgaccattcattgttggggggagagggctgccggagactgggtcctggaggtgtacgacacaccctcacaactacggaacttcaaaaccccaggaaagctcaaagagtggtccttagtcctttacggcactagtgtccagccatatagccccacgaacgagttccccaaagtagagcgctttagatacagtcgagtagaagaccctacagacgattacggcaccgaagattacgccggtccttgtgaccccgaatgctctgaggtaggttgcgacggccctggacctgaccattgcaatgactgtctgcactattactataagctaaagaacaataccaggatctgcgtgtcctcatgcccccctggtcattaccacgcagacaagaagcgttgcagaaaatgtgctcccaactgcgagagctgtttcggctcgcatggcgatcagtgcatgtcttgtaagtacggttatttcctgaatgaagaaaccaattcgtgcgtcacgcattgcccagacgggagttaccaggacactaagaagaacctgtgccgtaagtgtagcgagaactgtaaaacttgtactgaatttcacaattgcactgagtgccgcgacgggctcagcctgcagggttcaaggtgctccgtctcctgtgaggacggtcgctatttcaatggccaggactgccagccctgccaccgattttgcgcaacatgtgcaggggcaggagctgacgggtgcatcaattgcactgaagggtattttatggaggacggcagatgcgttcagtcatgttcgatttcctattattttgaccattcaagtgaaaacggatacaaatcatgtaaaaagtgtgatatctcctgtctgacctgcaatggacctggctttaagaattgtacctcttgcccgtctggctaccttctggacctaggcatgtgccagatgggggctatctgcaaagacggtgaatacgttgatgagcatggccattgccagacatgcgaagcctcatgtgccaagtgccagggacccactcaggaagattgcacaacttgtcctatgacacggatcttcgatgacggaagatgtgtgtcgaattgcccaagctggaagttcgagtttgaaaatcagtgtcacccatgccatcacacctgtcagcggtgccagggttccggcccaacccattgtaccagctgcggcgcagataactacggccgagagcacttcctgtatcaaggcgagtgtggcgactcgtgccccgagggccattatgccaccgaggggaacacgtgtcttccctgcccagacaactgtgagttgtgtcactctgtacatgtctgtacccggtgtatgaaggggtacttcattgctccgacgaaccacacatgtcagaaactcgaatgtggtcagggggaggtacaggatcccgactatgaggagtgcgtcccatgcgaggagggatgcttaggatgtagtctggatgatcccggaacgtgcacaagttgcgctatgggttattacaggttcgaccatcattgctacaaaacatgtccggagaagacctattccgaggaggtcgagtgcaaagcatgtgattcaaactgcggctcttgcgaccagaacgggtgctactggtgcgaagaggggttctttctactgggtggaagctgtgtccgcaaatgcggacccggattttatggcgaccaggaaatgggagagtgcgaaagctgtcatcgggcatgcgagacctgcacaggccctggtcatgatgaatgctcctcttgtcaagaaggcctgcagttgcttcggggtatgtgtgttcatgcaaccaaaacccaagaggaaggaaagttctggaacgaggccgtcagcacagcaaacctgtcagttgtcaagtcccttctgcaggagcggcgtcgctggaaggtgcaaattaagcgtgatatcctgcgcaaattgcagccgtgccactctagctgtaagacttgcaatgggtccgctacactctgcacaagttgccccaagggcgcttatcttctagcccaggcatgtgtgtcatcttgccctcagggaacttggccaagcgtgcgctcaggatcctgcgagaattgtaccgaagcttgcgcgatctgtagcggggctgatctctgtaagaaatgtcagatgcagcccggacatcctctgtttctgcatgagggcaggtgttatagcaaatgtccggaaggctcatacgcagaagacggcatttgtgagaggtgttcctctccttgccgcacatgtgagggtaatgccaccaactgtcactcttgcgaaggtggtcacgtgttacaccatggggtttgtcaagagaattgtccggaacgccatgtcgccgttaagggagtgtgcaagcattgtcctgagatgtgccaggactgcatccacgagaagacgtgtaaagagtgtacacccgagtttttcctccacgacgacatgtgccaccaaagctgccccagaggattttatgccgactctaggcattgtgtgccatgtcacaaagactgtctggagtgttccggaccgaaagcggatgactgcgagctctgcttggaatctagctgggttctgtatgatggattatgcctcgaggagtgcccagctggcacttattacgaaaaggaaaccaaagagtgcagggactgtcacaagtcctgcctgacatgtagcagctctggtacctgcacaacgtgccaaaagggcctcatcatgaacccccgtggctcatgcatggctaatgaaaagtgctctccatctgagtactgggacgaggacgcacctggctgcaagccttgtcacgtgaagtgtttccattgcatgggcccagctgaagaccagtgccagacttgcccaatgaattccttattgctgaacaccacttgcgttaaggactgcccagaggggtattatgccgacgaagattccaacaggtgtgcacattgccatagctcatgcagaacctgcgagggcagacacagcaggcagtgtcactcttgtcgcccaggatggtttcagctaggaaaagaatgcctgcttcagtgtcgagaaggttactatgcagacaattctacgggccgttgcgaacgctgcaaccgcagctgtaaaggttgccaagggccacgccctactgattgcctctcatgtgataggttcttcttcctgctgcggtcaaaaggcgagtgccataggtcttgccccgaccattactatgtcgaacagagcactcagacgtgtgaaaggtgccaccctacatgtgatcagtgcaaagggaagggggctttgaactgtttgagctgcgtgtggagctaccacttgatgggaggaatttgcactagtgattgcctggtaggggagtaccgggtgggcgagggcgaaaaatttaactgtgagaagtgtcacgagtcctgcatggagtgtaagggcccaggggcaaagaactgtacactgtgtcccgctaacttagttctgcacatggatgattcacattgtctgcattgctgtaatacttccgacccgccttcagcccaggagtgctgcgattgtcaagataccactgatgaatgtatactgaggacttcgaaggtgagacccgctactgaacactttaagaccgcactcttcataacttcatctatgatgttggtgcttcttctcggagcagcggtcgtcgtatggaagaaatctagaggtcgcgtacagcccgcagccaaagcaggttacgagaaactggctgacccaaataaatcgtatagcagctacaaatcctcatacagggagtcaacatcttttgaggaagatcaagtaatcgagtatcgcgacagagactacgacgaggacgatgatgatgacatcgtatacatgggacaagatggcacagtttatcgcaagtttaaatacggcctgctggacgacgatgatatcgacgagcttgagtatgatgatgagagctactcctactatcagtag

SEQ ID NO: 271550 - DNA, 6202 bp, Artificial Sequence
  derived and/or modified sequence
atttatgcagagcaggagctgctgccattgccactcagaatcctcgcgcgctgctcggagccggagggagcgctgggagcgagcaagcgagcgtttggagcccgggccagcagagggggcgcccggtcgctgcctgtaccgctcccgctggtcatctccgccgcgctcgggggccccgggaggagcgagaccgagtcggagagtccgggagccaagccgggcgaaacccaactgcggaggacgcccgccccactcagcctcctcctgcgtccgagccggggagcatcgccgagcgccccacgggccggagagctgggagcacaggtcccggcagccccagggatggtctaggagccggcgtaaggctcgctgctctgctccctgccggggctagccgcctcctgccgatcgcccggggctgcgagctgcggcggcccggggctgctcgccgggcggcgcaggccggagaagttagttgtgcgcgcccttagtgcgcggaaccagccagcgagcgagggagcagcgaggcgccgggaccatgggctgggggagccgctgctgctgcccgggacgtttggacctgctgtgcgtgctggcgctgctcgggggctgcctgctccccgtgtgtcggacgcgcgtctacaccaaccactgggcagtcaaaatcgccgggggcttcccggaggccaaccgtatcgccagcaagtacggattcatcaacataggacagataggggccctgaaggactactaccacttctaccatagcaggacgattaaaaggtcagttatctcgagcagagggacccacagtttcatttcaatggaaccaaaggtggaatggatccaacagcaagtggtaaaaaagcggacaaagagggattatgacttcagtcgtgcccagtctacctatttcaatgatcccaagtggcccagcatgtggtatatgcactgcagtgacaatacacatccctgccagtctgacatgaatatcgaaggagcctggaagagaggctacacgggaaagaacattgtggtcactatcctggatgacggaattgagagaacccatccagatctgatgcaaaactacgatgctctggcaagttgcgacgtgaatgggaatgacttggacccaatgcctcgttatgatgcaagcaacgagaacaagcatgggactcgctgtgctggagaagtggcagccgctgcaaacaattcgcactgcacagtcggaattgctttcaacgccaagatcggaggagtgcgaatgctggacggagatgtcacggacatggttgaagcaaaatcagttagcttcaacccccagcacgtgcacatttacagcgccagctggggcccggatgatgatggcaagactgtggacggaccagcccccctcacccggcaagcctttgaaaacggcgttagaatggggcggagaggcctcggctctgtgtttgtttgggcatctggaaatggtggaaggagcaaagaccactgctcctgtgatggctacaccaacagcatctacaccatctccatcagcagcactgcagaaagcggaaagaaaccttggtacctggaagagtgttcatccacgctggccacaacctacagcagcggggagtcctacgataagaaaatcatcactacagatctgaggcagcgttgcacggacaaccacactgggacgtcagcctcagcccccatggctgcaggcatcattgcgctggccctggaagccaatccgtttctgacctggagagacgtacagcatgttattgtcaggacttcccgtgcgggacatttgaacgctaatgactggaaaaccaatgctgctggttttaaggtgagccatctttatggatttggactgatggacgcagaagccatggtgatggaggcagagaagtggaccaccgttccccggcagcacgtgtgtgtggagagcacagaccgacaaatcaagacaatccgccctaacagtgcagtgcgctccatctacaaagcttcaggctgctcggataaccccaaccgccatgtcaactacctggagcacgtcgttgtgcgcatcaccatcacccaccccaggagaggagacctggccatctacctgacctcgccctctggaactaggtctcagcttttggccaacaggctatttgatcactccatggaaggattcaaaaactgggagttcatgaccattcattgctggggagaaagagctgctggtgactgggtccttgaagtttatgatactccctctcagctaaggaactttaagactccaggtaaattgaaagaatggtctttggtcctctacggcacctccgtgcagccatattcaccaaccaatgaatttccgaaagtggaacggttccgctatagccgagttgaagaccccacagacgactatggcacagaggattatgcaggtccctgcgaccctgagtgcagtgaggttggctgtgacgggccaggaccagaccactgcaatgactgtttgcactactactacaagctgaaaaacaataccaggatctgtgtctccagctgcccccctggccactaccacgccgacaagaagcgctgcaggaagtgtgcccccaactgtgagtcctgctttgggagccatggtgaccaatgcatgtcctgcaaatatggatactttctgaatgaagaaaccaacagctgtgttactcactgccctgatgggtcatatcaggataccaagaaaaatctttgccggaaatgcagtgaaaactgcaagacatgtactgaattccataactgtacagaatgtagggatgggttaagcctgcagggatcccggtgctctgtctcctgtgaagatggacggtatttcaacggccaggactgccagccctgccaccgcttctgcgccacttgtgctggggcaggagctgatgggtgcattaactgcacagagggctacttcatggaggatgggagatgcgtgcagagctgtagtatcagctattactttgaccactcttcagagaatggatacaaatcctgcaaaaaatgtgatatcagttgtttgacgtgcaatggcccaggattcaagaactgtacaagctgccctagtgggtatctcttagacttaggaatgtgtcaaatgggagccatttgcaaggatggagaatatgttgatgagcatggccactgccagacctgtgaggcctcatgtgccaagtgccagggaccaacccaggaagactgcactacctgccccatgacaaggatttttgatgatggccgctgtgtttcgaactgcccctcatggaaatttgaatttgagaaccaatgccatccatgccaccacacctgccagagatgccaaggaagtggccctacccactgcacctcctgtggagcagacaactatggccgagagcacttcctgtaccagggagagtgtggagatagctgcccagagggccactatgccactgaggggaacacctgcctgccctgcccagacaactgtgagctttgccacagcgtgcatgtctgcacaagatgcatgaagggctacttcatagcgcccaccaaccacacatgccagaagttagagtgtggacaaggtgaagtccaagacccagactatgaagaatgtgtcccttgtgaagaaggatgtctgggatgcagcttggatgatccaggaacatgtacatcttgcgctatggggtattacaggtttgatcaccattgttataaaacctgtcctgagaagacctacagtgaggaagtggaatgcaaggcgtgtgatagtaactgtggcagctgtgaccagaatgggtgttactggtgtgaagagggcttctttctcttaggtggcagttgtgtgaggaaatgtggtcctggattctatggtgaccaagaaatgggagaatgtgagtcctgccaccgagcatgcgaaacctgcacaggccctggtcatgacgagtgcagcagctgccaggaaggactgcagctgctgcgtgggatgtgcgtgcatgccaccaagacccaggaggagggcaaattctggaatgaagctgtgtccactgcaaacctatctgtggtgaagagcctgctgcaggagcgacgaaggtggaaagttcaaatcaaaagagatattttgagaaaactccagccttgtcattcttcttgtaaaacctgcaatggatctgcaactctgtgcacttcatgtcccaaaggtgcatatcttctggctcaggcctgtgtttcctcctgtccccaaggcacatggccttccgtaaggagtgggagctgcgagaactgtacggaggcctgtgccatctgctctggagccgatctttgcaaaaaatgccagatgcagccgggccaccctctcttcctccatgaaggcaggtgctactccaagtgcccggagggctcttatgcagaagacggcatatgtgaacgctgtagctctccttgcagaacatgtgaaggaaacgccaccaactgccattcttgtgaaggaggccacgtcctgcaccacggagtgtgccaggaaaactgccccgagaggcacgtggctgtgaagggggtatgcaagcattgcccagagatgtgtcaggactgcatccatgagaaaacatgcaaagagtgcacgcctgagttcttcctgcacgatgatatgtgccaccagtcctgtccccgtggcttctatgcagactcgcgccactgtgtcccctgccataaagactgtctggagtgcagtggccccaaagccgacgactgcgagctctgtcttgagagttcctgggtcctctatgatggactgtgcttggaggagtgtccagcaggaacctattatgaaaaggagactaaggagtgcagagattgccacaagtcctgcttgacctgctcatcatctgggacctgcaccacctgtcagaaaggcctgatcatgaaccctcgtgggagctgcatggccaacgagaagtgctcaccctccgagtactgggatgaggatgctcccgggtgcaagccctgccatgttaagtgcttccactgcatggggccggcggaggaccagtgtcaaacatgccccatgaacagccttcttctcaacacaacctgtgtgaaggactgcccagagggctattatgccgatgaggacagcaaccggtgtgcccactgccacagctcttgcaggacatgtgaagggagacacagcaggcagtgccactcctgccgaccgggctggttccagctaggaaaagagtgcctgctccagtgcagggaaggatattacgcagacaactccactggccggtgtgagaggtgcaacaggagctgcaaggggtgccagggcccacggcccacagactgcctgtcttgcgatagatttttctttctgctccgctccaaaggagagtgtcatcgctcctgcccagaccattactatgtagagcaaagcacacagacctgtgagagatgccatccgacttgtgatcaatgcaaaggaaaaggagcgttgaattgtttatcctgtgtgtggagttaccacctcatgggagggatctgcacctcggactgtcttgtgggggaatacagagtgggagagggagagaagtttaactgtgaaaaatgccacgagagctgcatggaatgcaagggaccaggggccaagaactgcaccttgtgccctgccaacctggtgctgcacatggacgacagccactgcctccactgctgcaacacctctgatccccccagtgcccaggagtgctgtgactgccaggacaccacggacgaatgcatccttcgaacaagcaaggttaggcctgcaactgagcatttcaagacagctctgttcatcacctcctccatgatgctggtgcttctgctcggggcagctgtggtagtgtggaagaaatctcgtggccgagtccagccagcagcaaaggccggctatgaaaaactggccgaccccaacaagtcttactcctcctataagagcagctatagagagagcaccagctttgaagaggatcaggtgattgagtacagggatcgggactatgatgaggatgatgatgatgacatcgtctacatgggccaggatggcacagtctaccggaaatttaaatatgggctgctggatgacgatgacatagatgagctggaatatgatgacgagagttactcctactaccagtaa

SEQ ID NO: 271551 - DNA, 5137 bp, Artificial Sequence
  derived and/or modified sequence
aacagcatctacaccatctccatcagcagcactgcagaaagcggaaagaaaccttggtacctggaagagtgttcatccacgctggccacaacctacagcagcggggagtcctacgataagaaaatcatcactacagatctgaggcagcgttgcacggacaaccacactgggacgtcagcctcagcccccatggctgcaggcatcattgcgctggccctggaagccaatccgtttctgacctggagagacgtacagcatgttattgtcaggacttcccgtgcgggacatttgaacgctaatgactggaaaaccaatgctgctggttttaaggtgagccatctttatggatttggactgatggacgcagaagccatggtgatggaggcagagaagtggaccaccgttccccggcagcacgtgtgtgtggagagcacagaccgacaaatcaagacaatccgccctaacagtgcagtgcgctccatctacaaagcttcaggctgctcggataaccccaaccgccatgtcaactacctggagcacgtcgttgtgcgcatcaccatcacccaccccaggagaggagacctggccatctacctgacctcgccctctggaactaggtctcagcttttggccaacaggctatttgatcactccatggaaggattcaaaaactgggagttcatgaccattcattgctggggagaaagagctgctggtgactgggtccttgaagtttatgatactccctctcagctaaggaactttaagactccaggtaaattgaaagaatggtctttggtcctctacggcacctccgtgcagccatattcaccaaccaatgaatttccgaaagtggaacggttccgctatagccgagttgaagaccccacagacgactatggcacagaggattatgcaggtccctgcgaccctgagtgcagtgaggttggctgtgacgggccaggaccagaccactgcaatgactgtttgcactactactacaagctgaaaaacaataccaggatctgtgtctccagctgcccccctggccactaccacgccgacaagaagcgctgcaggaagtgtgcccccaactgtgagtcctgctttgggagccatggtgaccaatgcatgtcctgcaaatatggatactttctgaatgaagaaaccaacagctgtgttactcactgccctgatgggtcatatcaggataccaagaaaaatctttgccggaaatgcagtgaaaactgcaagacatgtactgaattccataactgtacagaatgtagggatgggttaagcctgcagggatcccggtgctctgtctcctgtgaagatggacggtatttcaacggccaggactgccagccctgccaccgcttctgcgccacttgtgctggggcaggagctgatgggtgcattaactgcacagagggctacttcatggaggatgggagatgcgtgcagagctgtagtatcagctattactttgaccactcttcagagaatggatacaaatcctgcaaaaaatgtgatatcagttgtttgacgtgcaatggcccaggattcaagaactgtacaagctgccctagtgggtatctcttagacttaggaatgtgtcaaatgggagccatttgcaaggatggagaatatgttgatgagcatggccactgccagacctgtgaggcctcatgtgccaagtgccagggaccaacccaggaagactgcactacctgccccatgacaaggatttttgatgatggccgctgtgtttcgaactgcccctcatggaaatttgaatttgagaaccaatgccatccatgccaccacacctgccagagatgccaaggaagtggccctacccactgcacctcctgtggagcagacaactatggccgagagcacttcctgtaccagggagagtgtggagatagctgcccagagggccactatgccactgaggggaacacctgcctgccctgcccagacaactgtgagctttgccacagcgtgcatgtctgcacaagatgcatgaagggctacttcatagcgcccaccaaccacacatgccagaagttagagtgtggacaaggtgaagtccaagacccagactatgaagaatgtgtcccttgtgaagaaggatgtctgggatgcagcttggatgatccaggaacatgtacatcttgcgctatggggtattacaggtttgatcaccattgttataaaacctgtcctgagaagacctacagtgaggaagtggaatgcaaggcgtgtgatagtaactgtggcagctgtgaccagaatgggtgttactggtgtgaagagggcttctttctcttaggtggcagttgtgtgaggaaatgtggtcctggattctatggtgaccaagaaatgggagaatgtgagtcctgccaccgagcatgcgaaacctgcacaggccctggtcatgacgagtgcagcagctgccaggaaggactgcagctgctgcgtgggatgtgcgtgcatgccaccaagacccaggaggagggcaaattctggaatgaagctgtgtccactgcaaacctatctgtggtgaagagcctgctgcaggagcgacgaaggtggaaagttcaaatcaaaagagatattttgagaaaactccagccttgtcattcttcttgtaaaacctgcaatggatctgcaactctgtgcacttcatgtcccaaaggtgcatatcttctggctcaggcctgtgtttcctcctgtccccaaggcacatggccttccgtaaggagtgggagctgcgagaactgtacggaggcctgtgccatctgctctggagccgatctttgcaaaaaatgccagatgcagccgggccaccctctcttcctccatgaaggcaggtgctactccaagtgcccggagggctcttatgcagaagacggcatatgtgaacgctgtagctctccttgcagaacatgtgaaggaaacgccaccaactgccattcttgtgaaggaggccacgtcctgcaccacggagtgtgccaggaaaactgccccgagaggcacgtggctgtgaagggggtatgcaagcattgcccagagatgtgtcaggactgcatccatgagaaaacatgcaaagagtgcacgcctgagttcttcctgcacgatgatatgtgccaccagtcctgtccccgtggcttctatgcagactcgcgccactgtgtcccctgccataaagactgtctggagtgcagtggccccaaagccgacgactgcgagctctgtcttgagagttcctgggtcctctatgatggactgtgcttggaggagtgtccagcaggaacctattatgaaaaggagactaaggagtgcagagattgccacaagtcctgcttgacctgctcatcatctgggacctgcaccacctgtcagaaaggcctgatcatgaaccctcgtgggagctgcatggccaacgagaagtgctcaccctccgagtactgggatgaggatgctcccgggtgcaagccctgccatgttaagtgcttccactgcatggggccggcggaggaccagtgtcaaacatgccccatgaacagccttcttctcaacacaacctgtgtgaaggactgcccagagggctattatgccgatgaggacagcaaccggtgtgcccactgccacagctcttgcaggacatgtgaagggagacacagcaggcagtgccactcctgccgaccgggctggttccagctaggaaaagagtgcctgctccagtgcagggaaggatattacgcagacaactccactggccggtgtgagaggtgcaacaggagctgcaaggggtgccagggcccacggcccacagactgcctgtcttgcgatagatttttctttctgctccgctccaaaggagagtgtcatcgctcctgcccagaccattactatgtagagcaaagcacacagacctgtgagagatgccatccgacttgtgatcaatgcaaaggaaaaggagcgttgaattgtttatcctgtgtgtggagttaccacctcatgggagggatctgcacctcggactgtcttgtgggggaatacagagtgggagagggagagaagtttaactgtgaaaaatgccacgagagctgcatggaatgcaagggaccaggggccaagaactgcaccttgtgccctgccaacctggtgctgcacatggacgacagccactgcctccactgctgcaacacctctgatccccccagtgcccaggagtgctgtgactgccaggacaccacggacgaatgcatccttcgaacaagcaaggttaggcctgcaactgagcatttcaagacagctctgttcatcacctcctccatgatgctggtgcttctgctcggggcagctgtggtagtgtggaagaaatctcgtggccgagtccagccagcagcaaaggccggctatgaaaaactggccgaccccaacaagtcttactcctcctataagagcagctatagagagagcaccagctttgaagaggatcaggtgattgagtacagggatcgggactatgatgaggatgatgatgatgacatcgtctacatgggccaggatggcacagtctaccggaaatttaaatatgggctgctggatgacgatgacatagatgagctggaatatgatgacgagagttactcctactaccagtaaacaggcactcccccaccaacaccaccattccactctcaggcatgcctgtgagcatcactgtttttggttttatccccacaccaggctgatgtgtgagtttttctatttgtcttctttaaccatgagtccaaccagaatatgtaagaatgatgaaatactttgttcttcttttgagtggctaaactcaattaacagttcctgttcaaccgtaattgaagagcaaggataaaattcagaggcattttcctcaaaataatgtgttaagacacaaaaatgaaggaagtgaaaacaaatgagatttgtacaaactcttctatgtgattttaaaaaaaggacagcagatctatagaaattctgtttccgagctgcattgtggaggtgtctgctgcctcctggtattctaatttttctttatctaattttggggataatggaggtacaaaggagttgttgg

SEQ ID NO: 271552 - DNA, 4773 bp, Artificial Sequence
  derived and/or modified sequence
atgggcagaagaggcctgggcagcgtgttcgtgtgggccagcggcaacggcggcagaagcaaggaccactgcagctgcgacggctacaccaacagcatctacaccatcagcatcagcagcaccgccgagagcggcaagaagccctggtacctggaggagtgcagcagcaccctggccaccacctacagcagcggcgagagctacgacaagaagatcatcaccaccgacctgagacagagatgcaccgacaaccacaccggcaccagcgccagcgcccccatggccgccggcatcatcgccctggccctggaggccaaccccttcctgacctggagagacgtgcagcacgtgatcgtgagaaccagcagagccggccacctgaacgccaacgactggaagaccaacgccgccggcttcaaggtgagccacctgtacggcttcggcctgatggacgccgaggccatggtgatggaggccgagaagtggaccaccgtgcccagacagcacgtgtgcgtggagagcaccgacagacagatcaagaccatcagacccaacagcgccgtgagaagcatctacaaggccagcggctgcagcgacaaccccaacagacacgtgaactacctggagcacgtggtggtgagaatcaccatcacccaccccagaagaggcgacctggccatctacctgaccagccccagcggcaccagaagccagctgctggccaacagactgttcgaccacagcatggagggcttcaagaactgggagttcatgaccatccactgctggggcgagagagccgccggcgactgggtgctggaggtgtacgacacccccagccagctgagaaacttcaagacccccggcaagctgaaggagtggagcctggtgctgtacggcaccagcgtgcagccctacagccccaccaacgagttccccaaggtggagagattcagatacagcagagtggaggaccccaccgacgactacggcaccgaggactacgccggcccctgcgaccccgagtgcagcgaggtgggctgcgacggccccggccccgaccactgcaacgactgcctgcactactactacaagctgaagaacaacaccagaatctgcgtgagcagctgcccccccggccactaccacgccgacaagaagagatgcagaaagtgcgcccccaactgcgagagctgcttcggcagccacggcgaccagtgcatgagctgcaagtacggctacttcctgaacgaggagaccaacagctgcgtgacccactgccccgacggcagctaccaggacaccaagaagaacctgtgcagaaagtgcagcgagaactgcaagacctgcaccgagttccacaactgcaccgagtgcagagacggcctgagcctgcagggcagcagatgcagcgtgagctgcgaggacggcagatacttcaacggccaggactgccagccctgccacagattctgcgccacctgcgccggcgccggcgccgacggctgcatcaactgcaccgagggctacttcatggaggacggcagatgcgtgcagagctgcagcatcagctactacttcgaccacagcagcgagaacggctacaagagctgcaagaagtgcgacatcagctgcctgacctgcaacggccccggcttcaagaactgcaccagctgccccagcggctacctgctggacctgggcatgtgccagatgggcgccatctgcaaggacggcgagtacgtggacgagcacggccactgccagacctgcgaggccagctgcgccaagtgccagggccccacccaggaggactgcaccacctgccccatgaccagaatcttcgacgacggcagatgcgtgagcaactgccccagctggaagttcgagttcgagaaccagtgccacccctgccaccacacctgccagagatgccagggcagcggccccacccactgcaccagctgcggcgccgacaactacggcagagagcacttcctgtaccagggcgagtgcggcgacagctgccccgagggccactacgccaccgagggcaacacctgcctgccctgccccgacaactgcgagctgtgccacagcgtgcacgtgtgcaccagatgcatgaagggctacttcatcgcccccaccaaccacacctgccagaagctggagtgcggccagggcgaggtgcaggaccccgactacgaggagtgcgtgccctgcgaggagggctgcctgggctgcagcctggacgaccccggcacctgcaccagctgcgccatgggctactacagattcgaccaccactgctacaagacctgccccgagaagacctacagcgaggaggtggagtgcaaggcctgcgacagcaactgcggcagctgcgaccagaacggctgctactggtgcgaggagggcttcttcctgctgggcggcagctgcgtgagaaagtgcggccccggcttctacggcgaccaggagatgggcgagtgcgagagctgccacagagcctgcgagacctgcaccggccccggccacgacgagtgcagcagctgccaggagggcctgcagctgctgagaggcatgtgcgtgcacgccaccaagacccaggaggagggcaagttctggaacgaggccgtgagcaccgccaacctgagcgtggtgaagagcctgctgcaggagagaagaagatggaaggtgcagatcaagagagacatcctgagaaagctgcagccctgccacagcagctgcaagacctgcaacggcagcgccaccctgtgcaccagctgccccaagggcgcctacctgctggcccaggcctgcgtgagcagctgcccccagggcacctggcccagcgtgagaagcggcagctgcgagaactgcaccgaggcctgcgccatctgcagcggcgccgacctgtgcaagaagtgccagatgcagcccggccaccccctgttcctgcacgagggcagatgctacagcaagtgccccgagggcagctacgccgaggacggcatctgcgagagatgcagcagcccctgcagaacctgcgagggcaacgccaccaactgccacagctgcgagggcggccacgtgctgcaccacggcgtgtgccaggagaactgccccgagagacacgtggccgtgaagggcgtgtgcaagcactgccccgagatgtgccaggactgcatccacgagaagacctgcaaggagtgcacccccgagttcttcctgcacgacgacatgtgccaccagagctgccccagaggcttctacgccgacagcagacactgcgtgccctgccacaaggactgcctggagtgcagcggccccaaggccgacgactgcgagctgtgcctggagagcagctgggtgctgtacgacggcctgtgcctggaggagtgccccgccggcacctactacgagaaggagaccaaggagtgcagagactgccacaagagctgcctgacctgcagcagcagcggcacctgcaccacctgccagaagggcctgatcatgaaccccagaggcagctgcatggccaacgagaagtgcagccccagcgagtactgggacgaggacgcccccggctgcaagccctgccacgtgaagtgcttccactgcatgggccccgccgaggaccagtgccagacctgccccatgaacagcctgctgctgaacaccacctgcgtgaaggactgccccgagggctactacgccgacgaggacagcaacagatgcgcccactgccacagcagctgcagaacctgcgagggcagacacagcagacagtgccacagctgcagacccggctggttccagctgggcaaggagtgcctgctgcagtgcagagagggctactacgccgacaacagcaccggcagatgcgagagatgcaacagaagctgcaagggctgccagggccccagacccaccgactgcctgagctgcgacagattcttcttcctgctgagaagcaagggcgagtgccacagaagctgccccgaccactactacgtggagcagagcacccagacctgcgagagatgccaccccacctgcgaccagtgcaagggcaagggcgccctgaactgcctgagctgcgtgtggagctaccacctgatgggcggcatctgcaccagcgactgcctggtgggcgagtacagagtgggcgagggcgagaagttcaactgcgagaagtgccacgagagctgcatggagtgcaagggccccggcgccaagaactgcaccctgtgccccgccaacctggtgctgcacatggacgacagccactgcctgcactgctgcaacaccagcgacccccccagcgcccaggagtgctgcgactgccaggacaccaccgacgagtgcatcctgagaaccagcaaggtgagacccgccaccgagcacttcaagaccgccctgttcatcaccagcagcatgatgctggtgctgctgctgggcgccgccgtggtggtgtggaagaagagcagaggcagagtgcagcccgccgccaaggccggctacgagaagctggccgaccccaacaagagctacagcagctacaagagcagctacagagagagcaccagcttcgaggaggaccaggtgatcgagtacagagacagagactacgacgaggacgacgacgacgacatcgtgtacatgggccaggacggcaccgtgtacagaaagttcaagtacggcctgctggacgacgacgacatcgacgagctggagtacgacgacgagagctacagctactaccagtag

SEQ ID NO: 271553 - DNA, 4683 bp, Artificial Sequence
  derived and/or modified sequence
aacagcatctacaccatcagcatcagcagcaccgccgagagcggcaagaagccctggtacctggaggagtgcagcagcaccctggccaccacctacagcagcggcgagagctacgacaagaagatcatcaccaccgacctgagacagagatgcaccgacaaccacaccggcaccagcgccagcgcccccatggccgccggcatcatcgccctggccctggaggccaaccccttcctgacctggagagacgtgcagcacgtgatcgtgagaaccagcagagccggccacctgaacgccaacgactggaagaccaacgccgccggcttcaaggtgagccacctgtacggcttcggcctgatggacgccgaggccatggtgatggaggccgagaagtggaccaccgtgcccagacagcacgtgtgcgtggagagcaccgacagacagatcaagaccatcagacccaacagcgccgtgagaagcatctacaaggccagcggctgcagcgacaaccccaacagacacgtgaactacctggagcacgtggtggtgagaatcaccatcacccaccccagaagaggcgacctggccatctacctgaccagccccagcggcaccagaagccagctgctggccaacagactgttcgaccacagcatggagggcttcaagaactgggagttcatgaccatccactgctggggcgagagagccgccggcgactgggtgctggaggtgtacgacacccccagccagctgagaaacttcaagacccccggcaagctgaaggagtggagcctggtgctgtacggcaccagcgtgcagccctacagccccaccaacgagttccccaaggtggagagattcagatacagcagagtggaggaccccaccgacgactacggcaccgaggactacgccggcccctgcgaccccgagtgcagcgaggtgggctgcgacggccccggccccgaccactgcaacgactgcctgcactactactacaagctgaagaacaacaccagaatctgcgtgagcagctgcccccccggccactaccacgccgacaagaagagatgcagaaagtgcgcccccaactgcgagagctgcttcggcagccacggcgaccagtgcatgagctgcaagtacggctacttcctgaacgaggagaccaacagctgcgtgacccactgccccgacggcagctaccaggacaccaagaagaacctgtgcagaaagtgcagcgagaactgcaagacctgcaccgagttccacaactgcaccgagtgcagagacggcctgagcctgcagggcagcagatgcagcgtgagctgcgaggacggcagatacttcaacggccaggactgccagccctgccacagattctgcgccacctgcgccggcgccggcgccgacggctgcatcaactgcaccgagggctacttcatggaggacggcagatgcgtgcagagctgcagcatcagctactacttcgaccacagcagcgagaacggctacaagagctgcaagaagtgcgacatcagctgcctgacctgcaacggccccggcttcaagaactgcaccagctgccccagcggctacctgctggacctgggcatgtgccagatgggcgccatctgcaaggacggcgagtacgtggacgagcacggccactgccagacctgcgaggccagctgcgccaagtgccagggccccacccaggaggactgcaccacctgccccatgaccagaatcttcgacgacggcagatgcgtgagcaactgccccagctggaagttcgagttcgagaaccagtgccacccctgccaccacacctgccagagatgccagggcagcggccccacccactgcaccagctgcggcgccgacaactacggcagagagcacttcctgtaccagggcgagtgcggcgacagctgccccgagggccactacgccaccgagggcaacacctgcctgccctgccccgacaactgcgagctgtgccacagcgtgcacgtgtgcaccagatgcatgaagggctacttcatcgcccccaccaaccacacctgccagaagctggagtgcggccagggcgaggtgcaggaccccgactacgaggagtgcgtgccctgcgaggagggctgcctgggctgcagcctggacgaccccggcacctgcaccagctgcgccatgggctactacagattcgaccaccactgctacaagacctgccccgagaagacctacagcgaggaggtggagtgcaaggcctgcgacagcaactgcggcagctgcgaccagaacggctgctactggtgcgaggagggcttcttcctgctgggcggcagctgcgtgagaaagtgcggccccggcttctacggcgaccaggagatgggcgagtgcgagagctgccacagagcctgcgagacctgcaccggccccggccacgacgagtgcagcagctgccaggagggcctgcagctgctgagaggcatgtgcgtgcacgccaccaagacccaggaggagggcaagttctggaacgaggccgtgagcaccgccaacctgagcgtggtgaagagcctgctgcaggagagaagaagatggaaggtgcagatcaagagagacatcctgagaaagctgcagccctgccacagcagctgcaagacctgcaacggcagcgccaccctgtgcaccagctgccccaagggcgcctacctgctggcccaggcctgcgtgagcagctgcccccagggcacctggcccagcgtgagaagcggcagctgcgagaactgcaccgaggcctgcgccatctgcagcggcgccgacctgtgcaagaagtgccagatgcagcccggccaccccctgttcctgcacgagggcagatgctacagcaagtgccccgagggcagctacgccgaggacggcatctgcgagagatgcagcagcccctgcagaacctgcgagggcaacgccaccaactgccacagctgcgagggcggccacgtgctgcaccacggcgtgtgccaggagaactgccccgagagacacgtggccgtgaagggcgtgtgcaagcactgccccgagatgtgccaggactgcatccacgagaagacctgcaaggagtgcacccccgagttcttcctgcacgacgacatgtgccaccagagctgccccagaggcttctacgccgacagcagacactgcgtgccctgccacaaggactgcctggagtgcagcggccccaaggccgacgactgcgagctgtgcctggagagcagctgggtgctgtacgacggcctgtgcctggaggagtgccccgccggcacctactacgagaaggagaccaaggagtgcagagactgccacaagagctgcctgacctgcagcagcagcggcacctgcaccacctgccagaagggcctgatcatgaaccccagaggcagctgcatggccaacgagaagtgcagccccagcgagtactgggacgaggacgcccccggctgcaagccctgccacgtgaagtgcttccactgcatgggccccgccgaggaccagtgccagacctgccccatgaacagcctgctgctgaacaccacctgcgtgaaggactgccccgagggctactacgccgacgaggacagcaacagatgcgcccactgccacagcagctgcagaacctgcgagggcagacacagcagacagtgccacagctgcagacccggctggttccagctgggcaaggagtgcctgctgcagtgcagagagggctactacgccgacaacagcaccggcagatgcgagagatgcaacagaagctgcaagggctgccagggccccagacccaccgactgcctgagctgcgacagattcttcttcctgctgagaagcaagggcgagtgccacagaagctgccccgaccactactacgtggagcagagcacccagacctgcgagagatgccaccccacctgcgaccagtgcaagggcaagggcgccctgaactgcctgagctgcgtgtggagctaccacctgatgggcggcatctgcaccagcgactgcctggtgggcgagtacagagtgggcgagggcgagaagttcaactgcgagaagtgccacgagagctgcatggagtgcaagggccccggcgccaagaactgcaccctgtgccccgccaacctggtgctgcacatggacgacagccactgcctgcactgctgcaacaccagcgacccccccagcgcccaggagtgctgcgactgccaggacaccaccgacgagtgcatcctgagaaccagcaaggtgagacccgccaccgagcacttcaagaccgccctgttcatcaccagcagcatgatgctggtgctgctgctgggcgccgccgtggtggtgtggaagaagagcagaggcagagtgcagcccgccgccaaggccggctacgagaagctggccgaccccaacaagagctacagcagctacaagagcagctacagagagagcaccagcttcgaggaggaccaggtgatcgagtacagagacagagactacgacgaggacgacgacgacgacatcgtgtacatgggccaggacggcaccgtgtacagaaagttcaagtacggcctgctggacgacgacgacatcgacgagctggagtacgacgacgagagctacagctactaccagtag

SEQ ID NO: 271554 - protein, 295 aa, Artificial Sequence [sequence omitted]

SEQ ID NO: 271555 - DNA, 888 bp, Artificial Sequence
  derived and/or modified sequence
atgatccacggcacccccgtgctggacatcaagccctacatcgccgagtacgacagcccccagaacgtgatggagcccctggccgacttcaacctgcagaacaaccagcacacccccaacaccgtgagccagagcgacagcaagaccgacagctgcgaccagagacagctgagcggctgcgacgagccccagccccaccacagcaccaagagaaagcccaagtgccccgaggacagaaccagcgaggagaactacctgacccacagcgacaccgccagaatccagcaggccttccccatgcacagagagatcgccgtggacttcggcctggagagcagaagagaccagagcagcagcgtggccgaggagcagatcggcccctactgccccgagaagagcttcagcgagaagggcaccgacaagaagctggagagagtggagggcgccgccgtgctgcagggcagcagagccgagacccagcccatggccccccactgccccgccggcagagccgacggcgcccccagaagcgtggtgcccgcctgggtgaccgaggcccccgtggccaccctggaggtgagattcaccccccacgccgagatggacctgggccagctgagcagccaggacgtgggccaggccagcttcaagtacttccagagcgccgaggaggccaagagagccatcgaggccgtgctgagcgccgaccccagaagcgtgtacagaagaaagctgtgccaggacagactgttctacttcaccgtggacatcgcccacgtgacctgctggttcggcgacggcttcgccgaggtgctgagaatcaagcccgccagcgagcccgtgcacatgaccggccccgtgggcagcctggtgagcctgggcagctag

SEQ ID NO: 271556 - DNA, 888 bp, Artificial Sequence
  derived and/or modified sequence
atgattcatggaacacccgtgctggacatcaagccatacatcgccgagtacgactctccacagaatgttatggaaccactggccgatttcaatttgcaaaacaatcagcacacacccaatacagtgtctcaaagcgattctaagacagacagttgtgaccagcgccagctatccggatgtgacgagccacaaccccatcactcgaccaaacgcaagcctaagtgccctgaggatcggaccagtgaagaaaactacctcactcactccgataccgcccggatccagcaggctttccctatgcacagggaaattgcggtggattttgggctggagtctagacgcgatcaatcctcctcggtagccgaagagcaaatcggtccatactgcccagagaagtccttctcggagaaagggacagataaaaagctggaaagggtcgagggcgccgccgtcttgcaggggagtagagccgagactcagcctatggctccccactgccccgccggccgggcagacggcgctcctcggtccgttgtaccggcatgggtgacggaagcaccggtcgcgactctggaggtgcgcttcacccctcatgccgaaatggacctgggacagctgtcctcacaggatgtgggacaggcctcattcaaatattttcaatcggccgaggaagccaaacgagcgatagaggccgttctgtctgcagacccgcgctctgtgtaccggagaaagttgtgccaggacagactcttttattttaccgtggacatcgcccacgtaacatgctggtttggggacggcttcgccgaggttctccggatcaagcccgcaagcgagcccgtgcatatgactggacctgttgggagtctcgtaagtcttggatcttag

SEQ ID NO: 271557 - DNA, 888 bp, Artificial Sequence
  derived and/or modified sequence
atgattcatggcacccctgtgctggacatcaagccctacatcgccgagtatgacagcccccagaatgtgatggagcccctggccgacttcaacctgcagaacaaccagcacacccccaacacagtgtcccagagcgacagcaagacagacagctgtgaccagaggcagctgagcggctgtgatgagccccagccccaccacagcaccaagaggaagcccaagtgcccagaggacaggaccagcgaggagaactacctgacccacagcgacacagcccgcatccagcaggccttccccatgcaccgggagattgctgtggactttggcctggagagcagaagagaccagagcagctctgtggccgaggagcagatcggcccctactgcccagagaagagcttcagcgagaagggcacagacaagaagctggagcgggtggagggcgctgctgtgctgcagggcagcagagctgagacccagcccatggccccccactgcccagctggccgggcagatggagcccccaggtctgtggtgcctgcctgggtgacagaggcccctgtggccaccctggaggtgcgcttcacccctcatgctgagatggacctgggccagctgagcagccaggatgtgggccaggccagcttcaagtacttccagagcgctgaggaggccaagagggccattgaagctgtgctgtctgctgaccccaggtctgtgtacagaaggaagctgtgccaggacaggctcttctacttcaccgtggacatcgcccacgtgacctgctggtttggagatggctttgctgaggtgctgcgcatcaagccagccagcgagcctgtgcacatgacaggccctgtgggcagcctggtgtccctgggcagctag

SEQ ID NO: 271558 - DNA, 888 bp, Artificial Sequence
  derived and/or modified sequence
atgatccacggcacccccgtgctggacatcaagccctacatcgccgagtacgatagccctcagaacgttatggaaccgctggccgattttaacctccaaaacaaccagcacacgcctaacacggtctcgcagtccgactcgaaaaccgacagctgtgaccagaggcagctgtctggctgcgacgagccacaacctcaccatagtacgaagcgaaagcctaagtgccctgaggacagaacgtccgaggaaaactacttaactcattcggatacagcacggattcaacaggcctttccaatgcacagagagattgctgttgactttggtctggagtcccgcagggaccagtcctcctctgttgccgaggagcaaataggcccatactgcccagagaagtcttttagcgagaaggggacggacaagaagctcgagagagtggaaggcgctgctgtgcttcagggtagcagggctgagacccagcccatggcaccccactgtccggcaggacgcgctgatggtgctcctcgctcagttgtgcccgcttgggtaaccgaagcacctgttgctacattggaggtacggttcacaccgcacgctgagatggacctgggtcagctctcctcacaagacgtgggccaggccagtttcaaatattttcagagcgcagaagaagcgaagcgggccatagaggctgtgctatccgctgacccgagatcggtgtatcgccgaaagctatgtcaggaccgattattctatttcaccgtggacatcgcgcatgtgacctgttggttcggagatggttttgctgaagtcttgcggattaaacccgcgtctgagcctgtgcacatgacaggtcctgttggaagcttggtgtcattaggctcatag

SEQ ID NO: 271559 - DNA, 888 bp, Artificial Sequence
  derived and/or modified sequence
atgattcacggcactcccgtcttggacatcaaaccatacattgcagagtacgacagcccacagaatgtcatggagccactggcagacttcaacctccaaaataatcaacacacccccaatactgttagtcagagcgacagtaagactgattcctgtgatcagcgacagctgtctggctgcgatgaaccgcagcctcaccatagcactaagcgcaagcctaaatgccctgaagatcggacttcagaggagaattatctaacccattctgatactgctaggatccagcaggcgtttcccatgcatcgagaaattgctgtggacttcgggcttgagagccgacgggatcaatccagctccgtggcggaggagcagatcgggccttattgcccggaaaagtcattcagcgagaagggaaccgataagaagctggaacgggtggaaggagccgctgtgctgcaaggctcacgggctgaaactcagcccatggccccacactgtcccgcagggagggcagatggggcaccacgaagcgtggttcccgcatgggtcactgaggcgccagtggccacgcttgaggtgagattcacgcctcacgccgagatggacctcggccagctcagcagccaggatgtcggacaagccagtttcaaatactttcagagtgccgaggaggctaagagagccattgaggccgtgctcagcgcggatccacgttctgtgtatcggaggaagctctgtcaggatcgcttgttttatttcacagtagatatagctcacgtgacctgctggtttggtgatggtttcgcagaggtgctgcggattaagcctgcctctgagcctgtgcatatgactggacctgttggctctctggtctcactgggttcgtag

SEQ ID NO: 271560 - protein, 255 aa, Artificial Sequence
  derived and/or modified sequence
MAAAVAAAPGALGSLHAGGARLVAACSAWLCPGLRLPGSLAGRRAGPAIWAQGWVPAAGGPAPKRGYSSEMKTEDELRVRHLEEENRGIVVLGINRAYGKNSLSKNLIKMLSKAVDALKSDKKVRTIIIRSEVPGIFCAGADLKERAKMSSSEVGPFVSKIRAVINDIANLPVPTIAAIDGLALGGGLELALACDIRVAASSAKMGLVETKLAIIPGGVTSSTEVLNPSKSSMKIGIIIFQTPVNIDILASSHES

SEQ ID NO: 271561 - DNA, 1076 bp, Artificial Sequence
  derived and/or modified sequence
gacaacatggcggccgcggtggcggcggcacctggggccttgggatccctgcatgctggcggcgcccgcctggtggccgcttgcagtgcgtggctctgcccggggttgaggctgcccggctcgttggcaggccggcgagcgggcccggcgatctgggcccagggctgggtacctgcggccgggggtcccgccccgaaaaggggctacagctctgagatgaagacggaggacgagctgcgggtgcggcacctggaggaggagaaccgaggaattgtggtgcttggaataaacagagcttatggcaaaaattcactcagtaaaaatcttataaaaatgctatcaaaagctgtggatgctttgaaatctgataagaaagtacggaccataataatcaggagtgaagtcccagggatattctgtgctggtgctgaccttaaggaaagagccaaaatgagttccagtgaagttggtccttttgtctccaaaataagagcagtgattaacgatattgctaatcttccagtaccaacaattgcagcaatagatggactcgctttaggtggtggtcttgaactggctttagcctgtgatatacgagtagcagcttcctctgcaaaaatgggcctggttgaaacaaaattggcgattattcctggtggagtgacttcctccactgaagtcttgaatccctccaagtcatccatgaagattggaatcatcatcttccaaactcctgttaatattgatattctggcctcttcccatgaatcatgaatgttcttaaagggatctagaatggcagatcctttccagaaggttttcaatttaatttgcccagatccataagaggaatcactgtctatggcagctatagccttatgaaatgtggtttttgttttgttttgtttttttgagacggagtctcgctctgttgccaggttggagtgcagtggtgtgatctcggctcactgcaacccctgcctccccggttcaagggattctcctgcctcagcctcctgagtagctgggactacaggtgcacaccaccgtgcccagctaatttttgtattttttgt

SEQ ID NO: 271562 - DNA, 768 bp, Artificial Sequence
  derived and/or modified sequence
atggccgccgcagtagcagccgccccaggcgctcttggcagcctgcacgctggaggcgctaggctagtagcagcctgctccgcttggctgtgtccagggctgaggttaccaggatctctggccgggaggcgagcgggtccggctatctgggcacagggatgggttcccgccgcaggaggccctgctcccaaacgaggatatagttctgagatgaagacagaagatgaactgagggtgagacatcttgaggaagaaaatagggggatcgtggtcctgggtatcaacagggcctatgggaaaaattctttgtctaaaaacctcatcaaaatgctgtcaaaagctgtagatgctttaaaaagtgataaaaaggtgaggactattataattaggtccgaggtcccgggaattttttgcgccggagcagatctgaaggaacgcgcaaagatgagcagctcggaagtcggacccttcgttagcaaaatacgggccgttataaatgacattgctaatctcccagtgcctacaatagctgccattgatggactggcgctggggggaggcctcgaactcgccctggcatgtgacattcgagtggccgcctcttccgccaaaatgggcctggtggaaacaaaattagccatcattcccggtggcgtcacatcttctaccgaagtgctgaatccttcaaagtcctctatgaaaattggcatcattattttccagaccccggtgaacattgacattctcgctagctcacatgaaagctag

SEQ ID NO: 271563 - DNA, 768 bp, Artificial Sequence
  derived and/or modified sequence
atggctgctgctgtggccgccgcccctggggccctgggcagcctgcatgctggaggagcccggctggtggccgcctgcagcgcctggctgtgccccggcctgcggctgcccggcagcctggccggcagaagagctggccctgccatctgggcccagggctgggtgcctgctgctgggggccctgcccccaagaggggctacagcagcgagatgaagacagaagatgagctgcgggtgcgccacctggaggaggagaacagaggaattgtggtgctgggcatcaacagagcctacggcaagaacagcctgagcaagaacctgatcaagatgctgagcaaggctgtggatgccctgaagagtgacaagaaggtgaggaccatcatcatccgctctgaggtgcccggcatcttctgtgccggggctgacctgaaggagcgggccaagatgagcagcagcgaggtgggcccctttgtgtccaagatccgggctgtgatcaatgacatcgccaacctgcctgtgcccaccatcgccgccattgatggcctggccctgggcggcggcctggagctggccctggcctgtgacatccgggtggccgccagcagcgccaagatgggcctggtggagaccaagctggccatcatccctgggggcgtgaccagcagcacagaggtgctgaaccccagcaagagctccatgaagattggcatcatcatcttccagacccctgtgaacatcgacatcctggccagcagccatgagagctag

SEQ ID NO: 271564 - DNA, 768 bp, Artificial Sequence
  derived and/or modified sequence
atggccgccgccgtggccgccgcccccggcgccctgggcagcctgcacgcaggcggggcccgtctcgtcgctgcttgctcagcttggctgtgtccagggctcagacttcccggtagcctcgcaggcaggcgggcagggcccgcaatctgggcacagggttgggtgcccgcggcagggggccccgccccaaagcgcggctacagctctgagatgaagacggaagatgaactcagagtacgccacctggaagaagaaaaccggggcatcgtcgtactgggtataaatcgcgcctacggaaagaatagtctgtcgaaaaacttgattaagatgttaagcaaggctgtggacgccctcaaatcggataagaaggtgagaaccattatcatccgaagtgaggtccccggcattttttgtgccggagccgacctgaaggaacgagcgaaaatgagttcctctgaggtagggccgtttgtgtctaagattcgcgcagtaatcaatgatatcgcgaacctccccgtgccaaccattgctgctatcgacggtttagctcttggaggaggcctggagcttgctctcgcatgcgacatccgggttgctgcctcgtcagccaagatgggcctcgtggagactaagctggccataatccccgggggcgtaacctcttccacagaggttctgaaccccagcaaaagttcgatgaagatcggaattatcatcttccagacccccgtaaatattgacatcctggccagctcacacgaatcttag

SEQ ID NO: 271565 - DNA, 768 bp, Artificial Sequence
  derived and/or modified sequence
atggccgcagccgtggctgcggctcccggtgctctcgggtcactgcacgcaggaggcgcacgcctcgtcgctgcctgttctgcctggctctgccccggactgagacttcctggtagccttgccggtaggcgggcagggcctgcgatctgggctcaggggtgggtgcctgccgctggcggtcctgcaccaaaaagaggatattccagcgagatgaagaccgaagatgagctgcgagtgcggcacttagaagaggaaaacagagggatcgtagtcctcggcatcaatagggcttatgggaagaacagcttaagcaagaatctaatcaagatgctgtccaaggctgttgatgctcttaagtcagacaagaaagtgcggacaattataatccgatcagaggtgccaggaattttctgtgccggagccgacttaaaagagcgtgccaagatgtcttcctccgaggtgggtccttttgtgtctaagattagagcagttataaacgacatcgccaatctccctgttcccacaatcgcagccatcgacggactagccctgggaggcggtctcgagctcgccctggcctgcgacatccgtgtggccgcaagcagcgccaagatgggcctggtggaaaccaaactggcaattatccccggaggggtgacatcaagcacggaggtgctgaacccctctaagagctccatgaaaatagggattattatcttccaaacacccgtgaacatcgacatcctggcttcttcacacgagtcatag

SEQ ID NO: 271566 - DNA, 768 bp, Artificial Sequence
  derived and/or modified sequence
atggccgccgccgtggccgccgcccccggcgccctgggcagcctgcacgccggcggcgccagactggtggccgcctgcagcgcctggctgtgccccggcctgagactgcccggcagcctggccggcagaagagccggccccgccatctgggcccagggctgggtgcccgccgccggcggccccgcccccaagagaggctacagcagcgagatgaagaccgaggacgagctgagagtgagacacctggaggaggagaacagaggcatcgtggtgctgggcatcaacagagcctacggcaagaacagcctgagcaagaacctgatcaagatgctgagcaaggccgtggacgccctgaagagcgacaagaaggtgagaaccatcatcatcagaagcgaggtgcccggcatcttctgcgccggcgccgacctgaaggagagagccaagatgagcagcagcgaggtgggccccttcgtgagcaagatcagagccgtgatcaacgacatcgccaacctgcccgtgcccaccatcgccgccatcgacggcctggccctgggcggcggcctggagctggccctggcctgcgacatcagagtggccgccagcagcgccaagatgggcctggtggagaccaagctggccatcatccccggcggcgtgaccagcagcaccgaggtgctgaaccccagcaagagcagcatgaagatcggcatcatcatcttccagacccccgtgaacatcgacatcctggccagcagccacgagagctag

SEQ ID NO: 271567 - DNA, 714 bp, Artificial Sequence
  derived and/or modified sequence
atgctgcactgcttcggcggcggcatcctgagctgcctgctgctggccgagccccccctgaagttcctggccaaccacaccaacatcctgctggccagcagcatctggtacatcaccttcttctgcccccacgacctggtgagccagggctacagctacctgcccgtgcagctgctggccagcggcatgaaggaggtgaccagaacctggaagatcgtgggcggcgtgacccacgccaacagctactacaagaacggctggatcgtgatgatcgccatcggctgggccagaggcgccggcggcaccatcatcaccaacttcgagagactggtgaagggcgactggaagcccgagggcgacgagtggctgaagatgagctaccccgccaaggtgaccctgctgggcagcgtgatcttcaccttccagcacacccagcacctggccatcagcaagcacaacctgatgttcctgtacaccatcttcatcgtggccaccaagatcaccatgatgaccacccagaccagcaccatgaccttcgcccccttcgaggacaccctgagctggatgctgttcggctggcagcagcccttcagcagctgcgagaagaagagcgaggccaagagccccagcaacggcgtgggcagcctggccagcaagcccgtggacgtggccagcgacaacgtgaagaagaagcacaccaagaagaacgagtag

SEQ ID NO: 271568 - DNA, 714 bp, Artificial Sequence
  derived and/or modified sequence
atgctccactgttttggcggaggtattctcagctgcctgttgttagccgagccaccgctcaagtttcttgccaaccacacaaacatccttttagcctccagcatctggtacataaccttcttctgtccacatgacctggtgagccagggctacagctatctgccagtgcaactgctggcaagtggaatgaaagaggtaactagaacttggaagatagtgggcggggtcacccacgctaactcctactacaaaaatggttggatagttatgatcgccatcggatgggccaggggggctggaggtaccatcattacaaactttgagaggctcgtgaagggagattggaagccagaaggggatgagtggctgaaaatgagctatccagccaaggtaacactgctgggctcagttattttcacttttcagcatacccagcacctagccatctccaagcacaacctaatgttcctgtacacaatctttatagtggcgacaaagataactatgatgacaactcagaccagcacaatgacgtttgcccccttcgaggacactctgagttggatgctgtttggatggcagcagcctttttcctcttgtgagaaaaagagcgaggctaagtccccctctaatggcgtaggatcactggcctccaagcctgtcgacgtcgccagcgataatgtcaaaaagaaacataccaagaaaaacgaatag

SEQ ID NO: 271569 - DNA, 714 bp, Artificial Sequence
  derived and/or modified sequence
atgctgcactgctttggaggcggcatcctgagctgcctgctgctggccgagccccccctgaagttcctggccaaccacaccaacatcctgctggccagcagcatctggtacatcaccttcttctgcccccatgacctggtgtcccagggctacagctacctgcctgtgcagctgctggccagcggcatgaaggaggtgaccaggacctggaagatcgtgggcggcgtgacccacgccaacagctactacaagaatggctggatcgtgatgattgccatcggctgggcccggggagctgggggcaccatcatcaccaactttgagcggctggtgaagggggactggaagccagaaggagatgagtggctgaagatgagctacccagccaaggtgaccctgctgggcagcgtcatcttcaccttccagcacacccagcacctggccatcagcaagcacaacctgatgttcctgtacaccatcttcatcgtggccaccaagatcaccatgatgaccacccagaccagcaccatgacctttgccccctttgaggacaccctgtcctggatgctgtttggctggcagcagcccttcagcagctgtgagaagaagtctgaggccaagagccccagcaatggagtgggcagcctggccagcaagcctgtggatgtggccagtgacaacgtgaagaagaagcacaccaagaagaatgaatag

SEQ ID NO: 271570 - DNA, 714 bp, Artificial Sequence
  derived and/or modified sequence
atgctgcactgcttcggcggcggcatcctgagctgcctgctgctggccgaacctcctttgaaatttctggcgaatcatactaacatccttctggcttctagtatttggtacatcacgtttttttgccctcatgatctcgtgtctcagggatatagctacttgcctgtccagctgcttgccagcggcatgaaggaggttacacgtacttggaagattgtgggaggcgtgacccacgctaacagttactacaagaatggatggattgtaatgattgccatcggctgggctaggggggctggcggaaccatcatcactaacttcgagaggctcgtgaagggcgactggaaacctgaaggggatgagtggttgaagatgtcttatcctgccaaagtaactttgttgggatcagtcatctttacttttcaacacacacaacatctggccatatccaaacacaatctgatgtttctttataccatcttcatcgtggccactaagatcaccatgatgacaacacagaccagtacaatgaccttcgcacccttcgaggatacattgagctggatgctcttcggatggcaacaacccttcagcagttgtgagaagaaatccgaagctaaaagtccttccaatggcgtcggcagcttagcatccaaaccagtagacgtggcttctgacaacgtcaagaagaaacatactaagaagaacgaatag

SEQ ID NO: 271571 - DNA, 714 bp, Artificial Sequence
  derived and/or modified sequence
atgctccattgcttcggaggaggaatcttgtcatgtctactgctggctgagccccctctgaagttcttggccaaccacacaaatattctgctggcttctagtatctggtacatcacattcttttgcccccacgacttggtttctcagggctactcgtacttgcctgtgcaactgctggcctcaggaatgaaggaggttactaggacgtggaagatcgtggggggagtaactcacgccaactcgtattataagaatggctggatcgtgatgattgctatcggatgggccaggggggctggcggaactattattaccaactttgagagactggtgaagggcgactggaaacctgaaggtgacgaatggttaaaaatgtcatatccggctaaggtgactttgctgggctctgtgattttcacattccagcacacacagcatctggccatatccaaacacaacctgatgttcctctatacaatcttcattgtcgccactaaaatcactatgatgaccacacagacttcaaccatgaccttcgctcctttcgaagatacactgtcatggatgctgttcggttggcagcaaccgttcagcagctgcgagaaaaaaagcgaggctaaatccccaagcaatggcgtgggatcgcttgccagcaagcctgtggatgtagcatcagacaacgtgaaaaagaagcatacgaagaagaacgagtag

SEQ ID NO: 271572 - DNA, 721 bp, Artificial Sequence
  derived and/or modified sequence
tatcctgtctactgcttgcagagcctccattgaagtttcttgcaaaccacactaacatattactggcatcttcaatctggtatattacatttttttgcccgcatgacctagtttcccagggctattcatatctacctgttcaactactggcttcgggaatgaaggaagtgaccagaacttggaaaatagtaggtggagtcacacatgctaatagctattacaaaaatggctggatagtcatgatagctattggatgggcccgaggtgcaggtggtaccattataacgaattttgagaggttggtaaaaggagattggaaaccagaaggtgatgaatggctgaagatgtcataccctgccaaggtaaccctgctggggtcagttatcttcacattccagcacacccagcatctggcaatatcaaagcataatcttatgttcctttataccatctttattgtggccacaaagtctctgaattggagatgatctgtggctgtaattcagataaccatgatgactacacagacttctactatgacatttgctccttttgaggatacattgagttggatgctatttggctggcagcagccgttttcatcatgtgagaagaaaagtgaagcaaagtcaccttccaatggcgttgggtcattggcctcaaagccggtagatgttgcctcagataatgttaaaaagaaacatactaagaagaatgaata

SEQ ID NO: 271573 - protein, 162 aa, Artificial Sequence
  derived and/or modified sequence
  misc_feature (1)..(1): Xaa can be any naturally occurring amino acid
XSCLLLAEPPLKFLANHTNILLASSIWYITFFCPHDLVSQGYSYLPVQLLASGMKEVTRTWKIVGGVTHANSYYKNGWIVMIAIGWARGAGGTIITNFERLVKGDWKPEGDEWLKMSYPAKVTLLGSVIFTFQHTQHLAISKHNLMFLYTIFIVATKSLNWR

SEQ ID NO: 271574 - DNA, 489 bp, Artificial Sequence
  derived and/or modified sequence
tgaagctgcctgctgctggccgagccccccctgaagttcctggccaaccacaccaacatcctgctggccagcagcatctggtacatcaccttcttctgcccccacgacctggtgagccagggctacagctacctgcccgtgcagctgctggccagcggcatgaaggaggtgaccagaacctggaagatcgtgggcggcgtgacccacgccaacagctactacaagaacggctggatcgtgatgatcgccatcggctgggccagaggcgccggcggcaccatcatcaccaacttcgagagactggtgaagggcgactggaagcccgagggcgacgagtggctgaagatgagctaccccgccaaggtgaccctgctgggcagcgtgatcttcaccttccagcacacccagcacctggccatcagcaagcacaacctgatgttcctgtacaccatcttcatcgtggccaccaagagcctgaactggagatag

SEQ ID NO: 271575 - DNA, 489 bp, Artificial Sequence
  derived and/or modified sequence
tgaagttgcctgctgttggcagagcctcctctcaagttcttagctaatcatactaatattttactggcctcctccatatggtatatcacttttttctgccctcacgacttagtctctcaggggtactcatatctcccagtccaactcctggcctctggtatgaaagaggtgaccagaacctggaagattgtagggggggtcacacacgccaattcctattacaagaacggttggattgtaatgatcgctattggttgggccagaggtgcgggtggaactattatcacgaattttgaacggctggttaaaggcgactggaaaccagaaggtgacgagtggttaaaaatgagttacccagccaaggtgacactgctcggctcagttatctttactttccagcacacacagcacctggccatctccaagcataatttgatgttcctgtataccattttcatcgttgctaccaagagcctaaattggaggtag

SEQ ID NO: 271576 - DNA, 489 bp, Artificial Sequence
  derived and/or modified sequence
tgaagctgcctgctgctggccgagccccccctgaagttcctggccaaccacaccaacatcctgctggccagcagcatctggtacatcaccttcttctgcccccatgacctggtgtcccagggctacagctacctgcctgtgcagctgctggccagcggcatgaaggaggtgaccaggacctggaagatcgtgggcggcgtgacccacgccaacagctactacaagaatggctggatcgtgatgattgccatcggctgggcccggggggccggcggcaccatcatcaccaactttgagcggctggtgaagggggactggaagccagaaggagatgagtggctgaagatgagctacccagccaaggtgaccctgctgggcagcgtcatcttcaccttccagcacacccagcacctggccatcagcaagcacaacctgatgttcctgtacaccatcttcatcgtggccaccaagagcctgaactggaggtag

SEQ ID NO: 271577 - DNA, 489 bp, Artificial Sequence
  derived and/or modified sequence
tgaagctgcctgctgctggccgagccccccctgaagttcctggccaaccacaccaatatcctgctcgcaagttcaatctggtatataacttttttctgcccccacgacctggtttcccaaggctactcatatcttcctgttcagctgctagcttcagggatgaaagaggttactcgaacctggaagatcgtggggggagttacccatgccaattcatactataagaacggctggatcgtcatgattgctataggctgggccagaggcgccgggggtactatcataaccaactttgagagactcgtgaagggcgattggaaacctgagggagatgagtggctgaagatgagctatcccgccaaagtaactttgcttggcagcgtgatttttacgtttcaacatacacagcacttagctatctctaagcataacttaatgtttttgtacactatttttatcgttgccactaagtccctgaactggcgttag

SEQ ID NO: 271578 - DNA, 489 bp, Artificial Sequence
  derived and/or modified sequence
tagtcctgcctgctcctggccgaaccaccgcttaagtttctagccaaccatacgaatattctattagcctcaagtatctggtacatcacattcttctgtccccatgatctggtatctcagggctacagttaccttccggttcaattgctggccagcggaatgaaagaggttacaaggacttggaagatcgtgggcggtgtcacacacgctaatagctattacaagaacgggtggattgtcatgatcgcaattggatgggccaggggtgccggagggaccattattactaactttgaacgcctggtgaaaggggactggaagcccgaaggggacgagtggctcaagatgtcttacccagccaaagtaacactcttgggcagtgtcatttttacctttcagcatactcagcacctggctatcagcaagcacaatctcatgtttctctataccatattcatcgtcgccacaaagtcattaaactggcgttag

SEQ ID NO: 271579 - DNA, 451 bp, Artificial Sequence
  derived and/or modified sequence
ctggatagtcatgatagctattggatgggcccgaggtgcaggtggtaccattataacgaattttgagaggttggtaaaaggagattggaaaccagaaggtgatgaatggctgaagatgtcataccctgccaaggtaaccctgctggggtcagttatcttcacattccagcacacccagcatctggcaatatcaaagcataatcttatgttcctttataccatctttattgtggccacaaagtagtctctgaattggagatgatctgtggctgtaattcaggtaacaaatattggaggcaaaatctcttcacatgtagtctcttccagtcctcaaatgttgagccgtgtatatttttttctaacagctttattgagatatattttccatactgtgttagtctgttctcatgctgctaataaagacatacctgatactgggtaatttataaag

SEQ ID NO: 271580 - DNA, 108 bp, Artificial Sequence
  derived and/or modified sequence
atgctgcactgcttcggcggcggcatcctgagctgcctgctgctggccgagccccccctgaagttcctggccaaccacaccaacatcctgctggccagcagcatctag

SEQ ID NO: 271581 - DNA, 108 bp, Artificial Sequence
  derived and/or modified sequence
atgctacattgtttcggaggaggaatccttagttgcttgctgctcgccgagccccctctgaagtttctggctaatcacaccaatatcctattagcctcgagcatctag

SEQ ID NO: 271582 - DNA, 108 bp, Artificial Sequence
  derived and/or modified sequence
atgctgcactgctttggaggcggcatcctgagctgcctgctgctggccgagccccccctgaagttcctggccaaccacaccaacatcctgctggccagcagcatctag

SEQ ID NO: 271583 - DNA, 108 bp, Artificial Sequence
  derived and/or modified sequence
atgctgcactgcttcggcggcggcatcctgagctgcctgctgctggcggagccccctctgaagttcttggcaaaccacactaacattctactagccagcagcatttag

SEQ ID NO: 271584 - DNA, 108 bp, Artificial Sequence
  derived and/or modified sequence
atgcttcactgcttcggtgggggtatactgtcatgtctgcttttggccgagccacctttgaagttcctcgcaaatcatacaaacattctcctcgcctcttccatctag

SEQ ID NO: 271585 - DNA, 502 bp, Artificial Sequence
  derived and/or modified sequence
gctggagccggcgcggaggagcgggcggccgcggctgtgccctctcctactcctcaccgcgcgagcgcggggaaccagtagccgcggctgcttcggttgccgcggtcggtggtcgttatggattctccatgggacgagttggctctggccttctcccgcacgtccatgtttcccttttttgacatcgcgcactatctagtgtcagtgatggcggtgaaacgtcagccggggtctcactgtgttgtctaggctgagtgcattggcactatcatggctcactgcagcctggaactcctgggctcagtgattcttccactttagcctcctgagtagctgagactacaggagcagctgcattggcatggaagaatcctatttcaagctggtttactgctatgctccactgttttggtggaggaattttatcctgtctactgcttgcagagcctccattgaagtttcttgcaaaccacactaacatattactggcatcttcaatctg

SEQ ID NO: 271586 - protein, 529 aa, Artificial Sequence
  derived and/or modified sequence
MLKWPIPGQVALFQEVLQTLTKFCFPFYVDSLTVSQVGQNFTFVLTDIDSKQRFGFCRLSSGAKSCFCILSYLPWFEVFYKLLNILADYTTKRQENQWNELLETLHKLPIPDPGVSVHLSVHSYFTVPDTRELPSIPENRNLTEYFVAVDVNNMLHLYASMLYERRILIICSKLSTLTACIHGSAAMLYPMYWQHVYIPVLPPHLLDYCCAPMPYLIGIHLSLMEKVRNMALDDVVILNVDTNTLETPFDDLQSLPNDVISSLKNRLKKVSTTTGDGVARAFLKAQAAFFGSYRNALKIEPEEPITFCEEAFVSHYRSGAMRQFLQNATQLQLFKQFIDGRLDLLNSGEGFSDVFEEEINMGEYAGSDKLYHQWLSTVRKGSGAILNTVKTKANPAMKTVYKFAKDHAKMGIKEVKNRLKQKDIAENGCAPTPEEQLPKTAPSPLVEAKDPKLREDRRPITVHFGQVRPPRPHVVKRPKSNIAVEGRRTSVPSPEQNTIATPATLHILQKSITHFAAKFPTRGWTSSSH

SEQ ID NO: 271587 - DNA, 1590 bp, Artificial Sequence
  derived and/or modified sequence
atgctgaagtggcccattcccggtcaggttgctctcttccaggaagtcctgcagacccttaccaagttctgttttccgttctacgtggacagcctgacagtttcacaagtgggtcagaacttcacgttcgtccttactgacatcgacagcaaacaaagattcgggttctgccggctctcctctggggcaaaaagctgcttctgtatcctttcttacctgccgtggtttgaggtattctataagctgcttaacattctcgctgattacacgaccaagcggcaagaaaatcagtggaacgaattattggaaactctgcataagctgcctatccccgacccaggagtcagcgtccatctgtctgtccattcatatttcaccgtacccgatacaagggagcttccaagcatccccgagaacagaaacctgaccgagtattttgtggcagttgatgtgaataatatgctccatctgtatgccagcatgctgtacgagaggagaatcctgatcatctgtagcaaactcagtaccctgaccgcttgtatccacggctctgcagcgatgctttaccccatgtactggcaacacgtctacatcccagtattgccaccccatctactcgactattgttgtgcccctatgccctatttaatcggtatacatttgtccctgatggaaaaggtgaggaacatggctctagacgatgttgtgatcctcaacgtagatacaaatactctggagactccgttcgacgatctccagtcattgccaaacgatgttatttccagtctgaagaaccgcctgaagaaggtaagcaccactaccggtgatggcgtcgctagggcctttttaaaggcacaggccgccttctttggttcctatcgaaacgccctgaagatcgagccagaggagcccataacgttttgtgaagaggcattcgtgtctcactatagaagcggcgctatgcgccagttcctccagaacgctacccagctccagctgtttaagcagttcattgacgggaggctagatctactgaactccggcgaggggttcagtgatgttttcgaagaggagatcaatatgggagaatatgccgggtccgataaactttaccaccaatggctgagcacggttcgcaagggctccggtgctatacttaataccgtgaaaacaaaggctaaccctgccatgaaaacagtttacaagttcgctaaggatcatgccaaaatgggtataaaagaggtgaaaaataggttgaaacagaaggatatagccgagaacggttgtgctcccacgcccgaagagcagctgcctaaaacggccccatctcccttggtggaggccaaggatccgaagctgagagaagacagacgccctattactgttcatttcgggcaagtgcgccccccgcgaccacatgttgtgaaacgtcctaaatctaacattgctgtggaaggtcgcagaacaagtgtgccctctccagagcaaaacactattgccacaccagccactctccacatattgcagaagtccattacacactttgctgccaagtttccaacaaggggctggacctcttccagccactag

SEQ ID NO: 271588 - DNA, 1590 bp, Artificial Sequence
  derived and/or modified sequence
atgctgaagtggcccatccctggccaggtggccctcttccaggaggtgctgcagaccctgaccaagttctgcttccccttctacgtggacagcctgactgtgtcccaggtgggccagaacttcacctttgtgctgacagacatcgacagcaagcagcgcttcggcttctgccgcctgagcagcggggccaagagctgcttctgcatcctgagctacctgccctggtttgaggtgttctacaagctgctgaacatcctggccgactacaccaccaagaggcaggagaaccagtggaatgagctgctggagaccctgcacaagctgcccatcccagaccccggggtgtctgtgcacctgtctgtgcacagctacttcaccgtgcctgacacccgggagctgcccagcatccctgagaacagaaacctgacagagtactttgtggccgtggatgtgaacaacatgctgcacctgtatgcctccatgctgtatgaaagacgcatcctgatcatctgcagcaagctgagcaccctgacagcctgcatccacggcagcgctgccatgctgtaccccatgtactggcagcacgtgtacatccctgtgctgcccccccacctgctggactactgctgtgcccccatgccctacctgattggcatccacctgagcctgatggagaaggtgaggaacatggccctggatgatgtggtgatcctgaatgtggacaccaacaccctggagaccccatttgatgacctgcagagcctgcccaatgatgtgatcagcagcctgaagaaccggctgaagaaggtgtccaccaccactggagatggagtggcccgggccttcctgaaggcccaggccgccttcttcggcagctacagaaatgccctgaagattgagcctgaggagcccatcaccttctgtgaggaggcctttgtgagccactaccgcagcggggccatgaggcagttcctgcagaatgccacccagctgcagctgttcaagcagttcattgatggccgcctggacctgctgaacagcggggagggcttcagtgatgtgtttgaggaggagatcaacatgggagaatatgccggcagtgacaagctgtaccaccagtggctgagcacagtgaggaagggcagcggggccatcctgaacacagtgaagaccaaggccaacccagccatgaagacagtgtacaagtttgccaaggaccacgccaagatgggcatcaaggaggtgaagaaccggctgaagcagaaggacattgctgaaaatggctgtgcccccaccccagaggagcagctgcccaagacagcccccagccccctggtggaggccaaggaccccaagctgagagaagatagaagacccatcaccgtgcacttcggccaggtgcggcccccccggccccacgtggtgaagaggcccaagagcaacattgctgtggagggccgccgcacctctgtgcccagccctgagcagaacaccatcgccaccccagccaccctgcacatcctgcagaagagcatcacccactttgctgccaagttccccacccggggctggaccagcagcagccactag

SEQ ID NO: 271589 - DNA, 1590 bp, Artificial Sequence
  derived and/or modified sequence
atgctgaagtggcccatccccggccaggtggccctgttccaggaggtgctccagaccctgactaaattctgctttcctttttacgttgatagtctgacagtgtcacaggttggacagaatttcacctttgtcttgacggacatcgattcaaagcagcggttcggcttctgtcggctgtcctccggcgctaagtcatgcttctgtatcctgagctatttgccttggtttgaggtgttttacaagttgctgaatatcttggctgactataccaccaagagacaagagaaccagtggaacgagctcctggagacccttcataaactgccaattcccgatccaggggtgtccgtccacctttcagtgcactcctactttacagtgcctgacacaagagagttgcctagcattcccgagaatcggaatctgacagagtactttgtcgccgttgacgtcaataatatgctgcacttatacgccagcatgctgtatgagaggcggattttaattatctgtagtaagttgtcaaccctgacagcttgtatccacgggtctgcagctatgctctacccaatgtattggcagcatgtgtacatccctgtcctgcctcctcacttactcgattattgctgtgctccaatgccatacctgatcggtatccacttgagcctgatggagaaagtgcggaacatggccctggatgatgtagtgatcctcaacgtggacaccaataccctagagaccccgttcgatgaccttcagtcccttccgaatgatgtgatctccagtctcaagaacagactgaagaaagtcagtacgactactggagatggagtggcccgggccttcctcaaagcacaagcggccttcttcgggagttatcggaacgctctcaagattgaaccagaagagcccattactttctgcgaggaggctttcgtatcgcactaccggagtggtgccatgaggcagtttcttcagaatgccacccaactgcagctcttcaagcaatttattgatggacggttggacctgctaaacagcggggaaggattctcagacgtgttcgaggaagagatcaatatgggagaatatgctgggagcgacaagttgtatcaccagtggctgtcaaccgtgagaaagggcagtggagctatcttaaatacggttaagacaaaagccaatcccgcaatgaagactgtttataagttcgcaaaagaccacgcaaagatggggataaaggaggtgaagaacaggttaaagcaaaaggacatcgccgagaatggctgcgcacccacaccagaagaacagcttcctaaaacagccccgtcaccactggttgaagctaaagaccccaagctccgagaagatcgccgtcccataaccgtgcacttcggccaggtccggcccccaagacctcacgtcgttaaaaggccgaagtcaaatatcgccgtcgagggccgacgtacgtctgtgccgagtccggaacagaataccattgcaactcctgctaccctgcacatattacaaaagtccattacgcactttgccgcaaagtttcccactagaggctggacctcgtcgagccattag

SEQ ID NO: 271590 - DNA, 1590 bp, Artificial Sequence
  derived and/or modified sequence
atgctaaaatggcctattccaggccaggtcgccctatttcaagaagtactgcaaaccctaacgaagttttgtttccctttttatgtggatagccttacggtttcccaagtgggccagaactttacattcgtcctcaccgacatcgacagtaaacagcgcttcgggttttgccgcctatcctctggagcgaaaagttgcttttgcatcctctcatacctgccatggttcgaggttttctacaagcttttgaacatccttgccgactacactactaaacggcaggagaaccagtggaatgagttgctcgagaccttacacaagctacccatccccgatccgggtgtgtccgtgcacctatctgtacattcttacttcacagtgccagacacgagagagcttcctagcattcccgaaaaccgcaacctcactgaatattttgtcgctgtggatgtcaataatatgctgcacctctacgcatctatgttgtatgaacgaagaatactcatcatctgcagtaagctgagtacgctgactgcctgtattcatggaagcgccgcaatgttatatccaatgtactggcaacatgtttacatcccagttttgcccccacacctgcttgactactgctgtgccccaatgccctacctcattggcatacacttgtctctgatggagaaagtgcggaacatggcccttgacgacgtggtgatactcaatgtcgacacaaataccctcgagacgcctttcgacgacctacaatctctgcctaatgatgttatttctagccttaagaataggctgaaaaaggtgtccactacaaccggtgatggagtggctagggccttcctgaaagcacaggctgctttctttggttcataccgcaatgctcttaaaattgagcctgaagaacctattacgttctgtgaagaagcattcgtgtcccactacaggtctggcgctatgagacagtttctgcagaatgccacccagctgcagctgttcaagcaatttattgacggtaggttagaccttctgaactctggcgaaggattttctgatgtgttcgaagaggaaattaacatgggtgaatacgccggatcagacaagctgtatcatcagtggttgtctacagtgcgcaaaggcagcggggctatccttaataccgttaaaaccaaagccaacccagctatgaaaacggtatacaaattcgcgaaagaccacgccaaaatgggtattaaagaagtaaaaaaccgcttgaagcagaaagatattgccgaaaatgggtgtgcgcctacgccggaggaacaattgcccaagaccgctccttcaccactcgtcgaggccaaggatccaaagctcagagaagataggagacctatcacggtgcacttcggacaggtcagaccccctcggccacatgtggtcaagaggccgaagtcgaatatcgccgtagaaggcaggcgcacttctgtcccgtcgccagagcagaataccatcgccaccccagcaacacttcatatactgcagaagtccatcactcattttgcggcaaaattccccacacgaggatggacgagcagttcacattag

SEQ ID NO: 271591 - DNA, 1590 bp, Artificial Sequence
  derived and/or modified sequence
atgctgaagtggcccatccccggccaggtggccctgttccaggaggtgctgcagaccctgaccaagttctgcttccccttctacgtggacagcctgaccgtgagccaggtgggccagaacttcaccttcgtgctgaccgacatcgacagcaagcagagattcggcttctgcagactgagcagcggcgccaagagctgcttctgcatcctgagctacctgccctggttcgaggtgttctacaagctgctgaacatcctggccgactacaccaccaagagacaggagaaccagtggaacgagctgctggagaccctgcacaagctgcccatccccgaccccggcgtgagcgtgcacctgagcgtgcacagctacttcaccgtgcccgacaccagagagctgcccagcatccccgagaacagaaacctgaccgagtacttcgtggccgtggacgtgaacaacatgctgcacctgtacgccagcatgctgtacgagagaagaatcctgatcatctgcagcaagctgagcaccctgaccgcctgcatccacggcagcgccgccatgctgtaccccatgtactggcagcacgtgtacatccccgtgctgcccccccacctgctggactactgctgcgcccccatgccctacctgatcggcatccacctgagcctgatggagaaggtgagaaacatggccctggacgacgtggtgatcctgaacgtggacaccaacaccctggagacccccttcgacgacctgcagagcctgcccaacgacgtgatcagcagcctgaagaacagactgaagaaggtgagcaccaccaccggcgacggcgtggccagagccttcctgaaggcccaggccgccttcttcggcagctacagaaacgccctgaagatcgagcccgaggagcccatcaccttctgcgaggaggccttcgtgagccactacagaagcggcgccatgagacagttcctgcagaacgccacccagctgcagctgttcaagcagttcatcgacggcagactggacctgctgaacagcggcgagggcttcagcgacgtgttcgaggaggagatcaacatgggcgagtacgccggcagcgacaagctgtaccaccagtggctgagcaccgtgagaaagggcagcggcgccatcctgaacaccgtgaagaccaaggccaaccccgccatgaagaccgtgtacaagttcgccaaggaccacgccaagatgggcatcaaggaggtgaagaacagactgaagcagaaggacatcgccgagaacggctgcgcccccacccccgaggagcagctgcccaagaccgcccccagccccctggtggaggccaaggaccccaagctgagagaggacagaagacccatcaccgtgcacttcggccaggtgagaccccccagaccccacgtggtgaagagacccaagagcaacatcgccgtggagggcagaagaaccagcgtgcccagccccgagcagaacaccatcgccacccccgccaccctgcacatcctgcagaagagcatcacccacttcgccgccaagttccccaccagaggctggaccagcagcagccactag

SEQ ID NO: 271592 - DNA, 2088 bp, Artificial Sequence
  derived and/or modified sequence
cgcgcgccgggcacgcgcgccggcgaccatggcgttcgccgggctggagcgagtacattaacccctggaggcggcggcggcggcgagggagcgagcctcgagcgggcgggccccagcctgagggaagggaggaaggggcggggagagcgccagagggaggccggtcggccgcgggcgggcgggcagcgcagcgccgagcggggcccgcgggcccatgaggaggcctggggaccatgggctccaggatcaagcagaatccagagaccacatttgaagtatatgttgaagtggcctatcccaggacaggtggcactctttcaggaagttctacagactttgaccaagttttgtttccccttctatgtggacagcctcacagttagccaagttggccagaacttcacattcgtgctcactgacattgacagcaaacagagattcgggttctgccgcttatcttcaggagcgaagagctgcttctgtatcttaagctatctcccctggttcgaggtattttataagctgcttaacatcctggcagattacacgacaaaaagacaggaaaatcagtggaatgagcttcttgaaactctgcacaaacttcccatccctgacccaggagtgtctgtccatctcagcgtgcattcttattttactgtgcctgataccagagaacttcccagcatacctgagaatagaaatctgacagaatattttgtggctgtggatgttaacaacatgttgcatctgtacgccagtatgctgtacgaacgccggatactcatcatttgcagcaaactcagcactctgactgcctgcatccacgggtctgcggcgatgctctaccccatgtactggcagcacgtgtacatccccgtgctgccgccgcatctgctggactactgctgtgctcccatgccctacctcataggaatccatttaagtttaatggagaaagtcagaaacatggccctggatgatgtcgtgatcctgaatgtggacaccaacaccctggaaacccccttcgatgacctccagagcctcccaaacgacgtgatctcttccctgaagaacaggctgaaaaaggtctccacaaccactggggatggtgtggccagagcgttcctcaaggcccaggctgctttcttcggtagctaccgaaacgctctgaaaatcgagccggaggagccgatcactttctgtgaggaagccttcgtgtcccactaccgctccggagccatgaggcagttcctgcagaacgccacacagctgcagctcttcaagcagtttattgatggtcgattagatcttctcaattccggcgaaggtttcagtgatgtttttgaagaggaaatcaacatgggcgagtacgctggcagtgacaaactgtaccatcagtggctctccactgtccggaaaggaagtggagcaattctgaatactgtaaagaccaaagcaaatccggccatgaagactgtctacaagttcgcaaaagatcatgcaaaaatgggaataaaagaggtgaaaaaccgcttgaagcaaaaggacattgccgagaatggctgcgcccccaccccagaagagcagctgccaaagactgcaccgtccccactggtggaggccaaggaccccaagctccgagaagaccggcggccaatcacagtccactttggacaggtgcgcccacctcgtccacatgttgttaagagaccaaagagcaacatcgcagtggaaggccggaggacgtctgtgccgagccctgagcaaaacaccattgcaacaccagctacactccacatcctacagaaaagcattacccattttgcggccaagttcccgacgagaggctggacctcttcatcacattgacttacgccgttgcttttccagactgggcagaggggctgacttcgcagtgtgtgccaaagagccggtgtctgataatcccattttcctgcttatcacctgaactgtgtcagtatcacttttagttttgttggttggttggtttgttgtttgtttaatatgccctgttttctacttctgttggaaaatatttggggttgaaataaaccagtgggagcatgg

SEQ ID NO: 271593 - protein, 396 aa, Artificial Sequence [sequence omitted]

SEQ ID NO: 271594 - protein, 1836 aa, Artificial Sequence
  derived and/or modified sequence
MATSEYPYSECQNAAQIYRKVTCGIKPASFEKVHDPEIKEIIGECICKNKEERYEIKDLLSHAFFAEDTGVRVELAEEDHGRKSTIALRLWVEDPKKLKGKPKDNGAIEFTFDLEKETPDEVAQEMIESGFFHESDVKIVAKSIRDRVALIQWRRERIWPALQPKEQQDVGSPDKARGPPVPLQVQVTYHAQAGQPGPPEPEEPEADQHLLPPTLPTSATSLASDSTFDSGQGSTVYSDSQSSQQSVMLGSLADAAPSPAQCVCSPPVSEGPVLPQSLPSLGAYQQPTAAPGLPVGSVPAPACPPSLQQHFPDPAMSFAPVLPPPSTPMPTGPGQPAPPGQQPPPLAQPTPLPQVLAPQPVVPLQPVPPHLPPYLAPASQVGAPAQLKPLQMPQAPLQPLAQVPPQMPPIPVVPPITPLAGIDGLPPALPDLPTATVPPVPPPQYFSPAVILPSLAAPLPPASPALPLQAVKLPHPPGAPLAMPCRTIVPNAPATIPLLAVAPPGVAALSIHSAVAQLPGQPVYPAAFPQMAPTDVPPSPHHTVQNMRATPPQPALPPQPTLPPQPVLPPQPTLPPQPVLPPQPTRPPQPVLPPQPMLPPQPVLPPQPALPVRPEPLQPHLPEQAAPAATPGSQILLGHPAPYAVDVAAQVPTVPVPPAAVLSPPLPEVLLPAAPELLPQFPSSLATVSASVQSVPTQTATLLPPANPPLPGGPGIASPCPTVQLTVEPVQEEQASQDKPPGLPQSCESYGGSDVTSGKELSDSCEGAFGGGRLEGRAARKHHRRSTRARSRQERASRPRLTILNVCNTGDKMVECQLETHNHKMVTFKFDLDGDAPDEIATYMVEHDFILQAERETFIEQMKDVMDKAEDMLSEDTDADRGSDPGTSPPHLSTCGLGTGEESRQSQANAPVYQQNVLHTGKRWFIICPVAEHPAPEAPESSPPLPLSSLPPEASQDSAPYKDQLSSKEQPSFLASQQLLSQAGPSNPPGAPPAPLAPSSPPVTALPQDGAAPATSTMPEPASGTASQAGGPGTPQGLTSELETSQPLAETHEAPLAVQPLVVGLAPCTPAPEAASTRDASAPREPLPPPAPEPSPHSGTPQPALGQPAPLLPAAVGAVSLATSQLPSPPLGPTVPPQPPSALESDGEGPPPRVGFVDSTIKSLDEKLRTLLYQEHVPTSSASAGTPVEVGDRDFTLEPLRGDQPRSEVCGGDLALPPVPKEAVSGRVQLPQPLVEKSELAPTRGAVMEQGTSSSMTAESSPRSMLGYDRDGRQVASDSHVVPSVPQDVPAFVRPARVEPTDRDGGEAGESSAEPPPSDMGTVGGQASHPQTLGARALGSPRKRPEQQDVSSPAKTVGRFSVVSTQDEWTLASPHSLRYSAPPDVYLDEAPSSPDVKLAVRRAQTASSIEVGVGEPVSSDSGDEGPRARPPVQKQASLPVSGSVAGDFVKKATAFLQRPSRAGSLGPETPSRVGMKVPTISVTSFHSQSSYISSDNDSELEDADIKKELQSLREKHLKEISELQSQQKQEIEALYRRLGKPLPPNVGFFHTAPPTGRRRKTSKSKLKAGKLLNPLVRQLKVVASSTGHLADSSRGPPAKDPAQASVGLTADSTGLSGKAVQTQQPCSVRASLSSDICSGLASDGGGARGQGWTVYHPTSERVTYKSSSKPRARFLSGPVSVSIWSALKRLCLGKEHSSRSSTSSLAPGPEPGPQPALHVQAQVNNSNNKKGTFTDDLHKLVDEWTSKTVGAAQLKPTLNQLKQTQKLQDMEAQAGWAAPGEARAMTAPRAGVGMPRLPPAPGPLSTTVIPGAAPTLSVPTPGSCGPRAVSTPTSYT

SEQ ID NO: 271595 - DNA, 5511 bp, Artificial Sequence
  derived and/or modified sequence
atggccaccagcgagtacccctacagcgagtgccagaacgccgcccagatctacagaaaggtgacctgcggcatcaagcccgccagcttcgagaaggtgcacgaccccgagatcaaggagatcatcggcgagtgcatctgcaagaacaaggaggagagatacgagatcaaggacctgctgagccacgccttcttcgccgaggacaccggcgtgagagtggagctggccgaggaggaccacggcagaaagagcaccatcgccctgagactgtgggtggaggaccccaagaagctgaagggcaagcccaaggacaacggcgccatcgagttcaccttcgacctggagaaggagacccccgacgaggtggcccaggagatgatcgagagcggcttcttccacgagagcgacgtgaagatcgtggccaagagcatcagagacagagtggccctgatccagtggagaagagagagaatctggcccgccctgcagcccaaggagcagcaggacgtgggcagccccgacaaggccagaggcccccccgtgcccctgcaggtgcaggtgacctaccacgcccaggccggccagcccggcccccccgagcccgaggagcccgaggccgaccagcacctgctgccccccaccctgcccaccagcgccaccagcctggccagcgacagcaccttcgacagcggccagggcagcaccgtgtacagcgacagccagagcagccagcagagcgtgatgctgggcagcctggccgacgccgcccccagccccgcccagtgcgtgtgcagcccccccgtgagcgagggccccgtgctgccccagagcctgcccagcctgggcgcctaccagcagcccaccgccgcccccggcctgcccgtgggcagcgtgcccgcccccgcctgcccccccagcctgcagcagcacttccccgaccccgccatgagcttcgcccccgtgctgcccccccccagcacccccatgcccaccggccccggccagcccgccccccccggccagcagcccccccccctggcccagcccacccccctgccccaggtgctggccccccagcccgtggtgcccctgcagcccgtgcccccccacctgcccccctacctggcccccgccagccaggtgggcgcccccgcccagctgaagcccctgcagatgccccaggcccccctgcagcccctggcccaggtgcccccccagatgccccccatccccgtggtgccccccatcacccccctggccggcatcgacggcctgccccccgccctgcccgacctgcccaccgccaccgtgccccccgtgccccccccccagtacttcagccccgccgtgatcctgcccagcctggccgcccccctgccccccgccagccccgccctgcccctgcaggccgtgaagctgccccacccccccggcgcccccctggccatgccctgcagaaccatcgtgcccaacgcccccgccaccatccccctgctggccgtggccccccccggcgtggccgccctgagcatccacagcgccgtggcccagctgcccggccagcccgtgtaccccgccgccttcccccagatggcccccaccgacgtgccccccagcccccaccacaccgtgcagaacatgagagccacccccccccagcccgccctgcccccccagcccaccctgcccccccagcccgtgctgcccccccagcccaccctgcccccccagcccgtgctgcccccccagcccaccagacccccccagcccgtgctgcccccccagcccatgctgcccccccagcccgtgctgcccccccagcccgccctgcccgtgagacccgagcccctgcagccccacctgcccgagcaggccgcccccgccgccacccccggcagccagatcctgctgggccaccccgccccctacgccgtggacgtggccgcccaggtgcccaccgtgcccgtgccccccgccgccgtgctgagcccccccctgcccgaggtgctgctgcccgccgcccccgagctgctgccccagttccccagcagcctggccaccgtgagcgccagcgtgcagagcgtgcccacccagaccgccaccctgctgccccccgccaacccccccctgcccggcggccccggcatcgccagcccctgccccaccgtgcagctgaccgtggagcccgtgcaggaggagcaggccagccaggacaagccccccggcctgccccagagctgcgagagctacggcggcagcgacgtgaccagcggcaaggagctgagcgacagctgcgagggcgccttcggcggcggcagactggagggcagagccgccagaaagcaccacagaagaagcaccagagccagaagcagacaggagagagccagcagacccagactgaccatcctgaacgtgtgcaacaccggcgacaagatggtggagtgccagctggagacccacaaccacaagatggtgaccttcaagttcgacctggacggcgacgcccccgacgagatcgccacctacatggtggagcacgacttcatcctgcaggccgagagagagaccttcatcgagcagatgaaggacgtgatggacaaggccgaggacatgctgagcgaggacaccgacgccgacagaggcagcgaccccggcaccagccccccccacctgagcacctgcggcctgggcaccggcgaggagagcagacagagccaggccaacgcccccgtgtaccagcagaacgtgctgcacaccggcaagagatggttcatcatctgccccgtggccgagcaccccgcccccgaggcccccgagagcagcccccccctgcccctgagcagcctgccccccgaggccagccaggacagcgccccctacaaggaccagctgagcagcaaggagcagcccagcttcctggccagccagcagctgctgagccaggccggccccagcaacccccccggcgccccccccgcccccctggcccccagcagcccccccgtgaccgccctgccccaggacggcgccgcccccgccaccagcaccatgcccgagcccgccagcggcaccgccagccaggccggcggccccggcaccccccagggcctgaccagcgagctggagaccagccagcccctggccgagacccacgaggcccccctggccgtgcagcccctggtggtgggcctggccccctgcacccccgcccccgaggccgccagcaccagagacgccagcgcccccagagagcccctgcccccccccgcccccgagcccagcccccacagcggcaccccccagcccgccctgggccagcccgcccccctgctgcccgccgccgtgggcgccgtgagcctggccaccagccagctgcccagcccccccctgggccccaccgtgcccccccagccccccagcgccctggagagcgacggcgagggccccccccccagagtgggcttcgtggacagcaccatcaagagcctggacgagaagctgagaaccctgctgtaccaggagcacgtgcccaccagcagcgccagcgccggcacccccgtggaggtgggcgacagagacttcaccctggagcccctgagaggcgaccagcccagaagcgaggtgtgcggcggcgacctggccctgccccccgtgcccaaggaggccgtgagcggcagagtgcagctgccccagcccctggtggagaagagcgagctggcccccaccagaggcgccgtgatggagcagggcaccagcagcagcatgaccgccgagagcagccccagaagcatgctgggctacgacagagacggcagacaggtggccagcgacagccacgtggtgcccagcgtgccccaggacgtgcccgccttcgtgagacccgccagagtggagcccaccgacagagacggcggcgaggccggcgagagcagcgccgagcccccccccagcgacatgggcaccgtgggcggccaggccagccacccccagaccctgggcgccagagccctgggcagccccagaaagagacccgagcagcaggacgtgagcagccccgccaagaccgtgggcagattcagcgtggtgagcacccaggacgagtggaccctggccagcccccacagcctgagatacagcgccccccccgacgtgtacctggacgaggcccccagcagccccgacgtgaagctggccgtgagaagagcccagaccgccagcagcatcgaggtgggcgtgggcgagcccgtgagcagcgacagcggcgacgagggccccagagccagaccccccgtgcagaagcaggccagcctgcccgtgagcggcagcgtggccggcgacttcgtgaagaaggccaccgccttcctgcagagacccagcagagccggcagcctgggccccgagacccccagcagagtgggcatgaaggtgcccaccatcagcgtgaccagcttccacagccagagcagctacatcagcagcgacaacgacagcgagctggaggacgccgacatcaagaaggagctgcagagcctgagagagaagcacctgaaggagatcagcgagctgcagagccagcagaagcaggagatcgaggccctgtacagaagactgggcaagcccctgccccccaacgtgggcttcttccacaccgccccccccaccggcagaagaagaaagaccagcaagagcaagctgaaggccggcaagctgctgaaccccctggtgagacagctgaaggtggtggccagcagcaccggccacctggccgacagcagcagaggcccccccgccaaggaccccgcccaggccagcgtgggcctgaccgccgacagcaccggcctgagcggcaaggccgtgcagacccagcagccctgcagcgtgagagccagcctgagcagcgacatctgcagcggcctggccagcgacggcggcggcgccagaggccagggctggaccgtgtaccaccccaccagcgagagagtgacctacaagagcagcagcaagcccagagccagattcctgagcggccccgtgagcgtgagcatctggagcgccctgaagagactgtgcctgggcaaggagcacagcagcagaagcagcaccagcagcctggcccccggccccgagcccggcccccagcccgccctgcacgtgcaggcccaggtgaacaacagcaacaacaagaagggcaccttcaccgacgacctgcacaagctggtggacgagtggaccagcaagaccgtgggcgccgcccagctgaagcccaccctgaaccagctgaagcagacccagaagctgcaggacatggaggcccaggccggctgggccgcccccggcgaggccagagccatgaccgcccccagagccggcgtgggcatgcccagactgccccccgcccccggccccctgagcaccaccgtgatccccggcgccgcccccaccctgagcgtgcccacccccggcagctgcggccccagagccgtgagcacccccaccagctacacctag

SEQ ID NO: 271596 - DNA, 5511 bp, Artificial Sequence
  derived and/or modified sequence
atggccacaagcgagtacccctattctgaatgtcagaatgccgcccagatttatcgcaaggttacctgtggcattaagcctgccagctttgaaaaagtgcatgatcccgagatcaaggagattatcggggagtgcatctgtaagaataaagaagaacggtatgagattaaggatctcctgagccatgcattctttgcggaggacactggagtgagggtggagttagcagaggaagaccacggccgcaaatcaacaatagccctcagactctgggtggaagatccaaagaaactgaaaggaaagccaaaggataatggcgccatcgaatttaccttcgaccttgagaaggagacccctgacgaagtagctcaggagatgattgaatcaggcttcttccatgagtctgatgttaagattgtagccaagtctattcgcgatagggtggcactaattcagtggcggcgtgagagaatttggcccgcactgcagccgaaagaacagcaggatgtgggctcgcccgataaagctagaggcccgcctgtgcccctgcaagtgcaggtgacgtatcacgcccaagccggtcaacctgggcccccagaacctgaagaaccagaggcagaccagcacctgctaccaccaacactcccaacttccgcaacatccctcgccagtgatagtacctttgactctggccagggcagtacagtttattctgattcgcagtcaagtcaacagtcagttatgttggggtctttggccgacgcagccccctcgcctgcccagtgcgtatgttcccctcctgtgtcagagggcccagtgctgccgcagagcctgccctccttgggcgcataccagcagccaaccgcagccccagggcttccagtcggatctgtgcccgctcctgcatgccccccatcactacaacaacactttcccgatccagcaatgtccttcgcacctgtactgccacctccaagtacacccatgcctactggccctgggcagccagctcccccgggtcaacagcctcccccgctggcccagcctacccctttaccacaagtgttggcgccccagccggttgtgccgttgcagcccgtgcctccccaccttccgccgtacctcgcaccagcctcacaagtaggcgcaccagcccagctgaaacccttacaaatgccacaggctcccctacagccacttgcgcaggtacccccccaaatgccacccatccccgtcgtgccacccattactccacttgccggcatcgacggcctgcccccagctctcccagacctgccaactgccaccgtgcctcccgtgccacctccccagtacttcagccccgccgtcatccttccttccctggcagcccccctgccacctgcgagcccggcgctgccacttcaggctgtgaagctgcctcacccccccggtgcaccccttgcaatgccctgcaggaccatagtgcccaacgcaccagctactattccactcctggcggtggctccccctggcgttgccgccctctccattcacagtgctgtggcccaactccctggccagccggtatatcctgccgcatttccccagatggcacccactgacgtacccccttctccgcaccataccgtacagaatatgcgcgctacccctccgcaaccagccctgcccccacagccaacgcttcccccccaacccgtgttgccaccacaacctactctgccccctcagcccgtgctcccacctcagcccacaagacccccgcagccagttctgccccctcagcccatgctccctccccagcctgtgttgccaccgcagccggctctgccagtcagacctgagcctctgcagccacaccttcctgaacaggctgccccagccgccactccaggctcacaaattttactgggacaccctgcaccttacgcagtcgatgtcgccgcccaggttcctacggtgcctgttcccccagcagccgtgctctcccctcccctccccgaggtcttgttgccagccgctcctgagttgctgccccagtttccgtcaagcctggcgactgtcagcgccagtgtgcagagcgtacctacccagacagcaacattgctcccccctgcaaacccgccactgccaggcggccccggaatcgcgagtccttgtcccactgtccaactgactgttgaaccagtgcaggaggagcaggcctcccaggacaaaccacccggtctccctcagtcttgtgagtcctacggtgggagcgacgttacatcagggaaagagctaagcgattcttgcgagggtgcctttggaggcgggagattagaaggaagggctgcccgcaagcaccacaggcgaagtaccagggccaggtcgcgacaggaaagagcaagcaggccaagattaaccatcttgaatgtttgtaatacaggggacaaaatggttgagtgccagcttgaaacccacaaccataagatggtcacatttaagttcgatctcgatggcgatgcccctgatgaaattgccacgtatatggtcgaacatgacttcatactgcaggctgagcgagagacctttatcgagcaaatgaaagatgttatggataaagccgaagatatgctaagtgaagatacagacgcagaccgcgggagcgatcctggcacatcccctcctcacctgtccacgtgcggcctgggcaccggggaagagagccgccagtcccaggcaaatgcacctgtatatcaacaaaatgtgctccacactgggaagcgatggtttattatctgcccagtagccgagcatcccgcacccgaggccccggagagcagcccacctctgccattatcatcactgccccctgaggccagccaggattccgctccctacaaagaccagctttcttcgaaggagcagccttcctttctggctagccagcagttgctatctcaagcaggccctagcaatccaccgggcgcccctcccgccccactggccccttcatctccccccgtgacggccctgccccaggacggcgccgcacctgcaacttctactatgcctgagcctgcctccggaaccgcctctcaagcaggaggtccagggactccacagggattaacctccgagctggaaactagccaacctctggcggaaacgcacgaagctccccttgcggtccagccgttggtagttgggttggcgccttgcacccctgctccagaggctgcctctacaagagacgccagtgcaccccgggagcccttgccaccacctgccccagaaccatccccacattcaggtaccccacagcccgcactcggacagcccgccccactcctccctgcagctgtgggggctgttagtctggccacttctcagctaccctctccccccttgggacccacagttccaccacagcctcctagtgctctggaatcagatggcgaggggcctccgcctcgggttgggttcgtggactctacaatcaaaagtcttgacgaaaagctgcgcaccctgctctatcaggagcacgtcccgacatcctctgcaagtgcaggcactcccgttgaagtgggggaccgagattttaccctggagccactacgaggcgatcagccccgttccgaggtatgcgggggggacctcgctctgccacccgtgccaaaagaggctgtgtcaggaagggtccagctaccacagcctctggtcgagaaatctgaactagcgcctacaagaggtgctgtgatggaacaagggaccagtagttctatgacggccgagagctccccaagatccatgctgggttatgatcgtgacggacgacaagtggctagcgattcccacgtggttcccagtgtgccacaggacgttccagcctttgtgaggcctgcccgcgtggagcctacggatcgcgatggtggagaggccggggagtcgtctgcagagccaccaccatccgatatggggaccgtggggggccaagccagccacccgcagactctgggagccagggcactgggctccccccgcaaacgcccggagcagcaggatgtgtcatcaccagcaaagaccgttggtcgattcagcgttgtgtctacccaggacgagtggactttggcttccccgcattctctgagatacagcgctccccctgatgtatatctggacgaggcaccttcatcacctgacgtgaaactggctgtcaggcgggcgcaaacggcgtcatccattgaagtcggcgtgggggaacctgtttcttcagatagtggagacgaaggacctcgcgcaaggccaccagtacagaaacaggcctcgcttcccgtatctggctctgtcgccggggactttgtcaaaaaggcaactgcgtttctgcaacgccctagccgtgccgggtctctcgggcctgagacgccaagcagggtaggcatgaaggtgccaactatcagcgtcacatcatttcactcccagagttcatatatctcctcagacaatgacagcgagctcgaagacgctgatatcaagaaggagctacagtccctgagagaaaaacatctcaaggaaatctctgagttgcagagccaacagaagcaggagatcgaagctttgtatagaagacttgggaaacctcttccacctaacgtcgggttcttccataccgccccaccaactggaaggcgacgcaagacatccaagtccaagttaaaggcgggcaagctgcttaacccactggttagacagctgaaggtggttgccagttcaacaggccacctcgctgattcatcccgcggaccacccgcgaaggaccccgctcaagcttctgtggggctaactgcggatagcactggcctaagcgggaaggcggtacagacccagcagccctgcagtgtacgggccagcctttccagtgatatctgttctgggctggctagtgatggcggtggagctcggggacagggctggactgtttaccacccaacatctgagagggtcacatacaagtcttcctccaagccccgggcgcgcttcctgtctggcccagtgtccgtgtcaatctggtccgcacttaagaggctttgcctcggtaaggagcactcctcccggagctccactagctcactagcacccgggccagaaccaggccctcagccggctctacatgtccaagcccaagtgaacaacagcaacaataaaaaaggtactttcacagacgatctgcacaaactggttgacgagtggacatcaaagacagttggtgcggctcaacttaaacctacgttaaaccagctgaagcaaacccagaaattgcaggacatggaggcccaggctggctgggctgcccctggtgaggcacgcgctatgaccgcccctcgagcgggcgtgggcatgccaaggctgcctcccgctcccggccccctgtcaacaacggtcatcccaggtgccgccccgaccctctcagtacctacacctggaagctgtggaccccgcgccgtgtcaacacccacttcctatacttag

SEQ ID NO: 271597 - DNA, 5511 bp, Artificial Sequence
  derived and/or modified sequence
atggccaccagcgagtacccctacagcgagtgccagaatgctgcccagatctacaggaaggtgacctgtggcatcaagccagccagctttgagaaggtgcatgaccctgagatcaaggagatcatcggggagtgcatctgcaagaacaaggaggagagatatgagatcaaggacctgctgagccacgccttctttgctgaagatactggagtgcgggtggagctggccgaggaggaccacggcaggaagagcaccatcgccctgcggctgtgggtggaggaccccaagaagctgaagggcaagcccaaggacaatggagccatcgagttcacctttgacctggagaaggagaccccagatgaggtggcccaggagatgattgaaagtggcttcttccatgaaagtgatgtgaagatcgtggccaagagcatccgggacagagtggccctgatccagtggaggcgggagcgcatctggccagccctgcagcccaaggagcagcaggatgtgggcagcccagacaaggcccggggcccccctgtgcccctgcaggtgcaggtgacctaccacgcccaggccggccagcccggccccccagagcctgaggagcctgaggccgaccagcacctgctgccccccaccctgcccaccagcgccaccagcctggccagtgacagcacctttgacagcggccagggcagcacagtgtacagcgacagccagagcagccagcagagcgtgatgctgggcagcctggctgatgctgcccccagccctgcccagtgtgtgtgcagcccccctgtgtctgagggccctgtgctgccccagagcctgcccagcctgggcgcctaccagcagcccacagctgcccctggcctgcctgtgggctctgtgcctgccccagcctgcccccccagcctgcagcagcacttcccagaccctgccatgagctttgcccctgtgctgcccccacccagcacccccatgcccactggacctggccagcctgcccctcctggccagcagcccccacccctggcccagcccacccccctgccccaggtgctggccccccagcctgtggtgcccctgcagcctgtgcccccccacctgcccccctacctggccccagccagccaggtgggcgccccagcccagctgaagcccctgcagatgccccaggcccccctgcagcccctggcccaggtgcccccccagatgccacccatccctgtggtgccccccatcacccccctggccggcattgatggcctgcccccagccctgcctgacctgcccacagccaccgtgccccctgtgcccccaccccagtacttcagccctgctgtgatcctgcccagcctggccgcccccctgcccccagccagccctgccctgcccctgcaggccgtgaagctgccccaccccccaggggcccccctggccatgccctgcaggaccatcgtgcccaatgccccagccaccatccccctgctggccgtggcccctcctggggtggccgccctgagcatccacagcgctgtggcccagctgcccggccagcctgtgtacccagctgccttcccccagatggcccccacagatgtgccccccagcccccaccacacagtgcagaacatgagggccaccccaccccagcctgccctgcccccccagcccaccctgcccccccagcctgtgctgcccccccagcccaccctgcccccccagcctgtgctgcccccccagcccaccaggcctccccagcctgtgctgcccccccagcccatgctgcccccccagcctgtgctgcccccccagcctgccctgcctgtgcggcctgagcccctgcagccccacctgcctgagcaggccgccccagctgccaccccaggcagccagatcctgctgggccacccagccccctatgctgtggatgtggccgcccaggtgcccaccgtgcctgtgcccccagctgctgtgctgagcccccccctgcctgaggtgctgctgcctgctgcccctgagctgctgccccagttccccagcagcctggccaccgtgtctgcctctgtgcagagcgtgcccacccagacagccaccctgctgcccccagccaacccccccctgcccggcggccctggcatcgccagcccctgccccaccgtgcagctgactgtggagcctgtgcaggaggagcaggccagccaggacaagcccccaggcctgccccagagctgtgagagctatggaggcagtgatgtgaccagcggcaaggagctgagtgacagctgtgagggcgcctttggaggcggccgcctggagggccgggccgccaggaagcaccaccggcgcagcacccgggcccggagccggcaggagcgggccagccggccccggctgaccatcctgaatgtgtgcaacacaggagacaagatggtggagtgccagctggagacccacaaccacaagatggtgaccttcaagtttgacctggatggagatgccccagatgagatcgccacctacatggtggagcatgacttcatcctgcaggccgagcgggagaccttcatcgagcagatgaaggatgtgatggacaaggccgaggacatgctgtctgaggacacagatgctgaccggggcagtgaccccggcaccagccccccccacctgagcacctgtggcctgggcactggagaggagagccggcagagccaggccaatgcccctgtgtaccagcagaatgtgctgcacacaggcaagcgctggttcatcatctgccctgtggccgagcacccagcccctgaggcccctgagagcagcccccccctgcccctgagcagcctgcccccagaggccagccaggacagcgccccctacaaggaccagctgagcagcaaggagcagcccagcttcctggccagccagcagctgctgagccaggccggccccagcaaccccccaggggcccccccagcccccctggcccccagcagcccccctgtgacagccctgccccaggatggagctgccccagccaccagcaccatgcctgagcccgccagcggcacagccagccaggccggcggccctggcaccccccagggcctgaccagcgagctggagaccagccagcccctggccgagacccatgaggcccccctggccgtgcagcccctggtggtgggcctggccccctgcaccccagcccctgaggccgccagcaccagagatgccagcgccccccgggagcccctgcccccaccagcccctgagcccagcccccacagcggcaccccccagcctgccctgggccagcctgcccccctgctgcctgctgctgtgggcgctgtgtccctggccaccagccagctgcccagcccccccctgggccccaccgtgcccccccagcccccatctgccctggagagtgatggagagggccccccaccccgggtgggctttgtggacagcaccatcaagagcctggatgagaagctgcggaccctgctgtaccaggagcacgtgcccaccagcagcgccagcgctggcacccctgtggaggtgggggaccgggacttcaccctggagcccctgcggggggaccagcccaggtctgaggtgtgtggcggggacctggccctgccccctgtgcccaaggaggccgtgtctggccgggtgcagctgccccagcccctggtggagaagtctgagctggcccccaccagaggagctgtgatggagcagggcaccagcagctccatgacagctgagagcagccccaggtccatgctgggctatgacagagatggccggcaggtggccagtgacagccacgtggtgcccagcgtgccccaggatgtgcctgcctttgtgcggcctgcccgggtggagcccacagacagagatggaggagaggccggggagagcagcgctgagcccccacccagcgacatgggcaccgtgggcggccaggccagccacccccagaccctgggcgcccgggccctgggcagccccaggaagaggcctgagcagcaggatgtgagcagccctgccaagacagtgggccgcttctctgtggtgtccacccaggatgagtggaccctggccagcccccacagcctgcgctacagcgcccccccagatgtgtacctggatgaggcccccagcagcccagatgtgaagctggccgtgagaagagcccagacagccagcagcattgaggtgggcgtgggggagcctgtgtccagtgacagcggagatgagggcccccgggcccggccccctgtgcagaagcaggccagcctgcctgtgtctggctctgtggccggggactttgtgaagaaggccacagccttcctgcagaggcccagccgggccggcagcctgggccctgagacccccagccgggtgggcatgaaggtgcccaccatctctgtgaccagcttccacagccagagcagctacatcagcagtgacaatgacagcgagctggaggatgctgacatcaagaaggagctgcagagcctgcgggagaagcacctgaaggagatcagcgagctgcagagccagcagaagcaggagattgaggccctgtaccgccgcctgggcaagcccctgcccccaaatgtgggcttcttccacacagcccccccaactggaagaagaaggaagaccagcaagagcaagctgaaggccggcaagctgctgaaccccctggtgcggcagctgaaggtggtggccagcagcacaggccacctggccgacagcagccggggccccccagccaaggaccctgcccaggcctctgtgggcctgacagctgacagcacaggcctgagcggcaaggctgtgcagacccagcagccctgcagcgtgcgggccagcctgagcagtgacatctgcagcggcctggccagtgatggcggcggggcccggggccagggctggacagtgtaccaccccaccagcgagcgggtgacctacaagagcagcagcaagccccgggcccgcttcctgagcggccctgtgtctgtgtccatctggagcgccctgaagaggctgtgcctgggcaaggagcacagcagccgcagcagcaccagcagcctggcccctggccctgagcccggcccccagcctgccctgcacgtgcaggcccaggtgaacaacagcaacaacaagaagggcaccttcacagatgacctgcacaagctggtggatgagtggaccagcaagacagtgggcgccgcccagctgaagcccaccctgaaccagctgaagcagacccagaagctgcaggacatggaggcccaggccggctgggccgcccctggagaggcccgggccatgacagccccccgggccggcgtgggcatgccccggctgcccccagcccctggccccctgagcaccaccgtcatccctggggccgcccccaccctgtctgtgcccaccccaggcagctgtggccccagggctgtgtccacccccaccagctacacctag

SEQ ID NO: 271598 - DNA, 5511 bp, Artificial Sequence
  derived and/or modified sequence
atggccaccagcgagtacccctacagcgagtgccagaacgccgcccaaatttatcggaaagtgacatgtggcatcaaacccgcgtccttcgaaaaagtccatgaccctgaaataaaagaaatcattggagagtgcatttgcaagaacaaagaagagcgctacgagattaaagacttgctgagccacgcatttttcgcggaggacaccggggttagggtggagctggccgaggaagatcacggacgcaagagcaccatcgccctccgactgtgggtcgaagatcccaagaagttaaaaggcaaacccaaggacaatggtgctatcgagtttactttcgacctcgagaaggaaacccccgatgaggtggctcaagagatgatcgaaagtgggttctttcacgagagtgatgttaagatcgtggccaagtctatccgagacagggtggcccttatccagtggcggagggagcggatctggccggcactccagccgaaggagcagcaggatgtagggagccccgacaaggctagaggacctccagtgcccctccaggtgcaggttacttaccatgctcaggcaggtcaaccagggccaccagaacctgaagagccggaggcagatcagcatctcctcccccccacactgcctacatccgcaaccagcttggcgtcagactccacattcgactctggccaaggtagcactgtctattctgactcccagtcatctcagcagtccgtcatgctcggaagcctagctgatgcagcgcctagccccgctcagtgcgtgtgcagccccccagtcagtgaaggcccagtgctgccacagtcgctgcccagccttggtgcttaccagcagccaacagccgcaccagggctcccggtaggcagcgtcccagcccccgcttgtcctccttcattgcagcagcacttccccgacccagccatgagctttgccccagttctccctccgccttctacccccatgccaacgggacccggccagcccgcgccacctggccagcagcccccgccactggcccagcctactccgctccctcaagtgcttgcgccacagcctgtggtccctctgcagcccgttccaccccacctgccaccatacttggcccctgccagccaggtcggggctccggcacagctgaaaccactgcagatgcctcaggcaccgctgcagcctctggctcaagttcccccacagatgccgcccatcccagtggttccccctatcactcctttggctggaattgatggcttgcccccggctttgccagaccttccaaccgctaccgtcccccctgtgccgccaccccagtacttttcaccagctgtgatactcccctcattggccgccccactgccacctgcctcacctgccctgcctctacaggccgtgaaactaccacacccacccggcgctcctcttgcaatgccctgccgcacaatagtgcccaatgcaccagccactataccgcttctcgctgtggcaccgcccggcgttgcagctcttagtattcacagcgccgtggcccagcttcctgggcagcctgtgtaccctgccgcattcccgcagatggctccaacagacgtcccaccatccccgcaccacacagttcagaacatgcgagcgactccccctcaacccgccctgccccctcagccaacactgccccctcagccagttttgcccccccagcctactctgccgcctcagcctgtgctgccacctcagcctacccggccgcctcagcctgtgctcccacctcagcctatgctgcccccgcagccagtattaccgccccaaccagccctgccggtgagacccgagccacttcagccccacttgcccgaacaggccgctcctgctgcaacaccgggatcacagatccttcttggtcacccggccccgtatgcagtagacgtcgctgcccaagtgccaaccgtgcccgttccacctgcggcagtcttgagccctccattacctgaagtgttgctacctgccgcgccagagctgctgccccagttcccctcctctctggctaccgtcagcgcgtcggttcagtctgtgccaactcagaccgccacactcttgcctccagccaatcctcccctgccaggcggtcctggcatcgcctccccctgccctactgtccagttaacggtcgaaccggttcaagaagagcaggcttcccaagataaaccccccgggctgccacaatcctgcgagtcatacggtggatctgatgtcacaagtgggaaggagctgagcgacagctgtgagggagcgtttggaggtgggcgcctggaaggtagagctgccaggaagcatcataggcgtagtacccgggcccgcagccggcaggagagagcctcacgtcccaggctgactatactcaacgtttgtaacacaggtgataaaatggtggaatgtcagctcgaaactcataatcacaaaatggtgacattcaagttcgacctcgacggagacgcgcctgacgaaattgccacatatatggttgaacacgacttcatactccaagctgaacgcgaaacctttattgagcaaatgaaggatgtgatggacaaagcggaggacatgctgagtgaggatacagatgccgaccggggctccgacccaggtacttcaccaccacatttatcaacgtgtggcttgggaactggtgaggagagtcggcaaagccaagcgaacgctccggtctatcaacaaaacgtgctgcatactgggaaacggtggtttattatttgtccagttgcggaacacccagccccagaggcaccagagtcatcccccccactgccgttgtcctcactgcctcccgaggctagccaagattctgccccctacaaggaccagctctccagcaaagagcagccctccttccttgcctcccagcagctcttgtcacaggccggccctagcaatccgcccggggcccctccagcccctctggctccgagctcccctcctgtgaccgcactccctcaagacggggctgcacccgcaacttccaccatgcccgagccagcttcaggcaccgcctctcaggccgggggcccaggtacccctcagggcctcacaagtgagctcgaaacttcgcaaccactcgctgagacccatgaggcacctctcgccgtgcaacccctcgtggtggggctggccccatgcacccctgcacccgaggccgcaagcactcgggacgcctccgcccctcgggagcctctccccccgcctgctcccgagccatccccacactctggaacgcctcaacctgccctcgggcagcctgctcctcttctcccagccgcggtgggggctgtatcactggctacttcccaactgccttcaccacccctgggccctacggtccctccccagcctccatctgccctggagtctgatggagaaggtcctccccctagggttggctttgttgactctaccattaaatcactggacgaaaagttaaggacactgctctaccaggagcatgtccccacctcttcagcaagcgctggaactcccgtggaagttggagaccgggattttactttggaaccactgagaggggatcaacccaggtctgaagtctgcggcggggacctcgcgctgccgccagtgcccaaggaagcggtgtctgggcgcgtgcagttgcctcagccactggtagaaaaatctgaacttgcgcccacacgtggggcagtcatggaacagggaactagctcttctatgacggccgagtcaagcccacgatccatgctgggctacgacagagacggccgccaggtcgctagcgattctcacgtagtcccctctgtgcctcaggatgtgccggcctttgttcggcctgccagagtggaaccgactgatcgtgatggaggcgaagccggtgaaagtagtgctgagccgccccccagcgatatggggaccgtggggggacaagcctcccacccgcagacactcggtgcacgggcactagggtccccgcggaagcgcccagagcaacaggatgtatcgagccctgccaaaacagtggggagatttagcgtggtatcaacacaggatgaatggacactggcgtctccacattcactcaggtacagtgctccgcctgacgtgtacctggatgaggccccaagctccccagacgtcaaattggccgtgaggagggcccagactgccagctcgattgaggttggggtaggagaaccagtgtcaagcgactctggcgatgagggtcctcgggccagaccccccgtgcagaaacaggcatccctgcccgtgtctgggtcagtggccggtgacttcgtcaaaaaggctacagcattcctgcagagaccatctcgcgccggtagcctgggccctgaaaccccctcgcgagtcggtatgaaggtacctaccatctctgtaaccagctttcattctcagagctcctacatctcttcagataacgattccgagctggaagatgcagacataaagaaggagctgcagagcctccgggaaaagcacctgaaggagatctccgagctgcagtcacagcagaaacaggagatagaagcgctctatagaaggcttggtaagccactaccccccaatgtgggattcttccacactgccccccccactggtcgaaggaggaagacttctaagagcaagctgaaggctggcaagctgctcaacccactggtgagacagttgaaggtcgtggctagttcaaccggacacctggctgattcatcacgaggaccacccgccaaggatcccgcccaggcatctgtgggtttaaccgccgactcaacaggtttatcaggcaaggccgtgcagacccaacagccatgtagcgtgcgtgcctccttatctagtgacatctgcagtgggctggcctcagacggagggggcgcacggggacaggggtggacagtgtatcatcccacgtctgaaagagtcacctataagagtagttcaaagcctcgagcccgctttctgtccggtcctgttagtgttagcatatggtccgccctcaaaagactttgcttagggaaggaacatagcagccgtagcagcacttcctcactcgcccctggccccgagcccggcccccaacccgctctccacgtccaggctcaggttaacaacagcaataacaagaagggcacattcacggacgacctacacaagctggtggacgaatggacatcaaaaaccgtaggtgctgcacagttgaagcctaccttgaaccagctcaagcagacccagaagctccaggatatggaggcccaggcgggttgggctgccccaggggaagcgagagcaatgaccgcccctagggccggtgtgggtatgccccggttgcccccagctcccgggccgctctcaacaaccgtgatcccgggcgcagcccccaccctttcagtgccaacccctgggagctgcgggcccagggcggtgagcactccaacatcgtatacttag

SEQ ID NO: 271599 - DNA, 5510 bp, Artificial Sequence
  derived and/or modified sequence
atggctacgtcagagtatccctactctgagtgtcagaacgcggctcagatctatcgcaaggtcacctgcggaataaaaccagctagctttgaaaaggttcatgaccctgagattaaggagatcatcggggagtgcatttgcaaaaacaaagaggaaagatacgaaatcaaggacttgctttcccacgcttttttcgcggaagatacaggtgtgagggtagagctggcagaggaggatcacggacggaaatctacgattgcactgagactgtgggtggaggaccctaagaaactgaaagggaagccaaaggataacggagctattgagttcacctttgacttagagaaagagactcccgacgaggtggcccaggagatgattgaatctggattctttcatgaaagtgacgttaagatcgtggccaaatctataagggaccgtgtagcgctgatccagtggcgcagagagaggatatggcctgctcttcagcctaaagaacagcaggacgtgggctcgcccgacaaagccaggggtcctcccgtgcccctgcaagtgcaggtgacctaccatgcacaggcagggcagccaggacctcctgaaccggaagagcccgaggccgaccaacacttgctgccacctacattgccaacgtccgccacctccctcgcctccgatagtacatttgattcgggccaagggagcaccgtttattccgattctcagagctcccagcagagtgtgatgctcgggtccttggccgacgctgcccctagccccgcacagtgtgtttgcagtccaccagtctccgaagggcctgtactgccacagtcgctcccctctctcggggcttatcaacagcctaccgccgctcccggactgccagttgggtcagtccctgcacccgcttgccctccctcactccagcagcattttcctgacccggcaatgagcttcgcacctgtcctcccccctcccagcacccccatgccgaccggccctggccagccagcacctcctggacagcaacccccacctctagcccagcctacccctttacctcaggtcctggctccacagcccgtggtgcccttgcagcccgtgccaccccacctacctccatatctggcacctgcctctcaagtgggcgcaccagcccaactgaaaccacttcagatgccccaagctcccttacagccattagcccaggtgccaccacagatgccgccaataccggtcgttccccctattaccccattagccggaatagacgggctgcccccagctttaccagacttgccgaccgccacagtgcctcccgttcccccaccacagtatttttcgccggctgtgatcttgccgtcattggccgctcccctgccaccagcttccccagccttgcctctacaggccgtcaaactgccgcaccctccgggtgcgccactggccatgccctgccgcaccattgtgcccaatgctcctgccactatcccactgctggctgtcgcccctcctggagtggctgccctgtctatccactccgccgtcgcccagttgcccggacagcccgtgtaccctgcagccttcccacagatggcgcctactgacgtgcctccctccccacatcacacagttcaaaatatgcgcgctacgccccctcagccagctctgccacctcaacctactctaccaccccagcccgtcttacctccccaacccaccctgccacctcaaccagtactaccacctcaacccactcggcctccccagccggtgctgccaccacaacccatgcttccccctcagcccgtgctgcctcctcagcctgcactgcctgtgaggcccgagccccttcagcctcacttgccagagcaggcagccccagccgctactccaggttcccagatcctgctaggccatcctgccccttacgccgttgacgtggccgctcaagtgccaaccgtacccgtgcctcctgctgccgtgctctcccctccccttccggaggtcttgctgccagcagcccctgagctcctgccgcagttcccgtccagtttagcaacagttagcgcctctgtgcaatccgtgccgacccagactgccacactgctgccacctgctaatccaccgttacctggtgggcctgggatcgcgtcgccttgtcccacggttcaactgacggtggagccagttcaagaagaacaagcgtcacaggacaagccacccggtctgccacagagttgtgaatcctatgggggatccgacgtgacctctggtaaggagctcagtgatagctgtgagggggcttttggcggtgggagacttgaggggagggcagcacggaagcatcacaggaggtcaacccgcgcacgttccagacaggagcgagccagcagacctcgactcacgatcctgaatgtgtgcaacaccggagacaagatggtggagtgtcagctcgagacacacaaccacaagatggtgactttcaaatttgatcttgacggagatgctccagatgaaatcgccacttacatggttgaacacgactttatactgcaagcagagcgcgaaactttcatcgagcagatgaaggatgtaatggataaggcagaggacatgttgtctgaggataccgatgctgaccggggatctgatcctggcaccagcccccctcatctgagcacatgtgggctaggcaccggagaggaatcccggcaatcacaggccaacgccccagtgtatcagcaaaatgtgctgcataccggtaagagatggttcataatctgccccgtggcggagcacccggcacccgaggcacccgaatccagtccaccgctgccactctcaagcctccccccagaggcatcacaggactctgccccatacaaagaccagctgtcctccaaggagcagccctcatttcttgcgtcacagcagcttcttagccaggccggaccaagcaatcctcccggtgctccaccagccccactcgctcctagttcacctcctgtcacggccctccctcaggatggtgctgctcctgcgacatcaaccatgccagagcccgcttccggtaccgcaagccaagccggaggccctggcaccccccaaggtctcacgtcggaactcgaaacatcacagcccctggccgagacccatgaagcccctctggcagtccaacccctcgtagtgggtctcgccccttgtacaccagctccagaagccgcaagtactagagatgcctccgctccacgcgaaccactgccacctccagctcctgagccatcaccgcacagtggtactccccagcccgctctggggcagccagccccacttctgcccgcagcagtgggagcggtgagcctagcaacaagtcagctgccttcaccgccactcggaccaacagtgccccctcagcctccatcggcccttgagagtgatggcgagggcccaccccctcgcgtcgggttcgtcgatagcaccatcaaaagtctggatgaaaaactgcgtacattgctgtaccaagagcacgttccgactagctcggcaagcgcaggcacacctgtcgaggtcggggacagggactttaccctagaacctctgcgtggggatcaaccgaggtccgaggtttgtgggggagaccttgctctcccaccggtgcccaaggaggccgtgtctggccgagtccagctgccacagcctttggtggagaaatccgaactagcacctacacgtggtgcagttatggaacaaggcacctcctcttctatgaccgcagaatctagtcctagatcgatgttggggtacgaccgcgacggcaggcaggtggccagcgattcccatgttgtccccagtgttcctcaagatgtaccggctttcgtaaggccagctcgggtagaaccgactgacagggacgggggtgaggccggagaatcaagtgccgaaccccctcccagcgatatggggaccgtgggcggacaggcgagccacccccagaccctgggcgcacgggctctgggatcaccccgaaaaaggcctgagcagcaggacgtatcctccccagccaaaactgtgggaagattctctgtggtatcgacgcaagacgagtggaccctggccagcccccacagcctcagatactcagctccgcctgatgtgtacctcgatgaggccccatctagccctgacgtcaaactggctgtccgcagagctcagaccgccagctcaatagaagtaggtgtcggcgagcctgtgtcttcggacagcggggatgagggaccacgggctagacctcctgttcaaaaacaggcatctctgccagtgtctgggtctgtggctggcgactttgtcaagaaagccaccgcttttcttcagagaccaagtagagcgggatcactaggaccagagactccttcgagggtgggcatgaaggtgcccactatctcagtgacctcatttcattcgcagtcctcttatataagttcagataacgactctgagctcgaagacgctgatatcaaaaaagaattacaaagcttgagagagaagcatttgaaagaaatcagcgagcttcagtcccagcagaaacaggagattgaagccctctaccgcagacttgggaaacccctgcctcctaatgtcggcttcttccacaccgctccacctactggcagacgcagaaaaacctccaagtctaaacttaaagctggtaagctgcttaatccattagttagacagttgaaagtagtcgcttctagcacgggtcatctggctgatagtagccgtggacctcccgctaaggaccctgctcaggcctcagtggggcttaccgctgacagcaccggcctctccgggaaagctgttcagacacagcagccctgtagcgtgcgcgcaagcctcagttcagacatctgctccggcttggcttctgacggcggaggagccagggggcagggatggacagtctatcatccaacaagcgagagggtaacttacaagtcgagcagtaagcctagggctagatttctttcgggccctgtctcagtgagcatttggtccgctttgaaaaggttgtgcctgggcaaggaacattcctctagaagttctacatccagccttgcccctggtccagaaccagggcctcagccagccctccatgtgcaagcccaagtgaacaattccaataataaaaagggtaccttcactgacgatcttcacaagctagttgatgaatggactagtaaaaccgttggagccgcacagttgaagccgacattgaaccagctgaaacagacccagaaacttcaggatatggaagcccaagccggttgggctgcccctggggaggcccgagctatgaccgcccctagagccggagtgggaatgcccagactccctccggctccaggacctttatcaaccaccgtcattcccggtgctgcccctactctgtcagtgcctacacccggaagctgcgggccaagggcagtctccacacccacctcttacaccta

SEQ ID NO: 271600 - DNA, 6675 bp, Artificial Sequence
  derived and/or modified sequence
atggacggcgatggcggccgccgagacgtccccggcacgctgatggagcccgggcgcggcgcggggcccgcgggcatggcggagcctcgggcgaaggcggcgcggccggggccccagcgctttctgcggcgcagcgtggtagagtcggaccaggaggagccgccgggcttggaggcagccgaggcgccgggcccgcagcccccgcagcccctgcagcgccgggtgcttctgctctgcaagacgcgccgcctcatcgcggagcgcgcccgcggacgccccgccgcccccgcgcccgcagcgctggtagcgcagccgggagcccccggagcccccgcggacgccggccccgagcccgtgggcacgcaggagcccggcccggaccccatcgcagccgctgtcgaaaccgcgcctgcccccgacggcggccccagggaggaggcggcggcgaccgtgaggaaggaggatgagggggcggccgaggcgaagcctgagcccgggcgcactcgccgggacgagcccgaagaggaggaggacgacgaggacgacctcaaggccgtggccacctctctggacggccgcttcctcaagttcgacatcgagctgggccgcggttccttcaagacggtctacaaggggctggacacggagacctgggtggaggtggcctggtgtgagctgcaggaccggaagctcaccaagctggagcggcagcggttcaaggaagaggctgagatgctgaaaggcctgcagcaccccaacatcgtgcgcttctacgacttctgggagtccagcgccaagggcaagcggtgcattgtgctggtgacggagctgatgacctcagggacgctgaagacatacctgaagcggttcaaggtgatgaagcccaaggttctccgcagctggtgccggcagatcctgaagggcctgctgttcctgcacacaaggacgccacccatcatccaccgagacctgaaatgtgacaatattttcatcaccggaccaactgggtctgtgaagattggcgacttgggcctggccactctgaaaagagcgtcatttgccaaaagtgtgataggtactcccgagttcatggcgcccgagatgtacgaggagcactacgatgagtccgtggacgtctatgcctttgggatgtgcatgctggagatggccacctcggagtacccctactcggagtgccagaatgcggcccagatctaccgcaaggtcacctgtggtatcaagccggccagctttgagaaagtgcacgatcctgaaatcaaggagattattggggagtgtatctgcaaaaacaaggaggaaaggtacgagatcaaagacctgctgagccacgccttcttcgcagaggacacaggcgtgagggtggagctcgcggaggaggaccacggcaggaagtccaccatcgccctgaggctctgggtggaagaccccaagaaactgaagggaaagcccaaggacaatggagccatagagttcaccttcgacctggagaaggagacgccggatgaggtggcccaagagatgattgagtctggattcttccacgagagtgacgtcaagatcgtggccaagtccatccgtgaccgcgtggccttgatccagtggcggcgggagaggatctggcccgcgctgcagcccaaggagcagcaggatgtgggcagcccggacaaggccaggggtccgccggtgcccctgcaggtccaggtgacctaccatgcacaggctgggcagcccgggccaccagagcccgaggagccggaggccgaccagcacctcctgccacctacgttgccgaccagcgccacctccctggcctcggacagcaccttcgacagcggccagggctctaccgtgtactcagactcgcagagcagccagcagagcgtgatgcttggctcccttgccgacgcagcgccgtccccggcccagtgtgtgtgcagcccccctgtgagcgaggggcccgtcctgccgcagagcctgccctcgctgggggcctaccagcagcccacggctgcacctggcttgccggtgggctctgtcccggcccccgcctgccctccgtccctccagcagcacttcccggatccggccatgagcttcgcccccgtgctgccgccgcccagcacccccatgcccacgggcccaggccagccagcaccccccggccagcagcctcctccgctggcccagccgacacccctgccgcaggtcctggccccacagcccgtggtccccctccagccggttcccccccacctgccaccgtacctggctccagcctcccaggtgggggcccccgctcagctgaagcccctccagatgccacaggcgcccctgcagccgcttgctcaagtccctccgcagatgcccccgattcctgttgtgccccccatcacgcccctggcgggaatcgacggcctccctccggccctcccagacctgccgaccgcgactgtgcctcccgtgccaccacctcagtatttctctccagccgtgatcttgccgagcctcgctgccccactcccccctgcgtccccagccttgcctctgcaggctgtgaagctgccccacccccctggggcgcccctggccatgccctgccggaccattgtgccaaatgcaccggccactatccccctgctggccgtagccccaccgggcgtggctgccctgtccattcattctgccgtggcccagctcccaggccaacctgtgtacccagcggccttcccacagatggcgcctactgacgtccctccttccccccatcacacggtgcagaatatgagggccacccctccacagccggcactgcctccacaacccacactgcccccacaacccgtgctgcccccgcaacccacgctgccccctcaacctgtgttgcccccgcaacccacacggccccctcaacctgtgctgcccccgcaacccatgctgcccccacaacctgtgctgcccccgcagccggcactgcctgtgcgccctgagcccctccagccccaccttcctgaacaagctgctccagctgctacaccagggagccagattctgcttggccacccagctccctatgctgtggacgtcgccgctcaggtccccaccgtgcctgtgccaccggctgcggtcctctcgccgcctctgccggaagtgctgctgcctgccgcccctgagctcctgcctcagttccccagctccctggccacggtgtctgcctctgtgcagagtgtgcccacccagactgccacacttctgccaccagcaaacccaccgctgcctggcgggcccgggatcgccagcccttgcccaactgtccagctgacggtggaaccagtccaagaggagcaggcctcacaggacaagccgcccggcctcccgcagagctgtgagagctatggaggttctgatgtcacttctggaaaagagctgagtgacagctgtgaaggcgcctttggagggggcaggctggagggcagggcagcccgaaaacaccaccgcaggtccacgcgtgcgcgctcccggcaggagagggccagccggccccggcttaccatcttgaacgtgtgcaacactggggacaagatggtggagtgccagctggagacgcacaaccacaagatggtgaccttcaagttcgacttggacggggacgcacccgatgaaattgccacgtatatggtggagcatgactttatcctgcaggccgagcgggaaacgttcatcgagcagatgaaggatgtcatggacaaggcagaggacatgctcagcgaggacacagacgccgaccgtggctccgacccagggaccagcccgccacacctcagcacctgcggcctgggcaccggggaggagagccgacaatcccaagccaacgcccccgtgtatcagcagaacgtcctgcacaccgggaagaggtggttcatcatctgtccggtggctgagcaccccgcccccgaggcccctgaatcttcgcccccacttcctctaagctccctgccgccagaagccagccaagattcagcgccctataaagaccagctgtcctcgaaggaacaacccagctttctagccagtcagcagctcctgagccaggcgggccccagcaaccctcctggggcacccccagcccctttggccccctcctcccctcctgtgactgctctgccccaagatggagcagctccagccaccagcaccatgccagagccagcgtcaggaactgccagccaggcagggggtccagggacacctcaggggctgaccagtgagctcgagacgtctcagccactagcggagactcacgaggccccgcttgctgtgcagcccctcgtggtgggcctagcaccttgcactccagctccagaggctgcctcaaccagggacgccagtgccccaagggagcccctgccacctcctgcacctgagcccagcccccacagcgggaccccacagcccgccttgggtcaacctgctcccctgcttcctgccgcagtgggggccgtcagcctggccacctcccagctcccaagcccacccctggggcccaccgtccccccacagccaccctcggccctggagtcggatggggaagggccgccccccagggtgggctttgtggacagcaccatcaagagcctggacgagaagctgcggactctgctctaccaggagcacgtgcccacctcctcagcctcagctgggacccctgtggaggtgggcgacagagacttcaccctggagcccctgagaggggaccagccccgctcagaggtctgcgggggggacctggccctgcccccagtgcctaaggaggcggtctcagggcgtgtccagctgccccagcccttggtggagaagtcagaactggcccccactcgaggggccgtgatggagcagggcacgtcctcgtcaatgacagcagagtcgtctcccaggagtatgctaggctatgacagagatggaaggcaggtggcctcagactcccatgtggtccccagcgtcccccaggatgtacctgcttttgtgagacctgcacgtgtggagcccacagacagggatggtggagaagctggagaaagctcggcagagcccccgccgagtgacatgggcacagtggggggccaggctagccacccccagacactcggcgctcgagctttggggtcccctcggaaacgtccagagcagcaggatgtcagctcaccagccaagactgtgggccgtttctcggtggtcagcactcaggacgagtggaccctggcctccccccacagcctgagatactctgccccacccgacgtctacctggacgaggccccctccagccccgacgtgaagctggcagtgcggcgggcgcagacggcctcctccatcgaggtcggcgtgggcgagcccgtgtccagcgactctggggacgagggccctcgggcgagacccccggtgcagaagcaggcgtccctgcccgtgagtggcagcgtggctggcgacttcgtgaagaaggccaccgccttcctgcagaggccttctcgggccggctcgctgggccccgagacacccagcagggtgggcatgaaggtccccacgatcagcgtgacctccttccattcccagtcgtcctacatcagcagcgacaatgattcggagctcgaggatgctgacataaagaaggagctgcagagtctgcgggagaagcacctgaaggagatctcggagctgcagagccagcagaagcaggagatcgaagctctgtaccgccgcctgggcaagccactgccccccaacgtgggcttcttccacacggcaccccccactggccgccggagaaaaaccagcaagagcaagctgaaggcaggcaagctgctaaatcccctggtgcggcagctcaaggtcgtggcctccagcacaggtcacttggctgactccagcagaggccctcccgctaaggaccctgcccaagccagtgtggggctcactgcagacagcacgggcctgagcgggaaggcagtgcagacccagcagccctgctccgtccgggcctccctgtcttcggacatctgctccggcttagccagtgatggaggcggagcgcgtggccaaggctggacggtttaccacccaacgtctgagagagtgacctataagtctagtagcaaacctcgtgctcgattcctcagtggacccgtatctgtgtccatctggtctgccctgaagcgtctctgcctaggcaaagaacacagcagtaggtcctccaccagcagcctggccccaggccctgagccaggcccccagcccgccctgcacgtccaggcgcaggtgaacaacagcaacaacaagaagggtaccttcacggacgacctgcacaagctggtggacgagtggacgagcaagacggtgggggccgcgcagctgaagcccacgctcaaccagctgaagcagacccagaagctgcaagacatggaggcccaggcaggctgggctgcccctggcgaggcgcgggctatgaccgcacctcgagcaggagtggggatgccacgtctgcccccagcgcccggccctctgtccaccacggtcattcccggagccgccccgaccctgtccgtgcccacaccaggttcctgtggtccacgcgccgtctccacacccacttcctatacttga

SEQ ID NO: 271601 - protein, 2217 aa, Artificial Sequence
  derived and/or modified sequence
MDGDGGRRDVPGTLMEPGRGAGPAGMAEPRAKAARPGPQRFLRRSVVESDQEEPPGLEAAEAPGPQPPQPLQRRVLLLCKTRRLIAERARGRPAAPAPAALVAQPGAPGAPADAGPEPVGTQEPGPDPIAAAVETAPAPDGGPREEAAATVRKEDEGAAEAKPEPGRTRRDEPEEEEDDEDDLKAVATSLDGRFLKFDIELGRGSFKTVYKGLDTETWVEVAWCELQDRKLTKLERQRFKEEAEMLKGLQHPNIVRFYDFWESSAKGKRCIVLVTELMTSGTLKTYLKRFKVMKPKVLRSWCRQILKGLLFLHTRTPPIIHRDLKCDNIFITGPTGSVKIGDLGLATLKRASFAKSVIGTPEFMAPEMYEEHYDESVDVYAFGMCMLEMATSEYPYSECQNAAQIYRKVTCGIKPASFEKVHDPEIKEIIGECICKNKEERYEIKDLLSHAFFAEDTGVRVELAEEDHGRKSTIALRLWVEDPKKLKGKPKDNGAIEFTFDLEKETPDEVAQEMIESGFFHESDVKIVAKSIRDRVALIQWRRERIWPALQPKEQQDVGSPDKARGPPVPLQVQVTYHAQAGQPGPPEPEEPEADQHLLPPTLPTSATSLASDSTFDSGQGSTVYSDSQSSQQSVMLGSLADAAPSPAQCVCSPPVSEGPVLPQSLPSLGAYQQPTAAPGLPVGSVPAPACPPSLQQHFPDPAMSFAPVLPPPSTPMPTGPGQPAPPGQQPPPLAQPTPLPQVLAPQPVVPLQPVPPHLPPYLAPASQVGAPAQLKPLQMPQAPLQPLAQVPPQMPPIPVVPPITPLAGIDGLPPALPDLPTATVPPVPPPQYFSPAVILPSLAAPLPPASPALPLQAVKLPHPPGAPLAMPCRTIVPNAPATIPLLAVAPPGVAALSIHSAVAQLPGQPVYPAAFPQMAPTDVPPSPHHTVQNMRATPPQPALPPQPTLPPQPVLPPQPTLPPQPVLPPQPTRPPQPVLPPQPMLPPQPVLPPQPALPVRPEPLQPHLPEQAAPAATPGSQILLGHPAPYAVDVAAQVPTVPVPPAAVLSPPLPEVLLPAAPELLPQFPSSLATVSASVQSVPTQTATLLPPANPPLPGGPGIASPCPTVQLTVEPVQEEQASQDKPPGLPQSCESYGGSDVTSGKELSDSCEGAFGGGRLEGRAARKHHRRSTRARSRQERASRPRLTILNVCNTGDKMVECQLETHNHKMVTFKFDLDGDAPDEIATYMVEHDFILQAERETFIEQMKDVMDKAEDMLSEDTDADRGSDPGTSPPHLSTCGLGTGEESRQSQANAPVYQQNVLHTGKRWFIICPVAEHPAPEAPESSPPLPLSSLPPEASQDSAPYKDQLSSKEQPSFLASQQLLSQAGPSNPPGAPPAPLAPSSPPVTALPQDGAAPATSTMPEPASGTASQAGGPGTPQGLTSELETSQPLAETHEAPLAVQPLVVGLAPCTPAPEAASTRDASAPREPLPPPAPEPSPHSGTPQPALGQPAPLLPAAVGAVSLATSQLPSPPLGPTVPPQPPSALESDGEGPPPRVGFVDSTIKSLDEKLRTLLYQEHVPTSSASAGTPVEVGDRDFTLEPLRGDQPRSEVCGGDLALPPVPKEAVSGRVQLPQPLVEKSELAPTRGAVMEQGTSSSMTAESSPRSMLGYDRDGRQVASDSHVVPSVPQDVPAFVRPARVEPTDRDGGEAGESSAEPPPSDMGTVGGQASHPQTLGARALGSPRKRPEQQDVSSPAKTVGRFSVVSTQDEWTLASPHSLRYSAPPDVYLDEAPSSPDVKLAVRRAQTASSIEVGVGEPVSSDSGDEGPRARPPVQKQASLPVSGSVAGDFVKKATAFLQRPSRAGSLGPETPSRVGMKVPTISVTSFHSQSSYISSDNDSELEDADIKKELQSLREKHLKEISELQSQQKQEIEALYRRLGKPLPPNVGFFHTAPPTGRRRKTSKSKLKAGKLLNPLVRQLKVVASSTGHLADSSRGPPAKDPAQASVGLTADSTGLSGKAVQTQQPCSVRASLSSDICSGLASDGGGARGQGWTVYHPTSERVTYKSSSKPRARFLSGPVSVSIWSALKRLCLGKEHSSRSSTSSLAPGPEPGPQPALHVQAQVNNSNNKKGTFTDDLHKLVDEWTSKTVGAAQLKPTLNQLKQTQKLQDMEAQAGWAAPGEARAMTAPRAGVGMPRLPPAPGPLSTTVIPGAAPTLSVPTPDPESEKPD

SEQ ID NO: 271602 - DNA, 6654 bp, Artificial Sequence
  derived and/or modified sequence
atggacggcgacggcggcagaagagacgtgcccggcaccctgatggagcccggcagaggcgccggccccgccggcatggccgagcccagagccaaggccgccagacccggcccccagagattcctgagaagaagcgtggtggagagcgaccaggaggagccccccggcctggaggccgccgaggcccccggcccccagcccccccagcccctgcagagaagagtgctgctgctgtgcaagaccagaagactgatcgccgagagagccagaggcagacccgccgcccccgcccccgccgccctggtggcccagcccggcgcccccggcgcccccgccgacgccggccccgagcccgtgggcacccaggagcccggccccgaccccatcgccgccgccgtggagaccgcccccgcccccgacggcggccccagagaggaggccgccgccaccgtgagaaaggaggacgagggcgccgccgaggccaagcccgagcccggcagaaccagaagagacgagcccgaggaggaggaggacgacgaggacgacctgaaggccgtggccaccagcctggacggcagattcctgaagttcgacatcgagctgggcagaggcagcttcaagaccgtgtacaagggcctggacaccgagacctgggtggaggtggcctggtgcgagctgcaggacagaaagctgaccaagctggagagacagagattcaaggaggaggccgagatgctgaagggcctgcagcaccccaacatcgtgagattctacgacttctgggagagcagcgccaagggcaagagatgcatcgtgctggtgaccgagctgatgaccagcggcaccctgaagacctacctgaagagattcaaggtgatgaagcccaaggtgctgagaagctggtgcagacagatcctgaagggcctgctgttcctgcacaccagaaccccccccatcatccacagagacctgaagtgcgacaacatcttcatcaccggccccaccggcagcgtgaagatcggcgacctgggcctggccaccctgaagagagccagcttcgccaagagcgtgatcggcacccccgagttcatggcccccgagatgtacgaggagcactacgacgagagcgtggacgtgtacgccttcggcatgtgcatgctggagatggccaccagcgagtacccctacagcgagtgccagaacgccgcccagatctacagaaaggtgacctgcggcatcaagcccgccagcttcgagaaggtgcacgaccccgagatcaaggagatcatcggcgagtgcatctgcaagaacaaggaggagagatacgagatcaaggacctgctgagccacgccttcttcgccgaggacaccggcgtgagagtggagctggccgaggaggaccacggcagaaagagcaccatcgccctgagactgtgggtggaggaccccaagaagctgaagggcaagcccaaggacaacggcgccatcgagttcaccttcgacctggagaaggagacccccgacgaggtggcccaggagatgatcgagagcggcttcttccacgagagcgacgtgaagatcgtggccaagagcatcagagacagagtggccctgatccagtggagaagagagagaatctggcccgccctgcagcccaaggagcagcaggacgtgggcagccccgacaaggccagaggcccccccgtgcccctgcaggtgcaggtgacctaccacgcccaggccggccagcccggcccccccgagcccgaggagcccgaggccgaccagcacctgctgccccccaccctgcccaccagcgccaccagcctggccagcgacagcaccttcgacagcggccagggcagcaccgtgtacagcgacagccagagcagccagcagagcgtgatgctgggcagcctggccgacgccgcccccagccccgcccagtgcgtgtgcagcccccccgtgagcgagggccccgtgctgccccagagcctgcccagcctgggcgcctaccagcagcccaccgccgcccccggcctgcccgtgggcagcgtgcccgcccccgcctgcccccccagcctgcagcagcacttccccgaccccgccatgagcttcgcccccgtgctgcccccccccagcacccccatgcccaccggccccggccagcccgccccccccggccagcagcccccccccctggcccagcccacccccctgccccaggtgctggccccccagcccgtggtgcccctgcagcccgtgcccccccacctgcccccctacctggcccccgccagccaggtgggcgcccccgcccagctgaagcccctgcagatgccccaggcccccctgcagcccctggcccaggtgcccccccagatgccccccatccccgtggtgccccccatcacccccctggccggcatcgacggcctgccccccgccctgcccgacctgcccaccgccaccgtgccccccgtgccccccccccagtacttcagccccgccgtgatcctgcccagcctggccgcccccctgccccccgccagccccgccctgcccctgcaggccgtgaagctgccccacccccccggcgcccccctggccatgccctgcagaaccatcgtgcccaacgcccccgccaccatccccctgctggccgtggccccccccggcgtggccgccctgagcatccacagcgccgtggcccagctgcccggccagcccgtgtaccccgccgccttcccccagatggcccccaccgacgtgccccccagcccccaccacaccgtgcagaacatgagagccacccccccccagcccgccctgcccccccagcccaccctgcccccccagcccgtgctgcccccccagcccaccctgcccccccagcccgtgctgcccccccagcccaccagacccccccagcccgtgctgcccccccagcccatgctgcccccccagcccgtgctgcccccccagcccgccctgcccgtgagacccgagcccctgcagccccacctgcccgagcaggccgcccccgccgccacccccggcagccagatcctgctgggccaccccgccccctacgccgtggacgtggccgcccaggtgcccaccgtgcccgtgccccccgccgccgtgctgagcccccccctgcccgaggtgctgctgcccgccgcccccgagctgctgccccagttccccagcagcctggccaccgtgagcgccagcgtgcagagcgtgcccacccagaccgccaccctgctgccccccgccaacccccccctgcccggcggccccggcatcgccagcccctgccccaccgtgcagctgaccgtggagcccgtgcaggaggagcaggccagccaggacaagccccccggcctgccccagagctgcgagagctacggcggcagcgacgtgaccagcggcaaggagctgagcgacagctgcgagggcgccttcggcggcggcagactggagggcagagccgccagaaagcaccacagaagaagcaccagagccagaagcagacaggagagagccagcagacccagactgaccatcctgaacgtgtgcaacaccggcgacaagatggtggagtgccagctggagacccacaaccacaagatggtgaccttcaagttcgacctggacggcgacgcccccgacgagatcgccacctacatggtggagcacgacttcatcctgcaggccgagagagagaccttcatcgagcagatgaaggacgtgatggacaaggccgaggacatgctgagcgaggacaccgacgccgacagaggcagcgaccccggcaccagccccccccacctgagcacctgcggcctgggcaccggcgaggagagcagacagagccaggccaacgcccccgtgtaccagcagaacgtgctgcacaccggcaagagatggttcatcatctgccccgtggccgagcaccccgcccccgaggcccccgagagcagcccccccctgcccctgagcagcctgccccccgaggccagccaggacagcgccccctacaaggaccagctgagcagcaaggagcagcccagcttcctggccagccagcagctgctgagccaggccggccccagcaacccccccggcgccccccccgcccccctggcccccagcagcccccccgtgaccgccctgccccaggacggcgccgcccccgccaccagcaccatgcccgagcccgccagcggcaccgccagccaggccggcggccccggcaccccccagggcctgaccagcgagctggagaccagccagcccctggccgagacccacgaggcccccctggccgtgcagcccctggtggtgggcctggccccctgcacccccgcccccgaggccgccagcaccagagacgccagcgcccccagagagcccctgcccccccccgcccccgagcccagcccccacagcggcaccccccagcccgccctgggccagcccgcccccctgctgcccgccgccgtgggcgccgtgagcctggccaccagccagctgcccagcccccccctgggccccaccgtgcccccccagccccccagcgccctggagagcgacggcgagggccccccccccagagtgggcttcgtggacagcaccatcaagagcctggacgagaagctgagaaccctgctgtaccaggagcacgtgcccaccagcagcgccagcgccggcacccccgtggaggtgggcgacagagacttcaccctggagcccctgagaggcgaccagcccagaagcgaggtgtgcggcggcgacctggccctgccccccgtgcccaaggaggccgtgagcggcagagtgcagctgccccagcccctggtggagaagagcgagctggcccccaccagaggcgccgtgatggagcagggcaccagcagcagcatgaccgccgagagcagccccagaagcatgctgggctacgacagagacggcagacaggtggccagcgacagccacgtggtgcccagcgtgccccaggacgtgcccgccttcgtgagacccgccagagtggagcccaccgacagagacggcggcgaggccggcgagagcagcgccgagcccccccccagcgacatgggcaccgtgggcggccaggccagccacccccagaccctgggcgccagagccctgggcagccccagaaagagacccgagcagcaggacgtgagcagccccgccaagaccgtgggcagattcagcgtggtgagcacccaggacgagtggaccctggccagcccccacagcctgagatacagcgccccccccgacgtgtacctggacgaggcccccagcagccccgacgtgaagctggccgtgagaagagcccagaccgccagcagcatcgaggtgggcgtgggcgagcccgtgagcagcgacagcggcgacgagggccccagagccagaccccccgtgcagaagcaggccagcctgcccgtgagcggcagcgtggccggcgacttcgtgaagaaggccaccgccttcctgcagagacccagcagagccggcagcctgggccccgagacccccagcagagtgggcatgaaggtgcccaccatcagcgtgaccagcttccacagccagagcagctacatcagcagcgacaacgacagcgagctggaggacgccgacatcaagaaggagctgcagagcctgagagagaagcacctgaaggagatcagcgagctgcagagccagcagaagcaggagatcgaggccctgtacagaagactgggcaagcccctgccccccaacgtgggcttcttccacaccgccccccccaccggcagaagaagaaagaccagcaagagcaagctgaaggccggcaagctgctgaaccccctggtgagacagctgaaggtggtggccagcagcaccggccacctggccgacagcagcagaggcccccccgccaaggaccccgcccaggccagcgtgggcctgaccgccgacagcaccggcctgagcggcaaggccgtgcagacccagcagccctgcagcgtgagagccagcctgagcagcgacatctgcagcggcctggccagcgacggcggcggcgccagaggccagggctggaccgtgtaccaccccaccagcgagagagtgacctacaagagcagcagcaagcccagagccagattcctgagcggccccgtgagcgtgagcatctggagcgccctgaagagactgtgcctgggcaaggagcacagcagcagaagcagcaccagcagcctggcccccggccccgagcccggcccccagcccgccctgcacgtgcaggcccaggtgaacaacagcaacaacaagaagggcaccttcaccgacgacctgcacaagctggtggacgagtggaccagcaagaccgtgggcgccgcccagctgaagcccaccctgaaccagctgaagcagacccagaagctgcaggacatggaggcccaggccggctgggccgcccccggcgaggccagagccatgaccgcccccagagccggcgtgggcatgcccagactgccccccgcccccggccccctgagcaccaccgtgatccccggcgccgcccccaccctgagcgtgcccacccccgaccccgagagcgagaagcccgactag

SEQ ID NO: 271603 - DNA, 6654 bp, Artificial Sequence
  derived and/or modified sequence
atggatggcgatgggggtagacgcgacgtcccaggaaccctcatggagcctgggagaggggctggccctgccggtatggccgaaccccgggcgaaggcagccaggcccggtccccagcgcttccttagaaggtcagttgttgagagcgaccaggaagaacctccgggactggaagccgccgaagcacccggaccccagcctcctcagcccctccagagaagagtgctactcttatgcaagactcggagactgatcgcggaacgggcccgcggacgaccagcagcacccgccccagctgctctcgtcgcacaaccaggcgcccctggggctccggccgatgccgggcccgagcccgttggcacacaagaaccagggcctgaccccattgccgccgctgtggagacagccccagcccccgatggtggcccgagagaagaagctgctgccactgtacgcaaagaggatgaaggtgcagcagaagccaaaccggagcccggcagaaccagacgggacgaaccagaagaggaggaggacgacgaggacgacttgaaagccgtcgcaactagcctcgacggcagatttctcaagtttgacatagagctcggccgaggttcgttcaagaccgtctacaagggactcgacacagagacttgggtggaggttgcctggtgcgaactgcaagacagaaagctcactaaactggagagacaacggttcaaggaagaagcagagatgctgaagggactgcagcacccaaacatcgtgcgattctatgatttctgggagtcttctgcaaaaggtaaaagatgcatcgtgctcgtgacggagctaatgacgtcaggaactcttaagacgtacctgaagcggtttaaagtgatgaaaccaaaagtcctcaggagttggtgccggcagatcttgaagggactcctttttctgcatactaggaccccgcccattattcatcgtgatttaaaatgcgataatatatttatcaccgggccaaccgggagcgtcaaaatcggcgacctgggcctggctacacttaagcgcgcctcatttgcaaagtcggttatcgggactcccgaattcatggctcccgagatgtacgaggagcactatgacgagagcgtggacgtgtacgcttttgggatgtgcatgctggagatggccacctcagaatatccgtactctgagtgtcagaatgctgcccagatttatcggaaggtgacgtgtggaattaaacctgcctctttcgaaaaggttcatgacccggagattaaagagatcatcggagaatgtatttgtaaaaataaagaggagaggtacgaaatcaaagatttactgtcgcatgccttttttgccgaggataccggggtgcgcgtggagctcgcggaggaggaccatggacgcaagagcacaatagcccttagactgtgggttgaagacccaaagaaactgaaaggaaaacccaaggataacggcgcaattgagttcacattcgatctcgagaaggaaacacctgacgaggtagcacaggaaatgatcgagagcgggttctttcatgagtctgacgtcaaaattgttgctaaaagcattcgcgaccgtgtggccttaatccagtggcgacgcgaaaggatatggcccgcactgcaacccaaggaacagcaggacgtgggcagtcccgataaggctaggggcccgcctgtacctctgcaggttcaggtcacatatcatgcacaggctgggcagcctggacctcccgaacccgaggagccggaggctgaccaacatttgttacctccaaccctccccacgtcagccactagtctcgcttcagacagcacctttgactcagggcaagggtcaaccgtctattctgactcccagtccagccagcagtccgtgatgttaggtagcctagcggatgctgcccctagtccagctcagtgcgtctgctcgccacccgtcagcgaaggaccagtcctccctcagtcacttccatcactgggagcctatcagcagcctacggcagctcctggactgccggtaggtagcgtcccagccccagcctgtccaccctctcttcaacaacacttcccggaccctgctatgtccttcgccccagtccttccccccccttctacccccatgcccacaggccctggacagccagcacctccaggccagcagccaccccccctcgctcagccaaccccacttccacaggttctagccccccagcccgtggtacccctgcaacctgtaccaccccacttacctccctatctggccccagcatctcaagttggcgcacctgctcagctgaagcccctgcagatgccacaggcgccgctccagcccctcgcccaagttccccctcagatgccacctatccccgtggtgccaccaatcaccccactcgccggaatcgatggtttgccgcccgcattgccagacctccctactgccaccgtgccccctgttcctccgccccagtattttagcccggctgtaatcttgccgagcctggcagcaccactgccaccagcttctccagccctgccactccaggccgtgaaactgccgcaccctccaggcgctccccttgctatgccatgccgcacaatagtacccaacgcaccagcaactattcctctgcttgccgtggccccccccggcgtggcggcacttagcatacactctgcagtagcccagcttcccggacagccagtgtacccagccgcttttccccaaatggcaccgacagatgttcctccatcaccgcaccacaccgtgcaaaacatgcgcgctaccccaccccaacccgctctcccgccacagcccacgttacctccccagccggttctgccccctcagcccactctgcctcctcagcccgtacttcccccccagccgacccggcccccgcagccagttctgcccccgcaaccaatgctgcccccccagccggtcttgcctccacagcccgccctacccgtgcgccctgagccactgcagcctcacctgcccgagcaagcagcccccgccgctacgccggggtctcagatcctgttagggcatcccgccccttatgctgtggacgtagcagcacaggtaccaacagtgccggtgccccctgccgcagtccttagccctccccttccagaggtcctactccctgccgcaccggagcttttaccgcagtttccctctagcctggctacagtgtcagcgtctgtacagtctgtcccaacccagaccgccaccttgctgccaccagctaaccccccactgcccgggggtccagggattgccagcccctgccctaccgttcagctcactgtcgaaccagtgcaggaggagcaggcatcacaggacaagcccccaggacttcctcaaagctgcgagtcatatggagggagcgacgttacaagtggtaaagaactgagcgattcctgtgagggcgccttcgggggtgggagattggaggggagggcagccagaaagcatcatcgacgaagcactagagcacggtcacgccaggagagggcatccagaccccggctgaccattttaaacgtctgtaacaccggggacaagatggtggagtgccagcttgaaacgcataatcataaaatggtgacctttaaatttgatttagatggcgacgcccccgatgaaatcgccacatacatggtggaacacgattttattctgcaggcagaacgcgagacattcatcgagcagatgaaggacgtgatggacaaggccgaagacatgctgtccgaagatacagacgccgaccgggggagtgatcccggtacaagtccgcctcatttgtctacgtgtggcctcggtactggagaggagtcacggcaatcccaagcaaacgcaccagtctatcagcagaatgtcctccataccggaaaacggtggtttattatatgccctgtggcagaacatcccgctcctgaagcacccgaaagctccccaccgcttcctctatccagtctgccccctgaggcctctcaggactccgccccatataaagatcaactctcttctaaggagcaaccctccttcttagctagccagcagcttctgtctcaggccggtccatccaaccctcccggggctccgcccgcaccactggccccatcatccccaccagtgactgctcttccacaggatggggcggctcctgccacaagcaccatgcccgaacctgcctctggcaccgctagccaagccgggggacctggtaccccccagggacttactagcgaactggaaacgagtcagcctctggctgaaacacatgaggctccactggccgtgcagccactggtagttgggctcgccccctgtaccccagcccctgaagccgcttccacgcgagatgcaagtgcacctcgtgaacccctcccgcctccagctcctgagcccagtcctcattcaggtacacctcaaccggcattgggacaacctgcacccctcctgcctgctgccgtgggagcagtgagccttgcgaccagccagttaccatcaccacctcttggtcctaccgtgcccccacagcctccctctgccttggagtccgacggagaaggacccccgccgcgcgtggggtttgtcgactccactatcaagtcactggatgagaaattgaggacactgctttaccaggaacatgttccgacttcttctgccagcgccggaactccagtcgaggttggcgatcgggacttcacgttagagccattacggggggaccagcctagatcagaggtgtgtgggggcgacctggccctgccaccagtgcccaaagaagccgtttctggacgggtgcagctgccacagccacttgtggagaagagcgaactcgccccgacaagaggggctgtaatggaacagggcacatcctctagcatgaccgctgaatcatccccacgatcgatgctgggttatgaccgggatggacgacaggtggccagcgattcacatgtggtgccaagtgttccgcaagacgtgcctgccttcgtgagacccgctcgggtggagccaaccgaccgtgacgggggcgaggccggagaatctagcgccgaacctccaccaagcgacatgggcaccgtcggcggacaggcctcccacccgcagaccttaggggcccgagctcttggtagcccccgcaaaaggccagaacagcaggatgtgtcaagccctgcaaagaccgtggggagatttagcgttgtcagtactcaggatgagtggaccctggcgagtccgcattcactgcgatattccgccccccccgacgtgtatctagatgaggcccctagttccccagatgtgaaactggccgtgaggcgcgcacaaaccgcctcaagtattgaagtgggggtcggcgagcccgtatcttccgactccggagacgaggggccacgcgcccgtcccccagtacagaaacaggcctccttgccagtcagtggatcagtggccggagatttcgtaaaaaaggctacggcctttctgcagaggcccagtcgggccgggagtctcgggccggagacccccagcagggttgggatgaaagttccaaccatttctgttacctccttccactctcagtcctcttacatcagcagtgacaacgactccgaactcgaggatgcagacatcaaaaaagagctgcagagtctccgggaaaagcatctgaaggagatcagtgagctgcagtcgcagcagaaacaggagattgaggccctctatcgccgcctgggaaagcccctcccccccaatgtcggcttctttcacactgcacctcccactggccggcggcggaagacttctaaatctaagctcaaagctggaaagttactgaatcccctcgtgagacagctgaaggtggtcgcctctagcacaggccatttagccgactcttcccggggcccacccgccaaggaccccgcccaggcctccgtcggactgactgcagactcaacaggtctttcaggcaaggccgtgcagacacagcaaccatgttcggtgcgagcctctctgtctagcgacatctgctcgggactggcctcagatggtggaggcgcgcgaggtcaaggttggaccgtttatcatcctactagcgaacgagtgacatataagtcttcttcaaagccccgggctaggttcctgtcaggtccagtcagcgtttccatctggagtgctttgaaacgactatgccttggtaaggaacacagtagccgctcttcaaccagctccttagctccaggcccagagccggggccccagcctgctcttcatgttcaggcccaggtgaacaattcaaacaacaaaaagggaaccttcactgacgatttacataagctggtggacgaatggactagtaagactgtgggagcagcacagctcaagcccacactgaaccagctcaaacaaacccagaaacttcaagacatggaggcacaggccggatgggccgcccccggtgaggcccgggccatgaccgcccctcgcgccggggtcggaatgcctcggttacctcccgcccccgggccacttagcaccaccgtgatccccggtgctgcccctaccttgtctgtcccaactcccgaccccgagagcgagaagccagactag

SEQ ID NO: 271604 - DNA, 6654 bp, Artificial Sequence
  derived and/or modified sequence
atggatggagatggcggcagaagagatgtgcccggcaccctgatggagcccggcagaggagctggccctgctggcatggccgagccccgggccaaggccgcccggcccggcccccagcgcttcctgcggcgctctgtggtggagagtgaccaggaggagcccccaggcctggaggccgctgaggcccctggcccccagcccccccagcccctgcagaggagagtgctgctgctgtgcaagacccggcggctgattgctgagcgggcccggggccggcctgctgccccagccccagctgccctggtggcccagcccggggcccctggggccccagcagatgctggccctgagcctgtgggcacccaggagcccggccctgaccccatcgctgctgctgtggagacagccccagccccagatggcggcccccgggaggaggccgccgccaccgtgaggaaggaggatgaaggagctgctgaggccaagccagagcccggccgcaccaggagagatgagcctgaggaggaggaggatgatgaagatgacctgaaggctgtggccaccagcctggatggccgcttcctgaagtttgatattgagctgggccggggcagcttcaagacagtgtacaagggcctggacacagagacctgggtggaggtggcctggtgtgagctgcaggacaggaagctgaccaagctggagcggcagcgcttcaaggaggaggccgagatgctgaagggcctgcagcaccccaacatcgtgcgcttctatgacttctgggagagcagcgccaagggcaagcgctgcatcgtgctggtgacagagctgatgaccagcggcaccctgaagacctacctgaagcgcttcaaggtgatgaagcccaaggtgctgcgctcctggtgccggcagatcctgaagggcctgctcttcctgcacaccaggaccccacccatcatccaccgggacctgaagtgtgacaacatcttcatcaccggccccactggatctgtgaagatcggggacctgggcctggccaccctgaagagggccagctttgccaagagcgtcatcggcaccccagagttcatggcccctgagatgtatgaggagcactatgatgagagcgtggatgtgtatgccttcggcatgtgcatgctggagatggccaccagcgagtacccctacagcgagtgccagaatgctgcccagatctacaggaaggtgacctgtggcatcaagccagccagctttgagaaggtgcatgaccctgagatcaaggagatcatcggggagtgcatctgcaagaacaaggaggagagatatgagatcaaggacctgctgagccacgccttctttgctgaagatactggagtgcgggtggagctggccgaggaggaccacggcaggaagagcaccatcgccctgcggctgtgggtggaggaccccaagaagctgaagggcaagcccaaggacaatggagccatcgagttcacctttgacctggagaaggagaccccagatgaggtggcccaggagatgattgaaagtggcttcttccatgaaagtgatgtgaagatcgtggccaagagcatccgggacagagtggccctgatccagtggaggcgggagcgcatctggccagccctgcagcccaaggagcagcaggatgtgggcagcccagacaaggcccggggcccccctgtgcccctgcaggtgcaggtgacctaccacgcccaggccggccagcccggccccccagagcctgaggagcctgaggccgaccagcacctgctgccccccaccctgcccaccagcgccaccagcctggccagtgacagcacctttgacagcggccagggcagcacagtgtacagcgacagccagagcagccagcagagcgtgatgctgggcagcctggctgatgctgcccccagccctgcccagtgtgtgtgcagcccccctgtgtctgagggccctgtgctgccccagagcctgcccagcctgggcgcctaccagcagcccacagctgcccctggcctgcctgtgggctctgtgcctgccccagcctgcccccccagcctgcagcagcacttcccagaccctgccatgagctttgcccctgtgctgcccccacccagcacccccatgcccactggacctggccagcctgcccctcctggccagcagcccccacccctggcccagcccacccccctgccccaggtgctggccccccagcctgtggtgcccctgcagcctgtgcccccccacctgcccccctacctggccccagccagccaggtgggcgccccagcccagctgaagcccctgcagatgccccaggcccccctgcagcccctggcccaggtgcccccccagatgccacccatccctgtggtgccccccatcacccccctggccggcattgatggcctgcccccagccctgcctgacctgcccacagccaccgtgccccctgtgcccccaccccagtacttcagccctgctgtgatcctgcccagcctggccgcccccctgcccccagccagccctgccctgcccctgcaggccgtgaagctgccccaccccccaggggcccccctggccatgccctgcaggaccatcgtgcccaatgccccagccaccatccccctgctggccgtggcccctcctggggtggccgccctgagcatccacagcgctgtggcccagctgcccggccagcctgtgtacccagctgccttcccccagatggcccccacagatgtgccccccagcccccaccacacagtgcagaacatgagggccaccccaccccagcctgccctgcccccccagcccaccctgcccccccagcctgtgctgcccccccagcccaccctgcccccccagcctgtgctgcccccccagcccaccaggcctccccagcctgtgctgcccccccagcccatgctgcccccccagcctgtgctgcccccccagcctgccctgcctgtgcggcctgagcccctgcagccccacctgcctgagcaggccgccccagctgccaccccaggcagccagatcctgctgggccacccagccccctatgctgtggatgtggccgcccaggtgcccaccgtgcctgtgcccccagctgctgtgctgagcccccccctgcctgaggtgctgctgcctgctgcccctgagctgctgccccagttccccagcagcctggccaccgtgtctgcctctgtgcagagcgtgcccacccagacagccaccctgctgcccccagccaacccccccctgcccggcggccctggcatcgccagcccctgccccaccgtgcagctgactgtggagcctgtgcaggaggagcaggccagccaggacaagcccccaggcctgccccagagctgtgagagctatggaggcagtgatgtgaccagcggcaaggagctgagtgacagctgtgagggcgcctttggaggcggccgcctggagggccgggccgccaggaagcaccaccggcgcagcacccgggcccggagccggcaggagcgggccagccggccccggctgaccatcctgaatgtgtgcaacacaggagacaagatggtggagtgccagctggagacccacaaccacaagatggtgaccttcaagtttgacctggatggagatgccccagatgagatcgccacctacatggtggagcatgacttcatcctgcaggccgagcgggagaccttcatcgagcagatgaaggatgtgatggacaaggccgaggacatgctgtctgaggacacagatgctgaccggggcagtgaccccggcaccagccccccccacctgagcacctgtggcctgggcactggagaggagagccggcagagccaggccaatgcccctgtgtaccagcagaatgtgctgcacacaggcaagcgctggttcatcatctgccctgtggccgagcacccagcccctgaggcccctgagagcagcccccccctgcccctgagcagcctgcccccagaggccagccaggacagcgccccctacaaggaccagctgagcagcaaggagcagcccagcttcctggccagccagcagctgctgagccaggccggccccagcaaccccccaggggcccccccagcccccctggcccccagcagcccccctgtgacagccctgccccaggatggagctgccccagccaccagcaccatgcctgagcccgccagcggcacagccagccaggccggcggccctggcaccccccagggcctgaccagcgagctggagaccagccagcccctggccgagacccatgaggcccccctggccgtgcagcccctggtggtgggcctggccccctgcaccccagcccctgaggccgccagcaccagagatgccagcgccccccgggagcccctgcccccaccagcccctgagcccagcccccacagcggcaccccccagcctgccctgggccagcctgcccccctgctgcctgctgctgtgggcgctgtgtccctggccaccagccagctgcccagcccccccctgggccccaccgtgcccccccagcccccatctgccctggagagtgatggagagggccccccaccccgggtgggctttgtggacagcaccatcaagagcctggatgagaagctgcggaccctgctgtaccaggagcacgtgcccaccagcagcgccagcgctggcacccctgtggaggtgggggaccgggacttcaccctggagcccctgcggggggaccagcccaggtctgaggtgtgtggcggggacctggccctgccccctgtgcccaaggaggccgtgtctggccgggtgcagctgccccagcccctggtggagaagtctgagctggcccccaccagaggagctgtgatggagcagggcaccagcagctccatgacagctgagagcagccccaggtccatgctgggctatgacagagatggccggcaggtggccagtgacagccacgtggtgcccagcgtgccccaggatgtgcctgcctttgtgcggcctgcccgggtggagcccacagacagagatggaggagaggccggggagagcagcgctgagcccccacccagcgacatgggcaccgtgggcggccaggccagccacccccagaccctgggcgcccgggccctgggcagccccaggaagaggcctgagcagcaggatgtgagcagccctgccaagacagtgggccgcttctctgtggtgtccacccaggatgagtggaccctggccagcccccacagcctgcgctacagcgcccccccagatgtgtacctggatgaggcccccagcagcccagatgtgaagctggccgtgagaagagcccagacagccagcagcattgaggtgggcgtgggggagcctgtgtccagtgacagcggagatgagggcccccgggcccggccccctgtgcagaagcaggccagcctgcctgtgtctggctctgtggccggggactttgtgaagaaggccacagccttcctgcagaggcccagccgggccggcagcctgggccctgagacccccagccgggtgggcatgaaggtgcccaccatctctgtgaccagcttccacagccagagcagctacatcagcagtgacaatgacagcgagctggaggatgctgacatcaagaaggagctgcagagcctgcgggagaagcacctgaaggagatcagcgagctgcagagccagcagaagcaggagattgaggccctgtaccgccgcctgggcaagcccctgcccccaaatgtgggcttcttccacacagcccccccaactggaagaagaaggaagaccagcaagagcaagctgaaggccggcaagctgctgaaccccctggtgcggcagctgaaggtggtggccagcagcacaggccacctggccgacagcagccggggccccccagccaaggaccctgcccaggcctctgtgggcctgacagctgacagcacaggcctgagcggcaaggctgtgcagacccagcagccctgcagcgtgcgggccagcctgagcagtgacatctgcagcggcctggccagtgatggcggcggggcccggggccagggctggacagtgtaccaccccaccagcgagcgggtgacctacaagagcagcagcaagccccgggcccgcttcctgagcggccctgtgtctgtgtccatctggagcgccctgaagaggctgtgcctgggcaaggagcacagcagccgcagcagcaccagcagcctggcccctggccctgagcccggcccccagcctgccctgcacgtgcaggcccaggtgaacaacagcaacaacaagaagggcaccttcacagatgacctgcacaagctggtggatgagtggaccagcaagacagtgggcgccgcccagctgaagcccaccctgaaccagctgaagcagacccagaagctgcaggacatggaggcccaggccggctgggccgcccctggagaggcccgggccatgacagccccccgggccggcgtgggcatgccccggctgcccccagcccctggccccctgagcaccaccgtcatccctggggccgcccccaccctgtctgtgcccaccccagaccctgagagcgagaagccagactag

SEQ ID NO: 271605 - DNA, 6654 bp, Artificial Sequence
  derived and/or modified sequence
atggacggcgacggcggccggcgggacgtgcccggcaccctgatggagccgggacgaggtgccggacctgctggcatggccgaaccgcgcgctaaggctgcacggcccgggcctcagcgcttcctcaggcgcagtgttgtcgaaagtgaccaggaggaaccacccggacttgaggcggcggaagcccccgggccccagccaccgcagcctctccagcgtcgagtgctcctgctttgtaaaacgcggcgcctgattgctgagcgggcacggggcaggccagccgctccagcaccagcagctttagtggctcagcctggagctccaggcgcacctgcagacgcggggcctgaacctgtcggaacacaggaacctggcccagatcccatagcggctgcggtggagacggctcctgctcctgatggcggtcccagagaagaggccgctgcaactgtgagaaaggaggacgagggcgcagccgaagcaaagcccgaaccaggtcgtaccaggagagatgagcccgaggaggaggaggacgatgaggacgatctcaaggcagtggcaacatcactggacggaagatttttaaaatttgacatcgaactcgggagggggtctttcaaaacagtctacaagggcctggacaccgagacctgggtggaagtcgcctggtgtgaactgcaagaccggaagctcaccaaactcgaaaggcagaggtttaaagaggaagccgagatgctgaaaggcctgcagcatccaaacatcgtccggttctatgacttctgggagtccagcgctaaagggaagcggtgtattgtgctggtcaccgagctgatgacatctggcacgctcaaaacctaccttaagcggtttaaggtcatgaaaccaaaagtgttgagaagttggtgcaggcagatactcaaaggattgctgtttctccacacccgaacgcccccgatcatccaccgagacttaaaatgtgataatatctttatcactggacctacaggaagtgtcaagatcggcgacctgggactggctaccctgaagcgcgcgtcattcgccaagagtgttatcggaactcccgaatttatggctccagagatgtacgaggagcactacgatgaatcagtggatgtgtatgctttcggaatgtgcatgttagagatggccaccagcgagtacccttattccgaatgccagaacgcagcccaaatttatagaaaggtgacctgtggcatcaagccggctagcttcgagaaggtgcacgaccctgaaatcaaagagatcatcggggagtgcatatgcaagaataaggaagagcgctatgaaataaaggatctgttgtcgcatgcctttttcgccgaggataccggagtgcgcgtggagctggcggaggaagaccacggccgcaaatcaacgattgctcttagactgtgggtcgaggacccaaagaagctcaagggcaagcctaaggataacggggccatagaatttactttcgacctagaaaaagagactccggatgaggtagcccaggaaatgatcgaatctggattcttccatgagagcgacgtcaagattgtagctaagagtattcgcgatagagtcgcgctgatccagtggcgccgcgagcgcatttggccagccctccaaccgaaagaacaacaggacgtagggagccccgataaggccagaggacctccagtgcctctccaggtgcaggtgacgtatcacgcacaagctgggcagcccggaccgcctgagcctgaagagcccgaagcagaccagcatctacttccaccaactctgcctacgagcgcaacctccctggccagcgactccacctttgactctggacagggttccaccgtatattctgatagccagtctagccagcaatctgtgatgctgggctcactcgctgacgctgctccctccccagcccagtgtgtatgctctccccctgtatccgagggtcccgtcctgccacagagtctcccatccctcggcgcttaccaacagcccactgctgcaccagggctgcccgtcgggagcgtccctgcgccggcctgccctccttctctgcagcaacatttccccgaccctgccatgagtttcgcaccagttctcccaccaccttcaacacctatgcccacagggcccgggcagcctgcacccccaggacagcagcccccacctcttgcccagcccacgccattgccccaggtgctggccccccagccggttgtgcccctgcagcccgtgcctcctcacctgcccccttacctcgcccccgcttcccaggtcggggcccctgctcaactaaagccacttcaaatgcctcaagcgccactgcagcccctggcacaggtgcctccacagatgccccccatccctgtggttccccctatcacccctctcgccggaatcgatggcctaccgcctgcactgcctgatctgcccaccgccacggtgccgccagttccgccacctcaatatttttcaccagccgtgatactccctagcttggcggcccctcttccacccgccagccccgccctgcccctccaggccgtgaagctgcctcacccacccggagccccacttgctatgccgtgccgaaccattgtgccaaacgcccctgctactatcccactgctggcagtggcaccacccggagtcgctgctctgtccatccactcagccgttgctcagttaccaggccagccagtctatcctgcagctttcccccagatggcccccactgatgtcccaccctcgcctcaccacacagtacaaaacatgcgagctacgccgccccagcctgctctgccacctcagccaactcttcccccccagcctgtgttgcccccacaacccaccctacctccacagcccgtgctccctccgcaacctaccagaccaccacagcctgtactgcctccccaacctatgttaccacctcagcctgtcctccccccacagcccgccctgcctgtcagaccagaacccctgcagccgcatctgccggagcaggcagctcccgcagccactcccggaagccagattctgcttggccatcccgcaccatatgctgttgatgtcgccgcccaggtccctacagtgcccgtaccacctgcggcagttttaagtccaccgcttcccgaggtgctgctacccgccgcacctgaacttctgccgcagtttccatcatcactggctacagtgtcagcaagcgtccagagcgtgccaacccagactgcgactttgttgccacctgccaacccccctctccctggaggaccagggatcgccagtccttgtccgacagtgcaactgacggtggagccagtacaggaggagcaagcttctcaggataagcctcccggactgcctcagtcttgcgagagttatggtggcagcgacgttacctcaggaaaggaactttccgatagctgtgaaggggccttcgggggcggtagacttgagggtcgcgccgcccggaaacatcatcgcagatctacgagggctaggtcccgtcaggagcgggccagccggccaaggctaactattctcaatgtatgcaatacgggtgacaaaatggtagaatgccagcttgagactcacaatcacaaaatggtgacattcaagttcgatctggatggcgatgcgccggacgaaatcgctacatacatggttgagcatgactttatcctgcaagcggaaagggaaacgtttattgaacaaatgaaagatgtgatggataaggctgaggacatgctcagcgaagacacagacgcagatagaggaagtgatcccggtaccagtcccccacaccttagtacctgtggtctcggcactggtgaggaatcgaggcagtcacaagccaatgcgccagtgtatcagcagaacgtactgcatacaggtaagcgatggtttatcatctgtcctgtggcagaacatccggcgccggaggccccagagtcgtcaccccctttgcctctcagtagtttaccccccgaagcctcccaggactctgccccttacaaggaccaactgtcatccaaagagcaaccaagcttcctggcctctcagcagctgctgagtcaggcagggcctagtaatccgccaggcgctccacccgccccattagcacccagctcccctcccgtcactgccctgccccaggacggcgccgcccctgccacttcaacgatgccggaaccggcctccggaactgccagccaggctggcggtcctgggacccctcaaggactcacttctgaactcgaaactagccagcctctggctgaaactcacgaggcccctctcgctgttcagcccctggtggtgggcctcgccccatgcacccccgctccggaggcagccagcaccagagatgccagcgcgccccgggagccactacctccccccgccccggaaccaagcccccattcgggcacaccacaacctgcattaggccagcccgcgcccttactccccgccgccgtcggggccgtgtcattggccacctcccagctgccctctccacctctcggaccaacagttcccccccagccaccttcagccctggagagcgatggggagggacctcctccaagggttggttttgtcgactcaaccataaagtccctggacgaaaagcttcgcacactgctctatcaggaacatgtgcctacttcaagtgctagtgctggaacccctgttgaggtgggagaccgcgactttactcttgagccccttcggggggatcagccaagatccgaagtttgtgggggggacctggcactccctcccgtccctaaggaggctgtgtccggccgcgtacagctcccacaaccgctggtcgagaagtccgagctcgcacccacccgaggcgcggtgatggagcaagggacgagctctagcatgacagcagagtcaagtcctcggtccatgctggggtacgatcgggatgggcgccaggtggcctcagacagtcacgttgtaccaagtgttccccaggatgtccccgcctttgttcgacccgcccgagtggagccaacggacagagacgggggcgaggcaggcgagtcgtctgccgagccaccaccatcggatatggggacggttggagggcaagccagccacccgcagactctgggagcccgggccctggggtctccccggaagcggccagaacagcaggacgtttccagccccgcaaaaaccgttggcagattctccgtagtctctactcaagacgagtggaccttggcgtcacctcactccttgagatactcggcaccccccgatgtgtacttagacgaggctccatcctcacccgacgtgaaactggccgtgaggcgagcccagacggcgtcttccatcgaggttggggtgggtgagccagtatcaagcgacagcggggatgaaggtccacgggcccggccacccgtccaaaaacaggcttccctcccagtttccggttcagtggctggagattttgttaaaaaggcaacagcttttctacagcggccatcacgcgctgggtctctcggacccgagacacctagtcgggtgggaatgaaggttccaaccatttcggtgactagctttcattcacagtcttcgtacattagctccgacaatgatagcgagctggaagatgccgatatcaagaaagagctgcagagtttgcgggaaaagcacctgaaggagatttcagaacttcagtcacagcaaaagcaagagattgaagctctctatcggcggttagggaaacctctcccccccaacgtcgggttctttcacacagctccgcccactgggagacgtaggaagactagtaaaagcaaactgaaagcgggtaaactcctcaacccactggtgaggcagctgaaagtcgtggcctccagcacgggacatctcgcggactcatcaagaggacctcctgctaaggaccccgcccaggcgagcgtggggctgactgccgactccactggtctgtccgggaaagcagtgcaaacccagcaaccctgttccgtgagggccagtctcagttccgatatctgcagcggcctggccagtgatggcggaggcgcacggggccaaggttggaccgtttaccatcctacatcggagcgcgttacctataaatccagctcaaaacccagggccagatttctgtcagggcctgtgtcagtgtctatttggagtgccctgaaacgcctgtgcctggggaaggagcactcctcacgcagcagcacttcatcgctcgctcctgggcccgagcccggcccgcagcctgcactgcacgtccaagcccaagttaacaatagtaataataaaaaggggacgtttacagatgaccttcacaagcttgtggatgagtggactagcaaaactgttggtgccgctcagctgaagcccaccctgaaccagttgaaacagacccagaagttgcaggacatggaggctcaggctggctgggcagcacctggtgaagcccgggccatgaccgccccaagggccggcgttggaatgcctcgcttgccccccgctcccggcccactatccacaaccgtgataccaggtgccgcccctaccctttccgtgccaactccggaccctgagtctgagaagccagactag

SEQ ID NO: 271606 - DNA, 6653 bp, Artificial Sequence
  derived and/or modified sequence
atggacggtgacggtgggaggagggacgtcccaggcactctgatggaacccggacgcggtgccggacccgcaggtatggcagagcccagagctaaagccgctcgacctgggcctcagagatttctgcggaggtcggttgtggagagcgatcaagaagaacccccaggcttagaggccgcagaagcacccggtccgcaacctcctcaaccactgcaacgaagggtactgctgctctgtaagacaagaagactgattgcagagcgtgcgaggggaaggccagcggctcctgccccagccgctttggtggctcagccgggtgcgccaggggcaccagctgacgctgggcctgaacctgtgggaacgcaggagcctggtccagatccgatcgccgctgctgtggagactgccccagcgcctgacggtggacccagagaagaagctgcagcgaccgttcggaaggaagatgaaggagcagcggaggctaagcccgagcccggaaggacccgacgagacgaacccgaggaagaggaggacgatgaggatgacctcaaagctgtggcaacctcactcgatgggaggtttcttaaatttgacattgagctcggcagaggctcatttaagacggtttacaaaggactagacacagaaacctgggtggaggtggcctggtgcgagttacaggatcggaaactcaccaagctggaacggcagagattcaaggaagaggcggaaatgctgaagggacttcagcaccctaatatcgtgcgcttttacgatttttgggagtcctctgctaaagggaagcggtgtatagtgctggtcaccgaactgatgacatcaggcacacttaaaacctatctaaaaaggttcaaagtgatgaagcccaaggttttacgcagttggtgtaggcagatcctaaaggggctgctttttcttcatacgagaaccccgcctatcatacacagagatctgaaatgtgacaacatctttattaccggtcccaccgggtcagtgaaaattggcgatctgggcctggccaccttaaagcgagcctcctttgctaaaagcgtgatcgggactccagaatttatggcgcctgagatgtacgaggagcattacgatgaatccgtagacgtctatgcctttgggatgtgcatgctggaaatggccacctccgaatatccatattctgagtgtcagaacgctgctcagatataccgcaaggtgacgtgcggcataaagccagcctcatttgagaaagtacacgaccccgaaatcaaggagatcataggcgagtgtatttgtaaaaacaaagaagaaagatacgagatcaaggatttgctgtcccatgccttctttgctgaagacaccggtgtaagggtcgagctggccgaggaagatcatggcaggaaaagtaccattgccctgcgtctctgggtagaggaccctaagaagctgaagggcaagccaaaagataatggcgctattgagtttacgttcgatcttgaaaaggaaaccccggacgaagttgcacaagagatgatagaatccggcttctttcacgaatctgatgtgaaaattgttgcaaaatccatcagagaccgcgtagccctcatccagtggcggagagagaggatctggcccgcactccagccaaaagagcaacaggatgtgggcagtcccgataaagcaagaggaccccctgttcctttacaagtgcaagttacttaccacgcccaggcaggtcaaccaggtcccccagaacccgaggaacccgaagcagaccaacaccttttaccaccaactctcccaacgtcagccacaagcttagcgtctgactctactttcgactccgggcagggatccaccgtttattcggacagtcaatcctcgcagcaatctgtgatgctgggatctctggctgacgccgctccgtccccagcgcaatgtgtttgctctcctccagtgtcagagggaccagtgcttccacagagcctgccctctcttggagcatatcaacagcccaccgctgcgccaggactgcctgtgggaagcgtaccagcacccgcatgtccgccttccctgcagcagcactttccagatcctgctatgtctttcgcccctgtgctgccccctcctagtactccaatgcccacaggaccgggacagccagccccacccggacaacaaccccctccactggcccagcccaccccactcccccaggtgctggccccacagcctgtggtgccgcttcaaccagtgccgcctcacctccctccctatttggcgcctgcgtcccaggtcggggcaccagcacagctcaaacctctgcagatgcctcaagcccctttgcaaccccttgcgcaagtcccaccgcagatgcctcccatcccagtggtgccacctataactcccttggcgggaatagacggtctgcctcctgctctgccagatctgcctactgcaaccgtgccccctgtgcccccaccccagtatttttccccggcagtgattcttccatctttagctgcccctctgcctccggcatccccagctctacctcttcaggccgttaagctgccccacccgccaggagcacccttggccatgccttgcagaacaattgtacccaacgccccagctaccattcccctgctcgctgtggctccgccaggcgtcgccgctctgtccattcattcagcggtggcacaattgccaggccaacccgtgtaccccgcagcttttccccaaatggccccaaccgacgtgcccccatcacctcaccatacggttcagaacatgcgcgcaacccccccacagcccgctctgccaccgcagccaactctgcctccccagccagtgctgcctccacaacctaccctaccaccgcagccagtgctgccaccccaacctacaagaccaccccagccagtgctgcctccccagcctatgctgccccctcaaccggtgctgcctcctcagccggcactgccagtgcggcctgaaccattacagcctcatctgcccgagcaggccgctccagctgctacacctggctcacagatcttgctaggacacccggctccatatgcagtagacgttgctgcccaggtacccactgtccccgtcccccctgcagcggtgctgtctccaccactgcctgaggtcctcctgcccgctgcccctgagctgctgcctcagtttccatcatctctggccaccgtctctgcatcggtgcagagcgtgccgacccagaccgcaaccttgctgccgcctgcaaacccccctcttcccggtggcccaggaatcgcttccccctgccctacggtacaactgacagttgagcccgtgcaagaagagcaggcctctcaggacaaaccacccggactgccgcagtcctgcgaatcgtacggcggttcggatgtgacttctggcaaggagttatccgattcttgtgaaggggcattcggcggagggaggctggaagggagggctgctcggaagcaccacaggcgctccacccgagcacgctcccgccaggagagagctagcaggcccaggttgaccatcttgaacgtgtgtaacaccggggataaaatggtcgagtgtcaactggagactcacaatcacaaaatggtaaccttcaagtttgatcttgacggggatgcgcctgacgaaatcgcaacttatatggtcgagcacgactttatcctgcaggcagagcgggaaaccttcattgagcagatgaaggatgttatggacaaggctgaggacatgctctcggaagatacagatgccgataggggtagcgatccaggaacctctcctcctcacttgagcacttgcggactgggaacaggggaggaatcgcgtcagagccaggcaaatgcacccgtttatcaacagaacgtcctccatacggggaaacggtggttcatcatatgtcccgtagctgaacatcccgcaccggaggctcccgaatccagcccacctctgcccctgtcttccctgccccctgaagcttcacaggactccgccccatacaaagaccaattatcaagcaaagagcagcccagcttcctggcctcccagcagctgctctctcaggctgggcctagtaacccaccaggggcaccccctgcaccactggccccatctagcccgcctgtcacagcattaccccaggatggggcagcaccagccaccagtaccatgcctgaacctgcatcaggtaccgcgtcacaggctggcggtcctggcacgccccaagggctcacgagtgagcttgaaactagtcagcccctagccgaaacgcatgaagctcctctggccgttcagcccctggtcgtgggtctggccccttgtactccggctcccgaagctgcgagtacacgcgacgctagtgcacctagggaacctctccctcccccagctccagagcctagcccgcatagcggcaccccacaaccggcactggggcagccagcccctctgttacctgctgctgtgggcgcagtcagtctcgcaacctctcagctgccctctccacctctcggcccaactgtacccccacagccccctagcgccctggagtccgatggcgaaggaccacctccacgcgtgggatttgtagattctaccattaaaagtcttgatgagaagctgaggaccctgctataccaggaacatgtccccaccagcagcgcatctgccggaacacccgtggaagttggagaccgggattttactctggagcctttaagaggcgaccagcccagaagtgaggtatgcggaggagaccttgccctgccccctgtgccgaaagaagcagtgtccgggagggtgcagctcccccagccactggttgaaaagtccgagctggccccaaccagaggtgccgtgatggagcaaggtacgtcatcctccatgactgcagagtcatctccaaggtctatgctcggatatgatagagatggcagacaggttgcgagcgattctcatgttgtgccatcggtgccacaagacgtgcccgcatttgtgcggcctgccagagtcgagcccactgaccgtgatggaggggaggccggagaaagcagcgcagagcctcccccttccgacatgggcacagtaggcggacaggcttctcacccccagacattgggtgcgagagccctgggatccccacgcaaacggcctgaacaacaagatgtctccagtcccgcaaaaaccgtgggccgatttagtgtggtgtcaacgcaggatgagtggactttagcaagcccacactctttgcgttattctgccccacctgacgtgtacttggacgaagcccctagttcacccgatgtcaaactggccgtgcggagagcgcaaacagcaagctctattgaagtcggggtgggcgagcccgtgagttccgattccggtgacgaaggccctagagccaggcccccagtgcagaaacaggcatcactgcctgtgagcggatcagttgccggagattttgtgaagaaagcgactgctttcctacaaaggccatcaagggctggtagtctggggccagagacgccatcaagggtcggcatgaaggtgccgaccatcagtgtgacctcatttcatagccagtcgtcttacattagctccgataatgattccgagctggaagacgctgatatcaagaaggaattacagagcttgcgcgaaaagcaccttaaagaaatcagtgagctgcagtcccaacaaaaacaggagatagaggcgctctatcgaaggctgggaaagccacttccaccaaatgttggattctttcacacagcaccaccaactggtaggcgtcggaagacttccaagtccaaactaaaagctgggaagctcctgaatcccctggtgcggcagttgaaagtggtggccagcagcactggacacctggcagactctagtcgcggacctcccgcaaaagatcctgcgcaggcatcagtggggctgaccgccgactcaaccggcctgagcggcaaagccgttcaaacccagcagccatgcagtgtccgcgctagcctgagttcagatatctgcagtggtctcgcttcagatggagggggagcaaggggccagggatggaccgtctatcaccccacatccgaaagggtcacctacaaatcttcttctaagccacgcgctagattcctctctggtcccgttagcgtgtccatctggtccgcgctgaagcggttatgcttaggtaaagagcacagctctagatcatcaacatcttctttggcccctggacctgaacccggaccccagcctgctttgcatgttcaggcccaggttaacaatagcaataacaagaagggaacattcactgacgatctgcacaagcttgttgatgagtggacgagcaagaccgtcggcgcagctcaacttaagccaaccctgaaccagcttaagcagacccagaaactccaggacatggaggcccaagccggttgggcagcccctggtgaggccagagccatgaccgctccacgagcaggggtcggaatgcctcggctcccaccggctcccggaccactttccactactgttattcccggagcagctcccaccctcagtgtgcctacccccgatcctgagagcgagaagccagacta

SEQ ID NO: 271607 - DNA, 6678 bp, Artificial Sequence
  derived and/or modified sequence
atggacggcgatggcggccgccgagacgtccccggcacgctgatggagcccgggcgcggcgcggggcccgcgggcatggcggagcctcgggcgaaggcggcgcggccggggccccagcgctttctgcggcgcagcgtggtagagtcggaccaggaggagccgccgggcttggaggcagccgaggcgccgggcccgcagcccccgcagcccctgcagcgccgggtgcttctgctctgcaagacgcgccgcctcatcgcggagcgcgcccgcggacgccccgccgcccccgcgcccgcagcgctggtagcgcagccgggagcccccggagcccccgcggacgccggccccgagcccgtgggcacgcaggagcccggcccggaccccatcgcagccgctgtcgaaaccgcgcctgcccccgacggcggccccagggaggaggcggcggcgaccgtgaggaaggaggatgagggggcggccgaggcgaagcctgagcccgggcgcactcgccgggacgagcccgaagaggaggaggacgacgaggacgacctcaaggccgtggccacctctctggacggccgcttcctcaagttcgacatcgagctgggccgcggttccttcaagacggtctacaaggggctggacacggagacctgggtggaggtggcctggtgtgagctgcaggaccggaagctcaccaagctggagcggcagcggttcaaggaagaggctgagatgctgaaaggcctgcagcaccccaacatcgtgcgcttctacgacttctgggagtccagcgccaagggcaagcggtgcattgtgctggtgacggagctgatgacctcagggacgctgaagacatacctgaagcggttcaaggtgatgaagcccaaggttctccgcagctggtgccggcagatcctgaagggcctgctgttcctgcacacaaggacgccacccatcatccaccgagacctgaaatgtgacaatattttcatcaccggaccaactgggtctgtgaagattggcgacttgggcctggccactctgaaaagagcgtcatttgccaaaagtgtgataggtactcccgagttcatggcgcccgagatgtacgaggagcactacgatgagtccgtggacgtctatgcctttgggatgtgcatgctggagatggccacctcggagtacccctactcggagtgccagaatgcggcccagatctaccgcaaggtcacctgtggtatcaagccggccagctttgagaaagtgcacgatcctgaaatcaaggagattattggggagtgtatctgcaaaaacaaggaggaaaggtacgagatcaaagacctgctgagccacgccttcttcgcagaggacacaggcgtgagggtggagctcgcggaggaggaccacggcaggaagtccaccatcgccctgaggctctgggtggaagaccccaagaaactgaagggaaagcccaaggacaatggagccatagagttcaccttcgacctggagaaggagacgccggatgaggtggcccaagagatgattgagtctggattcttccacgagagtgacgtcaagatcgtggccaagtccatccgtgaccgcgtggccttgatccagtggcggcgggagaggatctggcccgcgctgcagcccaaggagcagcaggatgtgggcagcccggacaaggccaggggtccgccggtgcccctgcaggtccaggtgacctaccatgcacaggctgggcagcccgggccaccagagcccgaggagccggaggccgaccagcacctcctgccacctacgttgccgaccagcgccacctccctggcctcggacagcaccttcgacagcggccagggctctaccgtgtactcagactcgcagagcagccagcagagcgtgatgcttggctcccttgccgacgcagcgccgtccccggcccagtgtgtgtgcagcccccctgtgagcgaggggcccgtcctgccgcagagcctgccctcgctgggggcctaccagcagcccacggctgcacctcctccgctggcccagccgacacccctgccgcaggtcctggccccacagcccgtggtccccctccagccggttcccccccacctgccaccgtacctggctccagcctcccaggtgggggcccccgctcagctgaagcccctccagatgccacaggcgcccctgcagccgcttgctcaagtccctccgcagatgcccccgattcctgttgtgccccccatcacgcccctggcgggaatcgacggcctccctccggccctcccagacctgccgaccgcgactgtgcctcccgtgccaccacctcagtatttctctccagccgtgatcttgccgagcctcgctgccccactcccccctgcgtccccagccttgcctctgcaggctgtgaagctgccccacccccctggggcgcccctggccatgccctgccggaccattgtgccaaatgcaccggccactatccccctgctggccgtagccccaccgggcgtggctgccctgtccattcattctgccgtggcccagctcccaggccaacctgtgtacccagcggccttcccacagatggcgcctactgacgtccctccttccccccatcacacggtgcagaatatgagggccacccctccacagccggcactgcctccacaacccacactgcccccacaacccgtgctgcccccgcaacccacgctgccccctcaacctgtgttgcccccgcaacccacacggccccctcaacctgtgctgcccccgcaacccatgctgcccccacaacctgtgctgcccccgcagccggcactgcctgtgcgccctgagcccctccagccccaccttcctgaacaagctgctccagctgctacaccagggagccagattctgcttggccacccagctccctatgctgtggacgtcgccgctcaggtccccaccgtgcctgtgccaccggctgcggtcctctcgccgcctctgccggaagtgctgctgcctgccgcccctgagctcctgcctcagttccccagctccctggccacggtgtctgcctctgtgcagagtgtgcccacccagactgccacacttctgccaccagcaaacccaccgctgcctggcgggcccgggatcgccagcccttgcccaactgtccagctgacggtggaaccagtccaagaggagcaggcctcacaggacaagccgcccggcctcccgcagagctgtgagagctatggaggttctgatgtcacttctggaaaagagctgagtgacagctgtgaaggcgcctttggagggggcaggctggagggcagggcagcccgaaaacaccaccgcaggtccacgcgtgcgcgctcccggcaggagagggccagccggccccggcttaccatcttgaacgtgtgcaacactggggacaagatggtggagtgccagctggagacgcacaaccacaagatggtgaccttcaagttcgacttggacggggacgcacccgatgaaattgccacgtatatggtggagcatgactttatcctgcaggccgagcgggaaacgttcatcgagcagatgaaggatgtcatggacaaggcagaggacatgctcagcgaggacacagacgccgaccgtggctccgacccagggaccagcccgccacacctcagcacctgcggcctgggcaccggggaggagagccgacaatcccaagccaacgcccccgtgtatcagcagaacgtcctgcacaccgggaagaggtggttcatcatctgtccggtggctgagcaccccgcccccgaggcccctgaatcttcgcccccacttcctctaagctccctgccgccagaagccagccaagattcagcgccctataaagaccagctgtcctcgaaggaacaacccagctttctagccagtcagcagctcctgagccaggcgggccccagcaaccctcctggggcacccccagcccctttggccccctcctcccctcctgtgactgctctgccccaagatggagcagctccagccaccagcaccatgccagagccagcgtcaggaactgccagccaggcagggggtccagggacacctcaggggctgaccagtgagctcgagacgtctcagccactagcggagactcacgaggccccgcttgctgtgcagcccctcgtggtgggcctagcaccttgcactccagctccagaggctgcctcaaccagggacgccagtgccccaagggagcccctgccacctcctgcacctgagcccagcccccacagcgggaccccacagcccgccttgggtcaacctgctcccctgcttcctgccgcagtgggggccgtcagcctggccacctcccagctcccaagcccacccctggggcccaccgtccccccacagccaccctcggccctggagtcggatggggaagggccgccccccagggtgggctttgtggacagcaccatcaagagcctggacgagaagctgcggactctgctctaccaggagcacgtgcccacctcctcagcctcagctgggacccctgtggaggtgggcgacagagacttcaccctggagcccctgagaggggaccagccccgctcagaggtctgcgggggggacctggccctgcccccagtgcctaaggaggcggtctcagggcgtgtccagctgccccagcccttggtggagaagtcagaactggcccccactcgaggggccgtgatggagcagggcacgtcctcgtcaatgacagcagagtcgtctcccaggagtatgctaggctatgacagagatggaaggcaggtggcctcagactcccatgtggtccccagcgtcccccaggatgtacctgcttttgtgagacctgcacgtgtggagcccacagacagggatggtggagaagctggagaaagctcggcagagcccccgccgagtgacatgggcacagtggggggccaggctagccacccccagacactcggcgctcgagctttggggtcccctcggaaacgtccagagcagcaggatgtcagctcaccagccaagactgtgggccgtttctcggtggtcagcactcaggacgagtggaccctggcctccccccacagcctgagatactctgccccacccgacgtctacctggacgaggccccctccagccccgacgtgaagctggcagtgcggcgggcgcagacggcctcctccatcgaggtcggcgtgggcgagcccgtgtccagcgactctggggacgagggccctcgggcgagacccccggtgcagaagcaggcgtccctgcccgtgagtggcagcgtggctggcgacttcgtgaagaaggccaccgccttcctgcagaggccttctcgggccggctcgctgggccccgagacacccagcagggtgggcatgaaggtccccacgatcagcgtgacctccttccattcccagtcgtcctacatcagcagcgacaatgattcggagctcgaggatgctgacataaagaaggagctgcagagtctgcgggagaagcacctgaaggagatctcggagctgcagagccagcagaagcaggagatcgaagctctgtaccgccgcctgggcaagccactgccccccaacgtgggcttcttccacacggcaccccccactggccgccggagaaaaaccagcaagagcaagctgaaggcaggcaagctgctaaatcccctggtgcggcagctcaaggtcgtggcctccagcacaggtcacttggctgactccagcagaggccctcccgctaaggaccctgcccaagccagtgtggggctcactgcagacagcacgggcctgagcgggaaggcagtgcagacccagcagccctgctccgtccgggcctccctgtcttcggacatctgctccggcttagccagtgatggaggcggagcgcgtggccaaggctggacggtttaccacccaacgtctgagagagtgacctataagtctagtagcaaacctcgtgctcgattcctcagtggacccgtatctgtgtccatctggtctgccctgaagcgtctctgcctaggcaaagaacacagcagtaggtcctccaccagcagcctggccccaggccctgagccaggcccccagcccgccctgcacgtccaggcgcaggtgaacaacagcaacaacaagaagggtaccttcacggacgacctgcacaagctggtggacgagtggacgagcaagacggtgggggccgcgcagctgaagcccacgctcaaccagctgaagcagacccagaagctgcaagacatggaggcccaggcaggctgggctgcccctggcgaggcgcgggctatgaccgcacctcgagcaggagtggggatgccacgtctgcccccagcgcccggccctctgtccaccacggtcattcccggagccgccccgaccctgtccgtgcccacaccagatcctgagagtgagaagcctgactgaccccgcctagacgccaggcccacttcacgccgtctaagtggagaagtgacggaccctcagggccagctgctcctcctgtccagttcacgctgttttgtaaccactttctaagcattttttattcacaattggaaacacaaatgtaatgcaagaataaaaaatattttggggcagaaagga

SEQ ID NO: 271608 - DNA, 6834 bp, Artificial Sequence
  derived and/or modified sequence
atggacggcgatggcggccgccgagacgtccccggcacgctgatggagcccgggcgcggcgcggggcccgcgggcatggcggagcctcgggcgaaggcggcgcggccggggccccagcgctttctgcggcgcagcgtggtagagtcggaccaggaggagccgccgggcttggaggcagccgaggcgccgggcccgcagcccccgcagcccctgcagcgccgggtgcttctgctctgcaagacgcgccgcctcatcgcggagcgcgcccgcggacgccccgccgcccccgcgcccgcagcgctggtagcgcagccgggagcccccggagcccccgcggacgccggccccgagcccgtgggcacgcaggagcccggcccggaccccatcgcagccgctgtcgaaaccgcgcctgcccccgacggcggccccagggaggaggcggcggcgaccgtgaggaaggaggatgagggggcggccgaggcgaagcctgagcccgggcgcactcgccgggacgagcccgaagaggaggaggacgacgaggacgacctcaaggccgtggccacctctctggacggccgcttcctcaagttcgacatcgagctgggccgcggttccttcaagacggtctacaaggggctggacacggagacctgggtggaggtggcctggtgtgagctgcaggaccggaagctcaccaagctggagcggcagcggttcaaggaagaggctgagatgctgaaaggcctgcagcaccccaacatcgtgcgcttctacgacttctgggagtccagcgccaagggcaagcggtgcattgtgctggtgacggagctgatgacctcagggacgctgaagacatacctgaagcggttcaaggtgatgaagcccaaggttctccgcagctggtgccggcagatcctgaagggcctgctgttcctgcacacaaggacgccacccatcatccaccgagacctgaaatgtgacaatattttcatcaccggaccaactgggtctgtgaagattggcgacttgggcctggccactctgaaaagagcgtcatttgccaaaagtgtgataggtactcccgagttcatggcgcccgagatgtacgaggagcactacgatgagtccgtggacgtctatgcctttgggatgtgcatgctggagatggccacctcggagtacccctactcggagtgccagaatgcggcccagatctaccgcaaggtcacctgtggtatcaagccggccagctttgagaaagtgcacgatcctgaaatcaaggagattattggggagtgtatctgcaaaaacaaggaggaaaggtacgagatcaaagacctgctgagccacgccttcttcgcagaggacacaggcgtgagggtggagctcgcggaggaggaccacggcaggaagtccaccatcgccctgaggctctgggtggaagaccccaagaaactgaagggaaagcccaaggacaatggagccatagagttcaccttcgacctggagaaggagacgccggatgaggtggcccaagagatgattgagtctggattcttccacgagagtgacgtcaagatcgtggccaagtccatccgtgaccgcgtggccttgatccagtggcggcgggagaggatctggcccgcgctgcagcccaaggagcagcaggatgtgggcagcccggacaaggccaggggtccgccggtgcccctgcaggtccaggtgacctaccatgcacaggctgggcagcccgggccaccagagcccgaggagccggaggccgaccagcacctcctgccacctacgttgccgaccagcgccacctccctggcctcggacagcaccttcgacagcggccagggctctaccgtgtactcagactcgcagagcagccagcagagcgtgatgcttggctcccttgccgacgcagcgccgtccccggcccagtgtgtgtgcagcccccctgtgagcgaggggcccgtcctgccgcagagcctgccctcgctgggggcctaccagcagcccacggctgcacctggcttgccggtgggctctgtcccggcccccgcctgccctccgtccctccagcagcacttcccggatccggccatgagcttcgcccccgtgctgccgccgcccagcacccccatgcccacgggcccaggccagccagcaccccccggccagcagcctcctccgctggcccagccgacacccctgccgcaggtcctggccccacagcccgtggtccccctccagccggttcccccccacctgccaccgtacctggctccagcctcccaggtgggggcccccgctcagctgaagcccctccagatgccacaggcgcccctgcagccgcttgctcaagtccctccgcagatgcccccgattcctgttgtgccccccatcacgcccctggcgggaatcgacggcctccctccggccctcccagacctgccgaccgcgactgtgcctcccgtgccaccacctcagtatttctctccagccgtgatcttgccgagcctcgctgccccactcccccctgcgtccccagccttgcctctgcaggctgtgaagctgccccacccccctggggcgcccctggccatgccctgccggaccattgtgccaaatgcaccggccactatccccctgctggccgtagccccaccgggcgtggctgccctgtccattcattctgccgtggcccagctcccaggccaacctgtgtacccagcggccttcccacagatggcgcctactgacgtccctccttccccccatcacacggtgcagaatatgagggccacccctccacagccggcactgcctccacaacccacactgcccccacaacccgtgctgcccccgcaacccacgctgccccctcaacctgtgttgcccccgcaacccacacggccccctcaacctgtgctgcccccgcaacccatgctgcccccacaacctgtgctgcccccgcagccggcactgcctgtgcgccctgagcccctccagccccaccttcctgaacaagctgctccagctgctacaccagggagccagattctgcttggccacccagctccctatgctgtggacgtcgccgctcaggtccccaccgtgcctgtgccaccggctgcggtcctctcgccgcctctgccggaagtgctgctgcctgccgcccctgagctcctgcctcagttccccagctccctggccacggtgtctgcctctgtgcagagtgtgcccacccagactgccacacttctgccaccagcaaacccaccgctgcctggcgggcccgggatcgccagcccttgcccaactgtccagctgacggtggaaccagtccaagaggagcaggcctcacaggacaagccgcccggcctcccgcagagctgtgagagctatggaggttctgatgtcacttctggaaaagagctgagtgacagctgtgaaggcgcctttggagggggcaggctggagggcagggcagcccgaaaacaccaccgcaggtccacgcgtgcgcgctcccggcaggagagggccagccggccccggcttaccatcttgaacgtgtgcaacactggggacaagatggtggagtgccagctggagacgcacaaccacaagatggtgaccttcaagttcgacttggacggggacgcacccgatgaaattgccacgtatatggtggagcatgactttatcctgcaggccgagcgggaaacgttcatcgagcagatgaaggatgtcatggacaaggcagaggacatgctcagcgaggacacagacgccgaccgtggctccgacccagggaccagcccgccacacctcagcacctgcggcctgggcaccggggaggagagccgacaatcccaagccaacgcccccgtgtatcagcagaacgtcctgcacaccgggaagaggtggttcatcatctgtccggtggctgagcaccccgcccccgaggcccctgaatcttcgcccccacttcctctaagctccctgccgccagaagccagccaagattcagcgccctataaagaccagctgtcctcgaaggaacaacccagctttctagccagtcagcagctcctgagccaggcgggccccagcaaccctcctggggcacccccagcccctttggccccctcctcccctcctgtgactgctctgccccaagatggagcagctccagccaccagcaccatgccagagccagcgtcaggaactgccagccaggcagggggtccagggacacctcaggggctgaccagtgagctcgagacgtctcagccactagcggagactcacgaggccccgcttgctgtgcagcccctcgtggtgggcctagcaccttgcactccagctccagaggctgcctcaaccagggacgccagtgccccaagggagcccctgccacctcctgcacctgagcccagcccccacagcgggaccccacagcccgccttgggtcaacctgctcccctgcttcctgccgcagtgggggccgtcagcctggccacctcccagctcccaagcccacccctggggcccaccgtccccccacagccaccctcggccctggagtcggatggggaagggccgccccccagggtgggctttgtggacagcaccatcaagagcctggacgagaagctgcggactctgctctaccaggagcacgtgcccacctcctcagcctcagctgggacccctgtggaggtgggcgacagagacttcaccctggagcccctgagaggggaccagccccgctcagaggtctgcgggggggacctggccctgcccccagtgcctaaggaggcggtctcagggcgtgtccagctgccccagcccttggtggagaagtcagaactggcccccactcgaggggccgtgatggagcagggcacgtcctcgtcaatgacagcagagtcgtctcccaggagtatgctaggctatgacagagatggaaggcaggtggcctcagactcccatgtggtccccagcgtcccccaggatgtacctgcttttgtgagacctgcacgtgtggagcccacagacagggatggtggagaagctggagaaagctcggcagagcccccgccgagtgacatgggcacagtggggggccaggctagccacccccagacactcggcgctcgagctttggggtcccctcggaaacgtccagagcagcaggatgtcagctcaccagccaagactgtgggccgtttctcggtggtcagcactcaggacgagtggaccctggcctccccccacagcctgagatactctgccccacccgacgtctacctggacgaggccccctccagccccgacgtgaagctggcagtgcggcgggcgcagacggcctcctccatcgaggtcggcgtgggcgagcccgtgtccagcgactctggggacgagggccctcgggcgagacccccggtgcagaagcaggcgtccctgcccgtgagtggcagcgtggctggcgacttcgtgaagaaggccaccgccttcctgcagaggccttctcgggccggctcgctgggccccgagacacccagcagggtgggcatgaaggtccccacgatcagcgtgacctccttccattcccagtcgtcctacatcagcagcgacaatgattcggagctcgaggatgctgacataaagaaggagctgcagagtctgcgggagaagcacctgaaggagatctcggagctgcagagccagcagaagcaggagatcgaagctctgtaccgccgcctgggcaagccactgccccccaacgtgggcttcttccacacggcaccccccactggccgccggagaaaaaccagcaagagcaagctgaaggcaggcaagctgctaaatcccctggtgcggcagctcaaggtcgtggcctccagcacaggtcacttggctgactccagcagaggccctcccgctaaggaccctgcccaagccagtgtggggctcactgcagacagcacgggcctgagcgggaaggcagtgcagacccagcagccctgctccgtccgggcctccctgtcttcggacatctgctccggcttagccagtgatggaggcggagcgcgtggccaaggctggacggtttaccacccaacgtctgagagagtgacctataagtctagtagcaaacctcgtgctcgattcctcagtggacccgtatctgtgtccatctggtctgccctgaagcgtctctgcctaggcaaagaacacagcagtaggtcctccaccagcagcctggccccaggccctgagccaggcccccagcccgccctgcacgtccaggcgcaggtgaacaacagcaacaacaagaagggtaccttcacggacgacctgcacaagctggtggacgagtggacgagcaagacggtgggggccgcgcagctgaagcccacgctcaaccagctgaagcagacccagaagctgcaagacatggaggcccaggcaggctgggctgcccctggcgaggcgcgggctatgaccgcacctcgagcaggagtggggatgccacgtctgcccccagcgcccggccctctgtccaccacggtcattcccggagccgccccgaccctgtccgtgcccacaccagatcctgagagtgagaagcctgactgaccccgcctagacgccaggcccacttcacgccgtctaagtggagaagtgacggaccctcagggccagctgctcctcctgtccagttcacgctgttttgtaaccactttctaagcattttttattcacaattggaaacacaaatgtaatgcaagaataaaaaatattttggggcagaaagga

SEQ ID NO: 271609 - protein, 144 aa, Artificial Sequence
  derived and/or modified sequence
MQRHYVMYYEMSYGLNIEMHKQTEIAKRLNTICAQVIPFLSQEHQQQVAQAVERAKQVTMAELNAIIGQQQLQAQHLSHGHGPPVPLTPHPSGLQPPGIPPLGGSAGLLALSSALSGQSHLAIKDDKKHHDAEHHRGERPGKPD

SEQ ID NO: 271610 - protein, 242 aa, Artificial Sequence
  derived and/or modified sequence
MFPQSRHPTPHQAAGQPFKFTIPESLDRIKEEFQFLQAQYHSLKLECEKLASEKTEMQRHYVMYYEMSYGLNIEMHKQTEIAKRLNTICAQVIPFLSQEHQQQVAQAVERAKQVTMAELNAIIGVRGLPGLPPTQQQLQAQHLSHGHGPPVPLTPHPSGLQPPGIPPLGGSAGLLALSSALSGQSHLAIKDDKKHHDAEHHRGERPGKSNSLLVPDSLRGTDKRRNGPEFSNDIKKRKVDDK

SEQ ID NO: 271611 - protein, 242 aa, Artificial Sequence
  derived and/or modified sequence
MFPQSRHPTPHQAAGQPFKFTIPESLDRIKEEFQFLQAQYHSLKLECEKLASEKTEMQRHYVMYYEMSYGLNIEMHKQTEIAKRLNTICAQVIPFLSQEHQQQVAQAVERAKQVTMAELNAIIGVRGLPGLPPTQQQLQAQHLSHGHGPPVPLTPHPSGLQPPGIPPLGGSAGLLALSSALSGQSHLAIKDDKKHHDAEHHRDREPGTSNSLLVPDSLRGTDKRRNGPEFSNDIKKRKVDDK

SEQ ID NO: 271612 - DNA, 729 bp, Artificial Sequence
  derived and/or modified sequence
atgttcccccagagcagacaccccaccccccaccaggccgccggccagcccttcaagttcaccatccccgagagcctggacagaatcaaggaggagttccagttcctgcaggcccagtaccacagcctgaagctggagtgcgagaagctggccagcgagaagaccgagatgcagagacactacgtgatgtactacgagatgagctacggcctgaacatcgagatgcacaagcagaccgagatcgccaagagactgaacaccatctgcgcccaggtgatccccttcctgagccaggagcaccagcagcaggtggcccaggccgtggagagagccaagcaggtgaccatggccgagctgaacgccatcatcggcgtgagaggcctgcccggcctgccccccacccagcagcagctgcaggcccagcacctgagccacggccacggcccccccgtgcccctgaccccccaccccagcggcctgcagccccccggcatcccccccctgggcggcagcgccggcctgctggccctgagcagcgccctgagcggccagagccacctggccatcaaggacgacaagaagcaccacgacgccgagcaccacagaggcgagagacccggcaagagcaacagcctgctggtgcccgacagcctgagaggcaccgacaagagaagaaacggccccgagttcagcaacgacatcaagaagagaaaggtggacgacaagtag

SEQ ID NO: 271613 - DNA, 729 bp, Artificial Sequence
  derived and/or modified sequence
atgttcccccagagcagacaccccaccccccaccaggccgccggccagcccttcaagttcaccatccccgagagcctggacagaatcaaggaggagttccagttcctgcaggcccagtaccacagcctgaagctggagtgcgagaagctggccagcgagaagaccgagatgcagagacactacgtgatgtactacgagatgagctacggcctgaacatcgagatgcacaagcagaccgagatcgccaagagactgaacaccatctgcgcccaggtgatccccttcctgagccaggagcaccagcagcaggtggcccaggccgtggagagagccaagcaggtgaccatggccgagctgaacgccatcatcggcgtgagaggcctgcccggcctgccccccacccagcagcagctgcaggcccagcacctgagccacggccacggcccccccgtgcccctgaccccccaccccagcggcctgcagccccccggcatcccccccctgggcggcagcgccggcctgctggccctgagcagcgccctgagcggccagagccacctggccatcaaggacgacaagaagcaccacgacgccgagcaccacagagacagagagcccggcaccagcaacagcctgctggtgcccgacagcctgagaggcaccgacaagagaagaaacggccccgagttcagcaacgacatcaagaagagaaaggtggacgacaagtag

SEQ ID NO: 271614 - DNA, 729 bp, Artificial Sequence
  derived and/or modified sequence
atgtttccccagagccgtcaccctaccccacaccaggctgccgggcaacccttcaagttcacgatccctgagtctctcgatcgcatcaaggaagagtttcagtttctccaggcccagtatcattcattgaagctggaatgtgagaagttagctagtgaaaaaactgagatgcagcggcattacgtgatgtactacgagatgtcatacggcctgaacatagaaatgcataagcagacagaaatcgctaagcggctgaataccatctgcgcccaagtcattccatttctgtcccaggagcatcagcagcaggttgcgcaggcagtggagagggcgaagcaggtgacaatggccgagctgaacgctatcataggagtgcgcggcttgccaggccttccaccaacccaacagcagctgcaggcccagcacctgtcccacggtcatggtccacccgtgcccctgacaccccacccctcaggactgcagccacccgggatcccccccctggggggatctgccggattgctcgcactaagcagcgcattaagtggccagagccatttggccatcaaggatgacaagaaacatcatgacgcagaacatcatcgcggggaaagacctggtaagagcaactcgctgctggtcccagactccttgcgtggcacggataaacgccgtaatggacccgaattcagcaacgatataaagaaacgcaaagtggacgataaatag

SEQ ID NO: 271615 - DNA, 729 bp, Artificial Sequence
  derived and/or modified sequence
atgttccctcagtcccgccatccaactccccatcaggctgctggccagcctttcaagttcactataccagagagccttgatcgcatcaaggaagaattccagttcctgcaggcccagtaccactcgctcaaactcgagtgtgagaagctggcttcggagaagaccgagatgcaaagacattacgtgatgtattacgagatgagttatgggcttaatattgaaatgcacaagcaaaccgagatagccaagcgcctcaatacaatctgtgcacaggtcatacccttcctgagtcaagagcatcagcagcaggtggcacaggccgtcgagagagcgaaacaggtaaccatggcggagctgaacgcaatcattggggtgcgaggtctgccagggttgccacccacacagcagcagctgcaggcccagcacttgagtcacgggcacggtcccccggtccccctaacaccgcacccctctggattacagccgcccggcatcccgccccttggaggaagtgcaggcctgctcgcactgagttccgctttgagcggacagagccatctcgccattaaggatgacaaaaagcatcatgatgccgagcaccatagggatagggaacctggaacttcaaatagcctcttagtacctgactcgctacgcgggaccgacaagagaagaaatgggccagagttttccaatgacataaagaagcgaaaggtggatgacaaatag

SEQ ID NO: 271616 - DNA, 729 bp, Artificial Sequence
  derived and/or modified sequence
atgttcccccagagccgccaccccaccccccaccaggccgccggccagcccttcaagttcaccatccctgagagcctggaccgcatcaaggaggagttccagttcctgcaggcccagtaccacagcctgaagctggagtgtgagaagctggccagcgagaagacagagatgcagaggcactacgtgatgtactatgagatgtcctatggcctgaacatcgagatgcacaagcagacagaaattgccaagaggctgaacaccatctgtgcccaggtgatccccttcctgagccaggagcaccagcagcaggtggcccaggccgtggagcgggccaagcaggtgaccatggccgagctgaatgccatcattggagtgcggggcctgcccggcctgccccccacccagcagcagctgcaggcccagcacctgagccacggccacggcccccctgtgcccctgaccccccaccccagcggcctgcagcccccaggcatcccccccctgggcggcagcgctggcctgctggccctgagcagcgccctgagcggccagagccacctggccatcaaggatgacaagaagcaccatgatgctgagcaccacagaggagagaggcctgggaagagcaacagcctgctggtgcctgacagcctgcggggcacagacaagagaagaaatggacctgagttcagcaatgacatcaagaagaggaaggtggatgacaagtag

SEQ ID NO: 271617 - DNA, 729 bp, Artificial Sequence
  derived and/or modified sequence
atgttcccccagagccgccaccccaccccccaccaggccgccggccagcccttcaagttcaccatccctgagagcctggaccgcatcaaggaggagttccagttcctgcaggcccagtaccacagcctgaagctggagtgtgagaagctggccagcgagaagacagagatgcagaggcactacgtgatgtactatgagatgtcctatggcctgaacatcgagatgcacaagcagacagaaattgccaagaggctgaacaccatctgtgcccaggtgatccccttcctgagccaggagcaccagcagcaggtggcccaggccgtggagcgggccaagcaggtgaccatggccgagctgaatgccatcattggagtgcggggcctgcccggcctgccccccacccagcagcagctgcaggcccagcacctgagccacggccacggcccccctgtgcccctgaccccccaccccagcggcctgcagcccccaggcatcccccccctgggcggcagcgctggcctgctggccctgagcagcgccctgagcggccagagccacctggccatcaaggatgacaagaagcaccatgatgctgagcaccaccgggaccgggagcccggcaccagcaacagcctgctggtgcctgacagcctgcggggcacagacaagagaagaaatggacctgagttcagcaatgacatcaagaagaggaaggtggatgacaagtag

SEQ ID NO: 271618 - DNA, 729 bp, Artificial Sequence
  derived and/or modified sequence
atgttcccccagagccggcaccccaccccccaccaggccgccggccagccattcaaatttaccatccccgaatctctggatagaatcaaggaggaatttcagtttttacaagctcaatatcactccctcaaactggaatgcgaaaagttggcttccgaaaagacagaaatgcagcgccactatgtcatgtactacgagatgtcatatggactgaacattgagatgcataagcagacagaaatcgcgaaaagactgaataccatttgtgcgcaagtgattccttttctgtcccaggagcaccagcagcaggtggcccaggctgtcgaaagagccaagcaggtaaccatggccgaattgaatgcaattataggggtgcgaggcctgcccggactccctcctacgcagcagcagctccaggcccaacacctgagccacggccacggtcctccggtaccacttactcctcacccatctgggttgcaacccccaggtatccccccactaggcggctccgcagggctgcttgctctatctagtgccttgtcgggtcaatcgcacctggctataaaagatgacaagaagcaccacgacgccgaacatcaccgcggcgagcgcccagggaagtccaacagtttactcgtgcccgacagcctcagagggactgacaagcggcgcaatggccccgaatttagcaacgacatcaagaaaaggaaggttgacgacaagtag

SEQ ID NO: 271619 - DNA, 729 bp, Artificial Sequence
  derived and/or modified sequence
atgttcccccagagccggcaccccaccccccaccaggccgccggccaacctttcaaatttacgattccagagagcctggatcgcatcaaagaggaatttcaatttctgcaggcccagtaccacagtctgaaactggaatgcgaaaaacttgcttctgaaaagacagagatgcagcggcattatgtgatgtactatgagatgtcctacggcctaaacattgagatgcataagcagactgaaatcgcaaaaagactcaacactatctgcgctcaggtcatcccgttcctctctcaggaacaccagcagcaggtggctcaggcagttgagcgagccaaacaggtcacgatggctgagctgaatgccataatcggggtccgcggcttgcctggacttccccctacacagcagcagctccaggcacagcacctgagtcatggacacggacctccagtgcccttaaccccccacccaagtggtctgcagcctcctggtataccccccctgggcggatcagcaggcctgcttgcactgagctctgccctgagcgggcagtcacacctggcgattaaggacgataaaaaacatcacgacgccgagcaccacagggacagagagcccgggacatccaactcgctgcttgtgccagactccctgcggggcaccgacaagaggagaaacggtcccgagttctccaacgacattaaaaaaaggaaggtcgatgataaatag

SEQ ID NO: 271620 - DNA, 729 bp, Artificial Sequence
  derived and/or modified sequence
atgtttcctcagagccgccaccccactccccaccaggctgctggccagcccttcaaatttacaatccccgagtccctggaccgcatcaaagaggaattccagtttttgcaggcccaataccattccctgaagttggaatgtgagaagttggccagtgagaaaaccgagatgcaacggcattacgtgatgtattatgaaatgtcctacgggttgaatatcgagatgcacaagcagaccgagattgccaaacggttgaatactatatgtgcccaggtcattccattcctgtcacaggagcatcaacagcaggtcgcgcaggccgtggagagggcaaagcaggtcacaatggctgagctaaatgccatcattggcgtcaggggtcttcccggactgcctcccacacagcagcagctgcaggctcaacatctctctcacgggcacggtccgcctgttccacttactccacatcctagtgggctgcagcctccaggcatccctcctttagggggtagcgccggactgttggctttgagttccgcgttgtccggccaatcacacctcgccattaaagacgacaaaaagcatcatgatgcagagcaccacagaggtgagcgaccaggaaagagtaattccttgctcgtccccgattccctcaggggcacagacaagagaagaaatgggcctgagttttcaaacgacatcaagaagcggaaagtcgacgacaagtag

SEQ ID NO: 271621 - DNA, 729 bp, Artificial Sequence
  derived and/or modified sequence
atgtttccccaatccaggcaccctactccacatcaggcggctggccagcccttcaaattcacaatcccggagtctcttgacaggattaaagaagaatttcagtttctccaggcccagtatcatagcttaaaacttgagtgcgagaagctggcaagcgaaaagaccgagatgcagcgtcactacgtcatgtactacgaaatgtcatacggattaaatatcgaaatgcataaacaaacagagatcgccaaacggcttaataccatctgtgcacaggttatccctttcctctcccaggagcaccaacagcaggtggcccaggcggtggagagggccaaacaagttacgatggccgagctgaatgcgataataggcgtgcgaggtctgccgggtctaccaccaactcaacagcagctgcaggcacaacatctctcacacgggcacggacccccagtgccactgacaccacatcccagcggactgcaaccccctggcattcctcctttgggtggttctgcaggcctgctcgccctgagttcagcgctctctgggcagtcacacttggctattaaggacgataagaaacatcatgatgccgaacaccaccgagaccgcgagccgggaacctctaacagcctgctggtgcccgactccctgcggggtacagacaaaagaaggaacggaccggaattttccaacgacatcaagaaaagaaaggtggatgataagtag

SEQ ID NO: 271622 - DNA, 936 bp, Artificial Sequence
  derived and/or modified sequence
gggccggagcccgcaccgacgggagcgggagccggagcagctgcgggcgccgagtggccggtgcgcccggcggagcgcgcgtgcgtggccagcgcgctccccgcttctgcttggctttccggcttaattttcctcggcgggattaaagttggaaattgaccggagaattgagttgccggggaacagagccccggccgccgccagagcgatgttcccgcagagccggcacccgacgccgcaccaggctgcaggccagcccttcaagttcactatcccggagtccctggaccggattaaagaggaattccagttcctgcaggcgcagtatcacagccttaaattggaatgtgagaaactggcaagtgaaaagacagaaatgcagaggcactatgtgatgtattatgaaatgtcatatggattaaacattgaaatgcacaaacagactgaaatcgccaagagattgaatacgatttgtgcacaagtcatcccatttctgtctcaggaacatcaacaacaggtggcccaggctgttgaacgtgccaaacaggtgaccatggcagaattgaatgccatcatcggggtacgtggcctaccaggtctacctcctacacagcagcagttgcaagctcagcatctttctcatggccacggacccccagttccccttacgcctcacccttcgggacttcagcctcctggaatcccgcccctcgggggcagtgccggccttcttgcgctgtctagtgctctgagtgggcagtctcacttggcaataaaagatgacaagaagcaccacgatgcagagcaccacagagacagagagccgggcacaagtaattccctcctggtcccagacagtctaagaggcacagataaacgcagaaatggacctgaattttccaatgacatcaagaaaaggaaggtggatgataagga

SEQ ID NO: 271623 - protein, 127 aa, Artificial Sequence
  derived and/or modified sequence
MPTPGTSATPGLRPGLGKPPAIDPLVNQAAAGLRTPLAVPGPYPAPFGMVPHAGMNGELTSPGAAYASLHNMSPQMSAAAAAAAVVAYGRSPMVGFDPPPHMRVPTIPPNLAGIPGGKPSLVPAPAH

SEQ ID NO: 271624 - DNA, 384 bp, Artificial Sequence
  derived and/or modified sequence
atgcccacccccggcaccagcgccacccccggcctgagacccggcctgggcaagccccccgccatcgaccccctggtgaaccaggccgccgccggcctgagaacccccctggccgtgcccggcccctaccccgcccccttcggcatggtgccccacgccggcatgaacggcgagctgaccagccccggcgccgcctacgccagcctgcacaacatgagcccccagatgagcgccgccgccgccgccgccgccgtggtggcctacggcagaagccccatggtgggcttcgacccccccccccacatgagagtgcccaccatcccccccaacctggccggcatccccggcggcaagcccagcctggtgcccgcccccgcccactag

SEQ ID NO: 271625 - DNA, 384 bp, Artificial Sequence
  derived and/or modified sequence
atgcccacaccagggacgagtgctacccccggattgaggcctgggctcggaaaacccccggctatcgatccactggttaaccaggctgcagccggtttaagaacaccgttagcggtccctggcccatacccggcccccttcggcatggtgccacacgccggtatgaatggagagttaaccagccccggagctgcttacgcctcgctgcacaacatgtctcctcagatgagtgcagctgctgcagccgccgcggtcgtggcttacgggcgttccccgatggtcggcttcgaccctccgccccacatgagggttcccaccataccaccgaacttggcaggcattccaggggggaagcctagcctagtgcctgctcccgcccattag

SEQ ID NO: 271626 - DNA, 384 bp, Artificial Sequence
  derived and/or modified sequence
atgccaacaccgggaacctccgcaacccccggattgagaccggggctcggcaagccacctgctatcgatccattggttaatcaggcagctgcaggtctccgcacgcctctggctgtgccaggcccttatcctgccccgttcggcatggtcccgcacgctgggatgaatggggagctgactagtcccggggctgcctacgcatccctccacaacatgagcccacaaatgagcgctgctgctgcggctgccgccgtggtagcttatggaaggagtcctatggtggggtttgacccacctccccatatgagagtcccaacgattcctcctaatctcgccggaatacctggcggcaagccctcacttgtacccgctcccgctcattag

SEQ ID NO: 271627 - DNA, 384 bp, Artificial Sequence
  derived and/or modified sequence
atgcccaccccaggcaccagcgccaccccaggcctgcggcccggcctgggcaagcccccagccatcgaccccctggtgaaccaggccgctgctggcctgcggacccccctggccgtgcccggcccctacccagcccccttcggcatggtgccccatgctggcatgaatggagagctgaccagccctggggccgcctatgccagcctgcacaacatgagcccccagatgtctgctgctgctgctgctgctgctgtggtggcctacggccgcagccccatggtgggctttgaccccccaccccacatgagggtgcccaccatcccccccaacctggccggcatccctgggggcaagcccagcctggtgcctgccccagcccactag

SEQ ID NO: 271628 - DNA, 384 bp, Artificial Sequence
  derived and/or modified sequence
atgcccacccccggcaccagcgccacccccggcctgcggcccggcctaggaaaaccaccagccattgatccacttgttaatcaggccgcggccgggctgcgaacccccctggcagtgccaggcccataccccgctccctttggaatggtgccccacgctggcatgaatggcgaactgacaagccctggtgcggcgtacgcgtcgctccacaacatgagcccccagatgtccgccgccgccgctgcagccgcagtggtggcctacggtcgctcgcctatggtgggattcgatcccccaccccacatgcgggtgccaactataccgccaaacttggccggaatccctggcggcaagccgagccttgttccggctcctgcccattag

SEQ ID NO: 271629 - DNA, 384 bp, Artificial Sequence
  derived and/or modified sequence
atgcccacccccggcaccagcgccacccccggcctgcggcccggcctgggaaaaccccccgcaattgaccctcttgtgaatcaggccgccgccgggctccgaacaccgctggcagtgcctggtccatacccagcaccattcggcatggtgcctcacgctggcatgaatggggaactcacctcccctggtgctgcctacgccagtctccataatatgtcccctcagatgtccgctgcagccgcagcggctgctgtcgtggcttacgggaggagtcctatggtcggttttgatccacccccacatatgcgggtccccacaatcccccccaatctggcaggaattcctgggggaaagccaagcttagtgccagcacctgcccattag

SEQ ID NO: 271630 - DNA, 384 bp, Artificial Sequence
  derived and/or modified sequence
atgcccacgccaggaacttcagccactcccggtctgaggccgggtttgggtaagccgcctgcaatcgatcctctggttaaccaggcggctgccggtttaaggacacccttagccgtccccggaccataccccgctcctttcggtatggtacctcatgccggaatgaatggcgaacttaccagccccggagcagcatacgcatctcttcacaacatgagcccccaaatgtccgcagccgcagcggcagcagctgtagttgcctacggccgaagccctatggtggggtttgacccccctccacacatgagggttcccactataccgccaaacctggctggaattcccggtggtaaacctagcctggtaccagcacccgctcactag

SEQ ID NO: 271631 - DNA, 384 bp, Artificial Sequence
  derived and/or modified sequence
atgcctacgcctggtaccagcgccactcccggtctgcggccaggcctggggaaaccacccgcaatcgaccctttagtaaatcaggcagctgccggattgcgaactcccctagccgtgcccggaccctaccctgctcctttcggcatggtgccacatgccggaatgaacggggagctgacgtctcccggagcagcttacgcatccctccataatatgagccctcagatgagcgccgctgccgctgcagctgcagtggtggcatatggcagaagcccgatggtaggcttcgatccacccccacatatgcgtgtgccaacaataccacccaatctggcaggtattccaggcggtaaacctagcctggtccccgcaccagctcactag

SEQ ID NO: 271632 - DNA, 666 bp, Artificial Sequence
  derived and/or modified sequence
gcatgaaaaagccagcacgcctgttctgaaatccagcacaccaacgcctcggagcgacatgccaacgccgggcaccagcgccactccaggcctccgtccaggtctcggcaagcctccagccatagaccccctcgttaaccaagcggcagctggcttgaggacacccctggcagtgcccggcccatatcctgctccttttgggatggtcccccacgctggcatgaacggcgagctgaccagcccaggcgctgcctacgccagtttacacaacatgtcgccccagatgagcgccgcagccgccgcggccgccgtggtggcctacgggcgctcccccatggtggggtttgatcctccccctcacatgagagtacctaccattcctccaaacctggcaggaatccctggggggaaaccgagccttgttcctgccccagcacattgagaagtttggaaacgtgtaattgatagaggaagttaggtcctagaactcagaatcttaaatgttgactttggctggaatacttcctcatttatcaacttaggtcatctgtttcttgttttctttgcttgtaatcttcttttacatatccattttaagaagttttgtatttgcctttaaaaaaaataaatgaaaatagagtgtatgcctctaaataaggaaacaaa

SEQ ID NO: 271633 - DNA, 183 bp, Artificial Sequence
  derived and/or modified sequence
atgcccctgcccatcctgctgcacgtgcaggagcagatcctgaagatgctggtgtaccacctgctgaagctgtacctgagaatcctgcccaccaccaagaagaacaccctgttcatcctgcccaagagcctgaagcaccacaaggtggtgaccctgaacaagatgaagccccaggagagatag

SEQ ID NO: 271634 - protein, 121 aa, Artificial Sequence
  derived and/or modified sequence
MMRSIFLPHRKLICSRRGHLDPRGWEEDEKILVPDAIPTLPPYVFIRTDQACVKVYPGFVLIRNGKTHRHRGDCHEEEVCAHRTLETGGMACHVGPHGEGPSLWGFWGSWKQVLFFLPVDH

SEQ ID NO: 271635 - protein, 124 aa, Artificial Sequence
  derived and/or modified sequence
MSQPDVLLLVQECLKNSDSFIDVDADFHARVPVVVCREKQSGLLCKVSAGNENACLTTKHLTALGKLEPKLVPLVIAFRYWAKLCSIDRPEEGGLPPYVFALMAIFFLQQRKEPLLPVYLGSWV

SEQ ID NO: 271636 - DNA, 507 bp, Artificial Sequence
  derived and/or modified sequence
atggaggccggcagccccgagaacaagaagcagagaagcagacccagaaagcccagaaagaccagaaacgaggagaacgagcaggacggcgacctggagggccccgtgatcgacgagagcgtgctgagcaccaaggagctgctgggcctgcagcaggccgaggagagactgaagagagactgcatcgacagactgaagagaagacccagaaactaccccaccgccaagtacacctgcagactgtgcgacgtgctgatcgagagcatcgccttcgcccacaagcacatcaaggagaagagacacaagaagaacatcaaggagaagcaggaggaggagctgctgaccaccctgcccccccccacccccagccagatcaacgccgtgggcatcgccatcgacaaggtggtgcaggagttcggcctgcacaacgagaacctggagcagagactggagatcaagagaatcatggagaacgtgttccagcacaagctgcccggcatcttctag

SEQ ID NO: 271637 - DNA, 375 bp, Artificial Sequence
  derived and/or modified sequence
atgagccagcccgacgtgctgctgctggtgcaggagtgcctgaagaacagcgacagcttcatcgacgtggacgccgacttccacgccagagtgcccgtggtggtgtgcagagagaagcagagcggcctgctgtgcaaggtgagcgccggcaacgagaacgcctgcctgaccaccaagcacctgaccgccctgggcaagctggagcccaagctggtgcccctggtgatcgccttcagatactgggccaagctgtgcagcatcgacagacccgaggagggcggcctgcccccctacgtgttcgccctgatggccatcttcttcctgcagcagagaaaggagcccctgctgcccgtgtacctgggcagctgggtgtag

SEQ ID NO: 271638 - DNA, 498 bp, Artificial Sequence
  derived and/or modified sequence
atggaggccggcagccccgagaacaagaagcagagaagcagacccagaaagcccagaaagaccagaaacgaggagaacgagcaggacggcgacctggagggccccgtgatcgacgagagcgtgctgagcaccaaggagctgctgggcctgcagcaggccgaggagagactgaagagagactgcatcgacagactgaagagaagacccagaaactaccccaccgccaagtacacctgcagactgtgcgacgtgctgatcgagagcatcgccttcgcccacaagcacatcaaggagaagagacacaagaagaacatcaaggagaagcaggaggaggagctgctgaccaccctgcccccccccacccccagccagatcaacgccgtgggcatcgccatcgacaaggtggtgcaggagttcggcctgcacaacgagaacctggagcagagactggagatcaagagaatcatggagaacgtgttccagcacaagctgccctag

SEQ ID NO: 271639 - DNA, 507 bp, Artificial Sequence
  derived and/or modified sequence
atggaagctggaagtcctgaaaacaaaaagcagagatcaaggcccaggaagcccaggaaaactcggaacgaggagaatgagcaggacggagaccttgagggcccggttatagacgaatccgtactgtcaactaaagaattactcgggcttcagcaagcagaggaacgtctgaaaagggactgcatcgaccgcttaaaacgtcgcccacgcaattatccaacagctaagtacacatgccggctttgtgacgtgctcatcgagtctattgccttcgcccacaaacacatcaaagagaagcgccacaagaagaacatcaaagagaaacaagaggaagagctgttgactacattacctcctcccacccctagccaaattaacgccgtaggaatcgctatagacaaagtggtgcaggagttcggccttcataatgagaatctggagcagcgactagaaattaaacgcattatggagaatgttttccaacacaagctacctggaatcttttag

SEQ ID NO: 271640 - DNA, 375 bp, Artificial Sequence
  derived and/or modified sequence
atgagccagcctgacgtcctcctgctggtgcaggaatgtctcaaaaacagtgacagctttattgatgttgacgcggacttccacgccagggttcctgtcgtggtctgccgagagaaacaaagcggattgctgtgtaaggtgtcagcaggaaatgagaatgcttgtctgaccacgaaacatcttacagctttggggaagctggaacctaaactggtccctctggtgatagcatttagatattgggcaaaactgtgcagcattgacagaccggaggagggtggtctgcctccgtatgtgtttgccctgatggccatcttctttttacagcagaggaaagagccactgctgccagtctacctcggctcttgggtgtag

SEQ ID NO: 271641 - DNA, 498 bp, Artificial Sequence
  derived and/or modified sequence
atggaagccggcagccccgagaacaaaaaacagcgaagcaggcctagaaagccacgtaagacccggaacgaggaaaacgagcaggacggtgacctggagggaccagtcattgatgagagcgttttgagcacaaaagaactcctcgggcttcagcaggcggaggaaagacttaagagagattgtatcgataggctgaaacgcaggccccgcaactaccctacggccaaatatacttgcaggctgtgtgacgtgctgattgaaagtatagccttcgcgcacaagcatataaaggaaaaacgacataaaaagaacatcaaggagaaacaagaggaggaattgttgacaaccctgccacctccaacaccatcacagatcaacgccgtggggatcgccatcgataaagtggttcaggagttcgggctgcacaacgaaaacctcgaacagcggctcgagatcaaacgaatcatggaaaatgtgtttcagcataagctcccctag

SEQ ID NO: 271642 - DNA, 507 bp, Artificial Sequence
  derived and/or modified sequence
atggaggccggcagccctgagaacaagaagcagaggagccggcccaggaagcccaggaagaccagaaatgaagaaaatgagcaggatggagacctggagggccctgtgattgatgagagcgtgctgagcaccaaggagctgctgggcctgcagcaggccgaggagcggctgaagagggactgcatcgaccggctgaagagaagacccaggaactaccccacagccaagtacacctgccgcctgtgtgatgtgctgattgagagcatcgcctttgcccacaagcacatcaaggagaagaggcacaagaagaacatcaaggagaagcaggaggaggagctgctgaccaccctgcccccacccacccccagccagatcaatgctgtgggcatcgccatcgacaaggtggtgcaggagtttggcctgcacaatgaaaacctggagcagaggctggagatcaagaggatcatggagaatgtgttccagcacaagctgcccggcatcttctag

SEQ ID NO: 271643 - DNA, 375 bp, Artificial Sequence
  derived and/or modified sequence
atgagccagccagatgtgctgctgctggtgcaggagtgcctgaagaacagcgacagcttcattgatgtggatgctgacttccacgcccgggtgcctgtggtggtgtgccgggagaagcagagcggcctgctgtgcaaggtgtctgctggaaatgaaaatgcctgcctgaccaccaagcacctgacagccctgggcaagctggagcccaagctggtgcccctggtgattgccttccgctactgggccaagctgtgcagcattgacaggcctgaggagggcggcctgcccccctacgtgtttgccctgatggccatcttcttcctgcagcagaggaaggagcccctgctgcctgtgtacctgggctcctgggtgtag

SEQ ID NO: 271644 - DNA, 498 bp, Artificial Sequence
  derived and/or modified sequence
atggaggccggcagccctgagaacaagaagcagaggagccggcccaggaagcccaggaagaccagaaatgaagaaaatgagcaggatggagacctggagggccctgtgattgatgagagcgtgctgagcaccaaggagctgctgggcctgcagcaggccgaggagcggctgaagagggactgcatcgaccggctgaagagaagacccaggaactaccccacagccaagtacacctgccgcctgtgtgatgtgctgattgagagcatcgcctttgcccacaagcacatcaaggagaagaggcacaagaagaacatcaaggagaagcaggaggaggagctgctgaccaccctgcccccacccacccccagccagatcaatgctgtgggcatcgccatcgacaaggtggtgcaggagtttggcctgcacaatgaaaacctggagcagaggctggagatcaagaggatcatggagaatgtgttccagcacaagctgccctag

SEQ ID NO: 271645 - DNA, 507 bp, Artificial Sequence
  derived and/or modified sequence
atggaggccggcagccccgagaacaagaagcagcggagccggccccgcaaaccccgaaaaacccggaacgaagaaaatgaacaagatggcgacttggaaggccctgtgatcgacgagagtgttctgtccaccaaggaactgctgggactgcagcaggctgaagaaagactcaagcgagattgtattgacagactaaaacggaggccgaggaactatccgaccgccaagtacacctgccggttatgcgacgtactcatcgagagcatcgcctttgcgcacaagcatattaaagaaaagaggcacaagaaaaacataaaagagaaacaggaggaggaactgctcaccaccctcccccctccaacaccgtcccagattaacgcagtgggaatcgctattgacaaggtagtgcaagaatttggactgcacaacgaaaacctggagcagcgactggagatcaagcgcattatggagaacgtgttccagcacaagcttcccggaatcttttag

SEQ ID NO: 271646 - DNA, 375 bp, Artificial Sequence
  derived and/or modified sequence
atgagccagcccgacgtgctgctgctggtgcaggagtgcctgaagaacagtgattcattcattgatgtcgacgctgatttccatgcccgtgtgcccgtagtagtgtgcagagagaagcaaagtggcttgctctgcaaagtttcagcgggtaatgaaaacgcttgcttaaccacaaaacacctaactgcactgggcaagctggaaccaaagctggtgcctcttgtgatcgccttccggtattgggcaaaactttgtagcattgaccgtccggaagaggggggcctgcctccctatgtgtttgctttaatggccatttttttcctccaacaacgaaaagaacccttactacctgtgtatctgggctcatgggtgtag

SEQ ID NO: 271647 - DNA, 498 bp, Artificial Sequence
  derived and/or modified sequence
atggaggccggcagccccgagaacaagaagcagcggagccggcccaggaaacctcgcaagacacgcaacgaggaaaacgagcaagatggtgacctcgagggtcctgtcattgatgaatcagtcttatctacgaaggagctgctcggactccaacaggcagaagagaggcttaaaagagactgcattgaccgtctgaagcgacggccaagaaactaccccactgctaagtacacatgcaggttgtgtgacgtattaatcgaatctattgcatttgcccacaaacacatcaaggagaaaagacataagaagaatataaaggagaaacaggaggaggagctgttgacaacccttcccccaccaaccccttctcaaattaacgccgtcgggattgctattgataaagtggtgcaggagtttggccttcacaatgagaacttggaacaaagacttgagattaaaaggatcatggagaacgtgttccagcacaaacttccgtag

SEQ ID NO: 271648 - DNA, 507 bp, Artificial Sequence
  derived and/or modified sequence
atggaggccggatcaccggagaacaagaagcagaggtctaggcccaggaaaccgaggaaaactcggaatgaggagaatgagcaggatggagatctcgaaggccctgtcatcgatgagtctgtgttgagcactaaagaactgctaggacttcagcaggccgaagagagactgaaaagagactgtatagaccgactgaaacgccgtcctaggaactaccccacagccaaatatacctgtcgcctatgcgacgtgctgattgaaagtattgctttcgcccacaagcacatcaaggagaaacgacataagaagaacattaaggagaaacaagaggaggagctgcttaccactctgccacctcccacacctagccaaatcaacgccgtggggatcgccatcgataaggtggtccaggagtttggcttacacaacgagaatctggagcagcgactcgagatcaagaggattatggagaatgtttttcaacacaagctgccagggattttctag

SEQ ID NO: 271649 - DNA, 375 bp, Artificial Sequence
  derived and/or modified sequence
atgtctcagcccgatgtcctgttgctggttcaggaatgtttaaagaacagtgatagtttcatagatgttgacgctgatttccatgccagggtccccgtggtggtttgtagagaaaaacagtcaggactgttgtgtaaggtttcagccggtaatgagaatgcatgtctgacaactaagcacctcaccgccctgggtaagcttgagccgaaacttgttcccctagttatagcattccgatactgggcaaaactctgttcaattgaccgacccgaagagggcggactgcccccatatgtgtttgctctgatggccattttcttcctgcagcaaaggaaagaaccacttctccctgtttacttgggctcctgggtgtag

SEQ ID NO: 271650 - DNA, 498 bp, Artificial Sequence
  derived and/or modified sequence
atggaagccggtagtccagagaataagaagcagcgctcccgccctaggaaacctcgaaaaacaaggaatgaggagaatgagcaggatggagatctggaagggcctgtgattgacgagtccgttctgagcacaaaggaacttttaggcttacagcaggcagaggaaaggctgaaacgtgactgtatagatcggctaaaaagaaggcccagaaactacccgacagctaaatatacctgcagattgtgcgacgtgcttatcgaatccatcgcctttgcgcacaaacatataaaggaaaaacgacataagaaaaacattaaagaaaaacaggaggaagagctactgacaaccttaccacctccaactccttcacagatcaatgccgtggggattgcaatcgataaagttgtgcaagaattcgggctccacaatgaaaacctcgaacagcggctggaaatcaaaagaataatggagaatgtcttccaacacaaactcccatag

SEQ ID NO: 271651 - DNA, 611 bp, Artificial Sequence
  derived and/or modified sequence
cgtcagaaatggaagcaggaagtcctgaaaacaagaagcagaggtccagacctaggaagccacggaagactagaaatgaggaaaatgagcaggatggagacttggaaggccctgtgatcgatgagtctgtactttcaacgaaggagctgctaggcttacagcaggctgaggagagactgaagagagactgcattgacaggctaaaaaggcgaccacgaaactaccctacagcaaagtacacctgcagactctgtgatgttttaattgaatccattgcatttgcccataagcatatcaaggaaaagaggcacaagaaaaacattaaggagaagcaagaggaagagttgctcactacgttacccccaccaacaccctcccagataaatgcagttggcattgccattgacaaagtggtacaggaatttggcttacacaatgagaacttggaacagaggctggaaattaaacgtatcatggaaaatgtgttccaacacaagttaccaggtattttctagatttgtttttctatttaactacctaaaagtacctcattcatttctcctaccaatagtaattttcatcaaataaaaatttatttaccatgtcatgaa

SEQ ID NO: 271652 - DNA, 958 bp, Artificial Sequence
  derived and/or modified sequence
gggtttcaaaaattcggatgtaaacattgacatccagtttccagccattatgtctcagccagatgtcctcttacttgttcaagaatgtttaaagaacagtgactcctttattgatgttgatgcagacttccatgctagggtgccagtggtggtgtgcagagaaaagcaaagtggtcttctgtgtaaagtgagcgcaggaaatgaaaatgcttgtctgacaacaaagcatttaactgcccttggaaaactagaaccaaagctggttcctttggtgattgcatttaggtactgggcaaagctttgcagtatagatcgccctgaagaaggaggtctgccaccttatgtgtttgccctgatggccattttctttcttcagcagaggaaagaaccccttttgcctgtatatctaggatcatgggtataaaacattttttttgcttatatatctgaacagattttattacaggtccacaattaaattttgcataatttcaaaatctagacacctaaccagaactgacatggatttatttattctactcatgtgaatattcatacctttcactgctgaaatactaatgtgtttgatttcagtatgttgccctataacctgcttagggatattattacctttctagactgcaaaatctcttaatttttgaaatatgtatggtcctgagacgaacaagagactgaccctgtaaatttaccatttggtacattctttctttgggtacagttttctaaattgatacttgaatttacatatcacctccagacagacagactgtgggaagcatttggttcactgtaacttactttctgtttctaatctatttctccccataacctgtaaaacaaaaaaatatataaacattgaaattgctacctgtaccacaagatgcagaacctagtagtcatctcttgaataatattttgacattattttaaagatgaa

SEQ ID NO: 271653 - DNA, 132 bp, Artificial Sequence
  derived and/or modified sequence
atggagagcaccggcagcgtgggcgaggcccccggcggccggcacggcccccgccggggccctcacccactgggtgccttgctgcggtggaggggcgggggaggtagggcattggatccatgctgcccttag

SEQ ID NO: 271654 - protein, 831 aa, Artificial Sequence
  derived and/or modified sequence
MASSETEIRWAEPGLGKGPQRRRWAWAEDKRDVDRSSSQSWEEERLFPNATSPELLEDFRLAQQHLPPLEWDPHPQPDGHQDSESGETSGEEAEAEDVDSPASSHEPLAWLPQQGRQLDMTEEEPDGTLGSLEVEEAGESSSRLGYEAGLSLEGHGNTSPMALGHGQARGWVASGEQASGDKLSEHSEVNPSVELSPARSWSSGTVSLDHPSDSLDSTWEGETDGPQPTALAETLPEGPSHHLLSPDGRTGGSVARATPMEFQDSSAPPAQSPQHATDRWRRETTRFFCPQPKEHIWKQTKTSPKPLPSRFIGSISPLNPQPRPTRQGRPLPRQGATLAGRSSSNAPKYGRGQLNYPLPDFSKVGPRVRFPKDESYRPPKSRSHNRKPQAPARPLIFKSPAEIVQEVLLSSGEAALAKDTPPAHPITRVPQEFQTPEQATELVHQLQEDYHRLLTKYAEAENTIDQLRLGAKVNLFSDPPQPNHSIHTGMVPQGTKVLSFTIPQPRSAEWWPGPAEDPQASAASGWPSARGDLSPSSLTSMPTLGWLPENRDISEDQSSAEQTQALASQASQFLAKVESFERLIQAGRLMPQDQVKGFQRLKAAHAALEEEYLKACREQHPAQPLAGSKGTPGRFDPRRELEAEIYRLGSCLEELKEHIDQTQQEPEPPGSDSALDSTPALPCLHQPTHLPAPSGQAPMPAIKTSCPEPATTTAAASTGPCPLHVNVEVSSGNSEVEDRPQDPLARLRHKELQMEQVYHGLMERYLSVKSLPEAMRMEEEEEGEEEEEEEGGGDSLEVDGVAATPGKAEATRVLPRQCPVQAEKSHGAPLE

SEQ ID NO: 271655 - DNA, 1152 bp, Artificial Sequence
  derived and/or modified sequence
atggcaagcgcatttagactcagcctcaagcccaaggtgtcagataacatgacgcacctgatggtggacttttcccaagaaagacagatgctgcaaaccttgaagttcctccctgttcctaaggccccagaaatcgatcctgtcgagtgccttgtagctgataactcagtcactgtggcttggcggatgccagaggaggacaacaaaattgatcacttcatcctggagcaccgcaagacgaactttgatggccttccacgagtgaaggatgagcgctgctgggagatcatcgataacattaaaggcaccgaatatacactgagtgggctgaaattcgattctaagtatatgaactttcgtgtgagggcctgtaataaggcagtggccggtgaatactccgaccctgtcacgctggaaacaaaagccctgaatttcaacttagataattcctcatctcatttgaacctcaaggtggaggatacttgtgtcgaatgggatccaaccgggggaaagggacaggaatcaaagatcaaagggaaggagaacaaggggagtgtacatgtgacaagcctgaagaaacatactagcggtacgccatctccgaaacgaacaagcgtcggcagccgcccccctgcggttcgagggtcccgggataggttcaccggggagtcgtacaccgtcttaggggataccgccattgagagcgggcaacattattgggaggtcaaagctcaaaaggattgcaaatcatacagcgtgggagtcgcttacaaaacattagggaagtttgaccagctgggcaagacaaatacctcatggtgtattcatgtaaacaattggctgcagaacacctttgccgctaagcacaataataaggtcaaagccttagacgtaaccgttccagagaaaatcggtgtgttctgtgatttcgacgggggtcaactgtcattctacgatgccaactccaaacagctgctctacagctttaagacaaaatttacacagcccgtgctccccggttttatggtatggtgcggtggcctgtcactgagtacagggatgcaggtcccgagtgccgtgaggacacttcaaaagagtgagaacggcatgacaggcagtgccagttctcttaataacgtagtcacacagtag

SEQ ID NO: 271656 - DNA, 1152 bp, Artificial Sequence
  derived and/or modified sequence
atggccagcgccttccggctgagcctgaagcccaaggtgtctgacaacatgacccacctgatggtggacttcagccaggagcggcagatgctgcagaccctgaagttcctgcctgtgcccaaggcccctgagattgatcctgtggagtgcctggtggccgacaacagcgtgacagtggcctggaggatgcctgaggaggacaacaagattgaccacttcatcctggagcacaggaagaccaactttgatggcctgccccgggtgaaggatgagcgctgctgggagatcatcgacaacatcaagggcacagagtacaccctgagcggcctgaagtttgacagcaagtacatgaacttccgggtgcgggcctgcaacaaggctgtggccggggagtacagcgaccctgtgaccctggagaccaaggccctgaacttcaacctggacaacagcagcagccacctgaacctgaaggtggaggacacctgtgtggagtgggaccccaccggcggcaagggccaggagagcaagatcaagggcaaggaaaataaaggatctgtgcacgtgaccagcctgaagaagcacaccagcggcacccccagccccaagaggacctctgtgggcagccggcccccagctgtgcggggcagccgggaccgcttcaccggggagagctacacagtgctgggggacacagccattgaaagtggccagcactactgggaggtgaaggcccagaaggactgcaagagctacagcgtgggcgtggcctacaagaccctgggcaagtttgaccagctgggcaagaccaacacctcctggtgcatccacgtgaacaactggctgcagaacacctttgctgccaagcacaacaacaaggtgaaggccctggatgtgacagtgcctgagaagattggagtcttctgtgactttgatggcggccagctgtccttctatgatgccaacagcaagcagctgctgtacagcttcaagaccaagttcacccagcctgtgctgcccggcttcatggtgtggtgtggcggcctgagcctgagcacaggcatgcaggtgcccagcgctgtgaggaccctgcagaagtcagaaaatggcatgactggaagtgccagcagcctgaacaacgtggtgacccagtag

SEQ ID NO: 271657 - DNA, 1152 bp, Artificial Sequence
  derived and/or modified sequence
atggccagcgccttccggctgagcctgaagcccaaggtgagcgacaacatgacccacttgatggtggatttcagccaggaacgccagatgctgcagacgctgaagtttcttcccgtgcccaaagccccagagatcgaccccgtggaatgcctcgtggccgacaattccgtaactgtcgcctggaggatgcccgaagaagacaataaaatcgaccatttcattctggaacatagaaagacaaacttcgatggtctgccccgtgtgaaagacgagagatgttgggagatcatcgacaatatcaagggaaccgaatacacactgtcagggttaaagtttgattccaagtacatgaactttcgtgtacgcgcctgcaataaggctgttgcaggtgaatactctgaccctgtgacactggaaacaaaagcgctcaacttcaacctagataacagctcgtctcatttgaatctgaaagttgaagatacgtgcgtcgagtgggatcctactggaggcaagggccaggagtccaagattaaagggaaagagaataagggaagtgtgcacgtgacgagcctgaagaagcatacgagcggtaccccaagtcctaagaggacgtccgtaggatcacgtccaccggccgtaaggggttccagggaccgttttacaggtgagtcatataccgtgctgggggatactgccatcgaatcagggcagcactactgggaggttaaggcccagaaagactgcaagagttatagcgtcggggtggcctacaagactttgggcaaattcgatcagttgggcaaaaccaatacctcctggtgcatacacgtcaacaattggctccagaacaccttcgccgcgaaacataataacaaggttaaggcactggatgtgacagtgcctgagaaaataggcgtgttctgtgatttcgatggaggtcaactgagtttttacgatgctaactccaaacagttactgtattcttttaagaccaaatttactcagcccgtcttgccagggtttatggtttggtgcggagggctgagcctgagcaccgggatgcaggtaccctctgcggtgaggactcttcagaagtccgaaaacgggatgacaggtagcgcgtcctcgctgaataatgtggtcactcagtag

SEQ ID NO: 271658 - DNA, 1152 bp, Artificial Sequence
  derived and/or modified sequence
atggcatccgccttccgactctcccttaaacctaaggtgtccgataacatgacacacctcatggttgacttcagtcaggaaaggcaaatgttacagactctcaagtttctccccgtaccgaaggctccggagatcgacccggtcgaatgcttagtcgcagataattcagtgactgtggcctggcgcatgccggaggaagataacaagatcgatcactttatcttggagcataggaaaaccaattttgatggactgcctcgtgtgaaggacgaaaggtgctgggaaatcatagacaacatcaaaggaaccgagtacaccctctctggactaaagttcgactcaaagtacatgaatttccgagtacgagcctgcaacaaggctgtagcaggggagtattcagaccctgtgaccttggaaactaaagcactgaactttaatctcgataactcgagcagtcacctcaatctgaaggtcgaggatacctgtgtggagtgggaccctaccggcggtaaaggccaggagtccaaaatcaagggaaaagagaacaagggaagcgtccacgtgacttccttgaagaaacatacctccggcacaccgtccccaaagcgcacaagtgtaggtagcaggccgcctgcagttcgaggatcccgtgaccggttcacaggagagtcttacacagtgctcggcgataccgcaatcgagagcggccaacattattgggaggtgaaggcgcaaaaagactgtaagtcttattcagtcggagtggcctacaaaacactgggaaagtttgatcaattggggaagaccaacacatcgtggtgtattcatgtaaataattggctccaaaatacatttgccgcaaaacacaacaataaagtcaaggctttggacgtgacagtgccagagaaaatcggcgtgttctgcgattttgatgggggacaactgtcattctatgacgcaaactcaaagcagctgctttactctttcaaaactaaattcacccagccagtgctccccggatttatggtctggtgtgggggtttgagcctgagtacaggtatgcaggtccctagtgccgtaagaacacttcaaaaatcagaaaatgggatgacagggtcagcatcctccctgaacaacgttgtaacacagtag

SEQ ID NO: 271659 - DNA, 1152 bp, Artificial Sequence
  derived and/or modified sequence
atggccagcgccttcagactgagcctgaagcccaaggtgagcgacaacatgacccacctgatggtggacttcagccaggagagacagatgctgcagaccctgaagttcctgcccgtgcccaaggcccccgagatcgaccccgtggagtgcctggtggccgacaacagcgtgaccgtggcctggagaatgcccgaggaggacaacaagatcgaccacttcatcctggagcacagaaagaccaacttcgacggcctgcccagagtgaaggacgagagatgctgggagatcatcgacaacatcaagggcaccgagtacaccctgagcggcctgaagttcgacagcaagtacatgaacttcagagtgagagcctgcaacaaggccgtggccggcgagtacagcgaccccgtgaccctggagaccaaggccctgaacttcaacctggacaacagcagcagccacctgaacctgaaggtggaggacacctgcgtggagtgggaccccaccggcggcaagggccaggagagcaagatcaagggcaaggagaacaagggcagcgtgcacgtgaccagcctgaagaagcacaccagcggcacccccagccccaagagaaccagcgtgggcagcagaccccccgccgtgagaggcagcagagacagattcaccggcgagagctacaccgtgctgggcgacaccgccatcgagagcggccagcactactgggaggtgaaggcccagaaggactgcaagagctacagcgtgggcgtggcctacaagaccctgggcaagttcgaccagctgggcaagaccaacaccagctggtgcatccacgtgaacaactggctgcagaacaccttcgccgccaagcacaacaacaaggtgaaggccctggacgtgaccgtgcccgagaagatcggcgtgttctgcgacttcgacggcggccagctgagcttctacgacgccaacagcaagcagctgctgtacagcttcaagaccaagttcacccagcccgtgctgcccggcttcatggtgtggtgcggcggcctgagcctgagcaccggcatgcaggtgcccagcgccgtgagaaccctgcagaagagcgagaacggcatgaccggcagcgccagcagcctgaacaacgtggtgacccagtag

SEQ ID NO: 271660 - protein, 268 aa, Artificial Sequence
  derived and/or modified sequence
MDPLTKVPCGSQIAQTILWKAKSSLSFGIQPLQTWPTKDPELESQVNLSVSEDLGCRRGDFSRKHYGSVELLISSDADGAIQRAGRFRVENGSSDENATALPGTWRRTDVHLENPEYHTRWYFKYFLGQVHQNYIGNDAEKSPFFLSVTLSDQNNQRVPQYRAILWRKTGTQKICLPYSPTKTLSVKSILSAMNLDKFEKGPREIFHPEIQKDLLVLEEQEGSVNFKFGVLFAKDGQLTDDEMFSNEIGSEPFQKFLNLLGDTITLKG

SEQ ID NO: 271661 - DNA, 905 bp, Artificial Sequence
  derived and/or modified sequence
tacctcccccttgatgggtggcgggatcccggagccaacgcagaccggacgtcggaacgccgctttagccccgggacagctgcccagcctccaggcccactgatggacccgttaacgaaggtgccttgtgggagtcagatagcacaaaccattctatggaaagcaaagtcgtctctctccttcggcatccagccccttcagacatggccaacgaaagaccctgaactagagtcccaggtcaacctctctgtctcggaagacctaggctgtagacgtggggatttcagtaggaaacattatggatctgtggagctgcttatttccagtgatgctgatggagccatccaaagggctggaagattcagagtggaaaatggctcttcagatgagaatgcaactgccctgcctggtacttggcgaagaacagacgtgcacttagagaacccagaataccacaccagatggtatttcaaatattttttaggacaagtccatcagaactacattggaaacgatgccgagaagagccctttcttcttgtccgtgaccctttctgaccaaaacaatcaacgtgtccctcaataccgtgcaattctttggagaaaaacaggtacccagaaaatatgccttccctacagtcccacaaaaactctttctgtgaagtccatcttaagtgccatgaatctggacaaatttgagaaaggccccagggaaatttttcatcctgaaatacaaaaggacttgctggttcttgaagaacaagagggctctgtgaatttcaagtttggggttctttttgccaaagatgggcagctcactgatgatgagatgttcagcaatgaaattggaagcgagccttttcaaaaatttttaaatcttctgggtgacacaatcactctaaaggg

SEQ ID NO: 271662 - DNA, 1527 bp, Artificial Sequence
  derived and/or modified sequence
gtggtgagcgaggagttcagaaaccagatcgtgagagagctggtgaccctgcccgccaacagatggagagagcagctggactactacgccagatgcagccaggcccccggctgcggcgagctgctgttcgacaccgacacctggagcctgcagatcagaaagaccggcgcccagaccgccaccgacttcccccacgccatcagaatctggtacaagaccaagcccgagggcagaagcgtgacctggaccagcgaccagagcggcagaccctgcgtgtacaccgtgggcagccccatcaacaacagagccctgttcccctgccaggagccccccgtggccatgagcacctggcaggccaccgtgagagccgccgccagcttcgtggtgctgatgagcggcgagaacagcgccaagcccacccagctgtgggaggagtgcagcagctggtactactacgtgaccatgcccatgcccgccagcaccttcaccatcgccgtgggctgctggaccgagatgaagatggagacctggagcagcaacgacctggccaccgagagacccttcagccccagcgaggccaacttcagacacgtgggcgtgtgcagccacatggagtacccctgcagattccagaacgccagcgccaccacccaggagatcatcccccacagagtgttcgcccccgtgtgcctgaccggcgcctgccaggagaccctgctgagactgatccccccctgcctgagcgccgcccacagcgtgctgggcgcccaccccttcagcagactggacgtgctgatcgtgcccgccaacttccccagcctgggcatggccagacccagcaaggacaagaccggccacaccagcgacagcggcgccagcgtgatcaagcacggcctgaaccccgagaagatcttcatgcaggtgcactacctgaagggctacttcctgctgagattcctggccaagagactgggcgacgagacctacttcagcttcctgagaaagttcgtgcacaccttccacggccagctgatcctgagccaggacttcctgcagatgctgctggagaacatccccgaggagaagagactggagctgagcgtggagaacatctaccaggactggctggagagcagcggcatccccaagcccctgcagagagagagaagagccggcgccgagtgcggcctggccagacaggtgagagccgaggtgaccaagtggatcggcgtgaacagaagacccagaaagagaaagagaagagagaaggaggaggtgttcgagaagctgctgcccgaccagctggtgctgctgctggagcacctgctggagcagaagaccctgagccccagaaccctgcagagcctgcagagaacctaccacctgcaggaccaggacgccgaggtgagacacagatggtgcgagctgatcgtgaagcacaagttcaccaaggcctacaagagcgtggagagattcctgcaggaggaccaggtgggcgtgatcttccagcagatgggcatcctgtag

SEQ ID NO: 271663 - DNA, 1605 bp, Artificial Sequence
  derived and/or modified sequence
gttgtttctgaggagttcaggaatcagattgtacgtgaacttgtgactttgcctgcaaatcgttggagggagcagttagactattacgctcgctgcagccaggctcctggctgtggggaactcctctttgacactgacacttggagcttgcagataaggaagacaggggctcagacagctactgactttcctcatgctatcaggatatggtacaaaactaaacctgaagggcgatcggttacatggacctcagaccagagtggcaggccatgtgtttatactgtgggatctcccataaacaacagggccctttttccatgccaggagccacccgttgccatgtcaacatggcaggctacagttcgagcagctgcatcttttgttgttttaatgagtggggaaaattctgccaaaccaacgcagctttgggaagagtgctcaagctggtattactatgtaactatgccaatgccagcctccaccttcacaattgcagtgggatgctggacagaaatgaagatggagacatggtcatcaaatgatttggcaacagagagacccttctcaccttctgaggccaacttcaggcatgttggtgtttgcagtcacatggaatacccctgccgcttccagaatgcttctgccaccacccaggagatcattcctcatcgggtctttgcccctgtgtgcctcacgggtgcctgccaagagacccttctgcggctgatccctccttgcctctcagcagcacattctgttctgggagcacacccgttctctcggctggatgttctcatcgtccctgccaactttccaagtctggggatggccagacccagtaaagacaaaactggccacacaagtgactcgggagcatctgttatcaagcatggacttaatccggagaagatcttcatgcaggtgcattatttaaagggctacttccttcttcggtttcttgccaaaagacttggagatgaaacctatttttcatttttaagaaaatttgtgcacacatttcatggacagctgattctttcccaggatttccttcaaatgctactggagaacattccagaagaaaaaaggcttgagctgtctgttgaaaacatctaccaagactggcttgagagttccggaataccaaagccgctgcagagggagcgtcgcgccggggcggagtgcgggcttgcgcggcaagtgcgcgccgaggtcacgaaatggattggagtgaaccggagaccccgaaaacggaagcgcagggagaaggaagaggtgtttgaaaagcttcttccagaccagctggtcttgcttctggagcatctcttggagcagaagactctgagcccccgaactctgcaaagcctccagaggacataccacctccaggatcaggatgcagaggttcgccatcggtggtgtgaactcattgttaagcacaagttcacgaaagcctacaaaagtgtggagaggttccttcaggaggatcaggtaggtgtcatctttcagcagatggggattctgtaaaggctgtccctgcacttcacacaggaatccacgttctcagtatctctttcataacaaataattaaatctgttacagag

SEQ ID NO: 271664 - DNA, 1527 bp, Artificial Sequence
  derived and/or modified sequence
gtcgtgtcagaggagtttaggaatcagatagtccgtgagctcgtcactctgcctgccaatcggtggagagaacagcttgactactatgccagatgttctcaggcgcccggatgcggggagcttctatttgacacagacacatggagcctccagatcaggaaaacgggcgcccagactgcaaccgactttccccacgctatacggatctggtataagactaaaccggagggacgctcagtaacctggacatctgaccagtctggaagaccctgtgtgtatacagtagggtcgcctataaataatcgcgctctctttccatgtcaggaaccacccgttgcaatgagcacctggcaggccacagttagagccgccgcctcgtttgttgtgctgatgagtggagagaattccgcaaagcccacacagttatgggaagaatgcagctcctggtattactatgtgactatgcccatgccagccagcacttttacaattgctgtgggctgctggacggagatgaagatggagacctggtcttccaacgatttagctactgagcggcccttcagtccctcagaggcaaactttaggcatgtgggcgtctgttcccacatggagtatccttgtcggttccaaaacgccagcgccacaacgcaggaaatcatcccccatcgggtgttcgcccctgtgtgcctcacaggcgcatgtcaggagacattgctaaggctgattccaccgtgcctcagtgccgcccatagcgtcctcggtgctcatcctttctctaggcttgatgttctcatcgtgccggcgaactttccctcacttggcatggcccgtcccagcaaggataagactgggcatacgagcgactccggcgccagcgtgattaagcacggcctgaatcccgaaaagatctttatgcaggtgcattatctgaaaggttactttcttctcaggtttctggccaagagactgggtgacgaaacttatttctcttttctgaggaagttcgttcatacgtttcatggccagttgatattatcgcaggacttcctgcaaatgctccttgagaatatccctgaggaaaagaggctggagctcagcgtagagaacatctaccaggattggctggagtccagtggaatccctaagccactgcagagagagagacgcgccggagctgaatgcggtcttgctcgccaagtgcgtgctgaggtgacaaaatggatcggcgtcaatagaagacctcggaagagaaaaaggcgagagaaggaagaggttttcgagaagctcttacctgatcagctagtacttttgcttgaacatctgctggagcagaagactctgtcgcccaggactctgcaatccctgcagcgaacctatcacttgcaggatcaagatgctgaggtcaggcaccggtggtgcgagctcatcgtgaagcacaaatttacaaaagcttataaatctgtcgaacgctttctgcaagaagaccaagtgggagttatttttcagcagatggggatactatag

SEQ ID NO: 271665 - DNA, 1527 bp, Artificial Sequence
  derived and/or modified sequence
gtggtgtctgaggagttcaggaaccagatcgtgcgggagctggtgaccctgcctgccaaccgctggagggagcagctggactactatgcccgctgcagccaggcccctggctgtggggagctgctgtttgacacagacacctggagcctgcagatcaggaagacaggagcccagacagccacagacttcccccacgccatccgcatctggtacaagaccaagccagagggccgctctgtgacctggaccagtgaccagagcggccggccctgtgtgtacacagtgggcagccccatcaacaacagagccctcttcccctgccaggagccccctgtggccatgagcacctggcaggccaccgtgcgggccgccgccagctttgtggtgctgatgtctggagagaacagcgccaagcccacccagctgtgggaggagtgcagctcctggtactactacgtgaccatgcccatgcctgccagcaccttcaccatcgctgtgggctgctggacagagatgaagatggagacctggagcagcaatgacctggccacagagcggcccttcagccccagcgaggccaacttcagacatgtgggcgtgtgcagccacatggagtacccctgccgcttccagaatgccagcgccaccacccaggagatcatcccccaccgggtgtttgcccctgtgtgcctgaccggggcctgccaggagaccctgctgcggctcatccccccctgcctgtctgctgcccacagcgtgctgggcgcccaccccttcagccggctggatgtgctgattgtgcctgccaacttccccagcctgggcatggcccggcccagcaaggacaagacaggccacaccagtgacagcggggccagcgtcatcaagcacggcctgaaccctgagaagatcttcatgcaggtgcactacctgaagggctacttcctgctgcgcttcctggccaagaggctgggagatgagacctacttctccttcctgaggaagtttgtgcacaccttccacggccagctgatcctgagccaggacttcctgcagatgctgctggagaacatccctgaggagaagaggctggagctgtctgtggagaacatctaccaggactggctggagagcagcggcatccccaagcccctgcagcgggagaggagagctggagcagaatgtggcctggcccggcaggtgcgggcagaggtgaccaagtggattggagtgaacagaagacccaggaagaggaagaggcgggagaaggaggaggtgtttgagaagctgctgcctgaccagctggtgctgctgctggagcacctgctggagcagaagaccctgagccccaggaccctgcagagcctgcagaggacctaccacctgcaggaccaggatgctgaggtgcgccaccgctggtgtgagctgattgtgaagcacaagttcaccaaggcctacaagtctgtggagcgcttcctgcaggaggaccaggtgggcgtcatcttccagcagatgggcatcctgtag

SEQ ID NO: 271666 - DNA, 1527 bp, Artificial Sequence
  derived and/or modified sequence
gtggtgagcgaggagttccggaaccagatcgtgcgggagctggtgacactacccgccaatcgctggcgcgagcagctggactattacgcaaggtgtagtcaggcgccaggctgcggcgagttgttgttcgacactgacacttggtcactgcagatcaggaaaacaggtgctcagacggccacggactttccccacgcgattcgcatttggtataaaactaagccggagggccgatctgtcacatggacgagcgatcagagcggaagaccctgtgtctacactgtcggatctcccattaataatagggcgctgttcccctgccaagagcccccagtggccatgagcacctggcaggctacagtgagagccgccgcctcatttgttgtgcttatgagcggcgagaacagtgcaaaaccaactcagttgtgggaagagtgctcaagctggtattactacgttacaatgcctatgcctgcttccactttcacgatcgccgtgggatgttggactgaaatgaaaatggagacctggtcttccaacgatctggctaccgaaaggccttttagccccagcgaagccaatttcagacacgtcggcgtgtgctcccatatggagtacccatgccgcttccagaacgcaagcgcaaccacgcaggagatcattcctcaccgtgtcttcgcccccgtctgtctgacaggagcttgccaagagaccctcctacgacttatcccgccatgtttgagcgccgcccactccgtcctgggagcacaccctttctctagactggacgttctcattgtgccagccaacttccccagcctggggatggcaagacccagcaaggacaaaaccggacatacctctgacagcggagcatcggtcattaaacatggactcaatcccgaaaaaatctttatgcaggtgcactacctgaaaggctatttcctcctgcgatttcttgcaaagcggctaggggatgaaacctatttctctttcctgcggaagtttgtccacactttccacggacagctgattctgagccaggacttcctgcagatgctgctggagaatattcccgaagaaaaaagactcgagctgagcgtggagaatatttatcaggattggctcgaatctagtggtatccccaaaccactccagcgagaacggcgggcaggggctgagtgtggcttagcacgacaggttcgggccgaagtcactaagtggataggagtgaatagaaggccaaggaagcgaaagcggcgagagaaagaggaggtgttcgagaagctgctccctgaccaacttgtgctcttgcttgagcaccttctcgaacagaaaactttatcgcccaggacactgcaatccctgcagcgaacctaccatttgcaagaccaggatgcagaggtacgacacaggtggtgtgagttgatcgttaaacataagttcacaaaggcttacaaatcagtggagcgttttctgcaagaagatcaagtgggggtgatatttcagcaaatgggcattctgtag

SEQ ID NO: 271667 - DNA, 1527 bp, Artificial Sequence
  derived and/or modified sequence
gttgtgtcagaggagttccgaaatcagattgtccgggagctggtcactctgccggctaacaggtggcgggagcagttagactattacgctagatgttctcaggccccaggatgtggggaactcctgtttgacaccgacacttggtccctgcagatccgcaagaccggggctcagactgctacagacttcccgcacgctatccgcatctggtacaaaaccaaacctgaaggaaggagcgtcacatggacctctgaccagagcggccgtccatgcgtgtacaccgtggggagtcccattaataatagggccctgttcccatgccaggagcctcccgttgcaatgagtacatggcaggcgactgtgagggccgcagcctcttttgtggtgctcatgtccggcgagaactccgctaaacccacccaactgtgggaggagtgctccagttggtattactatgtaactatgccaatgcctgcttcaacgttcaccattgccgtaggatgttggactgagatgaaaatggaaacatggtccagcaacgacctggcgaccgaaaggcccttctccccctctgaagccaattttagacatgtgggcgtttgctcacacatggaatatccatgtcgattccagaacgcatctgctacaacccaagagatcatccctcacagggtcttcgctcctgtctgtctgactggagcctgccaggagaccctgctgcggcttatacccccttgcttatctgcagctcattccgtcctcggagctcacccattttcgaggctggacgtcctgatcgtgcctgctaactttccttcactggggatggctcgccctagcaaggacaaaaccggccataccagcgactccggcgctagcgtgatcaagcacggcctgaatcctgaaaagatcttcatgcaggtacattatctaaagggctactttctgctgcgtttcctcgccaaaagactcggagacgaaacttacttctcttttctgaggaagttcgtccacacattccacggccaacttatactgagccaagactttctgcagatgcttctcgagaacatcccggaagagaaacgcctggagctgtccgtggaaaacatttatcaggattggctggagtcttccgggatcccaaagcccttgcaaagagaacggagagctggtgcagagtgtggcctcgcccgtcaggttcgagcagaggtaaccaagtggattggagttaaccgcagaccacggaaaagaaaaagaagagaaaaggaagaagtctttgagaaactgctgcccgatcagctggtgctcctcctcgagcacctcctggagcagaaaacgttgtctcccagaaccctgcagtccctccagcgaacttatcatcttcaggatcaggacgcggaggtgcggcatagatggtgcgagctaatagtgaagcataaatttaccaaggcttataagtccgtggagagatttctgcaggaggaccaggtcggtgtaatctttcagcagatgggtatcctttag

SEQ ID NO: 271668 - protein, 205 aa, Artificial Sequence
  derived and/or modified sequence
MDTGLSSQPSEEDQSTMPEVKDLSEALPETSMDPITGVGVVASRNRAPTGYDVVAQTADGVDADLWKDGLFKSKVTRYLCFTRSFSKENSHLGNVLVDMKLIDIKDTLPVGFIPIQETVDTQEVAFRKKRLCIKFIPRDSTEAAICDIRIMGRTKQAPPQYTFIGELNSMGIWYRMGRVPRNHDSSQPTTPSQSSAASTPAPNLP

SEQ ID NO: 271669 - protein, 304 aa, Artificial Sequence
  derived and/or modified sequence
MDTGLSSQPSEEDQSTMPEVKDLSEALPETSMDPITGVGVVASRNRAPTGYDVVAQTADGVDADLWKDGLFKSKVTRYLCFTRSFSKENSHLGNVLVDMKLIDIKDTLPVGFIPIQETVDTQEVAFRKKRLCIKFIPRDSTEAAICDIRIMGRTKQAPPQYTFIGELNSMGIWYRMGRVPRNHDSSQPTTPSQSSAASTPAPNLPRHISLTLPATFRGRNSTRTDYEYQHSNLYAISAMDGVPFMISEKFSCVPESMQPFDLLGITIKSLAEIEKEYEYSFRTEQSAAARLPPSPTRCQQIPQS

SEQ ID NO: 271670 - protein, 214 aa, Artificial Sequence
  derived and/or modified sequence
MEAPAHGLEPCGWGACWLVCYTVGRRAGSWLRSWAGPPWRFPETKPSVSSVQGRRLEARRRVAQTADGVDADLWKDGLFKSKVTRYLCFTRSFSKENSHLGNVLVDMKLIDIKDTLPVGFIPIQETVDTQEVAFRKKRLCIKFIPRDSTEAAICDIRIMGRTKQAPPQYTFIGELNSMGIWYRMGRVPRNHDSSQPTTPSQSSAASTPAPNLPR

SEQ ID NO: 271671 - DNA, 618 bp, Artificial Sequence
  derived and/or modified sequence
atggacaccggcctgagcagccagcccagcgaggaggaccagagcaccatgcccgaggtgaaggacctgagcgaggccctgcccgagaccagcatggaccccatcaccggcgtgggcgtggtggccagcagaaacagagcccccaccggctacgacgtggtggcccagaccgccgacggcgtggacgccgacctgtggaaggacggcctgttcaagagcaaggtgaccagatacctgtgcttcaccagaagcttcagcaaggagaacagccacctgggcaacgtgctggtggacatgaagctgatcgacatcaaggacaccctgcccgtgggcttcatccccatccaggagaccgtggacacccaggaggtggccttcagaaagaagagactgtgcatcaagttcatccccagagacagcaccgaggccgccatctgcgacatcagaatcatgggcagaaccaagcaggcccccccccagtacaccttcatcggcgagctgaacagcatgggcatctggtacagaatgggcagagtgcccagaaaccacgacagcagccagcccaccacccccagccagagcagcgccgccagcacccccgcccccaacctgccctag

SEQ ID NO: 271672 - DNA, 915 bp, Artificial Sequence
  derived and/or modified sequence
atggacaccggcctgagcagccagcccagcgaggaggaccagagcaccatgcccgaggtgaaggacctgagcgaggccctgcccgagaccagcatggaccccatcaccggcgtgggcgtggtggccagcagaaacagagcccccaccggctacgacgtggtggcccagaccgccgacggcgtggacgccgacctgtggaaggacggcctgttcaagagcaaggtgaccagatacctgtgcttcaccagaagcttcagcaaggagaacagccacctgggcaacgtgctggtggacatgaagctgatcgacatcaaggacaccctgcccgtgggcttcatccccatccaggagaccgtggacacccaggaggtggccttcagaaagaagagactgtgcatcaagttcatccccagagacagcaccgaggccgccatctgcgacatcagaatcatgggcagaaccaagcaggcccccccccagtacaccttcatcggcgagctgaacagcatgggcatctggtacagaatgggcagagtgcccagaaaccacgacagcagccagcccaccacccccagccagagcagcgccgccagcacccccgcccccaacctgcccagacacatcagcctgaccctgcccgccaccttcagaggcagaaacagcaccagaaccgactacgagtaccagcacagcaacctgtacgccatcagcgccatggacggcgtgcccttcatgatcagcgagaagttcagctgcgtgcccgagagcatgcagcccttcgacctgctgggcatcaccatcaagagcctggccgagatcgagaaggagtacgagtacagcttcagaaccgagcagagcgccgccgccagactgccccccagccccaccagatgccagcagatcccccagagctag

SEQ ID NO: 271673 - DNA, 770 bp, Artificial Sequence
  derived and/or modified sequence
gtgatttgactctggctggtcaccaggtaatctgtccaaagttcagaaggtgtcaggatgctatcctgaggctccacagtgacagcctctcagtctgtgcactgtcccccacgggtggccccaaagccagctgcccatttaactgggcacagcatggacactggcctcagctctcagccttctgaggaggaccagtccaccatgcctgaagtcaaagacctctcagaagccttgccagaaacgtcaatggatcccatcacgggagtcggggtggtggcttctcggaaccgagccccgacaggctatgacgtagttgcacagacagcagatggtgtggatgctgacctctggaaagacggcttatttaaatccaaggttaccagatacctgtgtttcacaagatcattttccaaagaaaatagtcatctggggaacgtgttagtagatatgaagctcattgacatcaaggacacactgcctgtgggcttcatcccaattcaggagacggtggacacacaggaagtggcttttaggaagaagaggctgtgcattaaatttattccacgggattcaacggaagctgcgatttgtgacattcggatcatgggccggaccaagcaggccccgcctcagtacacgtttattggggaactgaacagcatggggatctggtatcgaatgggcagagtaccaagaaatcatgactcatctcaacccacaacgccttcccagtcatcagctgcctccaccccagcccccaaccttcccag

SEQ ID NO: 271674 - DNA, 1051 bp, Artificial Sequence
  derived and/or modified sequence
aatctgtccaaagttcagaaggtgtcaggatgctatcctgaggctccacagtgacagcctctcagtctgtgcactgtcccccacgggtggccccaaagccagctgcccatttaactgggcacagcatggacactggcctcagctctcagccttctgaggaggaccagtccaccatgcctgaagtcaaagacctctcagaagccttgccagaaacgtcaatggatcccatcacgggagtcggggtggtggcttctcggaaccgagccccgacaggctatgacgtagttgcacagacagcagatggtgtggatgctgacctctggaaagacggcttatttaaatccaaggttaccagatacctgtgtttcacaagatcattttccaaagaaaatagtcatctggggaacgtgttagtagatatgaagctcattgacatcaaggacacactgcctgtgggcttcatcccaattcaggagacggtggacacacaggaagtggcttttaggaagaagaggctgtgcattaaatttattccacgggattcaacggaagctgcgatttgtgacattcggatcatgggccggaccaagcaggccccgcctcagtacacgtttattggggaactgaacagcatggggatctggtatcgaatgggcagagtaccaagaaatcatgactcatctcaacccacaacgccttcccagtcatcagctgcctccaccccagcccccaaccttcccaggcacatctccctaacacttcctgccaccttccgaggcaggaacagcacccggacggactacgagtaccagcactccaatttgtatgccatatcagcaatggatggtgtgccttttatgatttcagagaagttttcttgtgttccagaaagtatgcagccctttgatctcctgggaatcaccatcaaatctctagcagaaatcgaaaaagagtacgagtacagcttccgcacagagcagagcgcagccgccaggctcccgcccagccccaccaggtgtcagcagatcccgcagtcctgaggagccagcgg

SEQ ID NO: 271675 - DNA, 618 bp, Artificial Sequence
  derived and/or modified sequence
atggatacaggactgagttcccagccctccgaggaggaccaaagtacaatgccagaagtcaaggacctctccgaggccctgccggaaacgagtatggaccccatcaccggagtgggagtggtcgcttcaagaaatagggccccaaccggctacgatgtggttgcccagacagctgatggagtcgatgccgatttatggaaagacggtctctttaaatctaaagtgacacgctatctgtgcttcaccaggtccttttctaaggaaaactcgcaccttggtaatgttttagtcgacatgaagttaattgatattaaagatacattgccggtgggctttatcccgatccaggagacagtagatactcaggaagttgctttcaggaagaaacgcctctgtattaaatttattccccgggacagcactgaggctgccatttgtgacatcagaatcatgggtagaacaaaacaggccccacctcagtatacttttatcggagaattgaacagcatggggatttggtataggatgggccgagtccctcgtaaccacgatagctcccagcctaccactccttcccaaagctctgctgcaagcacacctgcgcccaacctcccctag

SEQ ID NO: 271676 - DNA, 915 bp, Artificial Sequence
  derived and/or modified sequence
atggatactggactatcctcccaaccttccgaggaggatcagagtaccatgcccgaggtaaaggatcttagtgaagccttgccagagaccagcatggaccctatcaccggagtgggggtggtggcctcacggaatagagctccaactggttacgatgtggtggcccagacagcagatggggtcgacgcggatctttggaaggacggcctattcaagagtaaagtaacgcggtatctttgttttactaggtcattctccaaggagaattcccacctggggaatgtgctcgttgatatgaagctgatagacataaaggacaccttgccggtaggttttattcccatccaggagactgtcgatacacaagaagtggcatttcgaaaaaaaagactgtgcatcaaatttatcccaagagatagcacagaagctgcgatctgtgatataaggattatgggccgcaccaaacaagctccaccgcagtacacatttatcggagagctcaattctatgggcatctggtaccggatgggtcgggtcccccgcaaccacgatagttcgcagcctaccactccaagccagagtagcgccgcctccacccctgcaccaaatctaccgcgtcatatatccttaacattgcccgccacgttcaggggtcgaaattcgactcggacagactatgaataccagcactccaacctctacgcaatttccgccatggatggggttccattcatgatttcggagaagttcagctgcgtcccagaaagtatgcaaccatttgatctcctgggcattacaatcaaatcccttgccgagattgagaaggagtacgaatactcttttcgcactgagcagagcgccgcggctcggttacccccatcccctaccagatgccagcaaattccccagtcatag

SEQ ID NO: 271677 - DNA, 618 bp, Artificial Sequence
  derived and/or modified sequence
atggacaccggcctgagcagccagcccagcgaggaggaccagagcaccatgcctgaggtgaaggacctgtctgaggccctgcctgagacctccatggaccccatcaccggggtgggcgtggtggccagcaggaacagagcccccaccggctatgatgtggtggcccagacagcagatggagtggatgctgacctgtggaaggatggcctcttcaagagcaaggtgacccgctacctgtgcttcaccaggagcttcagcaaggagaacagccacctgggcaatgtgctggtggacatgaagctgattgacatcaaggacaccctgcctgtgggcttcatccccatccaggagaccgtggacacccaggaggtggccttcaggaagaagaggctgtgcatcaagttcatcccccgggacagcacagaagctgccatctgtgacatccgcatcatgggccgcaccaagcaggccccaccccagtacaccttcatcggggagctgaacagcatgggcatctggtacaggatgggccgggtgcccagaaatcatgacagcagccagcccaccacccccagccagagcagcgctgccagcaccccagcccccaacctgccctag

SEQ ID NO: 271678 - DNA, 915 bp, Artificial Sequence
  derived and/or modified sequence
atggacaccggcctgagcagccagcccagcgaggaggaccagagcaccatgcctgaggtgaaggacctgtctgaggccctgcctgagacctccatggaccccatcaccggggtgggcgtggtggccagcaggaacagagcccccaccggctatgatgtggtggcccagacagcagatggagtggatgctgacctgtggaaggatggcctcttcaagagcaaggtgacccgctacctgtgcttcaccaggagcttcagcaaggagaacagccacctgggcaatgtgctggtggacatgaagctgattgacatcaaggacaccctgcctgtgggcttcatccccatccaggagaccgtggacacccaggaggtggccttcaggaagaagaggctgtgcatcaagttcatcccccgggacagcacagaagctgccatctgtgacatccgcatcatgggccgcaccaagcaggccccaccccagtacaccttcatcggggagctgaacagcatgggcatctggtacaggatgggccgggtgcccagaaatcatgacagcagccagcccaccacccccagccagagcagcgctgccagcaccccagcccccaacctgcccaggcacatcagcctgaccctgcctgccaccttccggggcaggaacagcaccaggacagattatgagtaccagcacagcaacctgtatgccatcagcgccatggatggagtgcccttcatgatcagcgagaagttcagctgtgtgcctgagagcatgcagccctttgacctgctgggcatcaccatcaagagcctggccgagattgagaaggagtatgagtacagcttcagaacagagcagagcgctgctgcccggctgccccccagccccacccgctgccagcagatcccccagagctag

SEQ ID NO: 271679 - DNA, 618 bp, Artificial Sequence
  derived and/or modified sequence
atggacaccggcctgagcagccagcccagcgaggaggaccagagcaccatgccagaggttaaagatctgagtgaggccctcccggagacctccatggatcctattaccggagtgggcgtcgtcgcaagtcgaaaccgagctccaacaggatacgacgtcgttgcgcaaaccgccgacggcgtggacgcagatctgtggaaggacggactgttcaagagtaaagtgacaagatatctttgtttcacaagaagcttttcgaaagagaactcccatctgggtaatgtactggttgacatgaagcttatcgatattaaagatactctgcctgttggattcatacccattcaggagacagtagacacacaggaggtggcattccgtaagaaacggctctgcatcaaattcattccaagagatagcactgaggcagccatatgcgacattcgtattatgggaagaactaagcaagcaccgccccagtatacatttataggcgaactcaatagtatgggcatttggtatagaatggggagagtccctcgcaatcatgactctagccagcctacaacgcccagtcagtcaagcgcggcatctacccccgcccccaatctaccttag

SEQ ID NO: 271680 - DNA, 915 bp, Artificial Sequence
  derived and/or modified sequence
atggacaccggcctgagcagccagcccagcgaggaggaccagagcaccatgccggaagttaaagatctgtccgaagccctccccgagacctccatggatcccataactggagtaggggttgtagcgagcaggaatagggcacctacagggtatgatgtcgtggcacagacagcagacggagtggatgccgacctgtggaaggacggcctcttcaaatccaaggtcacccgctacttatgttttacaaggagcttctcaaaagagaattcccacctgggaaatgttctagttgacatgaagctcatcgacattaaagataccctcccagtcggcttcattccaattcaggagaccgttgacactcaggaagtggctttccgaaaaaagcgactctgcattaagtttatcccacgcgattccactgaagctgccatctgcgacattaggattatgggtaggactaagcaggctccccctcagtataccttcattggtgaacttaacagcatgggcatttggtataggatgggaagagtgccgcgtaaccacgactccagccagcccaccacaccctctcagtcttcagccgcgagtaccccggcacctaatctgccccgccacatatccctgacgctgccagccacattccgggggcgcaattccaccagaacagactatgaataccagcatagcaatctgtacgcaatcagtgctatggacggggtaccttttatgatctctgaaaagttctcttgtgtgccagaaagtatgcagccgttcgacctactgggcatcacaatcaagtctctcgccgaaatcgaaaaagaatacgagtatagcttccgcacagaacagtcggcagccgctaggctgccgcctagtcctactagatgccagcagataccccaaagctag

SEQ ID NO: 271681 - DNA, 618 bp, Artificial Sequence
  derived and/or modified sequence
atggacactgggctgagtagccaaccttccgaggaagaccagtctaccatgcccgaggtgaaagacctttccgaggctctgcctgaaacaagcatggacccaatcaccggtgtgggcgttgtggcttcaagaaaccgagccccaacggggtacgacgtggtagcacagactgctgatggggtggatgctgacctgtggaaggacggcctcttcaaatccaaggtaactcgctacttatgctttactaggagttttagtaaagagaactcccacctgggaaacgtgctggtcgacatgaagctgatagatataaaagatacactacctgtcggattcattccaatacaggaaaccgtggacacacaggaagtagcatttagaaagaagcgcctttgtatcaagttcatccctagggacagtactgaggccgcaatctgcgatataagaattatgggaaggactaaacaagcacccccacagtacacattcattggggagctcaattccatgggcatatggtacagaatggggagggtgcctcgtaaccatgatagctcccagccaaccaccccttcacagtcctccgcagcgtcgaccccagcccctaacctgccatag

SEQ ID NO: 271682 - DNA, 915 bp, Artificial Sequence
  derived and/or modified sequence
atggacactggcctcagttcacagcctagcgaagaggaccaatccacaatgcctgaggttaaggatctctctgaagcactccctgaaacttcgatggatccaatcaccggagttggagtggtcgcgtccaggaatcgggcacctacggggtacgacgtggtggcgcagacggcggatggtgttgatgctgatctatggaaagacgggctgttcaagagtaaggtgacaaggtacctgtgtttcacccggtccttctcaaaggaaaattctcacctcggcaatgtgctcgtggatatgaagttgattgatattaaagatactctgcccgtgggcttcattcctatacaagagaccgtggacacccaggaggttgcattcagaaagaaaaggctttgcatcaagtttatccctagggatagcactgaggcagccatttgcgacattcgtatcatgggacgaactaaacaagccccaccacagtacacttttatcggagaactgaactcaatggggatctggtacaggatgggcagggtccctaggaaccacgactctagccaaccaactactcccagccagtcttcggcagcttcaacacccgcacccaatctgccccgacatatctccttgaccctgccggctaccttccggggaagaaacagcacccgcacagactatgagtaccaacacagcaacctctacgccatttccgctatggatggtgtaccctttatgatctctgagaagttttcttgcgtgcccgaatctatgcaaccctttgacctccttggtattaccatcaagtctctggccgaaattgagaaggaatatgaatacagcttccgtaccgagcagagcgccgcagctagactcccccctagccccaccaggtgtcaacagatcccacagagttag

SEQ ID NO: 271683 - protein, 475 aa, Artificial Sequence
  derived and/or modified sequence
MAELQMLLEEEIPSGKRALIESYQNLTRVADYCENNYIQATDKRKALEETKAYTTQSLASVAYQINALANNVLQLLDIQASQLRRMESSINHISQTVDIHKEKVARREIGILTTNKNTSRTHKIIAPANMERPVRYIRKPIDYTVLDDVGHGVKHGNNQPARTGTLSRTNPPTQKPPSPPMSGRGTLGRNTPYKTLEPVKPPTVPNDYMTSPARLGSQHSPGRTASLNQRPRTHSGSSGGSGSRENSGSSSIGIPIAVPTPSPPTIGPAPGSAPGSQYGTMTRQISRHNSTTSSTSSGGYRRTPSVTAQFSAQPHVNGGPLYSQNSISIAPPPPPMPQLTPQIPLTGFVARVQENIADSPTPPPPPPPDDIPMFDDSPPPPPPPPVDYEDEEAAVVQYNDPYADGDPAWAPKNYIEKVVAIYDYTKDKDDELSFMEGAIIYVIKKNDDGWYEGVCNRVTGLFPGNYVESIMHYTD

SEQ ID NO: 271684 - DNA, 1428 bp, Artificial Sequence
  derived and/or modified sequence
atggccgagctacaaatgctcttggaagaggagatcccatcgggcaaaagagccctgatcgaatcttaccagaatctgactcgggtcgcagactactgtgaaaacaactacatccaggccaccgacaaaagaaaggctctcgaagagacaaaagcttatacaacgcagtccctcgcgtccgtcgcatatcagattaatgccctcgcaaacaacgtgctacagcttctcgacatccaggctagccagctgaggaggatggaatcctctattaatcacattagtcagactgtggatattcacaaggagaaggtagcccgtagagagataggcatcctcaccaccaacaagaacactagccgaacacacaagattatcgctcctgccaacatggaacgccccgtgcggtacatcaggaagcccattgattacaccgttctcgacgacgtagggcatggtgtcaaacacggaaataatcagcctgccaggacaggcactcttagcagaactaatcctcctacacagaagcctccctcccctccaatgagcggtcgaggaaccctgggtcggaacaccccctataagacactggaaccggtgaaacctccaacagtgccaaacgattacatgaccagtcctgcacgattgggcagccagcacagccctggtcgcactgctagtcttaatcagcggccccggactcactctggatcatcaggaggctccggatccagagaaaacagtggttcctcttccattggcatccctatcgccgtgcccacaccctcacccccgacaataggtcctgcaccagggtcagcaccgggctcccagtacggaaccatgacaagacagataagcagacacaattctaccacatcttctaccagctcaggaggttataggcggaccccatctgtgactgcccagttctccgcgcagccccatgtgaacggcggccctctgtatagccagaattcaattagcatcgcccctccaccaccccctatgccacagttgacacctcagatccccctcaccgggttcgtcgctagggtgcaagaaaatatcgctgactctcccacgccacctccaccacctccaccagatgacatccctatgttcgatgactctcccccccccccacccccaccccccgtcgactacgaagacgaagaggcagcagtagtgcagtataacgatccatatgctgatggagacccagcctgggcgcctaaaaactatatcgaaaaagtcgtggccatctatgactacaccaaagataaagacgatgaactgtctttcatggagggtgctatcatttacgtcatcaaaaaaaatgatgatgggtggtatgagggagtatgtaaccgcgtgaccggactttttccaggaaactatgtggaatcaatcatgcattacacagactag

SEQ ID NO: 271685 - DNA, 1428 bp, Artificial Sequence
  derived and/or modified sequence
atggccgagctgcagatgctgctggaggaggagatccccagcggcaagagggccctgattgagagctaccagaacctgaccagggtggccgactactgtgagaacaactacatccaggccacagacaagaggaaggccctggaggagaccaaggcctacaccacccagagcctggcctctgtggcctaccagatcaatgccctggccaacaacgtgctgcagctgctggacatccaggccagccagctgcggaggatggagagcagcatcaaccacatcagccagacagtggacatccacaaggagaaggtggcccggcgggagatcggcatcctgaccaccaacaagaacaccagcaggacccacaagatcatcgccccagccaacatggagaggcctgtgcgctacatcaggaagcccatcgactacacagtgctggatgatgtgggccatggagtgaagcacggcaacaaccagcctgccaggacaggcaccctgagcaggaccaacccccccacccagaagccacccagcccccccatgagcggccggggcaccctgggcaggaacaccccctacaagaccctggagcctgtgaagcccccaacagtgcccaatgactacatgaccagccctgcccggctgggcagccagcacagccctggccgcacagccagcctgaaccagaggcccaggacccacagcggcagcagcggcggcagcggcagcagagaaaattctggcagcagcagcatcggcatccccatcgctgtgcccacccccagcccccccaccatcggccctgcccctggcagcgcccctggcagccagtatggcaccatgacccggcagatcagccgccacaacagcaccaccagcagcaccagcagcggcggctacagaaggaccccatctgtgacagcccagttcagcgcccagccccacgtgaatggaggccccctgtacagccagaacagcatcagcatcgcccctcctcctccacccatgccccagctgaccccccagatccccctgaccggctttgtggcccgggtgcaggagaacattgctgacagccccaccccacctcctcctcctcctccagatgacatccccatgtttgatgacagccccccacctcctcctcctcctcctgtggactatgaagatgaggaggccgctgtggtgcagtacaatgacccctatgcagatggagaccctgcctgggcccccaagaactacatcgagaaggtggtggccatctatgactacaccaaggacaaggatgatgagctgtccttcatggagggcgccatcatctacgtgatcaagaagaatgatgatggctggtatgaaggagtgtgcaacagagtgacaggcctcttccctggcaactacgtggagagcatcatgcactacacagactag

SEQ ID NO: 271686 - DNA, 1428 bp, Artificial Sequence
  derived and/or modified sequence
atggccgagctgcagatgctgctggaggaggagatccccagcggcaagcgagcacttatcgaatcatatcaaaatttgacaagagtcgctgactattgtgaaaataattatatccaggccaccgataagaggaaagccctagaggaaaccaaggcctataccacccagagcctggcatccgttgcatatcagataaatgcgcttgcaaataatgtactccagctccttgatattcaggcttcacaactgcggcgaatggagtctagcatcaaccatatctcacagacggtggacatacacaaagagaaagtagcaaggcgggagatcggcattctgaccacaaataagaatactagccggactcacaagattatcgccccagccaacatggagaggcctgttcgttacattcggaagcccatcgattacaccgtgcttgacgacgttggccatggagtcaagcacggcaacaatcaacctgctcggacagggaccttgagcagaaccaatcctcctactcagaagccccccagccccccgatgtcaggccgtggcactctgggacgcaacactccatacaaaaccctggagcccgtcaagcccccgacagtgcctaacgattacatgacatccccggcaagactgggatcacagcattcgcctggacgcaccgcaagtctcaaccagagacctcgcacccatagtggcagcagcggcggctccggctctcgagaaaattctggctcaagcagtattggaatccccattgccgttccgactccatcccccccgaccattggcccagctcccgggagtgcccctggttcacagtatgggactatgactcgccagatctcgcggcacaacagcacgacaagctcaaccagctcagggggctatcgtaggactcccagcgtcacggcccagttctcggcgcagccgcatgtgaacggaggaccgctctattcccagaatagtatatctatcgctcccccccctccaccaatgccccagctgactcctcagatccccttaactggctttgtggccagggtccaagaaaacatcgccgacagtcctacaccaccccctccacccccgcccgatgatatcccaatgtttgatgacagtccccctccccctccccctccacccgtggactacgaagacgaagaagcggcagttgtgcagtacaatgacccctacgcagacggagatcccgcctgggcaccaaaaaattacatagagaaggtggttgccatatacgattataccaaagacaaggacgatgaactcagcttcatggaaggcgctattatatacgtgatcaagaagaacgatgacggatggtatgagggcgtttgcaaccgggtcaccggactttttcctggaaattacgttgaatctattatgcattacaccgactag

SEQ ID NO: 271687 - DNA, 1428 bp, Artificial Sequence
  derived and/or modified sequence
atggcagaactgcagatgctgctggaggaggaaatcccaagcggcaaacgggcattgatcgagagctatcagaatctcactagggtggccgactattgtgaaaataattatatccaagccactgataaacgcaaagctcttgaagaaacaaaggcttacactacccagtctctggcatctgtggcataccagattaacgccctagccaacaacgttcttcagttactggatatccaagcctcacagcttaggcgcatggagagttcaatcaatcatatctcccagactgtggacatccacaaggaaaaagtggcacgtcgggagattggtattctgacgactaataaaaacacctctcgcacgcataaaatcatcgctcccgctaatatggaacggcctgttcgttacattcggaagcctatagattacactgtcctggacgacgtcggtcacggcgtgaaacacggcaacaatcagccagccagaactggcacgctgagtcgcacaaacccacccacccagaagcctccgtctccaccgatgtccggtcgaggcacccttgggaggaacacaccgtacaaaacgctggaacccgttaaacccccaacagtgcctaacgactacatgacgtcacccgctcggcttggatcacagcattctcccggtaggacggcgtccctgaaccagagacccaggactcattctggatcctctgggggtagtggcagtcgagagaactcgggcagctcctctatcggcatccctatcgcggtccccactccctcacctcctactataggccctgcacctgggagcgcccctggttcccagtacggaactatgacgcgccagatcagccggcataactccaccacctcaagcacatcaagcggcggttaccggcgaactcctagcgttaccgcccagttttccgcccagccgcatgtaaacggcggacctctgtacagccagaactccatttcaatagcccctccccctccacccatgccccaactgactcctcagatccctttgaccgggtttgtggctcgcgtgcaggagaacatcgctgacagccctactccacctcctccacccccaccagacgacatccctatgtttgacgattccccacccccacccccaccaccccctgttgattacgaggacgaggaggctgctgttgttcagtacaatgatccatatgcggatggcgatcctgcctgggccccaaagaattacattgagaaagtggtcgccatatacgattacactaaagacaaagacgatgagttatccttcatggagggagccataatttatgtgatcaaaaagaacgatgacggctggtatgagggagtctgcaatcgtgtgactgggttatttcctggcaactatgtcgaatccatcatgcactacactgattag

SEQ ID NO: 271688 - DNA, 3515 bp, Artificial Sequence
  derived and/or modified sequence
ggagggcgggtaggcggtttgtatccgggctgtgaggtgctcggagcctcggcggaccttgctgcctctgtctctttaacgcgagaggaagcgatgcagaggggtggaaaatggcagagctgcagatgttactagaggaggagatcccgtctggcaagagggcgctgatcgagagttaccagaacctgactcgggtggcagactactgtgaaaacaactacatacaggctacagacaagagaaaagctttagaggagaccaaagcctatacaacccaatctctagctagtgttgcttatcaaataaatgcattggccaacaatgtactccagttgctggatatccaagcctctcagcttcggagaatggagtcttccatcaatcatatctcacagactgtggatattcataaggagaaagtggcacgaagagagattggtattttgacaacaaataagaatacatcaagaactcacaaaataatagcacctgcgaatatggagcgccctgtaaggtatattcggaaacctatcgattacacagttctggatgatgtgggccatggtgtcaagcatggaaataaccagcctgcaagaactggcacactgtcgagaacaaatcctcctactcagaaaccgccaagtcctcccatgtcaggccggggaacactgggacggaatactccttataaaaccctggaacctgttaaacccccaacagttcctaatgactatatgaccagtcctgctaggcttggaagtcagcatagtccaggcaggacagcatctttaaatcagagaccaaggacacacagtggaagtagtggaggaagtggaagtcgagaaaacagtggtagcagtagtattggcattcccattgctgtgcctacaccttcgccacccactattggaccagccccgggctcagctcctggttcccagtatggcacaatgaccaggcagatatctcgacacaactctactacttcttcgacatcttctggtggatacagacgaactccctctgtgactgctcaattttctgctcagcctcatgttaatggaggtccactttattctcaaaattcaatttctattgctccaccccctccccctatgcctcagttgactccacagatacctctcacaggcttcgtggccagggtgcaggaaaacattgctgatagtccaactccaccgccaccacctccaccagatgacattcccatgtttgatgactctccacctcccccaccaccaccaccagtggattatgaagatgaggaggctgcagtagttcagtataatgatccatatgcagatggggatcctgcttgggcccccaagaattatattgagaaagttgttgcaatatatgattatacaaaagacaaggatgatgagctgtcatttatggagggtgcaatcatttatgttataaagaagaatgatgatggctggtatgaaggagtctgcaatcgagtgactggtctgttccctgggaactatgttgaatcaatcatgcactatactgattaatttttttttttcttttgaagtagattcttattactcagtcatactgtgggactattatggttaacagaactgtcttaatatgttttaaaatgtgcccatattttcagaacatgctgttttattggtaaattgaatgtctacctgtaagcataaatctttgaggcagtttatgtattgctgaatagcaatttatacaagaagctgtccataactgattatgcttatgtacttacttacacatttttaactttatgaccagcctaaatattctgggggaagtggggtataatatttaacgaatcatgattcagattgtaccattacatgtttcagtgcagcatggttactaacgctatgtcagactaatattaaaatcagaaaatttaaatgctggtgctggtcagactttttttgttagattctctcatttaaaaaaaatactgtttgtttaaagcatgcataaaaatttatgtattgaaatatacttaaaaattcaagatgcttcccatttgtgtaatatttacctggaggactcgtacttaggtgtcttaacgtgaattgagtctccaaggtctccatgtgaaacaagcaaaaagagaattatctgtaatgttgtaatttgtacctaagttttttaatgagtgaaatttgcattataaactttttccattcataaatacataagtgaaccaaaggtttttgtcctttccttcactgatttgctttaaaaaaaataaaagataatgatttattgcagaattatgattctattttctcaatatgttaacttggaaaaaaattttagccttatcttaatctgtcccaacagcaatgtgacggatttttgcagattcaaaatctgcaatggttatttacaagtcaatctactgaattccttttttaaataatcttttgaaactaagaaaatgtgtcaaattgtgtgcattcattctgtaggtaaaattcttaaggattgccatgtcagtccttcagttgtacagtgaactgttgtacactggttcaatgaaaggaagttaaaagtaccttttacatattgtaaaagtggatacagttgatttgtgagtaggcactctttaatccattacctggcactagcaacattagaattttaaaataaaataattgggaaagaaggtgggtcatgtattaatcagtgaacagagatttacctaaccaacagacttggattgtcttttgacataatcaaaatgcaacacatgcactttgtgtgtctcctcttaattgaagggagggctgagggatgttttctcttcttgtcttgtgtataattctctattgcttaggatattaaagtagagcactcaagtgtgggtttctgtgttattgaggatttgtttggaattcaaattacagttatgtactggatgctacagacttataacagcatagtgaatggtaagactagtgcaaaacagttatttctgaaaattaaagaccattattgctaccaaatcaatgtgactatttcatatgcattttgcctttgttaattttaaacaaacaaagtatcattagtgatcagctagctaccttctactttccatttttcaagtggattgttctcttaatttgtatataacctgttgtctaaattttatgtacagtcttttataataaaccattctcctatatgaaattttggatactgttaaaatataactcatgtggacttcaatgcagacttcacatttttctgacctttactcctacggtaaatcaagacaaaccatttgaattttaacattggttatttatttgtgtaatggccttacatgtggatattaacagtgtaaacaataccacatataaccatcaagataccttgattataatttataggactagaatgacagattcaggtggtttattaattacatttaaaaagttttctgaaaaaacttttgcaataaaaaaaaataaattgcccatcaataa

SEQ ID NO: 271689 - DNA, 1428 bp, Artificial Sequence
  derived and/or modified sequence
atggccgagctgcagatgctgctggaggaggagatccccagcggcaagagagccctgatcgagagctaccagaacctgaccagagtggccgactactgcgagaacaactacatccaggccaccgacaagagaaaggccctggaggagaccaaggcctacaccacccagagcctggccagcgtggcctaccagatcaacgccctggccaacaacgtgctgcagctgctggacatccaggccagccagctgagaagaatggagagcagcatcaaccacatcagccagaccgtggacatccacaaggagaaggtggccagaagagagatcggcatcctgaccaccaacaagaacaccagcagaacccacaagatcatcgcccccgccaacatggagagacccgtgagatacatcagaaagcccatcgactacaccgtgctggacgacgtgggccacggcgtgaagcacggcaacaaccagcccgccagaaccggcaccctgagcagaaccaacccccccacccagaagccccccagcccccccatgagcggcagaggcaccctgggcagaaacaccccctacaagaccctggagcccgtgaagccccccaccgtgcccaacgactacatgaccagccccgccagactgggcagccagcacagccccggcagaaccgccagcctgaaccagagacccagaacccacagcggcagcagcggcggcagcggcagcagagagaacagcggcagcagcagcatcggcatccccatcgccgtgcccacccccagcccccccaccatcggccccgcccccggcagcgcccccggcagccagtacggcaccatgaccagacagatcagcagacacaacagcaccaccagcagcaccagcagcggcggctacagaagaacccccagcgtgaccgcccagttcagcgcccagccccacgtgaacggcggccccctgtacagccagaacagcatcagcatcgcccccccccccccccccatgccccagctgaccccccagatccccctgaccggcttcgtggccagagtgcaggagaacatcgccgacagccccacccccccccccccccccccccccgacgacatccccatgttcgacgacagcccccccccccccccccccccccccgtggactacgaggacgaggaggccgccgtggtgcagtacaacgacccctacgccgacggcgaccccgcctgggcccccaagaactacatcgagaaggtggtggccatctacgactacaccaaggacaaggacgacgagctgagcttcatggagggcgccatcatctacgtgatcaagaagaacgacgacggctggtacgagggcgtgtgcaacagagtgaccggcctgttccccggcaactacgtggagagcatcatgcactacaccgactag

SEQ ID NO: 271690 - protein, 571 aa, Artificial Sequence
  derived and/or modified sequence
MSHQPLSCLTEKEDSPSESTGNGPPHLAHPNLDTFTPEELLQQMKELLTENHQLKEAMKLNNQAMKGRFEELSAWTEKQKEERQFFEIQSKEAKERLMALSHENEKLKEELGKLKGKSERSSEDPTDDSRLPRAEAEQEKDQLRTQVVRLQAEKADLLGIVSELQLKLNSSGSSEDSFVEIRMAEGEAEGSVKEIKHSPGPTRTVSTGTSRSADGAKNYFEHEELTVSQLLLCLREGNQKVERLEVALKEAKERVSDFEKKTSNRSEIETQTEGSTEKENDEEKGPETVGSEVEALNLQVTSLFKELQEAHTKLSKAELMKKRLQEKCQALERKNSAIPSELNEKQELVYTNKKLELQVESMLSEIKMEQAKTEDEKSKLTVLQMTHNKLLQEHNNALKTIEELTRKESEKVDRAVLKELSEKLELAEKALASKQLQMDEMKQTIAKQEEDLETMTILRAQMEVYCSDFHAERAAREKIHEEKEQLALQLAVLLKENDAFEDGGRQSLMEMQSRHGARTSDSDQQAYLVQRGAEDRDWRQQRNIPIHSCPKCGEVLPDIDTLQIHVMDCII

SEQ ID NO: 271691 - DNA, 1716 bp, Artificial Sequence
  derived and/or modified sequence
atgagccatcaacctcttagctgtctgactgagaaggaggattcaccttcagaaagcacaggtaacggcccaccacaccttgcacatccaaatctagatacatttacacccgaagagctgctgcagcagatgaaagagctactgactgaaaatcaccaactgaaagaggctatgaagctgaacaaccaggcaatgaaagggcgattcgaggaactgagcgcctggacagaaaagcagaaggaggagaggcagttctttgagatacagagtaaagaggccaaagagagacttatggccctcagtcacgaaaacgaaaaactcaaagaggagctgggcaagctcaaaggcaagtctgagcggtcatctgaggatccaactgatgatagcagactaccacgggcagaagcggagcaggagaaagatcaactcagaacccaggtagttcgccttcaggcggagaaagcagacctgctcggtattgttagcgaactacagctgaagctgaatagttccgggtcatccgaggactccttcgttgaaatccgaatggctgagggggaggccgagggctcagtgaaggaaattaaacactctcctggacccacccgcactgtcagcacggggacaagcagatcggctgatggagccaaaaactattttgagcatgaagagctgaccgtctctcagctgctgctttgccttcgcgaagggaatcaaaaagtggagagattagaggtggccttaaaagaggcaaaagaaagagtatccgatttcgaaaaaaagacctcgaacaggtcagaaatcgagactcagacggaggggagcaccgagaaagagaatgatgaggagaaagggcccgaaacagtcggaagtgaggttgaagccttaaatcttcaagttacgtccctgttcaaggagcttcaggaggcccacactaagttgtcgaaggctgagctcatgaagaaaaggcttcaggagaaatgtcaggctctggagcgtaaaaactccgccattccgtcagagcttaacgaaaaacaggaactagtgtacacgaacaaaaagctggagttgcaggtagagtcgatgttgtccgagatcaaaatggagcaggctaagacagaagacgagaaatccaaactgacagttttacaaatgacacataacaaactgctccaggagcataacaacgccctgaaaacaatagaagaactgacgcgtaaagagtcagaaaaggtggaccgggccgtgctgaaagagctttccgagaagctggaactggcagagaaagccctggcctctaagcagctgcaaatggacgaaatgaaacagaccatcgcgaagcaagaggaggatctcgagacaatgaccatcctgcgcgctcagatggaggtatattgctcagacttccatgcagagcgggctgcccgggagaagatacacgaagagaaggagcaactagccttgcagttggccgtgttactcaaggagaatgacgcattcgaggatggaggccgccagtccctcatggagatgcagtccaggcatggagcccggacatccgacagcgaccagcaggcttacctggtgcagagaggggctgaagaccgggattggcgtcagcagcggaacattcccatccactcctgccccaagtgtggagaagtgttgcccgacatcgacactctgcagatacacgtcatggattgcattatttag

SEQ ID NO: 271692 - DNA, 1716 bp, Artificial Sequence
  derived and/or modified sequence
atgtcccaccagccattgagctgcctcactgagaaggaggacagtccatccgaatcgaccggcaatggcccgcctcacctcgcccatcctaatctcgacacattcacgcccgaggagctgctgcaacaaatgaaggagctgttaacagagaaccatcagctgaaagaggcaatgaaattgaacaaccaagccatgaaagggaggttcgaagaacttagtgcgtggacagagaagcagaaggaggagcggcagtttttcgagatccaaagtaaggaggccaaggagagactgatggcactgagccacgagaatgagaaactgaaggaagagcttggaaaattaaaaggcaagagcgaacggagtagcgaggaccctaccgacgattcaagacttcctagggccgaggcagaacaggagaaagaccagcttaggacccaggtcgtgcgcctgcaggctgagaaagccgatctgttaggcattgtctctgagctgcagctcaaactgaacagctcggggtccagcgaagatagttttgtagagattagaatggctgagggggaggctgaaggcagtgtgaaagaaatcaaacatagccctggaccgacacgcacggtgagcacaggaacatcccgaagcgcagacggagcaaagaactatttcgagcatgaggagctgaccgtgtcccaacttctactatgtctccgtgaaggaaatcagaaggtggaaaggcttgaggtggcactgaaggaagcaaaggagcgagttagcgatttcgagaagaagacatcaaaccggagtgaaatagaaactcaaacagaggggagcactgagaaagagaacgatgaggagaaagggccggaaacagtgggatcagaggtcgaggcactcaatcttcaggttacatctctcttcaaagaactgcaggaagcgcacactaaactctctaaagctgagctgatgaagaaacggttgcaggagaagtgtcaggctctggagcgtaaaaattcagcgatcccctccgagctcaacgagaaacaggagctggtgtatactaataaaaaattagagctgcaggtggaaagtatgctttccgagatcaaaatggagcaggccaagacagaggacgagaaatctaagctgacggtgttacagatgacacacaataagctgctgcaagaacacaacaatgccctgaagaccattgaagaattgacacggaaggaaagtgagaaagtggaccgcgccgtactaaaagagctgagcgagaagcttgaattggccgaaaaggccctcgcttccaaacagctccaaatggatgaaatgaaacagactatcgctaagcaagaggaggacctggagaccatgactatactacgggcccaaatggaagtgtactgttccgactttcacgccgaaagggccgcacgggagaaaatccatgaggaaaaggagcagctcgctctccaacttgcagtcctcttaaaagagaacgatgcctttgaggacggtggacggcagagcctgatggagatgcagagcagacatggggcacgtaccagcgactctgatcagcaggcctacctcgtgcagaggggtgccgaggaccgcgattggcgtcaacagcgcaatatccctatccactcttgtccgaaatgtggcgaggtcctgccagacattgacacactgcagatccatgtgatggactgtatcatttag

SEQ ID NO: 271693 - DNA, 1716 bp, Artificial Sequence
  derived and/or modified sequence
atgagccaccagcccctgagctgcctgacagagaaggaggacagccccagcgagagcactggaaatggccccccccacctggcccaccccaacctggacaccttcaccccagaggagctgctgcagcagatgaaggagctgctgacagagaaccaccagctgaaggaggccatgaagctgaacaaccaggccatgaagggccgctttgaggagctgagcgcctggacagagaagcagaaggaggagcggcagttctttgagatccagagcaaggaggccaaggagcggctgatggccctgagccatgaaaatgagaagctgaaggaggagctgggcaagctgaagggcaagtctgagaggagcagcgaggaccccacagatgacagccggctgcccagggctgaggccgagcaggagaaggaccagctgcggacccaggtggtgcggctgcaggccgagaaggctgacctgctgggcatcgtgtctgagctgcagctgaagctgaacagcagcggcagcagtgaagattcttttgtggagatccgcatggccgagggggaggccgagggctctgtgaaggagatcaagcacagccctggccccaccaggacagtgtccacaggcaccagccgctctgcagatggagccaagaactactttgagcacgaggagctgactgtgtcccagctgctgctgtgcctgcgggagggcaaccagaaggtggagcggctggaggtggccctgaaggaggccaaggagcgggtgtctgactttgagaagaagaccagcaacagaagtgaaattgagacccagacagagggcagcacagagaaggaaaatgatgaggagaagggccctgagaccgtgggcagcgaggtggaggccctgaacctgcaggtgaccagcctcttcaaggagctgcaggaggcccacaccaagctgagcaaggccgagctgatgaagaagaggctgcaggagaagtgccaggccctggagaggaagaacagcgccatccccagcgagctgaatgagaagcaggagctggtgtacaccaacaagaagctggagctgcaggtggagagcatgctgtctgagatcaagatggagcaggccaagacagaagatgagaagagcaagctgactgtgctgcagatgacccacaacaagctgctgcaggagcacaacaatgccctgaagaccatcgaggagctgaccaggaaggagagcgagaaggtggacagagctgtgctgaaggagctgtctgagaagctggagctggccgagaaggccctggccagcaagcagctgcagatggatgagatgaagcagaccatcgccaagcaggaggaggacctggagaccatgaccatcctgcgggcccagatggaggtgtactgcagcgacttccacgccgagcgggccgcccgggagaagatccacgaggagaaggagcagctggccctgcagctggccgtgctgctgaaggaaaatgatgcctttgaagatggcggccggcagagcctgatggagatgcagagcagacatggagcccggaccagtgacagcgaccagcaggcctacctggtgcagagaggagctgaggaccgggactggaggcagcagaggaacatccccatccacagctgccccaagtgtggggaggtgctgcctgacatcgacaccctgcagatccacgtgatggactgcatcatctag

SEQ ID NO: 271694 - DNA, 1716 bp, Artificial Sequence
  derived and/or modified sequence
atgagccaccagcccctgagctgcctgaccgagaaggaggacagcccatcagaatctaccggcaacggcccaccacatttggcgcatccgaatctggataccttcactcctgaggagctcttgcagcagatgaaagagcttcttaccgaaaatcaccagctgaaagaagcaatgaagcttaataaccaggccatgaagggtcggtttgaggagctgtcggcctggactgagaagcagaaggaagagcgacagttctttgagatccagagtaaggaggcaaaggagcgcctaatggcgcttagccacgagaatgagaagttaaaggaggagctgggcaagctcaaagggaaatccgaacgctctagcgaggatcccactgatgactcacgcctgccccgcgccgaagcagagcaggaaaaagaccagctgcgtacacaggtagtcagactccaggccgaaaaggccgacctgctgggaattgtgtccgagctgcaactgaaactcaatagcagcgggtcctccgaggactctttcgtggagatccgcatggccgagggagaagccgaaggcagtgtcaaggagatcaagcactcccctggacccacacggacagtctctaccggaacctctcgttctgcagacggagcgaagaactattttgagcatgaggaattgacagtttcccagctcctattatgcctgagggaaggaaatcagaaggtcgagcggctggaagtggccctgaaggaagctaaggagcgggttagtgacttcgagaaaaagaccagcaaccgctcagagatcgaaacccaaaccgagggaagcacagagaaagagaatgatgaagagaagggacctgaaactgtgggctctgaggttgaagctctcaaccttcaggtgactagcttgttcaaagaactgcaggaggcacataccaaactgagcaaggccgaactgatgaagaagagactgcaggaaaaatgccaggcgctggaaaggaagaattcagccataccatccgaactgaacgagaaacaggagctggtgtatactaacaagaagctcgagcttcaagtagaaagcatgctgtccgaaataaaaatggagcaggctaagactgaagatgagaagtcgaagctcaccgtgctacagatgacacataacaagctgctacaggagcacaataacgccttgaagaccatagaggagcttacgagaaaggagtccgagaaagtggaccgcgctgtgttgaaggagttatcagaaaagctggagttggcggaaaaggcattagccagcaagcagcttcagatggacgagatgaagcagaccatcgccaaacaggaggaagacctggagactatgaccatcctgagagcacaaatggaggtctactgctctgatttccatgccgagagagcagcacgagagaaaatacacgaggaaaaggagcaacttgccctacaacttgccgttctgctaaaagagaatgacgctttcgaagacggcgggcgacagagcctgatggaaatgcagagtcgccatggtgcgagaacttctgatagtgaccagcaggcgtatttggttcagcggggtgctgaggatagggactggcgccaacaacgcaacatccccattcactcatgccccaagtgtggtgaggtgctgcccgatatcgacacattgcagattcacgtcatggactgtattatctag

SEQ ID NO: 271695 - DNA, 1716 bp, Artificial Sequence
  derived and/or modified sequence
atgagccaccagcccctgagctgcctgaccgagaaggaggacagcccaagtgagtctaccgggaatggccccccccacctagcacatccaaacctcgacacctttacaccagaggagcttctgcagcagatgaaggaacttctcactgagaaccaccaactaaaagaggcgatgaagctgaacaaccaggcaatgaaagggcggtttgaggaactgtcggcttggacagagaaacagaaggaggaaaggcagttctttgagatccagtctaaagaagctaaggagagattgatggccctttctcatgagaacgagaagctgaaggaggagctgggcaagttgaagggcaaatccgaaaggtcaagtgaagatcctacagatgactcaaggctcccgagagctgaggccgaacaagagaaggatcagttgaggacccaagttgtgcggctgcaggcagagaaggctgacctgcttggcatcgtctctgagctccagttgaagctaaactcaagcggtagcagtgaagattcttttgtcgagatccggatggctgagggcgaggctgaaggcagcgtaaaggaaatcaagcactctccaggtcccacccggactgtgagtactggtactagccgaagtgctgatggcgccaagaattacttcgagcatgaggagctgactgtgtcccaacttttgctgtgcttaagggagggtaatcagaaggtggagcgattagaagtagcccttaaagaggccaaggagcgtgtttccgattttgagaagaagacctcaaacagaagcgaaatagaaacccagaccgagggctctaccgagaaagagaatgatgaggaaaaggggccagagacggtcggtagcgaagtcgaggcactcaacctgcaggtaacatcactatttaaagaactgcaggaagctcacaccaagctctccaaggcagaactcatgaaaaaaaggctgcaggaaaagtgtcaggcccttgaacggaaaaattcagccatccccagcgaactgaacgagaaacaggaattagtctacactaataaaaaactcgaactccaggttgaaagcatgttgtcagagattaaaatggagcaggcaaaaacagaggatgaaaagtccaaattaaccgtactccagatgacacataataaactgctgcaggaacacaacaatgccctcaagactatagaagaactgacgcgtaaggaaagcgaaaaagtcgaccgagccgtattaaaggaattgagcgagaagctggaactggccgaaaaagcattagcctccaagcaactccagatggacgaaatgaaacagacgatcgccaaacaggaggaggatcttgagacgatgacaatcttacgggcccagatggaggtgtattgcagtgattttcacgctgagcgtgcagcaagagaaaagatccacgaagaaaaggaacagttggcactgcagttagcagtactcctgaaggaaaatgacgcattcgaagatgggggaaggcaatcattgatggagatgcagagcagacatggcgctcgcaccagcgactctgatcaacaagcttacttggtgcagcggggtgcggaggatagggattggcggcagcagaggaacattcccattcacagctgccctaagtgcggggaagtcctgcctgatatagataccctgcaaatccacgtcatggactgcataatatag

SEQ ID NO: 271696 - DNA, 3488 bp, Artificial Sequence
  derived and/or modified sequence
gccccctccgccaccgccgccgcccgccggcaggttccctggtcagcgtcccatcccggtcgggagttctctccaggcggcacgatgccgaggaaacagtgaccctgagcgaagccaagccgggcggcaggtgtggctttgatagctggtggtgccacttcctggccttggatgagccgtacgcctctgtaaacccaacttcctcacctttgaaacagctgcctggttcagcattaatgaagattagtcagtgacaggcctggtgtgctgagtccgcacatagaagaatcaaaaatgtccaaaatgtaactggagagaaagtgggcaacttttggagaacttctgcaatgtcccatcaacctctcagctgcctcactgaaaaggaggacagccccagtgaaagcacaggaaatggacccccccacctggcccacccaaacctggacacgtttaccccggaggagctgctgcagcagatgaaagagctcctgaccgagaaccaccagctgaaagaagccatgaagctaaataatcaagccatgaaagggagatttgaggagctttcggcctggacagagaaacagaaggaagaacgccagttttttgagatacagagcaaagaagcaaaagagcgtctaatggccttgagtcatgagaatgagaaattgaaggaagagcttggaaaactaaaagggaaatcagaaaggtcatctgaggaccccactgatgactccaggcttcccagggccgaagcggagcaggaaaaggaccagctcaggacccaggtggtgaggctacaagcagagaaggcagacctgttgggcatcgtgtctgaactgcagctcaagctgaactccagcggctcctcagaagattcctttgttgaaattaggatggctgaaggagaagcagaagggtcagtaaaagaaatcaagcatagtcctgggcccacgagaacagtctccactggcacgagcagatctgcagatggggccaagaattacttcgaacatgaggagttaactgtgagccagctcctgctgtgcctaagggaagggaatcagaaggtggagagacttgaagttgcactcaaggaggccaaagaaagagtttcagattttgaaaagaaaacaagtaatcgttctgagattgaaacccagacagaggggagcacagagaaagagaatgatgaagagaaaggcccggagactgttggaagcgaagtggaagcactgaacctccaggtgacatctctgtttaaggagcttcaagaggctcatacaaaactcagcaaagctgagctaatgaagaagagacttcaagaaaagtgtcaggcccttgaaaggaaaaattctgcaattccatcagagttgaatgaaaagcaagagcttgtttatactaacaaaaagttagagctacaagtggaaagcatgctatcagaaatcaaaatggaacaggctaaaacagaggatgaaaagtccaaattaactgtgctacagatgacacacaacaagcttcttcaagaacataataatgcattgaaaacaattgaggaactaacaagaaaagagtcagaaaaagtggacagggcagtgctgaaggaactgagtgaaaaactggaactggcagagaaggctctggcttccaaacagctgcaaatggatgaaatgaagcaaaccattgccaagcaggaagaggacctggaaaccatgaccatcctcagggctcagatggaagtttactgttctgattttcatgctgaaagagcagcgagagagaaaattcatgaggaaaaggagcaactggcattgcagctggcagttctgctgaaagagaatgatgctttcgaagacggaggcaggcagtccttgatggagatgcagagtcgtcatggggcgagaacaagtgactctgaccagcaggcttaccttgttcaaagaggagctgaggacagggactggcggcaacagcggaatattccgattcattcctgccccaagtgtggagaggttctgcctgacatagacacgttacagattcacgtgatggattgcatcatttaagtgttgatgtatcacctccccaaaactgttggtaaatgtcagattttttcctccaagagttgtgcttttgtgttatttgttttcactcaaatattttgcctcattattcttgttttaaaagaaagaaaacaggccgggcacagtggctcatgcctgtaatcccagcactttgggaggtcgaggtgggtggatcacttggggtcagggtttgagaccagcctggccaacatggcggaaccctgtctctaccaaaattacaaaaattagccgagcatggtggcgcatgcctgtagtcgcagctactcgcgaggttgaggcaggagaattgcttgaacccaggaagtggcagttgcagtgagccgagacgacaccactgcactccagcctgggtgacagagggagactctgtctcgaaagaaagaaagaaaaaaaggaaggaaggagaaggaaggaaggagaagaaaaggtacctgttctacgtagaacacctttggtggagttccatcaactcgcaaagtagaatccttacctactactcttctgataataattttaatattttttatgtttggttgatgcgagcagctgcactgctcatgcagttagctagcatgtgacatcatgtgacaaagttcatgtaattagatggaagaaacctcactgattaattttaagaaccttttagggatgcaggaacaatgaagtggccacagtatgtgctgtttttgaagcatttttaaaaacgaattgtagttgtttttcttcatttaaaatggatctgttggaggttatgtgtgtatgttgtagttttattgcagccacaataattttaccaaagttttcacataggcagttagcctttacttaatatcaagacaagtgaaaaaatattggcatcgatgaaaccgataacattggcctcattggatttctttacccattcacagtgtaaagaagttaccttcatgctttcattgtacctgcaggcctgtgggcttgtacagtagataattaatttctaaaaagaacagctgcctattttcttcctaggttaggttatatcttcataatcacaagaattagtgatggcaaaataaaattttgcttatgaatcttttacattgtttatatatgattaatatcatcatatatattttctgtattaagctcatttggcttcatttaagctgtatacttagtcatatatctttcattagttctatggatatgagcagatccctttactggagcccagtatgtgctgtgtgagttagaagtcattcttgctgagaaggtgaataggtagggatttgccttgttttgtaagtctacaatttgccaagagtaaataacactggaccagctgtaaaagtaaacagtgtgtttatgcattgagatactaaagcatttaagaaaaaattaaaa

SEQ ID NO: 271697 - DNA, 3681 bp, Artificial Sequence
  derived and/or modified sequence
tagccgagcctattcgtccgcaacaagagcccaagaagcatcctgcaggctttctgctttttgagtgtattttaaagcaaaaacgagtggaaagctatgtatgctcagttaactatgtctagatgttaaccttttttcaaaaaacacagatggaggcctccctccgaggatgcctggcattctcctctttctgtgggcggcagcgaccccctgcggctccagcctccactacgggatctgcgggaagacacggggaagacgaactccgcacactgcatttgattaatgatttattttgattaacgccgtcacagtgacgccttagagcagtccctgttcacccgggtcccagcctcgaccccgcacggacagcgagggtgtggctttgatagctggtggtgccacttcctggccttggatgagccgtacgcctctgtaaacccaacttcctcacctttgaaacagctgcctggttcagcattaatgaagattagtcagtgacaggcctggtgtgctgagtccgcacatagaacttctgcaatgtcccatcaacctctcagctgcctcactgaaaaggaggacagccccagtgaaagcacaggaaatggacccccccacctggcccacccaaacctggacacgtttaccccggaggagctgctgcagcagatgaaagagctcctgaccgagaaccaccagctgaaagaagccatgaagctaaataatcaagccatgaaagggagatttgaggagctttcggcctggacagagaaacagaaggaagaacgccagttttttgagatacagagcaaagaagcaaaagagcgtctaatggccttgagtcatgagaatgagaaattgaaggaagagcttggaaaactaaaagggaaatcagaaaggtcatctgaggaccccactgatgactccaggcttcccagggccgaagcggagcaggaaaaggaccagctcaggacccaggtggtgaggctacaagcagagaaggcagacctgttgggcatcgtgtctgaactgcagctcaagctgaactccagcggctcctcagaagattcctttgttgaaattaggatggctgaaggagaagcagaagggtcagtaaaagaaatcaagcatagtcctgggcccacgagaacagtctccactggcacgagcagatctgcagatggggccaagaattacttcgaacatgaggagttaactgtgagccagctcctgctgtgcctaagggaagggaatcagaaggtggagagacttgaagttgcactcaaggaggccaaagaaagagtttcagattttgaaaagaaaacaagtaatcgttctgagattgaaacccagacagaggggagcacagagaaagagaatgatgaagagaaaggcccggagactgttggaagcgaagtggaagcactgaacctccaggtgacatctctgtttaaggagcttcaagaggctcatacaaaactcagcaaagctgagctaatgaagaagagacttcaagaaaagtgtcaggcccttgaaaggaaaaattctgcaattccatcagagttgaatgaaaagcaagagcttgtttatactaacaaaaagttagagctacaagtggaaagcatgctatcagaaatcaaaatggaacaggctaaaacagaggatgaaaagtccaaattaactgtgctacagatgacacacaacaagcttcttcaagaacataataatgcattgaaaacaattgaggaactaacaagaaaagagtcagaaaaagtggacagggcagtgctgaaggaactgagtgaaaaactggaactggcagagaaggctctggcttccaaacagctgcaaatggatgaaatgaagcaaaccattgccaagcaggaagaggacctggaaaccatgaccatcctcagggctcagatggaagtttactgttctgattttcatgctgaaagagcagcgagagagaaaattcatgaggaaaaggagcaactggcattgcagctggcagttctgctgaaagagaatgatgctttcgaagacggaggcaggcagtccttgatggagatgcagagtcgtcatggggcgagaacaagtgactctgaccagcaggcttaccttgttcaaagaggagctgaggacagggactggcggcaacagcggaatattccgattcattcctgccccaagtgtggagaggttctgcctgacatagacacgttacagattcacgtgatggattgcatcatttaagtgttgatgtatcacctccccaaaactgttggtaaatgtcagattttttcctccaagagttgtgcttttgtgttatttgttttcactcaaatattttgcctcattattcttgttttaaaagaaagaaaacaggccgggcacagtggctcatgcctgtaatcccagcactttgggaggtcgaggtgggtggatcacttggggtcagggtttgagaccagcctggccaacatggcggaaccctgtctctaccaaaattacaaaaattagccgagcatggtggcgcatgcctgtagtcgcagctactcgcgaggttgaggcaggagaattgcttgaacccaggaagtggcagttgcagtgagccgagacgacaccactgcactccagcctgggtgacagagggagactctgtctcgaaagaaagaaagaaaaaaaggaaggaaggagaaggaaggaaggagaagaaaaggtacctgttctacgtagaacacctttggtggagttccatcaactcgcaaagtagaatccttacctactactcttctgataataattttaatattttttatgtttggttgatgcgagcagctgcactgctcatgcagttagctagcatgtgacatcatgtgacaaagttcatgtaattagatggaagaaacctcactgattaattttaagaaccttttagggatgcaggaacaatgaagtggccacagtatgtgctgtttttgaagcatttttaaaaacgaattgtagttgtttttcttcatttaaaatggatctgttggaggttatgtgtgtatgttgtagttttattgcagccacaataattttaccaaagttttcacataggcagttagcctttacttaatatcaagacaagtgaaaaaatattggcatcgatgaaaccgataacattggcctcattggatttctttacccattcacagtgtaaagaagttaccttcatgctttcattgtacctgcaggcctgtgggcttgtacagtagataattaatttctaaaaagaacagctgcctattttcttcctaggttaggttatatcttcataatcacaagaattagtgatggcaaaataaaattttgcttatgaatcttttacattgtttatatatgattaatatcatcatatatattttctgtattaagctcatttggcttcatttaagctgtatacttagtcatatatctttcattagttctatggatatgagcagatccctttactggagcccagtatgtgctgtgtgagttagaagtcattcttgctgagaaggtgaataggtagggatttgccttgttttgtaagtctacaatttgccaagagtaaataacactggaccagctgtaaaagtaaacagtgtgtttatgcattgagatactaaagcatttaagaaaaaattaaaa

SEQ ID NO: 271698 - DNA, 1716 bp, Artificial Sequence
  derived and/or modified sequence
atgtcccaccaacctctctcttgcctcactgagaaggaggacagccctagtgagtctacagggaacggccctccccacttggcccatccgaacctcgacaccttcactcccgaggaattgcttcagcagatgaaagaactgctgaccgagaaccatcagcttaaggaagcaatgaagctaaacaaccaggcgatgaagggcagatttgaagagctgtcagcctggactgaaaaacagaaggaggaaagacagttctttgagattcagtctaaggaagcaaaggaaaggctaatggctttaagccacgaaaatgaaaagttgaaggaggagttggggaagctaaagggtaaatccgagaggtcttctgaggatccaacggacgacagcagactcccaagggccgaggctgagcaagagaaggatcaactcaggacacaggtggtgcgtttgcaggccgagaaggctgatctacttggcatcgtatcggagctgcaactaaaactaaatagcagcggcagcagtgaagacagctttgtcgagattcgcatggcggagggtgaagccgaaggttcggttaaggaaattaagcactcacccggaccaacacggaccgtttcgacaggtacgtcgcgcagcgcagacggcgcaaagaattacttcgagcacgaagaacttactgtgagccagctgctgctgtgtttgagagagggcaaccagaaggtggaacgattggaggtagctctgaaggaggctaaagaacgtgtgtcagatttcgaaaagaagacaagtaatagaagcgaaatcgaaacacagaccgagggctccaccgagaaggaaaacgatgaagagaagggccctgagactgttgggagcgaagtggaagctcttaatctccaggtcacaagcctttttaaggagctccaggaagcacatacaaagctaagcaaggcggagctgatgaaaaagcgtctgcaggagaaatgccaagccttggaaagaaaaaacagcgcgatccccagcgagctcaatgagaaacaggaactggtgtacaccaacaagaagctagagctgcaggtggagagcatgctgagtgaaattaaaatggagcaggccaagacagaggacgaaaaaagtaagcttacggtgctacagatgacacacaataagctccttcaggaacacaataacgcattgaagaccatcgaagaactcacgagaaaagaaagcgagaaagttgatagagctgtcctgaaagaactgtcggaaaagctagaactggctgaaaaagccttggcctctaagcagttgcagatggatgaaatgaagcagacaattgcgaagcaggaggaggacctggaaacaatgaccattctaagggcccagatggaagtgtactgttccgacttccatgcagaacgtgcagccagggagaaaattcacgaagagaaagaacagctggcacttcagttggccgtcttactgaaagaaaatgacgcgtttgaagatggcggaaggcaaagcttaatggagatgcagagcaggcatggcgcacgtacctctgactcggaccaacaggcctacctggttcaaaggggtgctgaggatcgggactggagacaacaaaggaacattccaattcattcctgtcccaagtgcggagaggtcctacccgacatagacactttacagatacacgtgatggactgtattatttag

SEQ ID NO: 271699 - DNA, 1716 bp, Artificial Sequence
  derived and/or modified sequence
atgtcccaccaacccctctcgtgcctaaccgagaaggaggattccccctcggaatcaacgggtaacggacctcctcatctagcccatcctaatttagatacttttacaccagaagaactcctgcagcagatgaaagagctgctgactgaaaatcaccagctgaaggaggcaatgaagcttaacaatcaagctatgaaaggaagattcgaggagctttcagcctggacagagaaacagaaagaagagaggcagttttttgagattcagagcaaggaggctaaggaacgcttaatggctctcagccacgaaaatgagaagttaaaggaagagctgggtaaactaaagggaaaaagtgagaggagcagcgaggatcctaccgatgacagcagattgcccagggccgaggcagaacaggaaaaggatcagctccgaacacaggtggtacgtctgcaggccgaaaaggccgatctgctcggcattgtttcagaactgcagctaaagttaaattcttctggatccagtgaggacagttttgtggagattcggatggcggagggggaggccgaaggatctgtgaaagagattaagcatagtccaggcccaacccgcaccgtgtccaccggtacaagccgaagtgccgacggcgctaaaaactacttcgagcatgaagagctaaccgtgtcccaactgttactttgtctgcgagaaggcaatcagaaggtggagcgtctcgaagtggctctaaaggaggccaaggagcgagtcagcgatttcgagaaaaaaaccagcaaccggagcgagatagagacacagactgaaggttccactgagaaggagaacgatgaggagaaaggcccagagacagtgggcagtgaggtcgaagcgttgaacctgcaggttacgtcactgtttaaggagttgcaggaagctcatacaaagctgtccaaagctgagctcatgaaaaagaggttgcaggaaaagtgccaggctctcgagcgaaagaacagcgctatcccatccgaactgaacgaaaaacaagaattggtctacacaaataagaagctcgaactgcaggttgaaagtatgctctccgaaatcaaaatggagcaggccaaaaccgaggacgaaaagtctaagctgaccgtactccagatgacccataataaactgcttcaggaacataacaacgcccttaaaaccattgaggagctgactcgcaaagaatcagaaaaggtagaccgggctgtgttgaaagagctgtcagagaagctcgaactggccgaaaaagctcttgcctccaagcagttgcagatggatgagatgaagcaaacaatcgcaaaacaggaggaagacttggagactatgactatcctgcgggcacagatggaggtctattgcagtgattttcacgcagagagagctgcaagggagaaaatccatgaagagaaagaacagctggcactgcaactagcagtcctgctaaaggagaacgacgcttttgaagacggcggacgtcagagtctcatggaaatgcaatctagacacggggcacgtacatccgattctgatcagcaggcctacctcgtccagagaggcgctgaggacagagattggagacagcagcgaaacattccaatccatagttgcccgaagtgtggcgaggtacttcctgatatcgatacactccagatccacgtgatggactgtatcatctag

SEQ ID NO: 271700 - DNA, 1716 bp, Artificial Sequence
  derived and/or modified sequence
atgagccaccagcccctgagctgcctgaccgagaaggaggacagccccagcgagagcaccggcaacggccccccccacctggcccaccccaacctggacaccttcacccccgaggagctgctgcagcagatgaaggagctgctgaccgagaaccaccagctgaaggaggccatgaagctgaacaaccaggccatgaagggcagattcgaggagctgagcgcctggaccgagaagcagaaggaggagagacagttcttcgagatccagagcaaggaggccaaggagagactgatggccctgagccacgagaacgagaagctgaaggaggagctgggcaagctgaagggcaagagcgagagaagcagcgaggaccccaccgacgacagcagactgcccagagccgaggccgagcaggagaaggaccagctgagaacccaggtggtgagactgcaggccgagaaggccgacctgctgggcatcgtgagcgagctgcagctgaagctgaacagcagcggcagcagcgaggacagcttcgtggagatcagaatggccgagggcgaggccgagggcagcgtgaaggagatcaagcacagccccggccccaccagaaccgtgagcaccggcaccagcagaagcgccgacggcgccaagaactacttcgagcacgaggagctgaccgtgagccagctgctgctgtgcctgagagagggcaaccagaaggtggagagactggaggtggccctgaaggaggccaaggagagagtgagcgacttcgagaagaagaccagcaacagaagcgagatcgagacccagaccgagggcagcaccgagaaggagaacgacgaggagaagggccccgagaccgtgggcagcgaggtggaggccctgaacctgcaggtgaccagcctgttcaaggagctgcaggaggcccacaccaagctgagcaaggccgagctgatgaagaagagactgcaggagaagtgccaggccctggagagaaagaacagcgccatccccagcgagctgaacgagaagcaggagctggtgtacaccaacaagaagctggagctgcaggtggagagcatgctgagcgagatcaagatggagcaggccaagaccgaggacgagaagagcaagctgaccgtgctgcagatgacccacaacaagctgctgcaggagcacaacaacgccctgaagaccatcgaggagctgaccagaaaggagagcgagaaggtggacagagccgtgctgaaggagctgagcgagaagctggagctggccgagaaggccctggccagcaagcagctgcagatggacgagatgaagcagaccatcgccaagcaggaggaggacctggagaccatgaccatcctgagagcccagatggaggtgtactgcagcgacttccacgccgagagagccgccagagagaagatccacgaggagaaggagcagctggccctgcagctggccgtgctgctgaaggagaacgacgccttcgaggacggcggcagacagagcctgatggagatgcagagcagacacggcgccagaaccagcgacagcgaccagcaggcctacctggtgcagagaggcgccgaggacagagactggagacagcagagaaacatccccatccacagctgccccaagtgcggcgaggtgctgcccgacatcgacaccctgcagatccacgtgatggactgcatcatctag

SEQ ID NO: 271701 - protein, 126 aa, Artificial Sequence
  derived and/or modified sequence
  misc_feature (1)..(1): Xaa can be any naturally occurring amino acid
XGEAEGSVKEIKHSPGPTRTVSTGTALSKYRSRSADGAKNYFEHEELTVSQLLLCLREGNQKVERLEVALKEAKERVSDFEKKTSNRSEIETQTEGSTEKENDEEKGPETTGFHHVGQDGLDLLTS

SEQ ID NO: 271702 - protein, 147 aa, Artificial Sequence
  derived and/or modified sequence
MKLNNQAMKGRFEELSAWTEKQKEERQFFEIQSKEAKERLMALSHENEKLKEELGKLKGKSERSSEDPTDDSRLPRAEAEQEKDQLRTQVVRLQAEKADLLGIVSELQLKLNSSGSSEDSFVEIRMAEGEAEGSVKEIKHSPGPTRT

SEQ ID NO: 271703 - DNA, 381 bp, Artificial Sequence
  derived and/or modified sequence
tgaggtgaggctgagggcagtgtgaaggaaatcaaacacagcccaggacctactaggacagtgtccaccggaacagctttgagtaaatacaggagccgcagcgccgatggggctaagaactactttgaacatgaggagcttacagtgtctcagctgctgctgtgccttcgggaagggaatcagaaggtggagaggctagaggtcgccctgaaagaggccaaggagcgggtgtccgattttgagaagaagacatccaacagaagcgagatcgagacccagacagaagggtcaacagaaaaagagaatgatgaagaaaaaggccctgaaacaaccggcttccatcatgttgggcaggatggactggatcttttaaccagctag

SEQ ID NO: 271704 - DNA, 444 bp, Artificial Sequence
  derived and/or modified sequence
atgaagcttaacaaccaggccatgaagggccgcttcgaggagctgtcagcctggactgaaaagcagaaggaagagcgccagtttttcgagattcaaagcaaggaagccaaggaaagactcatggcactctcgcatgagaacgagaagctgaaagaggaactggggaaactcaaagggaagagcgaacggtcttcagaagatcctacagacgacagcagactgccgcgcgccgaggcagagcaagagaaggaccagctcagaactcaagtggtccggctgcaggctgagaaagcagacctgctgggtatcgtttctgaattgcagctcaaactaaactcctccggcagtagtgaagattctttcgttgaaatcagaatggccgagggagaggctgaaggtagtgttaaggaaattaagcactcacccggcccaacccgaacttag

SEQ ID NO: 271705 - DNA, 381 bp, Artificial Sequence
  derived and/or modified sequence
tgaggagaggccgagggctctgtgaaggagatcaagcacagccctggccccaccaggacagtgtccactggaacagccctgagcaagtaccgcagccgctctgcagatggagccaagaactactttgagcacgaggagctgactgtgtcccagctgctgctgtgcctgcgggagggcaaccagaaggtggagcggctggaggtggccctgaaggaggccaaggagcgggtgtctgactttgagaagaagaccagcaacagaagtgaaattgagacccagacagagggcagcacagagaaggaaaatgatgaggagaagggccctgagaccaccggcttccaccacgtgggccaggacggcctggacctgctgaccagctag

SEQ ID NO: 271706 - DNA, 444 bp, Artificial Sequence
  derived and/or modified sequence
atgaagctgaacaaccaggccatgaagggccgctttgaggagctgagcgcctggacagagaagcagaaggaggagcggcagttctttgagatccagagcaaggaggccaaggagcggctgatggccctgagccatgaaaatgagaagctgaaggaggagctgggcaagctgaagggcaagtctgagaggagcagcgaggaccccacagatgacagccggctgcccagggctgaggccgagcaggagaaggaccagctgcggacccaggtggtgcggctgcaggccgagaaggctgacctgctgggcatcgtgtctgagctgcagctgaagctgaacagcagcggcagcagcgaggacagctttgtggagatccgcatggccgagggggaggccgagggctctgtgaaggagatcaagcacagccctggccccaccaggacatag

SEQ ID NO: 271707 - DNA, 381 bp, Artificial Sequence
  derived and/or modified sequence
tgaggcgaggccgagggcagcgtgaaggagatcaagcacagccccggtcccactcgcaccgtgtctacaggtaccgcgctgagcaagtacagaagcaggtcggcggacggtgctaagaactactttgaacacgaagagttgacggtttcacaactcctcttatgcctccgcgagggtaaccagaaggtcgagcgcctagaggttgctctgaaggaggccaaggaacgagtgtcagactttgaaaagaagactagcaacagaagtgaaattgagacccagactgaaggtagcacagagaaggaaaacgacgaggaaaaaggccccgagaccaccggcttccatcacgttggtcaggatggcttggacctcttaacttcctag

SEQ ID NO: 271708 - DNA, 444 bp, Artificial Sequence
  derived and/or modified sequence
atgaagctgaacaaccaggccatgaagggccggttcgaggagctgtccgcttggacggaaaagcagaaggaggagaggcagttctttgaaatacagagcaaggaagcgaaagaacgtttaatggctctcagccatgaaaatgagaaactcaaggaggaattggggaaactaaagggaaagagtgagcggagcagcgaggaccccacagatgactctcggctgcccagagctgaggccgagcaggaaaaggaccaattacggactcaggtggtaaggctccaggcagaaaaggcggatctgctgggtattgtgagcgagttgcagctgaaactcaactcctccggcagctctgaggattctttcgtcgagatccggatggctgagggtgaagctgaaggatcagtcaaggagatcaaacattcccctggacctacccggacatag

SEQ ID NO: 271709 - DNA, 664 bp, Artificial Sequence
  derived and/or modified sequence
aaggagaagcagaagggtcagtaaaagaaatcaagcatagtcctgggcccacgagaacagtctccactggcacggcattgtctaaatataggagcagatctgcagatggggccaagaattacttcgaacatgaggagttaactgtgagccagctcctgctgtgcctaagggaagggaatcagaaggtggagagacttgaagttgcactcaaggaggccaaagaaagagtttcagattttgaaaagaaaacaagtaatcgttctgagattgaaacccagacagaggggagcacagagaaagagaatgatgaagagaaaggcccggagactacagggtttcaccatgttggccaggatggtcttgatctcttgacctcgtgatcctcccacctcggcctcccagagtgctgggattacagatatgagccactgcgcccagctgcaagatgtatttctatcagtattctacaaaacgatttcctatgtctcttcttgactgatttcttctcctcggtccttcaatgaacaagcctactgtaggaaaaggaatgttgtccactttataatgagatcatttgaggatatgacttagaaacttgagggagaattgaaagatttgggttctatcccattactggtttgaataaagtagtttgaaaggaaaa

SEQ ID NO: 271710 - DNA, 381 bp, Artificial Sequence
  derived and/or modified sequence
tagggggaggcagagggaagcgttaaggagataaaacactcccccggacccaccagaactgtgtctactgggactgccctctctaagtaccgaagccgcagtgccgatggcgctaagaattacttcgaacatgaggaactgaccgtttctcagctgctgctatgtctccgcgaaggcaaccaaaaggtggagcgtttggaggtagcacttaaagaggctaaagaacgggtatccgatttcgaaaagaagacgtcgaacagaagcgagattgaaacccagaccgaggggtctactgagaaggagaatgatgaagaaaagggtcctgaaacgactggattccatcatgtggggcaagatggcctggacttgctaacttcgtag

SEQ ID NO: 271711 - DNA, 444 bp, Artificial Sequence
  derived and/or modified sequence
atgaaattgaacaaccaggcaatgaagggaaggttcgaggagctctcagcttggactgaaaagcaaaaagaggagagacagttctttgagatccaatctaaagaggcgaaggaacgtcttatggcgctcagccatgaaaacgagaagctgaaggaggagttaggaaagctgaaaggtaagtctgagcgaagcagcgaggaccctaccgatgatagcaggctgccaagggcggaagcagaacaggagaaggatcagctcaggacacaggtggtccgcttgcaggccgaaaaagccgatcttctgggtatcgtgtccgagctgcagctaaagctgaactcttcagggtcctccgaggacagtttcgtggaaatcagaatggccgaaggggaagcggagggcagcgtcaaggagattaaacactcacctggccctaccaggacatag

SEQ ID NO: 271712 - DNA, 381 bp, Artificial Sequence
  derived and/or modified sequence
tgaggcgaggccgagggcagcgtgaaggagatcaagcacagccccggccccaccagaaccgtgagcaccggcaccgccctgagcaagtacagaagcagaagcgccgacggcgccaagaactacttcgagcacgaggagctgaccgtgagccagctgctgctgtgcctgagagagggcaaccagaaggtggagagactggaggtggccctgaaggaggccaaggagagagtgagcgacttcgagaagaagaccagcaacagaagcgagatcgagacccagaccgagggcagcaccgagaaggagaacgacgaggagaagggccccgagaccaccggcttccaccacgtgggccaggacggcctggacctgctgaccagctag

SEQ ID NO: 271713 - DNA, 444 bp, Artificial Sequence
  derived and/or modified sequence
atgaagctgaacaaccaggccatgaagggcagattcgaggagctgagcgcctggaccgagaagcagaaggaggagagacagttcttcgagatccagagcaaggaggccaaggagagactgatggccctgagccacgagaacgagaagctgaaggaggagctgggcaagctgaagggcaagagcgagagaagcagcgaggaccccaccgacgacagcagactgcccagagccgaggccgagcaggagaaggaccagctgagaacccaggtggtgagactgcaggccgagaaggccgacctgctgggcatcgtgagcgagctgcagctgaagctgaacagcagcggcagcagcgaggacagcttcgtggagatcagaatggccgagggcgaggccgagggcagcgtgaaggagatcaagcacagccccggccccaccagaacctag

SEQ ID NO: 271714 - protein, 231 aa, Artificial Sequence
  derived and/or modified sequence
MRVPVFEDIKDETEEEKIGEEENEEDQVFYKPVIEDLSMELARKCTELISDIRYKEEFKKSKDKCTFVTDSPMLNHVKNIGAFISEAKYKGTIKADLSNSLYKRMPATIDSVFAGEVTQLQSEVAYKQKHDAAKGFSDYAHMKEPPEVKHAMEVNKHQSNISYRKDVQDTHTYSAELDRPDIKMATQISKIISNAEYKKGQGIMNKEPAVIGRPDFEHAVEASKLSSQVRL

SEQ ID NO: 271715 - DNA, 696 bp, Artificial Sequence
  derived and/or modified sequence
atgcgagtgcccgtgttcgaagacatcaaagacgagaccgaagaggaaaaaatcggggaggaagaaaatgaagaggaccaggtcttttataagcccgtcatcgaagatctgtcgatggagctggccagaaagtgcaccgagctaattagtgacatccggtataaggaagagtttaagaaatcaaaagacaagtgtaccttcgtgaccgatagtcctatgctgaatcatgtcaagaacatcggagcctttatctccgaagctaaatataagggaacgatcaaggcagatttgtccaatagtttgtacaaacgtatgcccgccaccattgactcggtgttcgctggagaggtgactcagctgcaaagcgaggttgcatacaaacagaaacacgatgcagccaaggggttttctgactatgctcatatgaaggaaccccctgaagtcaagcacgccatggaggtgaacaagcatcagagtaacatttcctatagaaaagacgtgcaggatacacacacttatagcgcagaactggaccgccccgacataaagatggctacacaaatttccaagattattagcaacgccgaatataaaaagggtcaagggataatgaacaaagagcccgcggtgattgggaggcctgactttgaacacgcagtggaagcctctaaacttagtagtcaggtgagactctag

SEQ ID NO: 271716 - DNA, 696 bp, Artificial Sequence
  derived and/or modified sequence
atgagggtgcctgtgtttgaggacatcaaggatgaaacagaggaggagaagatcggggaggaggagaatgaggaggaccaggtgttctacaagcctgtgattgaggacctgtccatggagctggccaggaagtgcacagagctgatcagtgacatccgctacaaggaggagttcaagaagagcaaggacaagtgcacctttgtgacagacagccccatgctgaaccacgtgaagaacatcggggccttcatcagcgaggccaagtacaagggcaccatcaaggctgacctgagcaacagcctgtacaagaggatgcctgccaccattgattctgtgtttgctggggaggtgacccagctgcagagcgaggtggcctacaagcagaagcatgatgctgccaagggcttcagtgactatgcccacatgaaggagcccccagaggtgaagcacgccatggaggtgaacaagcaccagagcaacatctcctacaggaaggatgtgcaggacacccacacctacagcgctgagctggacagaccagacatcaagatggccacccagatcagcaagatcatcagcaatgctgagtacaagaagggccagggcatcatgaacaaggagcctgctgtgattggccgcccagactttgagcacgctgtggaggccagcaagctgagcagccaggtgcggctgtag

SEQ ID NO: 271717 - DNA, 696 bp, Artificial Sequence
  derived and/or modified sequence
atgcgggtgcccgtgttcgaggacatcaaggacgagaccgaggaggaaaagatcggcgaggaagaaaacgaagaggatcaggtgttctataagccagtcatagaggatctttcaatggagctcgccagaaaatgtacagagttaatttcagatatccgctacaaagaagaatttaaaaaatccaaggataagtgcacgtttgtgacagacagtcccatgctcaatcacgtgaagaacatcggtgcctttatttcagaagccaagtacaaaggcaccattaaggcggatctgtccaattccctctataagagaatgccagcgacgattgactccgtgtttgccggggaggtgacacagctgcaatcggaagtggcatataaacagaagcacgacgcagcaaaaggcttctcggattacgcacatatgaaggaaccgcccgaagtgaagcacgcaatggaggttaataagcatcagtccaacattagctacaggaaggatgtgcaagacacccacacatactctgctgaactagatagaccagatataaagatggccacacagatatccaaaattatttcaaacgctgaatataaaaaaggtcagggtatcatgaacaaggagcctgcagttattggacgtccggatttcgaacacgctgtggaagctagcaaattgagctcacaagtaaggttatag

SEQ ID NO: 271718 - DNA, 1599 bp, Artificial Sequence
  derived and/or modified sequence
aagggtaaaaatgagggtccctgtatttgaggatataaaagatgaaactgaagaagaaaagataggggaagaagaaaatgaagaagaccaggtcttctataagcctgttattgaagacttaagcatggaattggccagaaaatgcacggaactcattagcgatatccgttataaagaagagtttaaaaagtccaaggataagtgtacatttgtgactgacagtcctatgctaaaccatgtaaaaaatatcggtgcttttatttctgaggcaaaatacaaaggcaccattaaagctgacctttctaattctctttataagcggatgccagccacaattgacagtgtttttgcaggagaagttacacagctccagagtgaggtggcctacaagcagaaacatgatgctgccaaaggattctcagattatgcccacatgaaggagccccctgaggttaaacatgccatggaggtcaataaacaccagagtaatatttcttataggaaagacgtgcaggacacccacacgtacagtgcagaacttgaccgaccagacatcaagatggcaacccagatctctaagatcataagcaatgcagaatacaagaaaggacaaggaataatgaataaagagcccgctgtaattggaagaccagattttgaacatgccgtggaagcttctaaactttctagtcaagtaaggctttagtgatgattccacaatgactttattcagatattttgtttctaacagcacaggagaatattgcattttagataatatctttaattgcaagaataaacagagataatgtttctgaacccagttcagatgggcttgcaatcattatgaatttcagtaaaggaaaaaaattaagtctaattttaagcataaaacaaagttttcttttctccaggcataaatctgaacatttttcaatgtctctagccatgttgtcacatttccctggatttccagaagtcattaatagtcatactaaataattgtgttttaacctacacacacacacacacacacacacacacacagtttttaacttagtaataaaaatattaattttcccaattttcaagtgcttttgtttaatcacaaaatttaaaaagggagatgaaaatgaagaaaactttgaagtcttatcaaagagcataaaataagatctgaaaaagtataaaggcattttatgtttttggctgaaagtttcaatagataaagatgtcagttctttcagaattatataaacgtcatgcaacttctgttagactccaacagcgtttttttttttttttaatatagataaaatgatcttaaagtttgtgtggaaagaaaataccagggaatagcctttaaaagtatgaaaatgaagaccagtgaaggggaacttaagttatgagttactataagttaatagaaaaccactgaaattaaatcaatatgggattggtgtagtgagagattaaataatcagtaggatagaatagggagtcctgaaatagattccagtatgtataagaatttaatatatgataaaagtgtcgattcaagtcagtgggaagaagttggattagctaataaatggtgct

SEQ ID NO: 271719 - DNA, 696 bp, Artificial Sequence
  derived and/or modified sequence
atgcgggtgccagtgttcgaagatatcaaggacgaaacagaagaagaaaaaattggagaggaggaaaatgaggaggatcaggtcttctacaagcccgtgatcgaagatcttagtatggaactggccagaaaatgcaccgagctgatcagtgacataagatacaaagaggaattcaagaagtcaaaggacaaatgtacttttgtgacagactccccaatgctgaatcatgtgaagaacattggagcctttattagcgaggccaaatataagggcaccataaaggcggatcttagtaactccctgtacaagcggatgccggctacaatcgattccgtctttgccggagaagttactcagctgcagtctgaggtcgcttataaacagaagcacgatgcagcaaaggggttttcagactacgcccacatgaaagaaccaccagaagtcaaacacgccatggaagtgaataagcatcagtccaatatttcgtaccgaaaagatgtccaggacacacacacgtattcagcagagctggataggccagacatcaagatggctacacaaatttcgaagattatttctaacgcagagtataaaaaaggccagggcatcatgaataaagaacccgcagtgatcgggcgacctgattttgagcacgccgtggaggcaagtaaactttcctcccaggttcgcctgtag

SEQ ID NO: 271720 - DNA, 696 bp, Artificial Sequence
  derived and/or modified sequence
atgagagtgcccgtgttcgaggacatcaaggacgagaccgaggaggagaagatcggcgaggaggagaacgaggaggaccaggtgttctacaagcccgtgatcgaggacctgagcatggagctggccagaaagtgcaccgagctgatcagcgacatcagatacaaggaggagttcaagaagagcaaggacaagtgcaccttcgtgaccgacagccccatgctgaaccacgtgaagaacatcggcgccttcatcagcgaggccaagtacaagggcaccatcaaggccgacctgagcaacagcctgtacaagagaatgcccgccaccatcgacagcgtgttcgccggcgaggtgacccagctgcagagcgaggtggcctacaagcagaagcacgacgccgccaagggcttcagcgactacgcccacatgaaggagccccccgaggtgaagcacgccatggaggtgaacaagcaccagagcaacatcagctacagaaaggacgtgcaggacacccacacctacagcgccgagctggacagacccgacatcaagatggccacccagatcagcaagatcatcagcaacgccgagtacaagaagggccagggcatcatgaacaaggagcccgccgtgatcggcagacccgacttcgagcacgccgtggaggccagcaagctgagcagccaggtgagactgtag

SEQ ID NO: 271721 - protein, 490 aa, Artificial Sequence
  derived and/or modified sequence
MNGALDHSDQPDPDAIKMFVGQIPRSWSEKELKELFEPYGAVYQINVLRDRSQNPPQSKGCCFVTFYTRKAALEAQNALHNIKTLPGMHHPIQMKPADSEKSNAVEDRKLFIGMVSKKCNENDIRVMFSPFGQIEECRILRGPDGLSRGCAFVTFSTRAMAQNAIKAMHQSQTMEGCSSPIVVKFADTQKDKEQRRLQQQLAQQMQQLNTATWGNLTGLGGLTPQYLALLQQATSSSNLGAFSGIQQMAGMNALQLQNLATLAAAAAAAQTSATSTNANPLSTTSSALGALTSPVAASTPNSTAGAAMNSLTSLGTLQGLAGATVGLNNINALAVAQMLSGMAALNGGLGATGLTNGTAGTMDALTQAYSGIQQYAAAALPTLYSQSLLQQQSAAGSQKEGPEGANLFIYHLPQEFGDQDILQMFMPFGNVISAKVFIDKQTNLSKCFGFVSYDNPVSAQAAIQAMNGFQIGMKRLKVQLKRSKNDSKPY

SEQ ID NO: 271722 - DNA, 7121 bp, Artificial Sequence
  derived and/or modified sequence
aaaagggcggtggggcggggggcggggcagggagagggagagaaatccagcagacatctagctctgcctttctttcccagccacagccagggtagggctgataaggcgctgatgcgttgatggcagccttgcagagctagacctgcacttaacttgcagctgcctcccgagcctccaagatgtccacgccctgggtgacaggcggcagggcgctgccccgtgctcccccggctctgctcgacagcagcacgcagtgagagcctcgccgccgccgaggagcaactcatgtaacggcacagccaacaagatgaacggagctttggatcactcagaccaaccagacccagatgccattaagatgtttgtcggacagatcccccggtcatggtcggaaaaggagctgaaagaactttttgagccttacggagccgtctaccagatcaacgtcctccgggaccggagtcagaaccctccgcagagtaaaggttgttgtttcgtaacattttatacaagaaaagctgcacttgaggcccagaatgcactgcacaatattaaaactttacctgggatgcatcatcccattcagatgaaacctgcagatagtgaaaagtccaacgctgtggaagacagaaaattgttcataggaatggtatcgaagaaatgtaatgagaacgacatcagggtgatgttctctccatttggccagatagaagaatgccggatcctccggggacctgatgggctgagtcgaggctgtgcgtttgtcacattttctacaagggcaatggcacagaatgcaatcaaagccatgcatcagtctcagaccatggagggctgctcttcacctatcgtggtgaagtttgctgacactcagaaggacaaagagcaaaggcgcctccagcagcagctcgctcagcagatgcagcagctcaacactgccacctgggggaacctgacagggctgggcggactgaccccacagtatctggcgctcctgcagcaggccacctcctccagcaacctgggtgcgttcagcggcattcaacaaatggcaggcatgaatgctttacagttgcagaacctggcgacgctggctgctgctgcagctgcggcccagacctcagccaccagcaccaatgcaaaccctctctctaccacgagcagcgccctgggagccctcacgagtcccgtggctgcttcaacccccaactccactgctggtgcagccatgaactccttgacctctctcgggactctgcaaggactggctggagccactgttggactgaataatattaatgcactagcagttgctcaaatgctctcaggtatggcggctctgaatggaggacttggcgccacaggcttgacgaatggcacggctggcaccatggacgccctcacccaggcctactcaggaattcaacagtacgcagccgccgcgctgcccactctgtacagccagagcctgctgcagcagcagagcgctgcaggcagccagaaggaaggtccagagggggcaaacctctttatttaccaccttccacaggaatttggagaccaggacattctgcagatgttcatgccttttggaaatgttatctctgctaaagtcttcattgacaaacagaccaatctgagcaagtgctttggttttgttagctacgacaatccagtctctgcacaagctgctatccaagctatgaatggctttcagatcggcatgaaacgcttgaaggtgcagctgaagcgttccaaaaacgacagcaaaccttactgatcctaaccccagaggctccctgctctcattttagctttcttagggtaagtcccacgagccagcctgtctcaacagggaaggcagaggaggaccacattgccaacttttaccaagagagacggttatttttacaataaggcctccatgtccccacccacttcccctacccagtttgccataattaaaacttgggctactttgtttctattgagtaattcctcctccagttgtgccactgtattctcctttgttttgcgatttgaatctccttttacctttttttttaatttttttcatttttgcttttttttaaagagaagcatatacacaaataaatggcatcttgagaatttaaaaggcaaacaaacaaacgctaatgtgcaattctaactctgaaaccactggtgccccgagagcactgcctggagaattcacccctccttgcccggcgcccgcccccggagggagggcccggtgcttagaggttaacttggtggcctaggagagggagaagccaggagaagcacttactccaaccacacgtctttccactacatcggcttgttttactaagtaggattttattttagggttcaaagaaacatgacatttattggtcaaaatattacactggttgtctattttgttattgttttattttagtttttagaaaggattaatgtacaaaaagatttagagatctgtttcttaaagctacagggtttaaaaaataaaaatgagtgaaaatacttgatgtttcttgaaagataaatttaataataataaataaatacataaatacataaataaaaaagaaagccacaggcctgtaaattttatttgtaaaaaagcatttctatttttatacaaaatttttactgcctcagaaataatggaagttatttattgcctattgttaacttattgggtacctaaagagcagttctctgtctagctagaaccttctgaagtagtctctagaggaattgttctaggaatgggctttttttcaccgttgaaccctagacctgaagttcatgctttatcctctcgttgtttgtatctgtctgattattttgtttgtaacttccattatctagtttacagttcagtcgtctgactttccccgtatgtcacatttgttgaaactggaccttctccccctgtccctcaccccaaaacacccggaatccatcccgtttcgctctctccagatggattctcttggggtttcattgtgctgtggataaggagtgtaagaaatgcaaattatgtgaatggctcggagactccctaatgacctaagatttgcattagtttttctcctgcacccttaaaagtgattttgttgccgctgcatagattctgtgtaactttttactcttccttgttttttccctagacatcttcatgcccgttagttcatcgtttgcctagcatgtccctgtggcgtctcaaaaaaaagtttcatcgtcccgtcattgtttctgatgtctttctgacctcacatcatatttggttctcctactgacctttgatctagtttgacctttgaaatttgcatgtgacctcatctagctatgaattctgggaagtcaatgtgaaaaacattgctgcattcatgcaagactgaaatttattattagacaaattcattatagaaaaaacctgtggcaaaaacgtttctttcttattttttttcttttcctaaaacagacttgaaagtattatacagggattggcattcttcccggtcactggtaacaatagcaatatgtgtccagggacacagaatgttggtttctaacagactacttccaaaaacagtttgagaaaaaaactgtctgattttaagtctctagaggtctgtaatagtttttacatttttcaggcagtgtaaagttttttgataaggccattttaggtggctcactttctcattaagatatatatatagaaccactttttgtagattagtataagaaaaatatttaccctgttttggggcaaatgctacctatttgtgtcaccttttgctgaactcacagttagacaatccatggtttaatgcacatgaaattacctatattttatactgtttcaatgtacaggagaaaggttactgtaaactgtgttatgttggtgcttctgtgaattaagttgtggtttcatcatgagtcttaatgttctttgttgataagacaagtttagaattggtttacttaatacaaaaaaaaaaaaaagaatttcaaaaaaaaaagttgtttgcttaaaaaaaatttcatgtgagggaaaaaaaaaaaacctattccagaataagttttgtgttggcttgtgaagcattgatgtcattttttttaattgtggactatttagatgtgtttgtgttcagcaaaatgtgatgtttttttcttttaaagaaaaaaagtgaaaatatatagtgccaaattccaaaggtacttccttcctagagcttcagtgtgtttcttgtgagaagtaatttgataacatgggtattttattatgtgttttgtataaatccctaatatttaaaaaaaaaaacaaaacaaaaaaaggttacaaagtttgttaacttgctatcctgtggtcttgttgcctgaaattgttattgtttgttatttctctctgatgttttttgtaagacattgtataagtgcccatgtcccacttttttaaccactccgcacatcagtgctgtgaaggcaacctcaccatgtattttcttcataatctatggaaacctctaaggtgagaaagttttgaacttttaaccctttctacccagagctatctggaatgttgatgactttttatactgtcatgatttgagtttgttttggggtgtttccaatttggatttttttccctgcatctatcctctaagttgtttcggtttgactactttgttctttggttaagatccaaaagaaaacagaaaacaattccacgaggccaatctaaagggaaaaaatcctacactacttttactacttttgattatttctcatttttgggaaaagaattcctaatgtgctactagaattccttcttcagttttaacgagtaattggataaaccctgagggaaaacggaggtagattcagcacctaacaatcctgtatgcttttgagatcacgtttagtgctatgtcctagtctagaatattttcatataccttgcagtaaaacgactttgtggcaggacagtctcttgaggggttttgtttctgtttcctaaatactcctaaataatatttctaatcagccattatgctggggcatctctgatcccagtaggtacctctgaatataccaggtgtctggagttagaagcccatagccctttcccagcctttttggtttttttaattgaacacatttcatctaagtaaagctcagttctttatcacaatttactgaccaaatacctagcaccagttcctgctgccactttttaaagtgccatatgactttctacgaacaggtaccttgctgtcttgacaaatcctaatgtcacgcctacagccccaacacaagctccagtcttcctcttcggcatgccctggaagcttcttccagtcttcctcttcggcatgccctggaagcttcttggcctcagctccccttccccgctcagcaccctgttaggatcagtgtgtgtggatgggatagccctgggatggaaaggactagcctctactgatgcaaaaaaacaaaaagcaacacaaacgtttccttcttatagcacatgcacttccttacaatgacatgatttgtattatcctcacatgtgtttactactgctggggccttccttcatcctctgagggctattttgtactttctgcagcaatcagcttaataacaacacttattgcacctgtctctctctgagaacacggtgtgtctcgacacgtaccacgtacgtggaaacacaagagcccaccacttgaatttctaagaccatttcattctgaaacttcttatcaattacctaaatctcaacgaaaaacaatttactgaagccgactcccctccccatctccctctcaacctcaacccacctgcatgcatctcccccagaggaaacactgagggtaggggacaggaggctcaggacgcgccctctgaatcgagtgtttcttcttcacaagtcaccaagagaggacatgagggggaaagtcctttttgcccttctccaaaaaataaccttccacagagacaaactgtccttctatccacttttatcttttaataaatatcaaaaggaaaaagctgcaagggtgcaaagggcctgtgccagaagaaaacacacacagggaaaccgctttttttaatcaattgtagagaatagtcatttttaatctaaattagagaattgtgatacaatggcagtcctcaaaggcgtaacgagttcatctttctttcaccataggggttatagttggcttgtgctactctggaatcattttactgtttgtttttattatcttaagtgctaattaaaaaaaaaataaaattttaaaaaaacctgtagtttcattacctttttgaataatgtcatacaaaaaatgtatttgtttttttgtgctgtgagaattgatgtttgtagattaataatcattttgtttagaattacaaaatagtttttaaatattgtctgagaaaagccaaagttaatgcaacctagtggaaactgtaagaccatttgagtattgtttgttttattgatgcatttggattttgttgtttgatggaatttgagccaaaaaaaaaatacgcaggctttcctatttctacaactgattgtacttatgcattttgtaccagtggaactttttatactggagattaaaaaaaaaatggaaatttttgtggcttgctctggtgggcccctgacaatgactgatttcaagtttgatttcgggttgattgattgattgattgatagaaagaaagttgcttttcttttgagaattaaaaactttggcttgatttcttttttccctttgcttatatctagcattagaattttgtcttaaaataacagcggtaagtttcactttttattctgtattgtgcagttacacaataaggtaattagatttagaagtactcagtcactttaagtggataaatgtattagttaaaactttagggtttgcttttttgctgtttagatcaaagttttttctgattcttctgtcctcattgtgaacataaccgtgtagttgaaacagtcaaacttatttttgtaatgtatgttattgtgtgatgcagttttttgcttctgtctccaatattaaaccattttcctaata

SEQ ID NO: 271723 - DNA, 8036 bp, Artificial Sequence
  derived and/or modified sequence
aaaagggcggtggggcggggggcggggcagggagagggagagaaatccagcagacatctagctctgcctttctttcccagccacagccagggtagggctgataaggcgctgatgcgttgatggcagccttgcagagctagacctgcacttaacttgcagctgcctcccgagcctccaagatgtccacgccctgggtgacaggcggcagggcgctgccccgtgctcccccggctctgctcgacagcagcacgcagtgagagcctcgccgccgccgaggagcaactcatgtaacggcacagccaacaagatgaacggagctttggatcactcagaccaaccagacccagatgccattaagatgtttgtcggacagatcccccggtcatggtcggaaaaggagctgaaagaactttttgagccttacggagccgtctaccagatcaacgtcctccgggaccggagtcagaaccctccgcagagtaaaggttgttgtttcgtaacattttatacaagaaaagctgcacttgaggcccagaatgcactgcacaatattaaaactttacctgggatgcatcatcccattcagatgaaacctgcagatagtgaaaagtccaacgctgtggaagacagaaaattgttcataggaatggtatcgaagaaatgtaatgagaacgacatcagggtgatgttctctccatttggccagatagaagaatgccggatcctccggggacctgatgggctgagtcgaggctgtgcgtttgtcacattttctacaagggcaatggcacagaatgcaatcaaagccatgcatcagtctcagaccatggagggctgctcttcacctatcgtggtgaagtttgctgacactcagaaggacaaagagcaaaggcgcctccagcagcagctcgctcagcagatgcagcagctcaacactgccacctgggggaacctgacagggctgggcggactgaccccacagtatctggcgctcctgcagcaggccacctcctccagcaacctgggtgcgttcagcggcattcaacaaatggcaggcatgaatgctttacagttgcagaacctggcgacgctggctgctgctgcagctgcggcccagacctcagccaccagcaccaatgcaaaccctctctctaccacgagcagcgccctgggagccctcacgagtcccgtggctgcttcaacccccaactccactgctggtgcagccatgaactccttgacctctctcgggactctgcaaggactggctggagccactgttggactgaataatattaatgcactagcagttgctcaaatgctctcaggtatggcggctctgaatggaggacttggcgccacaggcttgacgaatggcacggctggcaccatggacgccctcacccaggcctactcaggaattcaacagtacgcagccgccgcgctgcccactctgtacagccagagcctgctgcagcagcagagcgctgcaggcagccagaaggaaggtccagagggggcaaacctctttatttaccaccttccacaggaatttggagaccaggacattctgcagatgttcatgccttttggaaatgttatctctgctaaagtcttcattgacaaacagaccaatctgagcaagtgctttggttttgttagctacgacaatccagtctctgcacaagctgctatccaagctatgaatggctttcagatcggcatgaaacgcttgaaggtgcagctgaagcgttccaaaaacgacagcaaaccttactgatcctaaccccagaggctccctgctctcattttagctttcttaggacatcttcatgcccgttagttcatcgtttgcctagcatgtccctgtggcgtctcaaaaaaaagtttcatcgtcccgtcattgtttctgatgtctttctgacctcacatcatatttggttctcctactgacctttgatctagtttgacctttgaaatttgcatgtgacctcatctagctatgaattctgggaagtcaatgtgaaaaacattgctgcattcatgcaagactgaaatttattattagacaaattcattatagaaaaaacctgtggcaaaaacgtttctttcttattttttttcttttcctaaaacagacttgaaagtattatacagggattggcattcttcccggtcactggtaacaatagcaatatgtgtccagggacacagaatgttggtttctaacagactacttccaaaaacagtttgagaaaaaaactgtctgattttaagtctctagaggtctgtaatagtttttacatttttcaggcagtgtaaagttttttgataaggccattttaggtggctcactttctcattaagatatatatatagaaccactttttgtagattagtataagaaaaatatttaccctgttttggggcaaatgctacctatttgtgtcaccttttgctgaactcacagttagacaatccatggtttaatgcacatgaaattacctatattttatactgtttcaatgtacaggagaaaggttactgtaaactgtgttatgttggtgcttctgtgaattaagttgtggtttcatcatgagtcttaatgttctttgttgataagacaagtttagaattggtttacttaatacaaaaaaaaaaaaaagaatttcaaaaaaaaaagttgtttgcttaaaaaaaatttcatgtgagggaaaaaaaaaaaacctattccagaataagttttgtgttggcttgtgaagcattgatgtcattttttttaattgtggactatttagatgtgtttgtgttcagcaaaatgtgatgtttttttcttttaaagaaaaaaagtgaaaatatatagtgccaaattccaaaggtacttccttcctagagcttcagtgtgtttcttgtgagaagtaatttgataacatgggtattttattatgtgttttgtataaatccctaatatttaaaaaaaaaaacaaaacaaaaaaaggttacaaagtttgttaacttgctatcctgtggtcttgttgcctgaaattgttattgtttgttatttctctctgatgttttttgtaagacattgtataagtgcccatgtcccacttttttaaccactccgcacatcagtgctgtgaaggcaacctcaccatgtattttcttcataatctatggaaacctctaaggtgagaaagttttgaacttttaaccctttctacccagagctatctggaatgttgatgactttttatactgtcatgatttgagtttgttttggggtgtttccaatttggatttttttccctgcatctatcctctaagttgtttcggtttgactactttgttctttggttaagatccaaaagaaaacagaaaacaattccacgaggccaatctaaagggaaaaaatcctacactacttttactacttttgattatttctcatttttgggaaaagaattcctaatgtgctactagaattccttcttcagttttaacgagtaattggataaaccctgagggaaaacggaggtagattcagcacctaacaatcctgtatgcttttgagatcacgtttagtgctatgtcctagtctagaatattttcatataccttgcagtaaaacgactttgtggcaggacagtctcttgaggggttttgtttctgtttcctaaatactcctaaataatatttctaatcagccattatgctggggcatctctgatcccagtaggtacctctgaatataccaggtgtctggagttagaagcccatagccctttcccagcctttttggtttttttaattgaacacatttcatctaagtaaagctcagttctttatcacaatttactgaccaaatacctagcaccagttcctgctgccactttttaaagtgccatatgactttctacgaacaggtaccttgctgtcttgacaaatcctaatgtcacgcctacagccccaacacaagctccagtcttcctcttcggcatgccctggaagcttcttggcctcagctccccttccccgctcagcaccctgttaggatcagtgtgtgtggatgggatagccctgggatggaaaggactagcctctactgatgcaaaaaaacaaaaagcaacacaaacgtttccttcttatagcacatgcacttccttacaatgacatgatttgtattatcctcacatgtgtttactactgctggggccttccttcatcctctgagggctattttgtactttctgcagcaatcagcttaataacaacacttattgcacctgtctctctctgagaacacggtgtgtctcgacacgtaccacgtacgtggaaacacaagagcccaccacttgaatttctaagaccatttcattctgaaacttcttatcaattacctaaatctcaacgaaaaacaatttactgaagccgactcccctccccatctccctctcaacctcaacccacctgcatgcatctcccccagaggaaacactgagggtaggggacaggaggctcaggacgcgccctctgaatcgagtgtttcttcttcacaagtcaccaagagaggacatgagggggaaagtcctttttgcccttctccaaaaaataaccttccacagagacaaactgtccttctatccacttttatcttttaataaatatcaaaaggaaaaagctgcaagggtgcaaagggcctgtgccagaagaaaacacacacagggaaaccgctttttttaatcaattgtagagaatagtcatttttaatctaaattagagaattgtgatacaatggcagtcctcaaaggcgtaacgagttcatctttctttcaccataggggttatagttggcttgtgctactctggaatcattttactgtttgtttttattatcttaagtgctaattaaaaaaaaaataaaattttaaaaaaacctgtagtttcattacctttttgaataatgtcatacaaaaaatgtatttgtttttttgtgctgtgagaattgatgtttgtagattaataatcattttgtttagaattacaaaatagtttttaaatattgtctgagaaaagccaaagttaatgcaacctagtggaaactgtaagaccatttgagtattgtttgttttattgatgcatttggattttgttgtttgatggaatttgagccaaaaaaaaaatacgcaggctttcctatttctacaactgattgtacttatgcattttgtaccagtggaactttttatactggagattaaaaaaaaaatggaaatttttgtggcttgctctggtgggcccctgacaatgactgatttcaagtttgatttcgggttgattgattgattgattgatagaaagaaagttgcttttcttttgagaattaaaaactttggcttgatttcttttttccctttgcttatatctagcattagaattttgtcttaaaataacagcggtaagtttcactttttattctgtattgtgcagttacacaataaggtaattagatttagaagtactcagtcactttaagtggataaatgtattagttaaaactttagggtttgcttttttgctgtttagatcaaagttttttctgattcttctgtcctcattgtgaacataaccgtgtagttgaaacagtcaaacttatttttgtaatgtatgttattgtgtgatgcagttttttgcttctgtctccaatattaaaccattttcctaatacttgtttctctctctgcgtgttgtattgttggtagtcattatatgttggtgatacatctgcacacctcactgtttcacgtatctgtttttttctctatgttgtgtaaaaagatacagtcgattccacttaagtgaatatctgatttggggaagaggaaactgcacagcagccacctttgatttatgtacaaccgcccacttgaactcctgcttccaagatttatacacttttttcctacagttcacctcagtaactgcctttggggttggatttgccaaggtgttttacggtcttttgaccacacaggttaatttccccttctctcccctccctcatgagtctatccacgcagttcttaacatacattccaaactgctgcggggtttcctctccacacccacgaggccaaacccgcatcattacagtccaactcttcttagacactaatcactttctaaaagaagtgagttctccagggaagaaaaatcaacttagccagtgaaaagggttaaacttaagtctattatttgttgccctcaatcaaaagatatgtatagaaaagtcatttaaattatttatttctacaagctaattgaatccaggagcagctttaattattaacactaacggaagagaaaagaagtatttccaagggctcaaatggaagctgtactcagtccggtggaggcagggggaggtaaagtttctcacactcaagtcgtcttcatagtttactgtccttttccaaacaaaagctaataacgccatacgcatccacacactccctcctggatgaacctaagtctcgtccccactgtcaccccaaggccagttatcaaaaactgttccttctctgccctcaaagactgaagccgcaggccctgttctgcctctgctcaggaatctgattgctcttaaagtgctcttacaagattccgtcgatgtttgctccctctgtcttatctctccttccagtattttcagacgcacaagctctgactcaggccacccagcacctggcagccttcctctgcgtgccagtgaaatctctcccagtaggtgctcaggctcttcaccctctcgttgcagcagcccctctggcccgagattgtattttctagtctgctcaagaacagaggggcctggcgaggtggaggaagggaggctccctccccggggctggccgcctcagtgatggtgatgccaccagctccagcctgcacggatggagctcacttcctaccatcacttctgctttcagtctcctcatagccttcggcagtctcctctgaaaacacactgcctacgttagtgggaaaggatggctaagggtgtgatttctttttattagggaggtgggagggggatgttgggaggcatggggggtgattaaattatcatttccaaggtgcaagtgtttatttttcaaatctataagtacatagttccaccattttggcacaagacaaaatactcatgctaagcaaaggaagagaaagacaaagccagtttttgttgcttttctaaagcaacaaataattctccaaagaaggggatgaaaatgctagttcctttaagcacttactgactgtaaagttggtccctgcttaaattcatacccatagttttgagtcggtatgacaccactgcagtgtgagcaaggtgaatccgtgtgccatgcatggaccaccttgggataccgcagcaccatcaacatccgccttgctgatggaagccacacacgctgcccagcccacagcagtcgcacgcagccgatgggctcggactcttagctggcaggctaggacacacagtgaacattaatgtactgtgaatcgttcctgataagtgaataaaacattgtgaccaaacaatcagcttattcacttatcaggaatcgactgttctgctaatttgctgttgttgtttttcatctctgttgtagttcactatttttgctgtgttctgttttctcctctcatgcttgggcaaatcactgggaatattatcttcatgtgaccatgaaacgtttctattgagtgaaaatgatatcttaacaaaatctatgcacttgctatcaggaacacaatactggatgtgtcttatatatattgaactatatagtactcgatttcttaaataaagcttaagaaaggactctgttgtgtgtaaagttaatgtgattatttttcaaagcagtgtttctaaggggtatttttgttcttttaagtcttgagtgatacaggatatttttcattaaaattatatcactggctttatgacttaatattcaataaattgactttgg

SEQ ID NO: 271724 - DNA, 5763 bp, Artificial Sequence
  derived and/or modified sequence
aaaagggcggtggggcggggggcggggcagggagagggagagaaatccagcagacatctagctctgcctttctttcccagccacagccagggtagggctgataaggcgctgatgcgttgatggcagccttgcagagctagacctgcacttaacttgcagctgcctcccgagcctccaagatgtccacgccctgggtgacaggcggcagggcgctgccccgtgctcccccggctctgctcgacagcagcacgcagtgagagcctcgccgccgccgaggagcaactcatgtaacggcacagccaacaagatgaacggagctttggatcactcagaccaaccagacccagatgccattaagatgtttgtcggacagatcccccggtcatggtcggaaaaggagctgaaagaactttttgagccttacggagccgtctaccagatcaacgtcctccgggaccggagtcagaaccctccgcagagtaaaggttgttgtttcgtaacattttatacaagaaaagctgcacttgaggcccagaatgcactgcacaatattaaaactttacctgggatgcatcatcccattcagatgaaacctgcagatagtgaaaagtccaacgctgtggaagacagaaaattgttcataggaatggtatcgaagaaatgtaatgagaacgacatcagggtgatgttctctccatttggccagatagaagaatgccggatcctccggggacctgatgggctgagtcgaggctgtgcgtttgtcacattttctacaagggcaatggcacagaatgcaatcaaagccatgcatcagtctcagaccatggagggctgctcttcacctatcgtggtgaagtttgctgacactcagaaggacaaagagcaaaggcgcctccagcagcagctcgctcagcagatgcagcagctcaacactgccacctgggggaacctgacagggctgggcggactgaccccacagtatctggcgctcctgcagcaggccacctcctccagcaacctgggtgcgttcagcggcattcaacaaatggcaggcatgaatgctttacagttgcagaacctggcgacgctggctgctgctgcagctgcggcccagacctcagccaccagcaccaatgcaaaccctctctctaccacgagcagcgccctgggagccctcacgagtcccgtggctgcttcaacccccaactccactgctggtgcagccatgaactccttgacctctctcgggactctgcaaggactggctggagccactgttggactgaataatattaatgcactagcagttgctcaaatgctctcaggtatggcggctctgaatggaggacttggcgccacaggcttgacgaatggcacggctggcaccatggacgccctcacccaggcctactcaggaattcaacagtacgcagccgccgcgctgcccactctgtacagccagagcctgctgcagcagcagagcgctgcaggcagccagaaggaaggtccagagggggcaaacctctttatttaccaccttccacaggaatttggagaccaggacattctgcagatgttcatgccttttggaaatgttatctctgctaaagtcttcattgacaaacagaccaatctgagcaagtgctttggttttgttagctacgacaatccagtctctgcacaagctgctatccaagctatgaatggctttcagatcggcatgaaacgcttgaaggtgcagctgaagcgttccaaaaacgacagcaaaccttactgatcctaaccccagaggctccctgctctcattttagctttcttaggacatcttcatgcccgttagttcatcgtttgcctagcatgtccctgtggcgtctcaaaaaaaagtttcatcgtcccgtcattgtttctgatgtctttctgacctcacatcatatttggttctcctactgacctttgatctagtttgacctttgaaatttgcatgtgacctcatctagctatgaattctgggaagtcaatgtgaaaaacattgctgcattcatgcaagactgaaatttattattagacaaattcattatagaaaaaacctgtggcaaaaacgtttctttcttattttttttcttttcctaaaacagacttgaaagtattatacagggattggcattcttcccggtcactggtaacaatagcaatatgtgtccagggacacagaatgttggtttctaacagactacttccaaaaacagtttgagaaaaaaactgtctgattttaagtctctagaggtctgtaatagtttttacatttttcaggcagtgtaaagttttttgataaggccattttaggtggctcactttctcattaagatatatatatagaaccactttttgtagattagtataagaaaaatatttaccctgttttggggcaaatgctacctatttgtgtcaccttttgctgaactcacagttagacaatccatggtttaatgcacatgaaattacctatattttatactgtttcaatgtacaggagaaaggttactgtaaactgtgttatgttggtgcttctgtgaattaagttgtggtttcatcatgagtcttaatgttctttgttgataagacaagtttagaattggtttacttaatacaaaaaaaaaaaaaagaatttcaaaaaaaaaagttgtttgcttaaaaaaaatttcatgtgagggaaaaaaaaaaaacctattccagaataagttttgtgttggcttgtgaagcattgatgtcattttttttaattgtggactatttagatgtgtttgtgttcagcaaaatgtgatgtttttttcttttaaagaaaaaaagtgaaaatatatagtgccaaattccaaaggtacttccttcctagagcttcagtgtgtttcttgtgagaagtaatttgataacatgggtattttattatgtgttttgtataaatccctaatatttaaaaaaaaaaacaaaacaaaaaaaggttacaaagtttgttaacttgctatcctgtggtcttgttgcctgaaattgttattgtttgttatttctctctgatgttttttgtaagacattgtataagtgcccatgtcccacttttttaaccactccgcacatcagtgctgtgaaggcaacctcaccatgtattttcttcataatctatggaaacctctaaggtgagaaagttttgaacttttaaccctttctacccagagctatctggaatgttgatgactttttatactgtcatgatttgagtttgttttggggtgtttccaatttggatttttttccctgcatctatcctctaagttgtttcggtttgactactttgttctttggttaagatccaaaagaaaacagaaaacaattccacgaggccaatctaaagggaaaaaatcctacactacttttactacttttgattatttctcatttttgggaaaagaattcctaatgtgctactagaattccttcttcagttttaacgagtaattggataaaccctgagggaaaacggaggtagattcagcacctaacaatcctgtatgcttttgagatcacgtttagtgctatgtcctagtctagaatattttcatataccttgcagtaaaacgactttgtggcaggacagtctcttgaggggttttgtttctgtttcctaaatactcctaaataatatttctaatcagccattatgctggggcatctctgatcccagtaggtacctctgaatataccaggtgtctggagttagaagcccatagccctttcccagcctttttggtttttttaattgaacacatttcatctaagtaaagctcagttctttatcacaatttactgaccaaatacctagcaccagttcctgctgccactttttaaagtgccatatgactttctacgaacaggtaccttgctgtcttgacaaatcctaatgtcacgcctacagccccaacacaagctccagtcttcctcttcggcatgccctggaagcttcttccagtcttcctcttcggcatgccctggaagcttcttggcctcagctccccttccccgctcagcaccctgttaggatcagtgtgtgtggatgggatagccctgggatggaaaggactagcctctactgatgcaaaaaaacaaaaagcaacacaaacgtttccttcttatagcacatgcacttccttacaatgacatgatttgtattatcctcacatgtgtttactactgctggggccttccttcatcctctgagggctattttgtactttctgcagcaatcagcttaataacaacacttattgcacctgtctctctctgagaacacggtgtgtctcgacacgtaccacgtacgtggaaacacaagagcccaccacttgaatttctaagaccatttcattctgaaacttcttatcaattacctaaatctcaacgaaaaacaatttactgaagccgactcccctccccatctccctctcaacctcaacccacctgcatgcatctcccccagaggaaacactgagggtaggggacaggaggctcaggacgcgccctctgaatcgagtgtttcttcttcacaagtcaccaagagaggacatgagggggaaagtcctttttgcccttctccaaaaaataaccttccacagagacaaactgtccttctatccacttttatcttttaataaatatcaaaaggaaaaagctgcaagggtgcaaagggcctgtgccagaagaaaacacacacagggaaaccgctttttttaatcaattgtagagaatagtcatttttaatctaaattagagaattgtgatacaatggcagtcctcaaaggcgtaacgagttcatctttctttcaccataggggttatagttggcttgtgctactctggaatcattttactgtttgtttttattatcttaagtgctaattaaaaaaaaaataaaattttaaaaaaacctgtagtttcattacctttttgaataatgtcatacaaaaaatgtatttgtttttttgtgctgtgagaattgatgtttgtagattaataatcattttgtttagaattacaaaatagtttttaaatattgtctgagaaaagccaaagttaatgcaacctagtggaaactgtaagaccatttgagtattgtttgttttattgatgcatttggattttgttgtttgatggaatttgagccaaaaaaaaaatacgcaggctttcctatttctacaactgattgtacttatgcattttgtaccagtggaactttttatactggagattaaaaaaaaaatggaaatttttgtggcttgctctggtgggcccctgacaatgactgatttcaagtttgatttcgggttgattgattgattgattgatagaaagaaagttgcttttcttttgagaattaaaaactttggcttgatttcttttttccctttgcttatatctagcattagaattttgtcttaaaataacagcggtaagtttcactttttattctgtattgtgcagttacacaataaggtaattagatttagaagtactcagtcactttaagtggataaatgtattagttaaaactttagggtttgcttttttgctgtttagatcaaagttttttctgattcttctgtcctcattgtgaacataaccgtgtagttgaaacagtcaaacttatttttgtaatgtatgttattgtgtgatgcagttttttgcttctgtctccaatattaaaccattttcctaata

SEQ ID NO: 271725 - protein, 562 aa, Artificial Sequence
  derived and/or modified sequence
MSRVHGMHPKETTRQLSLAVKDGLIVETLTVGCKGSKAGIEQEGYWLPGDEIDWETENHDWYCFECHLPGEVLICDLCFRVYHSKCLSDEFRLRDSSSPWQCPVCRSIKKKNTNKQEMGTYLRFIVSRMKERAIDLNKKGKDNKHPMYRRLVHSAVDVPTIQEKVNEGKYRSYEEFKADAQLLLHNTVIFYGADSEQADIARMLYKDTCHELDELQLCKNCFYLSNARPDNWFCYPCIPNHELVWAKMKGFGFWPAKVMQKEDNQVDVRFFGHHHQRAWIPSENIQDITVNIHRLHVKRSMGWKKACDELELHQRFLREGRFWKSKNEDRGEEEAESSISSTSNEQLKVTQEPRAKKGRRNQSVEPKKEEPEPETEAVSSSQEIPTMPQPIEKVSVSTQTKKLSASSPRMLHRSTQTTNDGVCQSMCHDKYTKIFNDFKDRMKSDHKRETERVVREALEKLRSEMEEEKRQAVNKAVANMQGEMDRKCKQVKEKCKEEFVEEIKKLATQHKQLISQTKKKQWCYNCEEEAMYHCCWNTSYCSIKCQQEHWHAEHKRTCRRKR

SEQ ID NO: 271726 - protein, 602 aa, Artificial Sequence
  derived and/or modified sequence
MARLTKRRQADTKAIQHLWAAIEIIRNQKQIANIDRITKYMSRVHGMHPKETTRQLSLAVKDGLIVETLTVGCKGSKAGIEQEGYWLPGDEIDWETENHDWYCFECHLPGEVLICDLCFRVYHSKCLSDEFRLRDSSSPWQCPVCRSIKKKNTNKQEMGTYLRFIVSRMKERAIDLNKKGKDNKHPMYRRLVHSAVDVPTIQEKVNEGKYRSYEEFKADAQLLLHNTVIFYGADSEQADIARMLYKDTCHELDELQLCKNCFYLSNARPDNWFCYPCIPNHELVWAKMKGFGFWPAKVMQKEDNQVDVRFFGHHHQRAWIPSENIQDITVNIHRLHVKRSMGWKKACDELELHQRFLREGRFWKSKNEDRGEEEAESSISSTSNEQLKVTQEPRAKKGRRNQSVEPKKEEPEPETEAVSSSQEIPTMPQPIEKVSVSTQTKKLSASSPRMLHRSTQTTNDGVCQSMCHDKYTKIFNDFKDRMKSDHKRETERVVREALEKLRSEMEEEKRQAVNKAVANMQGEMDRKCKQVKEKCKEEFVEEIKKLATQHKQLISQTKKKQWCYNCEEEAMYHCCWNTSYCSIKCQQEHWHAEHKRTCRRKR

SEQ ID NO: 271727 - DNA, 4411 bp, Artificial Sequence
  derived and/or modified sequence
agtgttcttgcagggctgctgatgggtggtcctgttcttttcgcggtcctgtttgcgcagagatgaaacggggaacttagcgtatccctaccgctctttttgatgacaggagtaaagggctgttcagactacctaaacaatgttgttaagagaagcactcgtacttctcagacttcgctgttccggaccccgcgagccaggggcaggcaccgggtccacccggggctgagctgcggcggcgcctgacaatgccccctcgcgccccggcctcggcgcccgctcccggctccagcgcgcctgcacgtacgtagccttcacgtgtgtgtggatacggagtgcatgtgtggagacagaggaatatgctccaacaaatttcggatagaggcgccgaagacaggacgtggggaagctaaagaagtaaacaggtcatggcacgtttaacaaaaagacgacaggcggatacaaaagctatccagcatctttgggcagccattgagattatacggaaccagaagcagattgccaacattgaccgtattacaaagtatatgtctcgagtccacggtatgcaccctaaagagaccacccgtcagctgagcttagctgtgaaagatggtcttattgtcgaaactctaacagtgggctgcaaaggttcaaaagctggtattgaacaagaaggatattggttgccaggagatgagattgactgggaaacagaaaatcatgactggtattgttttgaatgccatttgcctggagaggtgttgatatgtgacctgtgttttcgtgtgtatcattccaagtgtttgtctgatgagttcaggcttagagacagcagtagtccctggcagtgcccagtttgcaggagcattaagaagaagaatacaaacaaacaggagatgggcacatacctcagattcattgtctcccgcatgaaggagagggctatagatcttaataaaaaggggaaggacaataaacacccgatgtacaggaggctggtgcactcagctgtggacgttcccaccattcaagagaaagtgaatgaagggaaataccgaagttatgaagagttcaaagctgatgcccaattgcttctccacaataccgtgattttctatggagcagacagtgagcaagctgacattgcgaggatgctatataaagacacatgtcatgagctggatgaactgcagctttgcaagaattgcttttacttgtcaaatgctcgtcctgacaactggttctgttatccttgtatacctaatcatgagctggtttgggctaaaatgaaaggttttgggttttggccagccaaagtcatgcagaaagaagacaatcaagtcgacgttcgcttctttggccaccaccaccagagggcctggattccttctgaaaacattcaagatatcacagtcaacattcatcggctgcacgtgaagcgcagtatgggttggaaaaaggcctgtgatgagctggagctgcatcagcgtttcctacgagaagggagattttggaaatctaagaatgaggaccgaggtgaggaagaggcagaatccagtatctcctccaccagtaatgagcagctaaaggtcactcaagaaccaagagcaaagaaaggacgacgtaatcaaagtgtggagcccaaaaaggaagaaccagagcctgaaacagaagcagtaagttctagccaggaaatacccacgatgcctcagcccatcgaaaaagtctccgtgtcaactcagacaaagaagttaagtgcctcttcaccaagaatgctgcatcggagcacccagaccacaaacgacggcgtgtgtcagagcatgtgccatgacaaatacaccaagatcttcaatgacttcaaagaccggatgaagtcggaccacaagcgggagacagagcgtgttgtccgagaagctctggagaagctgcgttctgaaatggaagaagaaaagagacaagctgtaaataaagctgtagccaacatgcagggtgagatggacagaaaatgtaagcaagtaaaggaaaagtgtaaggaagaatttgtagaagaaatcaagaagctggcaacacagcacaagcaactgatttctcagaccaagaagaagcagtggtgctacaactgtgaggaggaggccatgtaccactgctgctggaacacatcctactgctccatcaagtgccagcaggagcactggcacgcggagcacaagcgcacctgccgccggaaaagatgaagctggcccttcccggagtcaccccgatgattactcttttcagacacagcggtttttgtttccaagaagccaaaattgtttagaatttgcttcccattttgcaccagcctttaaacacttttcgtgaagaaattttgcacagtagtttaaatcttttgttaatgctcctccgaagtttttcagggggtaaaagtaacatcagtggagggtattattttaaataaattttaattgagaatttgttgcattttcagcaaattttaaaacatttttaggttttacagagattttaacctttaaacaacagatctttaaaaaacaggtgaatacaagtgagtttaacaaagaaacatttagaatagatctgaatgtaagaactacagaactgtttcagaaataaaacatactaccttgatgtgacatttttttcttaaccttgttgagctggttttgttcagcttaatttactgttcaaaggcattatctgttggtcacaccagtgggtatatgattgaatttagggaacagggttgacacagcagggctagtcctgcatattttttcttaaatatttcccaattgtgtttttcattatttcttttcaatatataacttttataacaaattattagctttgatcttgtagtttaaaattgcagggaactggggtaatcttttactgagctggatcttagagaaaatgaatatttaaattttaaagtttgcacatttcatctttgtcctaacatgagtgcttgtaacaaaataaacaacaaaaacaaagccaaaaactacctttatccatatgtgaaattatagatgaggcatacgaatttgtttaatgcttcccttcccttcccacatatcatctcactgcctattatctggtgtcacctcatgtatcgtaagttaatactaaaagaagagaaagcacttaagtttcacagaagccgttatgtttgtagtaatgggtcattgcctactaatgaactccatcactgtacacagaatgaagaataatgcatgttaattttcttgtattaaagatgccgtgatttgtaaaaagtctgtattttgcggaatgtctggattaagaagcattaccaataggaatggatcgatagttgaataatgattttttatacatagatatataaaatacagccaggaaaacttaaattacttttcttttaaaatatctcacaatttatgtggtatttttaaagactgatcttagaccaagtcaaattcccatttatcatttagttattttttgaggttagagaataatttgtacatatttatttagacctttgatatttattaaagcaattactcacaatggaagtgaaagaatcaggagaaaagccttttaaaaagtattctccaggtttgtcagggtcactctaaagataaaaatgtaactaagtcttctgtgaaatatcatccatctaatcttgatgctgttgcagatggtggtgacacaagttaattgacaaactactgccaaatggtgcacaatattttgtaaaaagtacccagtagccccatttcatacaatgtacctaaattatgcagtaacttggcatcatcgttccctccttgttgctgtgtaattagtcagtgttgccacagtgtgtggcgctgatggagatgtcagaaccgagaacacttaaccttctttgattgtttttcaagttttaagacttcgatccacccctatgagagcaagtaattgtggaaatatttttggtgtaaaatcattccagagtatgtaatatttaactgatagctgcatgaaagtgagattcgtgttactttggcttttctgtctctgttgacacggttgcacatttccaagttactacagcgtgaaaactgtgtgtttaaaaaaaaacaaaattaaaaaaagagattgtggcctggttttgtaaaagttttaggtaaaattacaattgattgttttaggaatcattattaaaaattttctgcaaatcataaagctatatcgaggtgttgagcttagccactatgcacattgtaattattcattgtggctgtccagttctatgatgcattctggcattttgtaagctgctctgactagcaatatatagattcatttaatgtgttaacattggttaataaatgtatttaaaaaaaactaaaaaaaa

SEQ ID NO: 271728 - DNA, 1809 bp, Artificial Sequence
  derived and/or modified sequence
atggccagactgaccaagagaagacaggccgacaccaaggccatccagcacctgtgggccgccatcgagatcatcagaaaccagaagcagatcgccaacatcgacagaatcaccaagtacatgagcagagtgcacggcatgcaccccaaggagaccaccagacagctgagcctggccgtgaaggacggcctgatcgtggagaccctgaccgtgggctgcaagggcagcaaggccggcatcgagcaggagggctactggctgcccggcgacgagatcgactgggagaccgagaaccacgactggtactgcttcgagtgccacctgcccggcgaggtgctgatctgcgacctgtgcttcagagtgtaccacagcaagtgcctgagcgacgagttcagactgagagacagcagcagcccctggcagtgccccgtgtgcagaagcatcaagaagaagaacaccaacaagcaggagatgggcacctacctgagattcatcgtgagcagaatgaaggagagagccatcgacctgaacaagaagggcaaggacaacaagcaccccatgtacagaagactggtgcacagcgccgtggacgtgcccaccatccaggagaaggtgaacgagggcaagtacagaagctacgaggagttcaaggccgacgcccagctgctgctgcacaacaccgtgatcttctacggcgccgacagcgagcaggccgacatcgccagaatgctgtacaaggacacctgccacgagctggacgagctgcagctgtgcaagaactgcttctacctgagcaacgccagacccgacaactggttctgctacccctgcatccccaaccacgagctggtgtgggccaagatgaagggcttcggcttctggcccgccaaggtgatgcagaaggaggacaaccaggtggacgtgagattcttcggccaccaccaccagagagcctggatccccagcgagaacatccaggacatcaccgtgaacatccacagactgcacgtgaagagaagcatgggctggaagaaggcctgcgacgagctggagctgcaccagagattcctgagagagggcagattctggaagagcaagaacgaggacagaggcgaggaggaggccgagagcagcatcagcagcaccagcaacgagcagctgaaggtgacccaggagcccagagccaagaagggcagaagaaaccagagcgtggagcccaagaaggaggagcccgagcccgagaccgaggccgtgagcagcagccaggagatccccaccatgccccagcccatcgagaaggtgagcgtgagcacccagaccaagaagctgagcgccagcagccccagaatgctgcacagaagcacccagaccaccaacgacggcgtgtgccagagcatgtgccacgacaagtacaccaagatcttcaacgacttcaaggacagaatgaagagcgaccacaagagagagaccgagagagtggtgagagaggccctggagaagctgagaagcgagatggaggaggagaagagacaggccgtgaacaaggccgtggccaacatgcagggcgagatggacagaaagtgcaagcaggtgaaggagaagtgcaaggaggagttcgtggaggagatcaagaagctggccacccagcacaagcagctgatcagccagaccaagaagaagcagtggtgctacaactgcgaggaggaggccatgtaccactgctgctggaacaccagctactgcagcatcaagtgccagcaggagcactggcacgccgagcacaagagaacctgcagaagaaagagatag

SEQ ID NO: 271729 - DNA, 1809 bp, Artificial Sequence
  derived and/or modified sequence
atggcccgcctaacaaaacgccgccaagccgacaccaaggcaatacagcatctgtgggccgccatcgaaataattagaaaccagaaacagatagcaaacatcgacaggattaccaagtacatgtctagagtacacgggatgcatccgaaggagactacgcggcaattgagcctcgccgtgaaagacgggctaatcgtggaaaccttgactgtcgggtgcaagggaagcaaggctggcattgaacaggagggatattggctcccgggcgatgaaatcgattgggaaacagagaaccacgattggtattgttttgagtgtcatctaccaggagaggtccttatatgtgacctgtgctttcgagtgtatcattccaagtgtctgtcggatgagttccgcctaagggactcctcctctccttggcagtgtccagtatgtagatctatcaaaaagaaaaatacaaataaacaggagatgggcacctacctccgattcatcgtctcccggatgaaggagcgtgctattgatctaaacaaaaaagggaaggataacaagcatcctatgtatcgacgcctggtgcactccgctgttgatgtgccaaccattcaagaaaaagtcaatgaaggcaaataccggtcgtatgaagagttcaaggctgacgcccagcttctgttgcacaataccgtgatcttctatggcgctgacagcgaacaagcagacattgcccggatgttgtataaggacacctgtcacgaactggacgaactgcagctgtgtaaaaactgcttctacttaagtaatgcgcgtcccgacaattggttttgctatccttgcatcccgaaccatgagctggtttgggccaagatgaagggattcggcttttggcccgcgaaggttatgcaaaaggaagataaccaagtcgacgtgaggtttttcggccaccaccaccagcgggcatggatcccgtcagagaatatccaggatattactgtgaatatacatagactccacgtgaagcgtagcatgggctggaaaaaagcctgcgatgaacttgagcttcatcaaaggtttctgcgcgaaggcagattttggaagtccaaaaacgaggatcgtggagaggaagaagccgagagcagcatctcctctactagtaacgaacagttaaaagtgactcaggagccgcgggcaaagaagggcagacgtaatcagagtgtcgagcctaagaaggaggagcccgaaccggaaacagaggcggtcagcagctcccaggagattcctactatgccccaacccattgagaaagtgagcgtcagcactcagaccaagaaattgagcgcatcaagtccaagaatgcttcatagaagcacgcagaccactaatgatggagtatgccaaagcatgtgtcacgataaatatacaaagatctttaatgattttaaggataggatgaagagcgaccataaacgcgagaccgagcgtgttgtacgcgaagctctcgaaaagctccgtagcgagatggaggaagaaaagcggcaagctgtgaacaaggccgtggctaatatgcagggcgagatggaccgtaagtgtaagcaagtgaaagaaaagtgcaaggaggaattcgtggaggaaataaaaaagctggccacgcagcataagcagctcatttcacaaaccaaaaaaaagcagtggtgctacaactgcgaggaggaggccatgtaccattgctgctggaacacctcttactgttctatcaagtgtcagcaggagcactggcacgccgagcacaagagaacctgtaggcgcaagcggtag

SEQ ID NO: 271730 - DNA, 1809 bp, Artificial Sequence
  derived and/or modified sequence
atggccaggttgacaaagcgccggcaggctgacacgaaagcaatccagcatttatgggccgctattgagatcatccgcaaccagaagcaaatcgcgaatatcgaccgaataacgaaatacatgtctcgagtccacgggatgcatcccaaggagactacaagacagctgtctctggccgtgaaggacggactgatcgtcgagacattgaccgtcggatgtaaagggagcaaggccggaatcgagcaggagggttactggctacctggggatgaaatcgactgggagaccgagaaccacgactggtattgtttcgagtgccacttaccgggcgaagtgcttatttgcgatctgtgcttccgcgtgtaccatagtaagtgcctttccgatgagtttaggctgcgagactcttcttctccatggcagtgtccagtatgcagatccatcaagaagaagaatacgaacaagcaagagatgggcacctacttgagatttattgtttcccggatgaaggaacgtgcaatcgacctgaacaaaaagggcaaagataacaaacaccccatgtatcggaggctagtgcattcagcagtggatgttcctacgatccaagagaaagtgaacgagggcaaatatagatcatatgaagagttcaaagcggatgctcagcttctgctgcacaacactgttattttttacggtgcagactcagagcaggctgacatcgcccggatgctatacaaagacacatgccacgagcttgacgaactccagttgtgcaagaactgcttctatctatctaacgcacggccagacaactggttctgttatccttgtattcctaatcacgaactcgtgtgggcaaaaatgaaaggtttcggcttttggccagcaaaagtcatgcagaaggaggacaaccaggtagacgtgcgcttctttggtcatcatcaccagcgcgcttggattccaagcgagaatatccaggacatcactgtcaacatccatcggcttcacgtgaaaaggagtatgggctggaaaaaggcctgtgatgagctggagcttcaccagcgcttcctcagggagggacgattttggaagtccaagaacgaggaccgcggcgaagaggaggcggagagcagcattagttcaacttcaaacgagcagctgaaagtgacccaagagcctagagcaaaaaagggaaggcggaatcagtctgtggagcccaagaaagaggagcccgagcccgagacagaagcagtctcttcttcccaagaaattcccactatgccccaacccattgagaaggttagcgtgtccacccagaccaagaaacttagtgcttctagcccccggatgttgcacaggagcactcagaccacaaacgatggtgtgtgccagtccatgtgtcacgataagtatacgaagatttttaacgactttaaggaccgaatgaaaagcgaccacaagcgggagacagaacgggttgtacgggaggccctcgaaaaactccgtagtgaaatggaagaggagaagcggcaagctgtgaataaggctgtcgcaaatatgcagggagagatggaccgcaagtgcaagcaggtgaaagaaaagtgcaaagaggagttcgtcgaggaaataaagaaactggcgacccagcacaaacagctgatcagtcagacaaagaaaaagcagtggtgctataattgcgaggaggaggcgatgtatcattgttgctggaatacatcctattgttccatcaaatgtcaacaggaacactggcacgcagagcacaagcggacctgccggcggaaacggtag

SEQ ID NO: 271731 - DNA, 1809 bp, Artificial Sequence
  derived and/or modified sequence
atggcccggctgaccaagaggcggcaggccgacaccaaggccatccagcacctgtgggccgccatcgagatcatccggaaccagaagcagatcgccaacatcgaccgcatcaccaagtacatgagccgggtgcacggcatgcaccccaaggagaccacccggcagctgagcctggccgtgaaggatggcctgattgtggagaccctgactgtgggctgcaagggcagcaaggccggcatcgagcaggagggctactggctgcctggagatgaaattgactgggagacagaaaatcatgactggtactgctttgagtgccacctgcctggagaggtgctgatctgtgacctgtgcttccgggtgtaccacagcaagtgcctgagtgatgagttccggctgcgggacagcagcagcccctggcagtgccctgtgtgccgcagcatcaagaagaagaacaccaacaagcaggagatgggcacctacctgcgcttcatcgtgtccaggatgaaggagcgggccatcgacctgaacaagaagggcaaggacaacaagcaccccatgtacagaaggctggtgcacagcgctgtggatgtgcccaccatccaggagaaggtgaatgaaggcaagtaccgctcctatgaggagttcaaggcagatgcccagctgctgctgcacaacacagtcatcttctatggagctgacagcgagcaggccgacatcgccaggatgctgtacaaggacacctgccacgagctggatgagctgcagctgtgcaagaactgcttctacctgagcaatgcccggccagacaactggttctgctacccctgcatccccaaccacgagctggtgtgggccaagatgaagggcttcggcttctggccagccaaggtgatgcagaaggaggacaaccaggtggatgtgcgcttcttcggccaccaccaccagagggcctggatccccagcgagaacatccaggacatcaccgtgaacatccaccggctgcacgtgaagaggtccatgggctggaagaaggcctgtgatgagctggagctgcaccagcgcttcctgcgggagggccgcttctggaagagcaagaatgaagatagaggagaggaggaggccgagagcagcatcagcagcaccagcaatgagcagctgaaggtgacccaggagccccgggccaagaagggcagaagaaaccagagcgtggagcccaagaaggaggagcctgagcctgagacagaagctgtgagcagcagccaggagatccccaccatgccccagcccatcgagaaggtgtctgtgtccacccagaccaagaagctgagcgccagcagccccaggatgctgcacaggagcacccagaccaccaatgatggagtgtgccagagcatgtgccacgacaagtacaccaagatcttcaatgacttcaaggacaggatgaagagtgaccacaagcgggagacagagcgggtggtgcgggaggccctggagaagctgcggtctgagatggaggaggagaagaggcaggccgtgaacaaggctgtggccaacatgcagggcgagatggacaggaagtgcaagcaggtgaaggagaagtgcaaggaggagtttgtggaggagatcaagaagctggccacccagcacaagcagctgatcagccagaccaagaagaagcagtggtgctacaactgtgaggaggaggccatgtaccactgctgctggaacaccagctactgcagcatcaagtgccagcaggagcactggcacgccgagcacaagaggacctgcaggaggaagaggtag

SEQ ID NO: 271732 - DNA, 1809 bp, Artificial Sequence
  derived and/or modified sequence
atggcccggctgaccaagcggcggcaggccgacaccaaggccatccagcatctgtgggctgctatcgagatcatcagaaatcaaaagcagatcgccaacattgacagaattacaaaatatatgtccagggtgcatgggatgcatcctaaggagactacccgacaattgtctttggcggtgaaagatggactgatcgtggagaccttaaccgtggggtgtaagggcagtaaagcaggtatcgaacaggaagggtactggcttcccggcgacgaaatagattgggagacagagaatcacgactggtattgtttcgagtgtcacctgcctggggaggtgcttatctgcgatctgtgcttcagggtataccattcaaagtgcctgtctgatgaattccgcctccgtgactcatccagcccatggcagtgtccagtatgtcgctccataaagaaaaagaacaccaataagcaagaaatggggacgtatctaagattcatagtgtcacgaatgaaagagagggcaatcgatttaaataaaaaaggaaaagacaataagcatccaatgtaccggaggctggtccacagcgcagtcgacgtacctactattcaagaaaaagtaaacgaggggaaatataggagttatgaggagttcaaggcagatgcacaattgctcctgcacaacacagtgatcttttatggggctgactccgaacaagcagacatagcccgaatgctatacaaggacacctgccacgagctcgatgagcttcaactgtgcaaaaattgcttctacctgagcaacgctcgaccggataactggttttgttacccttgcattccaaatcatgaactagtgtgggccaaaatgaaagggtttgggttttggcccgcaaaggtgatgcagaaagaagataaccaggtagacgtccgcttcttcgggcaccatcatcaaagggcctggatcccctccgaaaatatccaagatattactgtcaacattcatcggctgcacgtgaaacgcagcatgggatggaagaaggcgtgcgacgagctggagctacatcagagattcttgagagagggaagattttggaagtccaaaaacgaggaccgaggcgaggaggaggcagagtccagtatatcgtctacaagtaacgagcagttgaaggtgacccaggagcctcgggcaaaaaaggggcgacgaaatcagagtgtagaaccaaagaaggaggaacccgagcccgaaacggaggcagtctcatccagtcaggagattcctactatgcctcaaccgattgagaaggtctccgtgtccacacagacaaaaaagctctcagcctcatctccgcgaatgttacacagatcaacacaaactaccaacgacggagtttgtcagtcaatgtgtcacgataagtatacaaaaatctttaacgactttaaggatcgaatgaaatcagaccataagcgtgagacagagagggtggtccgggaagccttggaaaagctgagatcagagatggaagaagagaaaagacaggctgtcaacaaggccgtcgccaatatgcagggggaaatggaccgtaaatgcaagcaggtgaaagaaaaatgcaaagaggagttcgtcgaggagatcaagaagcttgctacacagcacaagcagctgatctctcagaccaagaaaaagcagtggtgctacaactgcgaggaagaggccatgtatcattgctgttggaacaccagttactgtagtatcaaatgccaacaggaacactggcatgcggaacataaacggacatgtcgacgaaagaggtag

SEQ ID NO: 271733 - DNA, 1809 bp, Artificial Sequence
  derived and/or modified sequence
atggcccggctgaccaagcggcggcaggccgacaccaaggccatccagcacctgtgggctgcaatcgagataatccggaatcagaagcagatcgccaatatcgatcggataaccaaatacatgagccgagtgcacggtatgcaccccaaggagactaccaggcagttgtcgctcgccgtgaaggacggtctgattgttgaaaccttgactgtgggctgcaaaggatccaaggccggcatcgagcaggaagggtattggctacctggcgacgagattgattgggaaacagaaaatcacgactggtactgttttgaatgccacctgcccggggaagtgttgatatgcgatctgtgtttccgcgtataccattccaaatgcctatctgatgagtttaggctgcgggatagcagctccccatggcagtgtccggtctgccggtccattaagaagaaaaataccaataagcaggaaatgggaacttacctgcgctttattgtatcaaggatgaaggagcgcgcaatagacttgaataaaaagggcaaggacaacaagcacccaatgtacagaagactcgttcatagtgccgtggatgtgccaactatacaggagaaggttaacgagggcaagtatcggtcctacgaggagttcaaagccgatgcacaattactgctccataataccgtgattttttacggtgcggattcagaacaggcggatattgcccgaatgttgtataaagatacatgccacgagctggatgagctgcaactatgtaagaactgcttttacttgtccaatgctcgccccgataattggttttgttacccctgtattccgaatcacgagcttgtgtgggccaaaatgaaaggcttcggtttctggcccgctaaagtgatgcagaaagaagataatcaggtcgatgtgcggttctttggccaccatcaccaacgcgcctggataccttctgagaacattcaggatattaccgttaatattcatcgcctgcacgtgaagaggtccatgggatggaaaaaagcctgtgatgagttagaattacaccagaggtttctgcgcgaggggcgtttctggaagtccaaaaacgaagatcgaggggaagaagaggccgagtcttctattagttcaacctcaaatgaacagctgaaggtgacccaggagcccagggccaaaaagggacgtcggaaccagagtgtggagccaaagaaagaggagcctgaacctgaaaccgaggccgtatcgagttcacaggaaatccctaccatgcctcagcccatagagaaagtgtccgtgtctactcagaccaaaaagctgtctgcatccagcccccggatgttacaccgttctactcagacaacaaatgacggagtgtgtcagtctatgtgtcatgataaatatacgaaaattttcaatgatttcaaggacagaatgaagagtgaccataagagagaaaccgaacgcgtggtcagagaggcccttgaaaagttgagaagcgaaatggaagaagaaaaaagacaagctgttaataaggctgtcgctaacatgcagggcgaaatggacagaaagtgcaaacaagtcaaggaaaagtgcaaggaggaattcgtggaggagatcaaaaagctcgctactcaacacaagcaactaatctctcagactaagaaaaaacagtggtgctataattgtgaggaggaggctatgtaccattgttgctggaatacctcatactgtagcatcaagtgccagcaggaacattggcatgccgagcacaaacgaacatgccgtcgcaaacgctag

SEQ ID NO: 271734 - DNA, 1809 bp, Artificial Sequence
  derived and/or modified sequence
atggctcgtctgacaaaacgcagacaagctgacaccaaagccatccaacatttgtgggcagccatcgagattattaggaatcagaagcagatcgcaaatatcgatagaattactaaatacatgtcgcgggttcacgggatgcatcccaaagagacaactaggcagctttctctggcagtgaaagatgggctcatcgttgagacactgacggtaggctgcaaaggctcgaaggcaggaatcgaacaagagggatactggctgccaggagatgaaattgactgggagaccgagaaccatgattggtattgcttcgagtgccaccttcctggagaagtgctgatttgcgatctgtgctttagggtttaccactccaaatgtctgagcgacgaatttcgcctgagagactctagtagcccctggcagtgtccggtgtgtcgtagtatcaagaaaaagaacaccaacaagcaggagatggggacttacctccggtttatagtgtctcgcatgaaggaacgggctattgaccttaacaaaaaagggaaagacaataaacatcctatgtacaggagactggtccattcagcagtggatgtgccgaccatacaggaaaaagttaatgagggaaaataccgcagttacgaagagtttaaagccgatgcccagcttttactgcacaatacggtcattttttatggtgctgacagcgagcaggccgacatcgcccgtatgttgtataaagacacgtgccacgagcttgatgaactgcagttgtgcaagaattgtttctatctgtcaaatgccagacccgacaattggttttgctacccctgcattcctaatcatgagctggtgtgggctaaaatgaagggcttcggattttggccggctaaggtcatgcagaaggaagataaccaggttgacgtgcgtttctttggacaccatcatcaaagagcctggatcccaagcgagaatattcaggacatcaccgtgaatatccatcgccttcatgtcaagcgcagcatggggtggaaaaaagcttgtgacgaactcgagctgcaccagaggtttttgcgcgagggaagattttggaaaagtaagaacgaggacaggggcgaggaggaggctgaaagctccattagcagcacatcgaatgagcaacttaaggttacacaggagccaagagctaagaaaggtcgacggaatcagtccgtggagccaaaaaaagaggagccagaacccgaaaccgaggccgtctctagttctcaggagatcccaaccatgcctcagcctatagaaaaggtctccgtctccacgcaaacaaagaaactctccgctagtagcccaagaatgctgcaccgttccacccagacaaccaacgacggcgtgtgccagtctatgtgtcacgacaagtacactaagatcttcaacgattttaaggaccggatgaagtctgaccataagcgtgaaaccgagcgggtggtgagagaggccttggagaaactccgctctgaaatggaggaggagaaaaggcaggcagttaataaggcagtcgctaacatgcagggggaaatggatcgcaagtgcaagcaggtgaaagaaaagtgcaaagaggagtttgtcgaggaaattaaaaagctagccacccaacataagcagctgatatcgcaaaccaaaaagaaacagtggtgctacaattgcgaggaagaggccatgtaccattgctgttggaacaccagctattgcagtatcaaatgtcaacaggagcactggcacgccgaacataaacggacctgccgaagaaagagatag

SEQ ID NO: 271735 - DNA, 1809 bp, Artificial Sequence
  derived and/or modified sequence
atggccagactgaccaaacgtaggcaggctgacactaaggcgattcagcatctctgggcggctattgagatcattagaaatcaaaagcagattgctaacatagaccgtataacaaagtacatgagccgcgttcacgggatgcatcccaaggaaaccacgcggcagttgtcacttgctgtgaaagacggccttatcgtggaaaccctcactgtgggctgcaaaggaagtaaagcaggaatcgaacaagaaggttattggttgccaggtgacgagatcgactgggagacggaaaaccatgactggtactgcttcgagtgccaccttcccggtgaagtcctgatctgcgatctgtgcttcagggtctaccactctaagtgcttgtctgacgagtttcgcctaagagatagctcttcaccctggcagtgtcctgtgtgtagatctattaaaaagaagaatacaaacaagcaggagatggggacatacctgcgctttatcgtcagccgtatgaaagagagggctatcgacctgaataagaagggcaaggacaacaagcatcctatgtatcgcaggctcgttcacagcgcagtggatgtccccacaatccaggagaaggtcaatgaagggaagtatcgatcgtacgaagaatttaaggccgacgctcagctactcctgcacaacaccgttatcttctatggagccgactcagaacaggccgacatagcacggatgctttacaaggacacctgtcatgagctggatgaactgcaattatgcaagaattgcttctacctctcaaacgcacggcctgacaattggttttgttatccttgcatcccgaaccatgaactagtttgggcaaagatgaaaggatttggtttctggcctgccaaggtcatgcaaaaggaggataatcaggttgacgtgaggttttttgggcatcaccatcaaagagcatggattccgtcagaaaatattcaggacatcacagtgaacatacatcggctccacgttaagcgatctatgggctggaaaaaggcatgcgacgagctggaattgcatcagcggttcttgagagaagggagattttggaaatcaaagaatgaagaccggggtgaagaggaggctgagagctcaatttcctcaacatcgaatgagcagcttaaggtaacacaagaacccagggccaaaaaagggaggcgcaatcaaagtgtggagccaaagaaggaagaaccagagcctgaaacagaggccgtgtcctcatcacaggaaatcccgactatgcctcagcctatcgagaaggtctcagttagtacccagaccaagaaactttccgcttctagcccgcgaatgctccatcggagcactcagactaccaatgacggcgtctgccagagcatgtgtcacgacaaatataccaaaatctttaacgacttcaaggaccggatgaagtctgatcacaagagagagactgagcgagtggtgagagaggccttggagaagctgagatccgaaatggaggaggagaaacggcaagccgttaataaggcagttgccaatatgcaaggagagatggacagaaagtgcaagcaggtgaaggaaaagtgcaaagaagagttcgtggaagagattaaaaagctggctacacagcataaacagcttatttctcagacgaaaaaaaaacagtggtgttacaattgcgaagaagaagctatgtatcattgctgttggaacactagttactgctctatcaagtgtcagcaggagcactggcatgccgagcacaaacgcacttgtaggagaaagcggtag

SEQ ID NO: 271736 - DNA, 4393 bp, Artificial Sequence
  derived and/or modified sequence
agtgttcttgcagggctgctgatgggtggtcctgttcttttcgcggtcctgtttgcgcagagatgaaacggggaacttagcgtatccctaccgctctttttgatgacaggagtaaagggctgttcagactacctaaacaatgttgttaagagaagcactcgtacttctcagacttcgctgttccggaccccgcgagccaggggcaggcaccgggtccacccggggctgagctgcggcggcgcctgacaatgccccctcgcgccccggcctcggcgcccgctcccggctccagcgcgcctgcacgtacgtagccttcacgtgtgtgtggatacggagtgcatgtgtggagacagaggaatatgctccaacaaatttcggatagaggcgccgaagacaggacgtggggaagctaaagaagtaaacaggtcatggcacgtttaacaaaaagacgacaggcggatacaaaagctatccagcatctttgggcagccattgagattatacggaaccagaagcagattgccaacattgaccgtattacaaagtatatgtctcgagtccacggtatgcaccctaaagagaccacccgtcagctgagcttagctgtgaaagatggtcttattgtcgaaactctaacagtgggctgcaaaggttcaaaagctggtattgaacaagaaggatattggttgccaggagatgagattgactgggaaacagaaaatcatgactggtattgttttgaatgccatttgcctggagaggtgttgatatgtgacctgtgttttcgtgtgtatcattccaagtgtttgtctgatgagttcaggcttagagacagcagtagtccctggcagtgcccagtttgcaggagcattaagaagaagaatacaaacaaacaggagatgggcacatacctcagattcattgtctcccgcatgaaggagagggctatagatcttaataaaaaggggaaggacaataaacacccgatgtacaggaggctggtgcactcagctgtggacgttcccaccattcaagagaaagtgaatgaagggaaataccgaagttatgaagagttcaaagctgatgcccaattgcttctccacaataccgtgattttctatggagcagacagtgagcaagctgacattgcgaggatgctatataaagacacatgtcatgagctggatgaactgcagctttgcaagaattgcttttacttgtcaaatgctcgtcctgacaactggttctgttatccttgtatacctaatcatgagctggtttgggctaaaatgaaaggttttgggttttggccagccaaagtcatgcagaaagaagacaatcaagtcgacgttcgcttctttggccaccaccaccagagggcctggattccttctgaaaacattcaagatatcacagtcaacattcatcggctgcacgtgaagcgcagtatgggttggaaaaaggcctgtgatgagctggagctgcatcagcgtttcctacgagaagggagattttggaaatctaagaatgaggaccgaggtgaggaagaggcagaatccagtatctcctccaccagtaatgagcagctaaaggtcactcaagaaccaagagcaaagaaaggacgacgtaatcaaagtgtggagcccaaaaaggaagaaccagagcctgaaacagaagcagtaagttctagccaggaaatacccacgatgcctcagcccatcgaaaaagtctccgtgtcaactcagacaaagaagttaagtgcctcttcaccaagaatgctgcatcggagcacccagaccacaaacgacggcgtgtgtcagagcatgtgccatgacaaatacaccaagatcttcaatgacttcaaagaccggatgaagtcggaccacaagcgggagacagagcgtgttgtccgagaagctctggagaagctgcgttctgaaatggaagaagaaaagagacaagctgtaaataaagctgtagccaacatgcagggtgagatggacagaaaatgtaagcaagtaaaggaaaagtgtaaggaagaatttgtagaagaaatcaagaagctggcaacacagcacaagcaactgatttctcagaccaagaagaagcagtggtgctacaactgtgaggaggaggccatgtaccactgctgctggaacacatcctactgctccatcaagtgccagcaggagcactggcacgcggagcacaagcgcacctgccgccggaaaagatgaagctggcccttcccggagtcaccccgatgattactcttttcagacacagcggtttttgtttccaagaagccaaaattgtttagaatttgcttcccattttgcaccagcctttaaacacttttcgtgaagaaattttgcacagtagtttaaatcttttgttaatgctcctccgaagtttttcagggggtaaaagtaacatcagtggagggtattattttaaataaattttaattgagaatttgttgcattttcagcaaattttaaaacatttttaggttttacagagattttaacctttaaacaacagatctttaaaaaacaggtgaatacaagtgagtttaacaaagaaacatttagaatagatctgaatgtaagaactacagaactgtttcagaaataaaacatactaccttgatgtgacatttttttcttaaccttgttgagctggttttgttcagcttaatttactgttcaaaggcattatctgttggtcacaccagtgggtatatgattgaatttagggaacagggttgacacagcagggctagtcctgcatattttttcttaaatatttcccaattgtgtttttcattatttcttttcaatatataacttttataacaaattattagctttgatcttgtagtttaaaattgcagggaactggggtaatcttttactgagctggatcttagagaaaatgaatatttaaattttaaagtttgcacatttcatctttgtcctaacatgagtgcttgtaacaaaataaacaacaaaaacaaagccaaaaactacctttatccatatgtgaaattatagatgaggcatacgaatttgtttaatgcttcccttcccttcccacatatcatctcactgcctattatctggtgtcacctcatgtatcgtaagttaatactaaaagaagagaaagcacttaagtttcacagaagccgttatgtttgtagtaatgggtcattgcctactaatgaactccatcactgtacacagaatgaagaataatgcatgttaattttcttgtattaaagatgccgtgatttgtaaaaagtctgtattttgcggaatgtctggattaagaagcattaccaataggaatggatcgatagttgaataatgattttttatacatagatatataaaatacagccaggaaaacttaaattacttttcttttaaaatatctcacaatttatgtggtatttttaaagactgatcttagaccaagtcaaattcccatttatcatttagttattttttgaggttagagaataatttgtacatatttatttagacctttgatatttattaaagcaattactcacaatggaagtgaaagaatcaggagaaaagccttttaaaaagtattctccaggtttgtcagggtcactctaaagataaaaatgtaactaagtcttctgtgaaatatcatccatctaatcttgatgctgttgcagatggtggtgacacaagttaattgacaaactactgccaaatggtgcacaatattttgtaaaaagtacccagtagccccatttcatacaatgtacctaaattatgcagtaacttggcatcatcgttccctccttgttgctgtgtaattagtcagtgttgccacagtgtgtggcgctgatggagatgtcagaaccgagaacacttaaccttctttgattgtttttcaagttttaagacttcgatccacccctatgagagcaagtaattgtggaaatatttttggtgtaaaatcattccagagtatgtaatatttaactgatagctgcatgaaagtgagattcgtgttactttggcttttctgtctctgttgacacggttgcacatttccaagttactacagcgtgaaaactgtgtgtttaaaaaaaaacaaaattaaaaaaagagattgtggcctggttttgtaaaagttttaggtaaaattacaattgattgttttaggaatcattattaaaaattttctgcaaatcataaagctatatcgaggtgttgagcttagccactatgcacattgtaattattcattgtggctgtccagttctatgatgcattctggcattttgtaagctgctctgactagcaatatatagattcatttaatgtgttaacattggttaataaatgtattt

SEQ ID NO: 271737 - DNA, 4229 bp, Artificial Sequence
  derived and/or modified sequence
gcggccgccccgcgcgcatcgccatgtgagcggctgccgcggcttcgcggggacccaactttcccgggcggcggcgcccaacttcccgccgcccgctccggccccgcaggcccgcggcgccaggggaagacgcgagtaagtgcgggcggcggtgccctcccggccctcaccccgcacgcggcgacccggccgcctagcctccctcgctcaggcgcgaccgcggcgttctctgagctaaagaagtaaacaggtcatggcacgtttaacaaaaagacgacaggcggatacaaaagctatccagcatctttgggcagccattgagattatacggaaccagaagcagattgccaacattgaccgtattacaaagtatatgtctcgagtccacggtatgcaccctaaagagaccacccgtcagctgagcttagctgtgaaagatggtcttattgtcgaaactctaacagtgggctgcaaaggttcaaaagctggtattgaacaagaaggatattggttgccaggagatgagattgactgggaaacagaaaatcatgactggtattgttttgaatgccatttgcctggagaggtgttgatatgtgacctgtgttttcgtgtgtatcattccaagtgtttgtctgatgagttcaggcttagagacagcagtagtccctggcagtgcccagtttgcaggagcattaagaagaagaatacaaacaaacaggagatgggcacatacctcagattcattgtctcccgcatgaaggagagggctatagatcttaataaaaaggggaaggacaataaacacccgatgtacaggaggctggtgcactcagctgtggacgttcccaccattcaagagaaagtgaatgaagggaaataccgaagttatgaagagttcaaagctgatgcccaattgcttctccacaataccgtgattttctatggagcagacagtgagcaagctgacattgcgaggatgctatataaagacacatgtcatgagctggatgaactgcagctttgcaagaattgcttttacttgtcaaatgctcgtcctgacaactggttctgttatccttgtatacctaatcatgagctggtttgggctaaaatgaaaggttttgggttttggccagccaaagtcatgcagaaagaagacaatcaagtcgacgttcgcttctttggccaccaccaccagagggcctggattccttctgaaaacattcaagatatcacagtcaacattcatcggctgcacgtgaagcgcagtatgggttggaaaaaggcctgtgatgagctggagctgcatcagcgtttcctacgagaagggagattttggaaatctaagaatgaggaccgaggtgaggaagaggcagaatccagtatctcctccaccagtaatgagcagctaaaggtcactcaagaaccaagagcaaagaaaggacgacgtaatcaaagtgtggagcccaaaaaggaagaaccagagcctgaaacagaagcagtaagttctagccaggaaatacccacgatgcctcagcccatcgaaaaagtctccgtgtcaactcagacaaagaagttaagtgcctcttcaccaagaatgctgcatcggagcacccagaccacaaacgacggcgtgtgtcagagcatgtgccatgacaaatacaccaagatcttcaatgacttcaaagaccggatgaagtcggaccacaagcgggagacagagcgtgttgtccgagaagctctggagaagctgcgttctgaaatggaagaagaaaagagacaagctgtaaataaagctgtagccaacatgcagggtgagatggacagaaaatgtaagcaagtaaaggaaaagtgtaaggaagaatttgtagaagaaatcaagaagctggcaacacagcacaagcaactgatttctcagaccaagaagaagcagtggtgctacaactgtgaggaggaggccatgtaccactgctgctggaacacatcctactgctccatcaagtgccagcaggagcactggcacgcggagcacaagcgcacctgccgccggaaaagatgaagctggcccttcccggagtcaccccgatgattactcttttcagacacagcggtttttgtttccaagaagccaaaattgtttagaatttgcttcccattttgcaccagcctttaaacacttttcgtgaagaaattttgcacagtagtttaaatcttttgttaatgctcctccgaagtttttcagggggtaaaagtaacatcagtggagggtattattttaaataaattttaattgagaatttgttgcattttcagcaaattttaaaacatttttaggttttacagagattttaacctttaaacaacagatctttaaaaaacaggtgaatacaagtgagtttaacaaagaaacatttagaatagatctgaatgtaagaactacagaactgtttcagaaataaaacatactaccttgatgtgacatttttttcttaaccttgttgagctggttttgttcagcttaatttactgttcaaaggcattatctgttggtcacaccagtgggtatatgattgaatttagggaacagggttgacacagcagggctagtcctgcatattttttcttaaatatttcccaattgtgtttttcattatttcttttcaatatataacttttataacaaattattagctttgatcttgtagtttaaaattgcagggaactggggtaatcttttactgagctggatcttagagaaaatgaatatttaaattttaaagtttgcacatttcatctttgtcctaacatgagtgcttgtaacaaaataaacaacaaaaacaaagccaaaaactacctttatccatatgtgaaattatagatgaggcatacgaatttgtttaatgcttcccttcccttcccacatatcatctcactgcctattatctggtgtcacctcatgtatcgtaagttaatactaaaagaagagaaagcacttaagtttcacagaagccgttatgtttgtagtaatgggtcattgcctactaatgaactccatcactgtacacagaatgaagaataatgcatgttaattttcttgtattaaagatgccgtgatttgtaaaaagtctgtattttgcggaatgtctggattaagaagcattaccaataggaatggatcgatagttgaataatgattttttatacatagatatataaaatacagccaggaaaacttaaattacttttcttttaaaatatctcacaatttatgtggtatttttaaagactgatcttagaccaagtcaaattcccatttatcatttagttattttttgaggttagagaataatttgtacatatttatttagacctttgatatttattaaagcaattactcacaatggaagtgaaagaatcaggagaaaagccttttaaaaagtattctccaggtttgtcagggtcactctaaagataaaaatgtaactaagtcttctgtgaaatatcatccatctaatcttgatgctgttgcagatggtggtgacacaagttaattgacaaactactgccaaatggtgcacaatattttgtaaaaagtacccagtagccccatttcatacaatgtacctaaattatgcagtaacttggcatcatcgttccctccttgttgctgtgtaattagtcagtgttgccacagtgtgtggcgctgatggagatgtcagaaccgagaacacttaaccttctttgattgtttttcaagttttaagacttcgatccacccctatgagagcaagtaattgtggaaatatttttggtgtaaaatcattccagagtatgtaatatttaactgatagctgcatgaaagtgagattcgtgttactttggcttttctgtctctgttgacacggttgcacatttccaagttactacagcgtgaaaactgtgtgtttaaaaaaaaacaaaattaaaaaaagagattgtggcctggttttgtaaaagttttaggtaaaattacaattgattgttttaggaatcattattaaaaattttctgcaaatcataaagctatatcgaggtgttgagcttagccactatgcacattgtaattattcattgtggctgtccagttctatgatgcattctggcattttgtaagctgctctgactagcaatatatagattcatttaatgtgttaacattggttaataaatgtatttaaaaaaaacta

SEQ ID NO: 271738 - DNA, 1809 bp, Artificial Sequence
  derived and/or modified sequence
atggcacgactcaccaagaggcgtcaggcggatacaaaagcgattcagcacttgtgggccgcgattgaaattatccgcaatcagaagcagatcgctaatattgaccggataacgaaatatatgtctcgggtccatgggatgcacccaaaagaaactactcgtcagctgagcctggccgtgaaggacggcttgatcgtggaaaccctcaccgtgggctgtaaagggagcaaggccgggatcgaacaagaaggatattggctccctggagacgaaatcgactgggaaacagagaaccatgattggtactgcttcgaatgccacctccctggagaagtacttatttgcgatctctgtttccgcgtgtatcatagtaagtgcctctctgacgagttccgactgcgggactctagcagcccttggcagtgcccagtatgccgatctattaaaaagaagaataccaataaacaagagatgggcacttacctgcgctttattgtgagtaggatgaaggaaagagccattgacctgaacaaaaagggaaaagataacaagcatccaatgtaccggcgtctcgttcactctgccgtcgatgtacctactatacaggagaaggtcaacgagggaaaatatcggagctacgaagagttcaaagctgacgctcaactgttactgcacaatacggtgatattttatggggccgatagcgagcaagccgatattgccaggatgctctacaaagacacttgccatgagctggatgaactgcaattatgcaaaaactgcttctatctgtccaatgcacgcccagataactggttttgctacccctgtattcctaatcatgaattggtatgggcgaagatgaagggattcggtttttggcctgccaaggttatgcaaaaggaggacaatcaggtcgatgtccgtttcttcggacatcatcatcagagggcctggatcccttccgaaaacattcaggacatcacagttaacatccaccgcctccacgtaaagcggtcgatgggctggaagaaagcatgcgatgagttggagctccatcaaagattcttgagggaaggtaggttctggaagagcaaaaatgaagacaggggtgaggaggaggccgaatctagtatcagcagcacatccaatgaacaactgaaggtgacccaagagccacgcgcgaaaaagggtagacggaatcagtccgttgaacccaagaaagaggagcccgaacctgagactgaggcagtgtccagtagccaggaaatccccaccatgcctcagcccatcgaaaaggtatcggtgagtacccagacgaaaaaactctccgcttcttccccaaggatgctgcaccgcagcacacagaccacaaatgatggcgtatgtcagagcatgtgccatgataagtatacgaagatcttcaacgacttcaaggacaggatgaaaagcgatcacaagcgcgagactgaacgggtagtcagggaggctctggaaaaactgaggagcgagatggaggaggagaagcgtcaggctgtgaacaaagctgttgccaacatgcagggcgagatggatcgcaaatgcaagcaggtgaaggaaaaatgtaaggaggaatttgtagaggagattaaaaaattggcaacccagcacaaacaactgatctcacaaacaaagaagaagcagtggtgttacaattgtgaagaggaggctatgtaccactgctgttggaacacaagctactgctccatcaaatgccaacaagaacactggcacgccgagcacaaacggacatgtcgaagaaagcgctag

SEQ ID NO: 271739 - DNA, 1809 bp, Artificial Sequence
  derived and/or modified sequence
atggcccggctgaccaagcggcggcaggccgacaccaaggccatccaacacctgtgggccgctatcgaaatcatccggaaccagaagcagatcgccaacattgatcgtataaccaagtatatgtcccgggtacacggcatgcaccctaaagagacgactcggcaactgtccctggcggtgaaggacggcttaattgttgaaaccctcacggtggggtgtaaagggtcaaaggctgggatcgagcaagaaggatattggctgccaggtgatgaaattgattgggaaacagaaaaccacgactggtattgctttgagtgtcacctaccaggcgaagttctaatttgcgacctctgcttccgagtctatcatagcaagtgtctgtccgacgaattccggttaagagactcatcatcaccttggcagtgcccagtctgcaggagtattaagaagaaaaacactaataagcaggagatgggaacctacctacgctttatagtctccaggatgaaggagagggcaatcgatcttaacaagaagggaaaggataataagcatcccatgtatagacgcctggtgcacagcgctgtagacgtgccaacaatccaggagaaggtgaatgaaggaaagtataggtcttacgaggagtttaaggcagatgcacagctgttactgcacaatacagttatcttttacggagcggatagcgaacaggcggacatcgctcgaatgctttacaaggacacttgccacgaactagacgagctgcagctctgcaaaaattgcttctatcttagcaacgcaaggccagataattggttctgttatccatgcattccaaaccacgaactcgtgtgggccaagatgaaagggtttggtttctggcccgctaaagttatgcagaaggaagataatcaggtggatgttcgcttctttgggcaccaccatcagcgggcttggattccaagcgagaacattcaggacattaccgtcaacattcaccggctacacgtcaagcgttccatgggctggaagaaagcctgcgacgaacttgaacttcaccagaggtttttgcgcgaaggtcggttctggaaatctaagaacgaagatcggggagaagaggaagcagagtcctctatctccagcaccagtaacgagcagctcaaggtaacacaggagcctcgggccaaaaaaggtcgtagaaatcagagcgtggagcccaaaaaggaggagcccgagcccgagaccgaagccgtatcctccagtcaggagatcccaactatgccacaaccaattgaaaaggtgagtgtgtctacacagacgaaaaagctgagcgcctcatcacctcggatgttgcaccggagcacccagactacaaatgacggcgtttgtcagtctatgtgtcacgacaaatacacgaagatttttaacgatttcaaggaccgcatgaaatccgatcacaagagagaaacggaaagggtggtccgcgaggctctcgaaaagctcaggtcagaaatggaggaggagaagcggcaagcggttaacaaggcagtggccaacatgcagggggagatggataggaaatgcaagcaagtgaaagaaaagtgtaaggaagagtttgtggaagagataaaaaaactcgccacccaacacaagcagctcatttctcaaacgaagaaaaagcagtggtgttacaactgtgaagaggaggctatgtaccactgttgttggaatacttcgtattgttcaatcaaatgccagcaagagcactggcatgccgaacataagagaacatgtcgacgtaaacggtag

SEQ ID NO: 271740 - DNA, 1809 bp, Artificial Sequence
  derived and/or modified sequence
atggcaagattaacaaagcgccgtcaagccgacacaaaagcaatccaacacctttgggctgctattgagattatccggaatcagaaacagatcgcaaatatcgatcgcattaccaagtatatgagccgggttcatggtatgcaccccaaagagacaactaggcagttgagcctggcggtgaaggatggacttatcgttgaaacactgacagtaggatgcaaaggctccaaagctggcatagagcaggaaggatactggcttccgggagatgagattgactgggaaacagagaatcatgactggtactgttttgagtgccacttgcctggcgaagtgctgatctgtgacctgtgcttccgcgtttatcacagcaagtgccttagtgacgagtttaggctgcgggattctagctccccctggcagtgccccgtgtgtagatctattaagaaaaagaacaccaacaaacaggaaatgggcacatacctcagattcattgtgagccgcatgaaggaacgggcaatcgatctcaacaagaaaggcaaggataataagcatccgatgtatagacggctagtgcattccgccgtcgacgtccctacgatccaggagaaagtcaacgaggggaaatacagaagctacgaagagttcaaggctgatgcacagctgttattgcacaacaccgtgatattctatggagctgacagcgaacaggctgacattgctaggatgctgtacaaagatacttgccatgaactggatgagcttcaattgtgcaagaactgcttttacttaagcaacgcaaggcccgacaactggttttgctatccctgcatccccaatcacgaactggtctgggcaaaaatgaagggctttggtttctggcccgcaaaggtgatgcagaaggaggacaatcaggtggacgtgcgcttttttggccatcatcaccaaagagcatggatcccgagcgagaacatccaagatattacagtaaatatacatcgccttcatgtgaaaaggtcaatgggatggaaaaaagcctgtgatgagctggagctgcaccagcggttcttgcgggaggggcgtttttggaagtctaagaacgaagaccgcggagaagaggaggctgagtcctctatctctagcactagcaatgaacagttgaaggtgacccaggaaccacgggctaagaaggggcgtcggaatcagagtgtggaaccaaagaaagaggaacctgaaccggaaaccgaggctgtcagttcctcccaggagatcccaacgatgcctcagcctatcgagaaggtcagcgtcagcacacaaacgaaaaagctcagcgcctcttcccccaggatgttacataggtcaacacagacgaccaacgacggcgtgtgtcagagtatgtgtcacgacaagtatactaaaattttcaatgactttaaagaccggatgaaaagtgaccacaagagggagacagaaagggtcgttagagaagccttggagaaactgaggtcagaaatggaagaggagaagaggcaggccgtcaacaaagccgtggcaaatatgcaaggcgaaatggacaggaagtgcaagcaagtaaaggaaaagtgtaaggaagaatttgtggaggaaattaagaagctggcaacacagcacaaacagctgatctctcagaccaagaagaaacagtggtgttacaactgtgaggaggaagcaatgtatcactgctgctggaacactagctactgttccattaaatgccagcaggaacactggcatgctgagcacaaacgcacttgtcgacggaaacgctag

SEQ ID NO: 271741 - protein, 467 aa, Artificial Sequence
  derived and/or modified sequence
MEYMSTGSDNKEEIDLLIKHLNVSDVIDIMENLYASEEPAVYEPSLMTMCQDSNQNDERSKSLLLSGQEVPWLSSVRYGTVEDLLAFANHISNTAKHFYGQRPQESGILLNMVITPQNGRYQIDSDVLLIPWKLTYRNIGSDFIPRGAFGKVYLAQDIKTKKRMACKLIPVDQFKPSDVEIQACFRHENIAELYGAVLWGETVHLFMEAGEGGSVLEKLESCGPMREFEIIWVTKHVLKGLDFLHSKKVIHHDIKPSNIVFMSTKAVLVDFGLSVQMTEDVYFPKDLRGTEIYMSPEVILCRGHSTKADIYSLGATLIHMQTGTPPWVKRYPRSAYPSYLYIIHKQAPPLEDIADDCSPGMRELIEASLERNPNHRPRAADLLKHEALNPPREDQPRCQSLDSALLERKRLLSRKELELPENIADSSCTGSTEESEMLKRQRSLYIDLGALAGYFNLVRGPPTLEYG

SEQ ID NO: 271742 - protein, 223 aa, Artificial Sequence
  derived and/or modified sequence
MEYMSTGSDNKEEIDLLIKHLNVSDVIDIMENLYASEEPAVYEPSLMTMCQDSNQNDERSKSLLLSGQEVPWLSSVRYGTVEDLLAFANHISNTAKHFYGQRPQESGILLNMVITPQNGRYQIDSDVLLIPWKLTYRNIGSDFIPRGAFGKVYLAQDIKTKKRMACKLIPVDQFKPSDVEIQACFRHENIAELYGAVLWGETVHLFMEAGEGGSVLEKLESCG

SEQ ID NO: 271743 - protein, 255 aa, Artificial Sequence
  derived and/or modified sequence
MEYMSTGSDNKEEIDLLIKHLNVSDVIDIMENLYASEEPAVYEPSLMTMCQDSNQNDERSKSLLLSGQEVPWLSSVRYGTVEDLLAFANHISNTAKHFYGQRPQESGILLNMVITPQNGRYQIDSDVLLIPWKLTYRNIGSDFIPRGAFGKVYLAQDIKTKKRMACKLIPVDQFKPSDVEIQACFRHENIAELYGAVLWGETVHLFMEAGEGGSVLEKLESCGPMREFEIIWVTKHVLKGLDFLHSKKVIHHDIK

SEQ ID NO: 271744 - protein, 190 aa, Artificial Sequence
  derived and/or modified sequence
  misc_feature (1)..(1): Xaa can be any naturally occurring amino acid
XVEDLLAFANHISNTAKHFYGQRPQESGILLNMVITPQNGRYQIDSDVLLIPWKLTYRNIGSDFIPRGAFGKVYLAQDIKTKKRMACKLIPVDQFKPSDVEIQACFRHENIAELYGAVLWGETVHLFMEAGEGGSVLEKLESCGPMREFEIIWVTKHVLKGLDFLHSKKVIHHDIKRKYLWTYTFLAQRD

SEQ ID NO: 271745 - DNA, 1404 bp, Artificial Sequence
  derived and/or modified sequence
atggagtacatgtccactgggagcgacaacaaggaggagatcgatttgttaatcaagcatctgaatgtttccgacgtcatagatattatggagaacctgtacgcttccgaggagccagccgtttacgaaccgtcattgatgacaatgtgccaggattctaaccagaatgacgagaggtccaagagcctgcttctgagcggacaggaggtcccatggcttagctccgtgagatacggaacagtcgaagatcttctcgcgttcgccaaccacatctcgaacactgcgaaacatttttatgggcagcgcccacaggaatccggaatactcctcaatatggtcattacaccacagaatgggcgctaccagattgactccgacgtgctccttattccttggaagcttacctatcggaacatcggctctgattttattccgcgaggcgctttcgggaaagtgtatctcgctcaggacattaagaccaaaaagcggatggcctgtaagctcatacccgttgaccagtttaagccatctgacgtcgaaatccaggcatgttttcgccacgagaacattgccgaactctacggagcggtcctgtggggcgagaccgtgcacctgttcatggaggcaggagaaggtggaagcgtcctggaaaagctggagtcgtgtgggccaatgagggagtttgaaattatctgggtgaccaaacacgttcttaaagggctcgacttcctccactctaaaaaggtgattcaccacgacataaaaccaagcaacatagtttttatgtctacgaaggctgtgctggtcgatttcggtctcagcgtgcagatgacagaggatgtgtacttccctaaagatctgaggggaaccgaaatttatatgtcaccagaggttatcctgtgtaggggccacagcaccaaggccgacatctatagccttggggcaacattgatccacatgcagactgggacccccccgtgggtgaagagatatcctaggtccgcatacccctcttacctgtacatcatccacaaacaggcgccaccattggaagacatcgctgatgactgctcccctggcatgcgcgagcttatcgaggcctccctcgagcggaaccccaaccacagacctagagcggccgatctactaaaacacgaggcactgaaccccccacgggaagatcagccacgctgccagtcactagactccgcactcctagagcgtaagcgtctgctgtcgcgtaaggagttagaactgcccgaaaacatcgctgactccagttgcactggttccacagaagagagtgagatgctgaaacgccaacgttctctttacatagatttgggagccctggccgggtattttaacctcgtgcgggggccaccaacactggaatatggctag

SEQ ID NO: 271746 - DNA, 1404 bp, Artificial Sequence
  derived and/or modified sequence
atggagtacatgagtactggttcagataacaaagaggagattgatttgctgatcaaacacttgaatgtttcagatgttatcgacatcatggagaacttgtacgcctccgaagagccagcagtgtatgaaccttctctaatgacaatgtgccaggattccaatcagaacgatgaacgatccaaatcgctcttgctgtccggacaagaagtcccctggctgtctagcgtgcgttacggcacggtcgaggacctcctggccttcgccaatcatataagcaatacagccaagcacttttatggccagaggccccaggagagcggcattctccttaatatggtgattacaccccaaaacggtcgataccagattgacagcgacgtgctgctcatcccgtggaagctaacatacagaaatataggaagtgactttatcccccgcggggctttcggcaaagtgtacctggcacaagacatcaaaactaagaaacggatggcgtgcaagctgattccagtcgaccagttcaaaccttcagatgtcgagatccaggcctgctttaggcacgagaacattgcagagttatacggcgccgtcctttggggcgagaccgtgcatctgttcatggaggcaggcgaaggcggaagcgtgttagagaagttggagagctgcggtcctatgcgtgaattcgaaatcatatgggtcaccaagcacgtgcttaaaggcctggactttttgcattccaagaaagtcattcaccacgacattaagccttcaaacattgtctttatgtctacgaaagctgtgctggtagattttggcttatctgtgcagatgacggaggatgtgtactttccgaaggacctgcgcggaaccgagatctatatgtcacctgaagtcatcctgtgccgcggtcattctaccaaagccgatatttactctctgggcgccaccctgatccacatgcaaaccggaacaccaccgtgggtgaagagataccctcgctcggcgtacccatcatacctatacattattcacaaacaggccccccccctcgaagatattgctgacgactgcagtcctggaatgcgagaactgatcgaagcttccctagagcgaaatcccaaccacaggccccgcgcagctgacttattgaaacatgaagccctgaatcccccgagggaggaccagcctagatgccagagcctcgattccgccctgctggagcgtaagaggctcctgtcccgtaaggagctcgagctcccggagaatatcgctgactcctcttgtacgggatccactgaagaaagcgagatgctgaagaggcagcgtagtttatacattgacctgggagctctagctggctacttcaatttagtcagggggccccccaccctcgagtacgggtag

SEQ ID NO: 271747 - DNA, 399 bp, Artificial Sequence
  derived and/or modified sequence
atggagtacatgagcactggctcagataacaaggaagagattgatcttctgattaaacatctgaacgtgtccgatgtgatcgatatcatggaaaacctttatgcctctgaggagccagccgtgtatgagccctctctaatgacaatgtgccaagacagcaatcagaatgacgagcgctccaagtctctgttactgagcggacaagaggttccatggctgtctagcgtgcgctacggaaccgttgaggacctgctggcattcgctaatcacatctccaatactgctaagcatttttacgggcagcgcccacaagagtctggcattttactgaacatggtgcgcttctttccaatcagctgggtgctttgcgcgcaactctcctactgtagtttcatctag

SEQ ID NO: 271748 - DNA, 1404 bp, Artificial Sequence
  derived and/or modified sequence
atggaatacatgagtacaggctcagacaataaggaggagatcgacttactgataaagcatctaaacgtatccgacgtcatcgacattatggagaatttgtatgcatcagaagagcccgccgtgtatgaacccagtctgatgaccatgtgccaagattccaaccagaacgatgaacgttcaaagagtttactgctgagcggtcaggaagtgccatggctgagtagtgtcaggtatggcacagtggaagacctcctagctttcgcaaaccatatcagcaatactgctaagcacttctatggtcagaggccacaggaaagtggcatcctgcttaacatggtaatcactccacagaacggcagatatcagattgattcagacgtcctgctaattccttggaaactgacgtatagaaatatcggcagtgactttattccaaggggagcattcggcaaggtataccttgcccaggacatcaaaaccaagaaacgaatggcctgcaagcttataccggtcgatcagttcaagccttccgacgttgaaattcaggcttgcttccgacacgagaacatcgctgagctgtatggcgcagtgctctggggcgagaccgttcacctgtttatggaagcaggtgaaggtggcagcgttttggaaaagctggaatcatgcggcccaatgcgggagttcgaaataatttgggttacgaagcatgtcctaaaggggctggacttcctccactcaaagaaggtcatccaccacgatattaagccatctaacattgttttcatgagcactaaagccgtcctggtggacttcgggctaagcgtgcagatgaccgaggatgtatattttccgaaagacctgagaggaaccgaaatctatatgtcccccgaggtgatcttatgccgcggccatagtactaaggctgacatttattctctgggcgcaaccctgatccatatgcagaccggcacaccgccttgggtgaaaagatatcccagatccgcatatccatcctacttgtacataattcataagcaggcccccccactagaagatatcgccgacgattgctcaccgggcatgcgcgagcttatcgaggcctctctggaaaggaaccctaatcataggcccagggctgcggaccttcttaagcatgaggctctcaacccaccacgggaagatcagccccggtgtcaatctttggattcggcattgttagaacggaaacggcttctgagccgaaaagagctggaactgcctgagaacattgcggactcatcatgcacgggctccactgaagagtccgagatgcttaagcgccagcggtctttgtacattgatctaggcgccctcgccgggtattttaatctcgtccgcggccctccaactctggagtatggttag

SEQ ID NO: 271749 - DNA, 672 bp, Artificial Sequence
  derived and/or modified sequence
atggagtatatgtccaccggttcagataacaaagaggaaatcgatctactcatcaagcacctgaatgtcagcgacgtgatcgatatcatggaaaacctgtacgcaagcgaagagcccgcggtgtatgaaccctcgctgatgacaatgtgtcaggatagtaaccaaaatgacgagcggtcaaaaagcctcctgctgtcggggcaggaagtcccatggctctcatcggtcaggtatgggaccgtggaagatctcctcgcctttgccaatcatatctctaacacagccaaacacttctatggccagcgtccgcaagaaagcgggattttactgaacatggtaatcaccccccagaatggcagatatcagatcgactcagatgttctgctgatcccctggaaattgacctataggaacatcggtagtgacttcatacctcgcggagccttcgggaaggtatacttggcccaagatataaagaccaaaaagagaatggcctgcaaactgatccctgtcgaccagttcaagccttctgatgtggagatccaagcctgtttccgacatgaaaacattgctgaattgtacggggcagttctgtggggagagacagtccatcttttcatggaagcgggcgagggcgggtctgtccttgaaaagctggaatcgtgcggctag

SEQ ID NO: 271750 - DNA, 768 bp, Artificial Sequence
  derived and/or modified sequence
atggagtacatgagtacaggcagcgacaataaggaggaaatcgatctccttattaaacacctgaacgtgtcagacgtcattgacatcatggagaatctatatgcttccgaagaacctgccgtgtacgagcccagcctgatgaccatgtgccaggactccaatcaaaacgatgaaaggtcaaagagtctcctgctgtcaggccaggaagtgccctggctgagttctgtgcgttatggaacagtcgaagatctgttggccttcgctaaccacattagtaacacagccaaacatttttacggccagagacctcaggaatctggcatccttctgaatatggttatcaccccgcagaatggtaggtaccaaattgactctgatgtcttgttaattccatggaagctgacttatcgaaatataggctccgatttcataccccgtggagcatttggcaaagtttacttggcccaagacattaagacaaagaaacgcatggcctgcaagctgatccccgtcgatcagtttaagccttcggatgttgaaattcaagcctgctttcgccacgagaatattgctgagttgtacggtgcggttctgtggggagagaccgtccatctgtttatggaagcaggcgagggaggcagcgtgctcgaaaaactggagagttgcggtcctatgagggaatttgagatcatatgggtgacaaagcacgtattgaaaggactggatttcctgcactctaagaaggtgatacaccacgacatcaagtag

SEQ ID NO: 271751 - DNA, 573 bp, Artificial Sequence
  derived and/or modified sequence
taagtggaggacctgctagctttcgcaaaccatatatctaacactgccaaacatttctacggccagagacctcaggaatccggaatcctgctgaatatggtcatcacccctcagaatggaaggtatcagatcgactctgacgtgctgttaataccatggaaattgacctatcgcaatattggatctgattttatcccgaggggtgcattcggcaaggtgtacctggctcaggacattaagaccaagaagcgcatggcgtgtaagttaattcctgtggaccagttcaagccctccgatgtggaaattcaggcttgtttccgccatgagaacattgcggaactttatggagctgtattgtggggcgaaaccgtgcatctcttcatggaggctggcgaggggggaagtgtgctcgaaaagctggaaagctgcggcccaatgcgggaatttgagataatctgggtaactaagcacgttctgaaaggccttgactttctacacagcaaaaaggtcatacaccacgatattaagcggaaatacttgtggacctacacattccttgctcagcgcgattag

SEQ ID NO: 271752 - DNA, 1404 bp, Artificial Sequence
  derived and/or modified sequence
atggagtatatgtcaactgggtcagataataaggaagagatcgatctgttaatcaaacacttgaacgtgtcagatgtaatcgacattatggaaaacctatatgccagcgaggaacctgctgtatatgaaccttcgctcatgaccatgtgtcaggatagtaatcaaaacgacgagcggtctaaaagcctcttgttgtccggccaggaggtgccctggctgtcttccgtgcggtacggcactgtagaggacttactggcttttgcgaaccacattagtaataccgcaaagcacttttacggccagagaccacaggagtctggaattcttctgaatatggtgattacgccccagaacggaagataccaaatcgacagtgatgtccttcttatcccatggaagcttacttaccgaaatatcggctccgactttatcccgcgaggagcgtttggaaaggtatacctggcccaagatataaaaacgaaaaaaaggatggcgtgtaaactgatcccagtggatcagttcaagcccagcgatgtggaaatccaggcttgcttcaggcatgagaacatagcagaattgtatggcgccgtgctatggggggaaacagtgcacctttttatggaggccggagagggaggttcggtattggagaagctggagtcctgtgggccaatgagagagtttgaaatcatttgggtgaccaagcatgtactcaaaggactggacttccttcatagcaaaaaagtgattcatcatgatataaagccatctaatatcgtcttcatgtccactaaggccgttttagtggacttcggcctgagtgtgcagatgaccgaagatgtgtacttccctaaggatctacgcggcactgaaatttatatgtcccctgaagtcatcttatgtcggggacacagtactaaagcagacatctactcactgggcgctaccctaatccatatgcaaaccggcaccccgccatgggttaagagatatccacgatccgcatacccatcttatctgtacattattcacaaacaagcacctccactggaagacatcgccgatgattgttcaccaggcatgagggagttaatcgaagccagtctggagagaaaccctaatcaccgaccacgggcagctgacctgctgaaacacgaggccctcaatccccctcgtgaggaccaaccaaggtgtcagtcattggactcggccctgcttgagagaaagcggctcctctccagaaaagagctggagctgcctgaaaacattgctgactcctcttgtactggatcgactgaagagagcgaaatgcttaagaggcagcggtcattgtatatcgatttgggggcgctagccgggtactttaacctggttcgcggcccaccaaccctggaatatggctag

SEQ ID NO: 271753 - DNA, 1404 bp, Artificial Sequence
  derived and/or modified sequence
atggagtacatgagcacaggcagtgacaacaaggaggagattgacctgctgatcaagcacctgaatgtgtctgatgtgattgacatcatggagaacctgtatgccagcgaggagcctgctgtgtatgagcccagcctgatgaccatgtgccaggacagcaaccagaatgatgagaggagcaagagcctgctgctgagcggccaggaggtgccctggctgagctctgtgcgctatggcaccgtggaggacctgctggcctttgccaaccacatcagcaacacagccaagcacttctacggccagaggccccaggagagcggcatcctgctgaacatggtgatcaccccccagaatggccgctaccagattgacagtgatgtgctgctgatcccctggaagctgacctacagaaatattggaagtgacttcatccccaggggggccttcggcaaggtgtacctggcccaggacatcaagaccaagaagaggatggcctgcaagctgatccctgtggaccagttcaagcccagtgatgtggagatccaggcctgcttcagacatgagaacattgctgagctgtatggagctgtgctgtggggcgagaccgtgcacctgttcatggaggccggggagggcggctctgtgctggagaagctggagagctgtggccccatgagggagtttgagatcatctgggtgaccaagcacgtgctgaagggcctggacttcctgcacagcaagaaggtgatccaccacgacatcaagcccagcaacatcgtgttcatgagcaccaaggctgtgctggtggactttggcctgtctgtgcagatgacagaagatgtgtacttccccaaggacctgcggggcacagagatctacatgagccctgaggtgatcctgtgccggggccacagcaccaaggctgacatctacagcctgggcgccaccctcatccacatgcagacaggcaccccaccctgggtgaagcgctaccccaggtctgcctaccccagctacctgtacatcatccacaagcaggccccacccctggaggacattgctgatgactgcagccctggcatgagggagctgattgaggccagcctggagaggaaccccaaccaccggcccagggctgctgacctgctgaagcatgaggccctgaaccccccccgggaggaccagccccgctgccagagcctggacagcgccctgctggagaggaagaggctgctgagcaggaaggagctggagctgcctgaaaatattgctgacagcagctgcaccggcagcacagaggagagcgagatgctgaagaggcagaggagcctgtacatcgacctgggcgccctggccggctacttcaacctggtgcggggcccccccaccctggagtatggatag

SEQ ID NO: 271754 - DNA, 399 bp, Artificial Sequence
  derived and/or modified sequence
atggagtacatgagcacaggcagtgacaacaaggaggagattgacctgctgatcaagcacctgaatgtgtctgatgtgattgacatcatggagaacctgtatgccagcgaggagcctgctgtgtatgagcccagcctgatgaccatgtgccaggacagcaaccagaatgatgagaggagcaagagcctgctgctgagcggccaggaggtgccctggctgagctctgtgcgctatggcaccgtggaggacctgctggcctttgccaaccacatcagcaacacagccaagcacttctacggccagaggccccaggagagcggcatcctgctgaacatggtgcgcttcttccccatctcctgggtgctgtgtgcccagctgagctactgcagcttcatctag

SEQ ID NO: 271755 - DNA, 672 bp, Artificial Sequence
  derived and/or modified sequence
atggagtacatgagcacaggcagtgacaacaaggaggagattgacctgctgatcaagcacctgaatgtgtctgatgtgattgacatcatggagaacctgtatgccagcgaggagcctgctgtgtatgagcccagcctgatgaccatgtgccaggacagcaaccagaatgatgagaggagcaagagcctgctgctgagcggccaggaggtgccctggctgagctctgtgcgctatggcaccgtggaggacctgctggcctttgccaaccacatcagcaacacagccaagcacttctacggccagaggccccaggagagcggcatcctgctgaacatggtgatcaccccccagaatggccgctaccagattgacagtgatgtgctgctgatcccctggaagctgacctacagaaatattggaagtgacttcatccccaggggggccttcggcaaggtgtacctggcccaggacatcaagaccaagaagaggatggcctgcaagctgatccctgtggaccagttcaagcccagtgatgtggagatccaggcctgcttcagacatgagaacattgctgagctgtatggagctgtgctgtggggcgagaccgtgcacctgttcatggaggccggggagggcggctctgtgctggagaagctggagagctgtggctag

SEQ ID NO: 271756 - DNA, 768 bp, Artificial Sequence
  derived and/or modified sequence
atggagtacatgagcacaggcagtgacaacaaggaggagattgacctgctgatcaagcacctgaatgtgtctgatgtgattgacatcatggagaacctgtatgccagcgaggagcctgctgtgtatgagcccagcctgatgaccatgtgccaggacagcaaccagaatgatgagaggagcaagagcctgctgctgagcggccaggaggtgccctggctgagctctgtgcgctatggcaccgtggaggacctgctggcctttgccaaccacatcagcaacacagccaagcacttctacggccagaggccccaggagagcggcatcctgctgaacatggtgatcaccccccagaatggccgctaccagattgacagtgatgtgctgctgatcccctggaagctgacctacagaaatattggaagtgacttcatccccaggggggccttcggcaaggtgtacctggcccaggacatcaagaccaagaagaggatggcctgcaagctgatccctgtggaccagttcaagcccagtgatgtggagatccaggcctgcttcagacatgagaacattgctgagctgtatggagctgtgctgtggggcgagaccgtgcacctgttcatggaggccggggagggcggctctgtgctggagaagctggagagctgtggccccatgagggagtttgagatcatctgggtgaccaagcacgtgctgaagggcctggacttcctgcacagcaagaaggtgatccaccacgacatcaagtag

SEQ ID NO: 271757 - DNA, 573 bp, Artificial Sequence
  derived and/or modified sequence
tgagtggaggacctgctggcctttgccaaccacatcagcaacacagccaagcacttctacggccagaggccccaggagagcggcatcctgctgaacatggtgatcaccccccagaatggccgctaccagattgacagtgatgtgctgctgatcccctggaagctgacctacagaaacatcggcagtgacttcatccccaggggggccttcggcaaggtgtacctggcccaggacatcaagaccaagaagaggatggcctgcaagctgatccctgtggaccagttcaagcccagtgatgtggagatccaggcctgcttcagacatgaaaatattgctgagctgtatggagctgtgctgtggggcgagaccgtgcacctgttcatggaggccggggagggcggctctgtgctggagaagctggagagctgtggccccatgagggagtttgagatcatctgggtgaccaagcacgtgctgaagggcctggacttcctgcacagcaagaaggtgatccaccacgacatcaagaggaagtacctgtggacctacaccttcctggcccagagggactag

SEQ ID NO: 271758 - DNA, 1026 bp, Artificial Sequence
  derived and/or modified sequence
gggcagagcagggcggtctgagcgtgcgggcgacgcgggtctcactcgtccgctccgctctggactgcgcgccacgctctggggtccggcgccctggttcctgcttctgccgctgccgccgccggatcccagtggcccggcgtgctcggctcccacaggcctgcagccagcatcgcaccgaaccttcggggggccgcggctggagcgctcggccggcgtgggagcgccaaggccgcagactctccagaaagagcaacagtaatggagtacatgagcactggaagtgacaataaagaagagattgatttattaattaaacatttaaatgtgtctgatgtaatagacattatggaaaatctttatgcaagtgaagagccagcagtttatgaacccagtctaatgaccatgtgtcaagacagtaatcaaaacgatgagcgttctaagtctctgctgcttagtggccaagaggtaccatggttgtcatcagtcagatatggaactgtggaggatttgcttgcttttgcaaaccatatatccaacactgcaaagcatttttatggacaacgaccacaggaatctggaattttattaaacatggtcatcactccccaaaatggacgttaccaaatagattccgatgttctcctgatcccctggaagctgacttacaggaatattggttctgattttattcctcggggcgcctttggaaaggtatacttggcacaagatataaagacgaagaaaagaatggcgtgtaaactgatcccagtagatcaatttaagccatctgatgtggaaatccaggcttgcttccggcacgagaacatcgcagagctgtatggcgcagtcctgtggggtgaaactgtccatctctttatggaagcaggcgagggagggtctgttctggagaaactggagagctgtggaccaatgagagaatttgaaattatttgggtgacaaagcatgttctcaagggacttgattttctacactcaaagaaagtgatccatcatgatattaaa

SEQ ID NO: 271759 - DNA, 647 bp, Artificial Sequence
  derived and/or modified sequence
ctgtggaggatttgcttgcttttgcaaaccatatatccaacactgcaaagcatttttatggacaacgaccacaggaatctggaattttattaaacatggtcatcactccccaaaatggacgttaccaaatagattccgatgttctcctgatcccctggaagctgacttacaggaatattggttctgattttattcctcggggcgcctttggaaaggtatacttggcacaagatataaagacgaagaaaagaatggcgtgtaaactgatcccagtagatcaatttaagccatctgatgtggaaatccaggcttgcttccggcacgagaacatcgcagagctgtatggcgcagtcctgtggggtgaaactgtccatctctttatggaagcaggcgagggagggtctgttctggagaaactggagagctgtggaccaatgagagaatttgaaattatttgggtgacaaagcatgttctcaagggacttgattttctacactcaaagaaagtgatccatcatgatattaaacgtaagtatctttggacatatacctttttggctcaaagagactagttattcaggagacaaacaagctccttcctgtaatctgaagaccctccatggagggtggaaagctccctcagagca

SEQ ID NO: 271760 - DNA, 1404 bp, Artificial Sequence
  derived and/or modified sequence
atggagtacatgagcaccggcagcgacaacaaggaggagatcgacctactcataaagcacttaaacgtgtctgatgtgatcgacataatggagaacctttacgctagcgaggagcctgccgtttacgaacccagcttgatgactatgtgccaggactcaaaccagaatgacgaaagaagcaagagccttctcctgtctggtcaagaggtgccatggctgagctccgttagatacggcacagtcgaggacttactcgccttcgcaaaccacatctcaaacactgcaaagcacttctacggccaacggccccaggaatctgggatcctgttgaatatggttatcaccccacagaacggcagataccagatagactccgatgtgctgctaatcccttggaagcttacatatagaaatatcggtagtgatttcatcccaagaggcgcatttggcaaagtgtacctcgctcaggatattaaaacgaagaaaaggatggcctgcaagttaatcccagtggaccaatttaaacccagtgatgtagaaatacaggcctgcttccgccatgaaaatatcgctgagctatatggcgcagtcctgtggggagaaacggtgcacttgtttatggaggccggagaaggggggagtgtactggagaagctagaaagctgcggccccatgagggagttcgagattatctgggtcactaagcatgtattgaaaggactcgactttcttcactcaaaaaaggtgatacaccacgatattaagccctctaatattgtgttcatgagcactaaggccgtcctggtggactttggtttgtcggtacagatgaccgaagacgtctattttcccaaggatttgcgcggcacagaaatctacatgtcgccagaggttatactgtgcagagggcactcaaccaaggctgacatctacagcctgggcgctactctcattcatatgcaaactggcacgcctccttgggtaaagcggtatcctcgctccgcatatccatcctatctttacatcatccataagcaagcccctcccctggaggatattgctgatgactgctcgcccgggatgcgagagctgattgaggcatctctcgaacgcaatcccaaccaccgccctcgggcagccgacctcttaaaacatgaggcacttaacccccctagggaggaccagcctcggtgtcagagtttggattccgcactgcttgagaggaagaggctcctgagccgcaaagaactcgaattgccagagaatatcgcagattcaagctgcaccggatccacagaggagtccgagatgctgaaaaggcagcgatccctgtatatagatctcggagcactggccggatattttaatcttgtgagaggtccacctacccttgagtacggatag

SEQ ID NO: 271761 - DNA, 1404 bp, Artificial Sequence
  derived and/or modified sequence
atggagtacatgagcaccggcagcgacaacaaggaggagatcgaccttctcattaagcatctcaatgtgtctgatgtcatagatatcatggagaatctctacgcctccgaagagccagccgtctatgagccaagcctgatgacaatgtgtcaagattctaaccaaaacgatgagcggagcaagtcgctgctgttgtcggggcaagaggtcccgtggttatccagtgtgaggtacggtacagtagaagatttgctcgcatttgcaaatcatattagcaacacagccaaacatttctatggccagcgccctcaggaatcgggaatccttctcaacatggtaattacaccccaaaatggtcgctatcagattgacagcgacgttctgcttatcccttggaagctgacctaccgaaatatcggatctgactttatacctcgaggggccttcggaaaagtatatctcgcacaggacatcaagactaagaagcggatggcttgtaaactcattccagtggatcagtttaagccatctgatgtggagattcaagcatgctttcgacacgaaaacatcgccgagttgtacggagctgttctgtggggtgaaaccgtgcacctattcatggaggcaggggaggggggctctgtgctggagaaactggagtcgtgtggcccaatgagagaattcgaaatcatttgggtgacgaagcatgtcctgaaggggctggattttctgcactctaaaaaggtcattcaccatgatatcaagccgagcaatatcgtctttatgagcaccaaagcagttttagtagactttggattgtcggtgcagatgacagaagacgtctactttcccaaggatctgcgaggcacggaaatttacatgtcccccgaggttatcctatgcaggggccacagtaccaaagcggatatctacagcctgggtgctactttgattcatatgcaaactggcacaccgccctgggttaagagatatccccgatccgcctaccctagctacctttacattatacacaaacaggccccacccctggaagacatcgccgacgattgtagccccgggatgcgcgagcttatcgaggcatcacttgagagaaacccaaaccatagacctcgcgcagccgacttgcttaagcacgaagccctgaacccaccccgagaggaccagccccggtgccagtcgctggactcggccttgctggaacggaagcgcttacttagtcgaaaagaactggaactgccagaaaatattgctgactcatcatgcacagggtcgacagaagaaagcgagatgctgaaaagacaacggtcactgtacatcgatttaggtgcgctagctggctacttcaaccttgttcgtggcccaccaacccttgagtatggttag

SEQ ID NO: 271762 - DNA, 399 bp, Artificial Sequence
  derived and/or modified sequence
atggagtacatgagcaccggcagcgacaacaaggaggagatcgaccttctgataaagcatttgaacgtgagcgacgtcatcgatataatggaaaatctgtacgcatccgaagaaccggcagtgtacgagccttcactgatgacaatgtgtcaggacagcaatcagaacgacgagaggagtaaatctctgctgctgtcaggacaggaggttccttggctgtcctcagtccggtacggtacagtggaagatctgctggctttcgcgaaccacatttcaaatacagctaagcacttctacggacaacggccacaggagtctggcatcctgctcaacatggtccgcttcttcccaatcagttgggtgttgtgtgcccagctgtcatattgttcgttcatatag

SEQ ID NO: 271763 - DNA, 1404 bp, Artificial Sequence
  derived and/or modified sequence
atggagtacatgagcaccggcagcgacaacaaggaggagatcgacctgctgatcaaacatctcaacgtgtcagacgtcatagacattatggagaatctgtatgccagcgaggagcctgccgtgtacgagccaagcttaatgaccatgtgtcaggatagcaatcagaacgatgagcggtccaaatcccttctgctctcaggccaggaggttccatggctgtcatctgtgagatacggcacagtcgaggacctcctggcctttgccaaccatatcagcaacacggcgaagcatttttacgggcagaggccccaggagtcaggcatcctcctgaacatggtaatcactccccagaacggcaggtaccaaatcgattctgacgtgttactcatcccatggaagcttacttaccgaaatataggcagcgatttcatacctcgcggcgccttcggtaaagtgtatcttgcacaagatatcaagacgaaaaagagaatggcctgtaaactgattccagtagatcaattcaagccgagtgacgtggagatccaggcatgctttaggcatgaaaacatcgcagagctctacggcgcagttttatggggtgagactgtgcacctctttatggaggctggagagggcggaagcgtgctggaaaagctggaatcgtgcggccccatgcgggagttcgaaatcatctgggtgacaaagcacgttctcaagggtcttgatttccttcatagcaaaaaggtgatccaccacgacattaagcccagcaatatcgtttttatgtctacaaaagccgttttggtcgacttcggtctgtcagtccagatgactgaggacgtttattttcctaaagacctgagaggcactgagatatacatgagcccagaagtaatcctgtgcagagggcattccaccaaggcagacatatattccctgggcgccactttaattcatatgcagacagggaccccgccatgggtcaagcggtatccgcggtcggcctatccgagctatctttacattatccataagcaggcgcccccattagaggatatcgccgatgactgcagccctggcatgcgcgaactgatcgaagcctccctcgaacgcaaccccaatcaccgtccccgtgctgctgacttgcttaagcacgaagccctgaaccccccacgggaagatcaacctcggtgccaaagcctggacagcgcccttttagaacggaaaaggctactttctcggaaggagcttgagctcccggagaatatcgccgactctagctgcactgggtcaactgaagagtccgaaatgctgaaacggcaaaggtccttatacatcgacctcggcgcactggcgggatatttcaacctggtgcgaggaccccccaccctggaatatggctag

SEQ ID NO: 271764 - DNA, 672 bp, Artificial Sequence
  derived and/or modified sequence
atggagtacatgagcaccggcagcgacaacaaggaggagatcgacttgctaatcaagcacctgaacgtgagcgatgttatcgatattatggagaatctgtatgcttctgaagaacccgctgtatacgaaccaagtttaatgacaatgtgtcaggactctaaccagaacgatgagaggagcaagtcgctgctgctgtcaggtcaggaagttccatggctcagtagtgtccgctatggaactgttgaggacttactggcatttgccaatcatattagcaatactgccaagcacttttacggtcaacggccccaggagtctggcatcttgctgaacatggtcattactccacagaatgggcgataccaaatcgattcggatgtactcctgattccttggaaacttacttaccggaacatcggtagcgatttcatccccaggggtgctttcggcaaggtttatctggctcaggacatcaagacgaaaaagagaatggcatgcaaactgattcctgtcgatcagttcaagccttcagatgtggagatacaggcctgttttaggcatgaaaacatcgctgagctgtacggagcagtgctgtggggcgagaccgttcacctgttcatggaggctggcgagggcggtagtgtcctggagaagttggagtcttgcgggtag

SEQ ID NO: 271765 - DNA, 768 bp, Artificial Sequence
  derived and/or modified sequence
atggagtacatgagcaccggcagcgacaacaaggaggagatcgaccttcttataaaacatcttaacgtctccgacgtgatagatataatggaaaatttgtatgcctctgaggaacccgctgtgtacgaaccttctctaatgactatgtgtcaggacagtaaccagaacgacgaaagatctaaaagtcttctactgagcgggcaggaggtcccctggctatctagcgtccggtatggaactgtggaggatctgttggccttcgccaatcacatttccaacacagcgaaacatttctacggccaacgtcctcaggagtccggaatcctgctaaacatggtgattacgcctcagaacggacgctatcagatcgactccgacgtactgttaatcccatggaaattaacttaccgtaatataggcagcgactttattccaaggggcgcttttggaaaagtctatctcgcacaggatatcaagacaaagaagcgcatggcctgtaaattgatccccgtcgaccagtttaaaccttccgatgtggaaatccaagcttgtttccgtcacgaaaacattgcagagctatatggggcagtgctgtggggagagactgtgcacctattcatggaggccggcgagggaggatctgtcttggagaagctcgagtcatgtgggcctatgcgcgagtttgaaatcatatgggttactaagcacgtcctcaaaggtttggactttctgcacagtaagaaagtgattcatcacgatatcaagtag

SEQ ID NO: 271766 - DNA, 573 bp, Artificial Sequence
  derived and/or modified sequence
tgagtggaggacctgctggccttcgccaaccacatcagcaacaccgcaaaacacttctatggacagagaccccaggagtccggcatcctgctaaacatggtcatcacacctcagaacggaaggtatcagattgattcagatgtgctgctgattccctggaagttaacgtatcgtaacatcgggtctgattttatccctagaggcgcttttgggaaggtgtacctggcccaagacatcaagaccaaaaagcggatggcatgcaaactcattccggtagaccagttcaagccatctgatgtcgagattcaggcctgttttcgccatgaaaacattgccgagctgtatggcgccgtgctgtggggcgaaaccgtccatctgtttatggaggcgggagagggcggaagtgtgctcgaaaaactggagtcctgcggtccaatgagagaattcgaaatcatctgggtcaccaagcacgtgctcaaggggctggatttcttacactctaaaaaagtgattcaccacgatataaagcgaaaatacctgtggacctacacatttcttgctcagcgcgactag

SEQ ID NO: 271767 - DNA, 1404 bp, Artificial Sequence
  derived and/or modified sequence
atggagtacatgagcaccggcagcgacaacaaggaggagatcgaccttttaatcaaacacctcaacgtctcagatgttatcgacatcatggagaacctttatgctagtgaggaacctgcggtgtacgaaccctctctgatgaccatgtgtcaggactccaatcagaacgatgaaaggtctaaatcattactcttatctgggcaggaagtgccctggttgtcaagcgttagatacggtacagtggaagatctcctggcctttgcaaaccatatcagtaacacagcgaagcacttttacgggcagcggcctcaagaaagcggtatactccttaatatggtcattacaccacaaaacggaaggtatcagatcgatagcgacgtgctcctgataccctggaagctgacttatcgcaatatcggctcagatttcataccgcgcggagcattcgggaaagtttacctagcccaagacatcaaaacaaagaagcgcatggcctgtaagctcatccctgtggatcaattcaagccctccgatgtggaaattcaggcatgctttagacatgagaatatcgccgagctatacggggccgtcctgtggggtgaaacagttcacttatttatggaagcaggtgagggcggttctgttctcgagaagttggagtcatgcggtcctatgcgcgagtttgagatcatctgggtgactaagcacgtcctgaaaggcctagactttctgcattccaagaaagtgatccaccacgacattaagcccagcaacatcgtgttcatgagtactaaggccgtcctcgtggactttggcctgagcgtgcagatgaccgaggacgtttacttccccaaagacctccgcggtaccgagatctacatgtcccccgaggtgattctttgccgaggacatagtaccaaggcagacatctactccttgggggctactcttatccacatgcagacaggtacacctccatgggttaaacggtatcccagaagcgcttaccccagttatctgtatattatccacaagcaggctccacccctggaggacattgctgacgattgctcaccgggaatgagagagctgatagaagcctctcttgagagaaatcctaaccaccggccacgagcagctgatctgttgaagcacgaagccctgaacccgccccgcgaggaccagcccagatgccagtctttggattccgctcttctggagcggaaaagacttctcagtcggaaggaactcgagctgcccgagaacatcgccgattcgtcttgcaccggatccaccgaagagagcgaaatgttgaaaagacagaggagcctgtacattgacttaggagccttggcaggctactttaaccttgtacgggggcctcctaccctcgaatacgggtag

SEQ ID NO: 271768 - DNA, 1404 bp, Artificial Sequence
  derived and/or modified sequence
atggagtatatgagtaccggatcggacaataaagaagaaatcgatctcctgatcaagcacctgaatgtatcagacgtgatcgatatcatggagaacctctacgccagcgaggagccagctgtctacgagccttcccttatgaccatgtgtcaggactcaaatcaaaacgatgagagatccaaatccttgctgctgtccggccaggaggtcccgtggttgtcatcagtccgatatggcactgttgaggacctgcttgcattcgccaatcatatcagcaatactgctaagcacttttatggtcagcgaccccaggagtctggaatcctgctcaatatggtcataaccccccagaacggccgataccagatcgacagtgatgttctgctgattccctggaagttgacatatagaaacatcggatcagattttatacccaggggagcattcggcaaggtgtacttggctcaggatattaagaccaagaaaagaatggcctgcaagcttatcccagtggaccaatttaagccctctgacgtggagatccaggcttgcttcagacacgaaaatatcgccgagctctacggcgctgtcttgtggggtgaaaccgttcatctctttatggaagctggtgaaggcggatcggtgctggagaaacttgagagctgtggaccaatgcgtgagttcgaaatcatttgggtgaccaaacacgtgctcaaaggactggatttcctccactccaagaaagtaatccatcacgatattaagccttctaacatcgtgttcatgagcacaaaggccgtcctggttgatttcggcctcagcgttcagatgacggaagatgtctattttcctaaggatttgcgtgggacagaaatctacatgtctcccgaggttattctttgcaggggacacagtaccaaggctgatatctatagcttgggggctacattgattcatatgcagactgggacgcctccctgggtgaagaggtatcctagatccgcctacccatcctacctctacataattcataagcaggcacctcctttggaagatatcgccgacgattgtagtcctggcatgagagagcttattgaagcgagccttgaacgtaatccaaaccatagaccgagagcagccgacttgcttaagcacgaagctctgaaccccccacgggaggaccaaccgagatgccagagcctggattcagcccttctggagagaaagcggttactgtcaaggaaggagctcgaattaccagagaacattgcagactcctcttgtacgggctctaccgaagagagtgaaatgctgaaacgacagcgttcactttacatcgacttgggagccctcgccggatacttcaacctggtccggggaccccctacactggagtatggttag

SEQ ID NO: 271769 - DNA, 1404 bp, Artificial Sequence
  derived and/or modified sequence
atggaatatatgagcacggggtcggacaacaaagaagagatagatttgttgataaagcatttgaacgtgtctgatgttatagacattatggaaaacttgtatgcttcagaagaacccgctgtctatgaacctagtctaatgacgatgtgtcaagactcaaaccagaatgacgaacgatcaaaatctttactcctgagcggacaagaggtgccctggctatcatccgttaggtacggaacagtcgaggatctgttagctttcgccaaccacatctccaataccgcaaaacatttttacggccagcgaccccaagagtccggcatcctcctgaacatggtgatcaccccacaaaatggaagatatcaaatcgattcggacgtcttactcatcccgtggaagctgacttatagaaatataggtagcgattttatccctcgaggcgctttcggcaaagtgtacctggctcaagatatcaagacaaaaaagcgcatggcctgcaagttgatccctgtggaccagtttaagcctagtgacgtcgagatccaagcctgcttcaggcatgaaaacattgccgagctgtacggagctgtcctgtggggtgagacagtccatctattcatggaagccggagagggtgggtcggtcctagaaaagctcgaatcctgtggcccaatgagggaattcgaaataatctgggtaacgaagcacgtcctgaagggcttggactttctccactccaaaaaggtcatccatcatgatattaagccttccaacatcgtgttcatgagtaccaaagccgtgctcgtggacttcggtctatccgtccaaatgacagaggatgtgtacttcccaaaggatctcagggggaccgagatctacatgtctccagaggtcatcctatgcagaggccatagtacaaaagccgacatttacagcctgggggcaaccttgatacacatgcaaacgggaacccccccttgggtcaagagataccctcgaagcgcgtatccatcctacttatatattattcacaagcaagcgccacccttagaggatatcgcggatgattgttcaccgggaatgagagagttgatagaggcgagcctcgaaagaaacccaaaccaccgcccaagagccgctgaccttttgaaacacgaggccctgaatccaccaagagaagatcagccgaggtgccaatcgctcgattccgctctgctggagcgaaagaggcttctgtccaggaaagaactcgaactgccggagaacatcgcagacagttcatgcactggcagcacagaggagagcgagatgctgaaacgacagagaagtctctacatagacctaggagcgttagccggttatttcaacctcgtgcgaggcccaccaacattagagtatggctag

SEQ ID NO: 271770 - DNA, 399 bp, Artificial Sequence
  derived and/or modified sequence
atggagtacatgagtaccggcagtgacaacaaggaggaaattgatctcctcataaaacatctgaatgtttctgacgtgatcgatatcatggagaacctgtatgcgtctgaggaacctgccgtttacgaacccagccttatgacaatgtgtcaggacagcaatcagaacgacgaaagatctaaatcgctgctgttgtccggacaggaggtcccttggctgagtagtgtccgttacgggacagtggaggatctactggcttttgctaaccatatctcaaacaccgcaaaacacttttacggacagcgaccccaggagtccggtatcttactgaacatggtgcggttcttccccatctcctgggtcctgtgcgcacaattaagctattgctctttcatatag

SEQ ID NO: 271771 - DNA, 1404 bp, Artificial Sequence
  derived and/or modified sequence
atggagtatatgagtaccgggagtgacaacaaagaggaaatcgacctgctgattaagcatctcaacgtcagtgacgtgattgatattatggagaacttgtacgcaagcgaagagcctgcggtttatgagccctcactgatgacaatgtgtcaggacagcaaccaaaatgacgagcggtcaaagtcgctgctgctatctggccaggaggtcccatggctgagttcagtccggtatggaaccgtggaagacctgctggcctttgcaaatcatattagcaacacagccaagcatttctacgggcagaggccacaggaatcagggattctgctgaacatggtcatcacgccacagaacggcagataccaaatcgacagcgatgtcctgttgatcccttggaaactgacatatagaaatattggatccgatttcatccctcggggagcctttgggaaggtgtacctggcccaggatattaagactaagaaacgcatggcctgcaaacttatcccagtcgaccagttcaagccgagcgatgtggagatccaagcctgcttccgccacgagaacatcgccgaactttatggtgctgtcctttggggagagacagtgcacctgttcatggaagccggagagggcggtagtgtgctggagaaactggagtcctgtggtcctatgagggaatttgagatcatatgggtaactaagcacgtccttaaaggactcgactttttacacagtaagaaggtgatccaccacgacatcaagcctagcaacatagtgtttatgtccaccaaagcggtgctcgtcgatttcggcctctccgtacaaatgactgaagacgtgtattttcctaaggacctgagaggcactgaaatttacatgtctccagaggtaatcttgtgccgcggacacagtacgaaagccgacatttattcattgggcgcaacgcttatccacatgcagaccgggaccccgccttgggtcaagaggtaccctagatcggcctacccgagttatctgtacataatccataagcaggcccctcctctagaggacatcgctgatgattgttctccagggatgcgcgagctgatcgaggcgtccctggagcggaatcctaatcaccggcctcgtgcagccgatcttctgaaacacgaagcattgaatccacccagggaagaccagccgcgatgtcagtccctggacagtgcactcctggagcggaagaggctgctgtccagaaaggagttagaactacctgaaaatatagccgattcaagctgcacaggctccacggaggagtcagaaatgttgaagagacagcggtcgctatatattgatctgggagccttggcaggttacttcaatttagtccgaggcccacccacactcgaatatggctag

SEQ ID NO: 271772 - DNA, 672 bp, Artificial Sequence
  derived and/or modified sequence
atggagtacatgtcaaccgggtccgataataaggaagagatagatctgttgataaaacacctgaatgtatcggacgtcatcgatatcatggagaatttgtatgcctccgaagaacctgccgtgtatgagccatcactcatgacaatgtgtcaggactccaatcaaaacgacgagaggtcaaagtcacttctgctgtccggtcaggaggtcccttggctgagctccgtacgttacggcactgtggaggacctattagcgtttgcaaatcatatatctaatactgctaaacacttctacggacagcgccctcaggagtccggcattctcctcaacatggtgatcacaccacaaaacggcaggtaccaaattgactcggacgttctacttatcccctggaagctgacatacagaaacatcggatctgattttattccccgaggtgcattcgggaaggtgtatctggcccaggacatcaaaacaaagaagcgtatggcctgcaaactgatcccagtcgaccagttcaagcccagcgacgtagagatacaagcgtgcttcagacatgaaaacatcgccgagctgtatggtgcagtgctgtggggcgagaccgtgcatctcttcatggaggccggtgaagggggtagcgttctggagaagctcgagagttgcggatag

SEQ ID NO: 271773 - DNA, 768 bp, Artificial Sequence
  derived and/or modified sequence
atggagtatatgtcaaccggatccgataataaggaggaaatcgacctcctgatcaagcaccttaatgtttccgacgtgatcgatatcatggaaaatctctacgcatctgaggagcctgccgtgtacgagcctagccttatgacaatgtgccaagatagtaaccagaacgacgaaaggagcaagagcctactgctgtcgggacaagaggtcccctggttaagtagcgtcaggtacgggacagtggaggatcttctggcctttgccaaccacatttctaatactgcaaaacatttctacggtcagagaccgcaagaatccggtatactgctcaatatggtgattacgcctcaaaatggcagatatcagattgactccgatgtgttactcatcccgtggaagttgacctaccggaacatcgggtccgactttattccaaggggggctttcgggaaagtgtacttggcacaggatattaaaacaaaaaagcgtatggcatgtaagctaataccggtggatcagttcaagcccagcgatgtggagattcaggcgtgttttcggcacgagaacatagctgaactatacggggcagtgctatggggagagacggtccatctgtttatggaggcaggcgaggggggtagtgtgctggagaaactcgagtcgtgtggcccaatgcgagagtttgaaattatctgggtcacaaagcatgtccttaaaggactagatttcctgcattccaagaaagtaatccaccacgatattaagtag

SEQ ID NO: 271774 - DNA, 573 bp, Artificial Sequence
  derived and/or modified sequence
tgagtcgaggatttgctggcctttgccaaccacatatccaacactgccaagcacttctacggccaacgtcctcaggagtctggaattctcctgaacatggttatcacaccccaaaacggcaggtatcagatagactcagatgttctgttgataccttggaagctcacctatagaaatatcggaagcgattttatcccaagaggcgcttttgggaaggtctatctcgcccaggatataaagacaaagaagaggatggcctgcaaactgatccctgtcgaccaatttaagccttctgacgtcgagatccaagcgtgttttcgacatgagaacatcgcggagctgtatggcgctgtgttatggggagagaccgtgcatttgtttatggaggccggagagggtggatccgtgctggagaagctcgagtcctgcggacccatgagagagtttgagatcatctgggtgaccaagcatgtgcttaagggtcttgacttcctgcactcaaaaaaagtcatacaccacgacatcaaaaggaagtatctctggacttacacctttctcgctcagcgggactag

SEQ ID NO: 271775 - DNA, 1404 bp, Artificial Sequence
  derived and/or modified sequence
atggaatatatgtctactgggagcgataacaaggaggaaattgacttgctgatcaaacacctaaacgtcagtgatgtgatagacatcatggagaatctgtatgcctcagaagagcctgccgtctatgaacctagtctgatgacaatgtgccaggatagtaaccagaatgatgaacgttccaagtcactcctactaagtggacaggaggtaccatggctcagctccgtgcgttacggtacagttgaagacctgttggcgttcgccaaccacatttccaacacggctaagcatttttatggccaaagaccccaggagtctggaatcctcctgaatatggtgattacacctcagaacggtaggtaccagatcgacagtgacgtcctccttatcccctggaagctcacatatagaaatatcggttccgatttcatcccccgtggtgcctttggaaaggtgtacctagctcaagacattaagaccaaaaaaagaatggcttgcaagttgatcccggttgatcagttcaagcctagcgatgtcgagattcaagcatgtttcagacacgaaaacattgcagaactatacggtgcggtgctctggggagaaaccgtccatctgtttatggaagctggtgaggggggttctgtgctcgaaaaactggagagctgtggccctatgagagaatttgagattatctgggttaccaaacatgtactcaaggggttagattttctccattcaaagaaggttatccatcatgacatcaagccaagcaacatcgtgttcatgagtactaaggcagtgttggtagatttcggtctatcagtccagatgacagaggacgtgtatttccctaaggatctgagagggaccgagatatatatgtctccggaagtcatcctttgccgcggtcactcgaccaaagctgatatatatagcctaggagctaccttgatccatatgcagacaggcactcccccttgggtgaaacgctacccgagatctgcgtatccatcatacttatacataatccataagcaagctccaccactggaggatatagccgacgactgttctcccggtatgagggaactgatagaggcctctcttgagagaaacccaaaccacagacctcgcgcagccgacttacttaagcatgaagcactgaaccctccaagagaagaccagcctaggtgccagagtcttgatagtgcgctgcttgagcggaaacgcctgctatcaagaaaggagttagagttgccggagaatatcgccgactcctcatgcacgggctctaccgaagaatccgagatgctaaaacgacaaagaagcttgtacattgaccttggcgctctagccggttatttcaacctcgtcagggggcctcccaccctggaatacggctag

SEQ ID NO: 271776 - DNA, 1404 bp, Artificial Sequence
  derived and/or modified sequence
atggagtacatgagcaccggcagcgacaacaaggaggagatcgacctgctgatcaagcacctgaacgtgagcgacgtgatcgacatcatggagaacctgtacgccagcgaggagcccgccgtgtacgagcccagcctgatgaccatgtgccaggacagcaaccagaacgacgagagaagcaagagcctgctgctgagcggccaggaggtgccctggctgagcagcgtgagatacggcaccgtggaggacctgctggccttcgccaaccacatcagcaacaccgccaagcacttctacggccagagaccccaggagagcggcatcctgctgaacatggtgatcaccccccagaacggcagataccagatcgacagcgacgtgctgctgatcccctggaagctgacctacagaaacatcggcagcgacttcatccccagaggcgccttcggcaaggtgtacctggcccaggacatcaagaccaagaagagaatggcctgcaagctgatccccgtggaccagttcaagcccagcgacgtggagatccaggcctgcttcagacacgagaacatcgccgagctgtacggcgccgtgctgtggggcgagaccgtgcacctgttcatggaggccggcgagggcggcagcgtgctggagaagctggagagctgcggccccatgagagagttcgagatcatctgggtgaccaagcacgtgctgaagggcctggacttcctgcacagcaagaaggtgatccaccacgacatcaagcccagcaacatcgtgttcatgagcaccaaggccgtgctggtggacttcggcctgagcgtgcagatgaccgaggacgtgtacttccccaaggacctgagaggcaccgagatctacatgagccccgaggtgatcctgtgcagaggccacagcaccaaggccgacatctacagcctgggcgccaccctgatccacatgcagaccggcacccccccctgggtgaagagataccccagaagcgcctaccccagctacctgtacatcatccacaagcaggccccccccctggaggacatcgccgacgactgcagccccggcatgagagagctgatcgaggccagcctggagagaaaccccaaccacagacccagagccgccgacctgctgaagcacgaggccctgaacccccccagagaggaccagcccagatgccagagcctggacagcgccctgctggagagaaagagactgctgagcagaaaggagctggagctgcccgagaacatcgccgacagcagctgcaccggcagcaccgaggagagcgagatgctgaagagacagagaagcctgtacatcgacctgggcgccctggccggctacttcaacctggtgagaggcccccccaccctggagtacggctag

SEQ ID NO: 271777 - DNA, 399 bp, Artificial Sequence
  derived and/or modified sequence
atggagtacatgagcaccggcagcgacaacaaggaggagatcgacctgctgatcaagcacctgaacgtgagcgacgtgatcgacatcatggagaacctgtacgccagcgaggagcccgccgtgtacgagcccagcctgatgaccatgtgccaggacagcaaccagaacgacgagagaagcaagagcctgctgctgagcggccaggaggtgccctggctgagcagcgtgagatacggcaccgtggaggacctgctggccttcgccaaccacatcagcaacaccgccaagcacttctacggccagagaccccaggagagcggcatcctgctgaacatggtgagattcttccccatcagctgggtgctgtgcgcccagctgagctactgcagcttcatctag

SEQ ID NO: 271778 - DNA, 672 bp, Artificial Sequence
  derived and/or modified sequence
atggagtacatgagcaccggcagcgacaacaaggaggagatcgacctgctgatcaagcacctgaacgtgagcgacgtgatcgacatcatggagaacctgtacgccagcgaggagcccgccgtgtacgagcccagcctgatgaccatgtgccaggacagcaaccagaacgacgagagaagcaagagcctgctgctgagcggccaggaggtgccctggctgagcagcgtgagatacggcaccgtggaggacctgctggccttcgccaaccacatcagcaacaccgccaagcacttctacggccagagaccccaggagagcggcatcctgctgaacatggtgatcaccccccagaacggcagataccagatcgacagcgacgtgctgctgatcccctggaagctgacctacagaaacatcggcagcgacttcatccccagaggcgccttcggcaaggtgtacctggcccaggacatcaagaccaagaagagaatggcctgcaagctgatccccgtggaccagttcaagcccagcgacgtggagatccaggcctgcttcagacacgagaacatcgccgagctgtacggcgccgtgctgtggggcgagaccgtgcacctgttcatggaggccggcgagggcggcagcgtgctggagaagctggagagctgcggctag

SEQ ID NO: 271779 - DNA, 768 bp, Artificial Sequence
  derived and/or modified sequence
atggagtacatgagcaccggcagcgacaacaaggaggagatcgacctgctgatcaagcacctgaacgtgagcgacgtgatcgacatcatggagaacctgtacgccagcgaggagcccgccgtgtacgagcccagcctgatgaccatgtgccaggacagcaaccagaacgacgagagaagcaagagcctgctgctgagcggccaggaggtgccctggctgagcagcgtgagatacggcaccgtggaggacctgctggccttcgccaaccacatcagcaacaccgccaagcacttctacggccagagaccccaggagagcggcatcctgctgaacatggtgatcaccccccagaacggcagataccagatcgacagcgacgtgctgctgatcccctggaagctgacctacagaaacatcggcagcgacttcatccccagaggcgccttcggcaaggtgtacctggcccaggacatcaagaccaagaagagaatggcctgcaagctgatccccgtggaccagttcaagcccagcgacgtggagatccaggcctgcttcagacacgagaacatcgccgagctgtacggcgccgtgctgtggggcgagaccgtgcacctgttcatggaggccggcgagggcggcagcgtgctggagaagctggagagctgcggccccatgagagagttcgagatcatctgggtgaccaagcacgtgctgaagggcctggacttcctgcacagcaagaaggtgatccaccacgacatcaagtag

SEQ ID NO: 271780 - DNA, 573 bp, Artificial Sequence
  derived and/or modified sequence
tgagtggaggacctgctggccttcgccaaccacatcagcaacaccgccaagcacttctacggccagagaccccaggagagcggcatcctgctgaacatggtgatcaccccccagaacggcagataccagatcgacagcgacgtgctgctgatcccctggaagctgacctacagaaacatcggcagcgacttcatccccagaggcgccttcggcaaggtgtacctggcccaggacatcaagaccaagaagagaatggcctgcaagctgatccccgtggaccagttcaagcccagcgacgtggagatccaggcctgcttcagacacgagaacatcgccgagctgtacggcgccgtgctgtggggcgagaccgtgcacctgttcatggaggccggcgagggcggcagcgtgctggagaagctggagagctgcggccccatgagagagttcgagatcatctgggtgaccaagcacgtgctgaagggcctggacttcctgcacagcaagaaggtgatccaccacgacatcaagagaaagtacctgtggacctacaccttcctggcccagagagactag

SEQ ID NO: 271781 - protein, 374 aa, Artificial Sequence
  derived and/or modified sequence
MPEDIDDEEDSVKIIRLVKNREPLGATIKKDEQTGAIIVARIMRGGAADRSGLIHVGDELREVNGIPVEDKRPEEIIQILAQSQGAITFKIIPGSKEETPSKEGKMFIKALFDYNPNEDKAIPCKEAGLSFKKGDILQIMSQDDATWWQAKHEADANPRAGLIPSKHFQERRLALRRPEILVQPLKVSNRKSSGFRKSFRLSRKDKKTNKSMYECKKSDQYDTADVPTYEEVTPYRRQTNEKYRLVVLVGPVGVGLNELKRKLLISDTQHYGVTVPHTTRARRSQESDGVEYIFISKHLFETDVQNNKFIEYGEYKNNYYGTSIDSVRSVLAKNKVCLLDVQPHGPWFLLPLMAVPWGAKPPNARMTCGSPLDL

SEQ ID NO: 271782 - DNA, 1125 bp, Artificial Sequence
  derived and/or modified sequence
atgccggaggacatcgatgacgaagaggatagcgtgaaaatcatcaggctggtgaagaatcgagaacctctcggcgccacaatcaagaaagacgaacaaacaggcgccattatcgttgctcggattatgagggggggagccgccgacaggagtggactgatccacgtgggagacgaactgcgcgaggtcaatgggattccggtcgaagataagaggcctgaagagataattcagatcctggcccagtcacagggcgctatcaccttcaagatcatcccagggagcaaggaggagacaccttcaaaggaaggcaaaatgttcatcaaagcactcttcgactacaatcctaacgaagacaaggccatcccctgcaaggaggccgggctgtcatttaagaaaggcgacatactgcaaattatgagccaggacgatgctacctggtggcaggcaaagcacgaggcagatgccaacccaagagctggcttgataccctctaagcacttccaagagagacgactggccctgcggaggccagaaatactggtgcagccgttgaaggtctccaatcggaagtcaagcgggtttaggaaatcctttcgcttgtctagaaaagacaagaagacaaacaaatccatgtatgaatgcaaaaagtcagaccaatacgatactgcggatgtgccaacatacgaggaggtgaccccatataggagacagactaatgagaagtacagattggttgtgctagtaggtcctgttggcgtaggcttgaatgagctgaagaggaagttactgatatccgatacccagcactatggcgttactgtccctcacacgaccagggccaggcgttcccaggagagtgatggcgtagagtacatcttcattagcaagcatctattcgaaactgacgtccaaaataacaaattcattgagtacggggagtataagaacaattattatggcaccagcatcgatagcgtcaggagtgtcctggcaaagaacaaggtctgccttcttgatgtgcaaccacacggcccctggttccttctgcctctgatggcagtcccatggggcgctaaaccccctaatgcccggatgacttgtggtagtcccctggatctatag

SEQ ID NO: 271783 - DNA, 1125 bp, Artificial Sequence
  derived and/or modified sequence
atgccagaagatattgatgatgaagaagattctgtgaagatcatccggctggtgaagaaccgggagcccctgggcgccaccatcaagaaggatgagcagacaggagccatcatcgtggcccgcatcatgagaggaggagctgctgacagaagtggcctcatccacgtgggagatgagctgcgggaggtgaatggcatccctgtggaggacaagaggcctgaggagatcatccagatcctggcccagagccagggcgccatcaccttcaagatcatccctggcagcaaggaggagacccccagcaaggagggcaagatgttcatcaaggccctgtttgactacaaccccaatgaagacaaggccatcccctgcaaggaggccggcctgtccttcaagaagggggacatcctgcagatcatgagccaggatgatgccacctggtggcaggccaagcatgaagcagatgccaacccccgggccggcctcatccccagcaagcacttccaggagcggcggctggccctgcggcggcctgagatcctggtgcagcccctgaaggtgagcaacaggaagagcagcggcttcaggaagagcttccggctgagcaggaaggacaagaagaccaacaagtccatgtatgagtgcaagaagagtgaccagtatgacacagcagatgtgcccacctatgaggaggtgaccccctaccgccggcagaccaatgagaagtaccgcctggtggtgctggtgggccctgtgggcgtgggcctgaatgagctgaagaggaagctgctgatcagtgacacccagcactatggagtgacagtgccccacaccacccgggcccggcgcagccaggagagtgatggagtggagtacatcttcatcagcaagcacctgtttgaaacagatgtgcagaacaacaagttcatcgagtatggagagtacaagaacaactactacggcaccagcattgacagcgtgcgctctgtgctggccaagaacaaggtgtgcctgctggatgtgcagccccacggcccctggttcctgctgcccctgatggctgtgccctggggcgccaagcccccaaatgccaggatgacctgtggcagccccctggacctgtag

SEQ ID NO: 271784 - DNA, 1856 bp, Artificial Sequence
  derived and/or modified sequence
gtgttggttactagccgggctggaggcgggggccgggctcccactgggctcgtgcgttctgcgcccgccgcggcggtgccgagcccgctggctcccgattgtcctctgcggcggtggcggtcgctgcctccttgcctccgggcccggggctgcaggggccagagcgagtgcgcctcctgcccgcggaccgcggcagcccagagcagaaacggcttacaaaatatacagatcttggtagacaacgtggctgcaggctgttgaattggaattccctgtggctgtccgaaggcagggtgtccggagagcggtgggctgacctgttcctacaccttgcatcatgccagctttgtcaacgggatctgggagtgacactgattcatgaaaaactacactactatgagaagcagagtccggtgcccattctccatggtgcggcggccttggccgatgatctggccgaagagcttcagaacaagccattaaacagtgagatcagagagctgttgaaactactgtcaaaacccaatgtgaaggctttgctctctgtacatgatactgtggctcagaagaattacgacccagtgttgcctcctatgcctgaagatattgacgatgaggaagactcagtaaaaataatccgtctggtcaaaaatagagaaccactgggagctaccattaagaaggatgaacagaccggggcgatcattgtggccagaatcatgagaggaggagctgcagatagaagtggtcttattcatgttggtgatgaacttagggaagtcaacgggataccagtggaggataaaaggcctgaggaaataatacagattttggctcagtctcagggagcaattacatttaagattatacccggcagcaaagaggagacaccatcaaaagaaggcaagatgtttatcaaagccctctttgactataatcctaatgaggataaggcaattccatgtaaggaagctgggctttctttcaaaaagggagatattcttcagattatgagccaagatgatgcaacttggtggcaagcgaaacacgaagctgatgccaaccccagggcaggcttgatcccctcaaagcatttccaggaaaggagattggctttgagacgaccagaaatattggttcagcccctgaaagtttccaacaggaaatcatctggttttagaaaaagttttcgtcttagtagaaaagataagaaaacaaataaatccatgtatgaatgcaagaagagtgatcagtacgacacagctgacgtacccacatacgaagaagtgacaccgtatcggcgacaaactaatgaaaaatacagactcgttgtcttggttggtcccgtgggagtagggctgaatgaactgaaacgaaagctgctgatcagtgacacccagcactatggcgtgacagtgccccataccaccagagcaagaagaagccaggagagtgatggtgttgaatacattttcatttccaagcatttgtttgagacagatgtacaaaataacaagtttattgaatatggagaatataaaaacaactactacggcacaagtatagactcagttcggtctgtccttgctaaaaacaaagtttgtttgttggatgttcagcctcatggaccatggtttctccttccactgatggctgtaccctggggtgcaaaacctccaaatgctagaatgacctgcggaagccctttggacctctaaaggaagatgaatctggagtaaaagtgtttcaagaatcaggaaggctgcctcctgacttgggcactgtgttagtcccttgttgcactgctctgaagaaatacctgaaactggacagtgaagcatttaaggacactagaa

SEQ ID NO: 271785 - DNA, 1125 bp, Artificial Sequence
  derived and/or modified sequence
atgcccgaggacatcgacgacgaggaggacagcgtgaagatcatccgtcttgttaagaaccgcgagcccttaggcgcaaccatcaagaaggatgaacagacaggggccatcatcgtggcccggattatgcgaggcggtgcagctgaccgatcaggtctgatccatgtgggcgacgagttgcgggaggtgaacggcattccagtggaggacaagagaccagaagaaatcatccaaatactggcacaatcccaaggggcaattacttttaagatcattcccggtagcaaggaggaaactcctagcaaggagggaaaaatgtttataaaagctctcttcgattataaccccaacgaggataaggccattccatgcaaggaggcaggccttagcttcaagaaaggagatatcctgcagattatgtcccaggatgacgccacatggtggcaagccaagcacgaggctgatgctaacccaagagctggactaatcccttccaagcactttcaggagcgccgcctggctctccggcgcccagagatcctggtgcaacctctcaaagtatccaataggaagtctagcggattcaggaagagttttcgcctgtcacgcaaagataaaaaaaccaataagtccatgtacgagtgcaagaaatctgatcagtacgataccgctgatgtgcctacgtatgaggaagtgacaccatatcgtaggcagacaaatgagaaataccgcttagttgtcctggtaggccccgttggagtcggtctcaatgagcttaaacgcaagctcctgatatccgatacacagcattacggggtcactgtaccccatacgaccagagctaggaggtctcaggaaagtgacggagttgagtacatcttcatctctaagcacttatttgaaactgacgtccagaataataaatttatcgaatatggcgaatataaaaataattactatggtactagcatcgattcagtgcgctccgtactggccaagaataaagtatgcctgctggacgtgcagccccacggaccttggttcctgctccctttgatggccgtaccttggggagccaaaccaccaaatgcgaggatgacttgcggctcccccctggatctgtag

SEQ ID NO: 271786 - DNA, 1125 bp, Artificial Sequence
  derived and/or modified sequence
atgccagaagacatcgacgatgaggaagactccgtcaagatcatacggctggttaagaacagggaaccgttgggggctaccatcaaaaaggatgagcagacaggcgctatcatcgtcgccagaattatgcggggtggcgctgcagataggtcaggtctgatacatgtcggcgatgaattgcgagaggttaacgggatcccggtggaggacaagaggcctgaggaaattattcagattttagctcagtcccaaggagcaattacctttaagattattcctggctcaaaggaagaaacacccagtaaggagggtaagatgttcatcaaagctctgtttgattataatcctaatgaagacaaagccatcccttgtaaagaggcaggtctgagtttcaaaaagggtgacattctgcagataatgagtcaggacgatgccacctggtggcaggcaaagcacgaagctgacgccaatcctcgcgctggtttgattccaagcaagcactttcaggagaggcggcttgctctgcggagacctgaaatccttgtgcagccacttaaagtgagtaaccgaaagtctagcggcttcagaaagagtttccgtctcagtaggaaggataagaagacgaacaagtccatgtacgagtgcaaaaaaagcgatcagtacgataccgcagacgttccaacttatgaggaggtgacgccctatcgaaggcaaacaaatgagaagtacagattggtagttctggtcggtccagtgggagtcggattgaacgaattgaagcggaaactcctcatctctgatacccagcactacggagtgaccgtaccccatacgactagagcacggagaagccaggaaagtgatggggtggagtacatttttatctcaaagcatctcttcgagaccgatgttcagaacaataagttcatcgagtacggcgagtacaagaacaactactatgggacgagcattgactccgtgagatccgtcctcgctaaaaataaagtatgtctgttggatgtccagcctcacggcccatggtttctcctgcctttaatggcagtgccctggggcgcaaaacccccaaatgcacggatgacatgtgggagtccacttgacttgtag

SEQ ID NO: 271787 - DNA, 1125 bp, Artificial Sequence
  derived and/or modified sequence
atgcccgaggacatcgacgacgaggaggacagcgtgaagatcatcagactggtgaagaacagagagcccctgggcgccaccatcaagaaggacgagcagaccggcgccatcatcgtggccagaatcatgagaggcggcgccgccgacagaagcggcctgatccacgtgggcgacgagctgagagaggtgaacggcatccccgtggaggacaagagacccgaggagatcatccagatcctggcccagagccagggcgccatcaccttcaagatcatccccggcagcaaggaggagacccccagcaaggagggcaagatgttcatcaaggccctgttcgactacaaccccaacgaggacaaggccatcccctgcaaggaggccggcctgagcttcaagaagggcgacatcctgcagatcatgagccaggacgacgccacctggtggcaggccaagcacgaggccgacgccaaccccagagccggcctgatccccagcaagcacttccaggagagaagactggccctgagaagacccgagatcctggtgcagcccctgaaggtgagcaacagaaagagcagcggcttcagaaagagcttcagactgagcagaaaggacaagaagaccaacaagagcatgtacgagtgcaagaagagcgaccagtacgacaccgccgacgtgcccacctacgaggaggtgaccccctacagaagacagaccaacgagaagtacagactggtggtgctggtgggccccgtgggcgtgggcctgaacgagctgaagagaaagctgctgatcagcgacacccagcactacggcgtgaccgtgccccacaccaccagagccagaagaagccaggagagcgacggcgtggagtacatcttcatcagcaagcacctgttcgagaccgacgtgcagaacaacaagttcatcgagtacggcgagtacaagaacaactactacggcaccagcatcgacagcgtgagaagcgtgctggccaagaacaaggtgtgcctgctggacgtgcagccccacggcccctggttcctgctgcccctgatggccgtgccctggggcgccaagccccccaacgccagaatgacctgcggcagccccctggacctgtag

SEQ ID NO: 271788 - protein, 71 aa, Artificial Sequence
  derived and/or modified sequence
MEPLRVLELYSGVGGMHHALRESCIPAQVVAAIDVNTVANEVYKYNFPHTQLLAKTIEITKITKVYSFGKC

SEQ ID NO: 271789 - protein, 117 aa, Artificial Sequence
  derived and/or modified sequence
MEPLRVLELYSGVGGMHHALRESCIPAQVVAAIDVNTVANEVYKYNFPHTQLLAKTIERPLDTNNRKLWLSVPRVSIISNLSWHSKFKATIFSYCKASVRAITLSSPWSGTDGVPQN

SEQ ID NO: 271790 - protein, 345 aa, Artificial Sequence
  derived and/or modified sequence
MEPLRVLELYSGVGGMHHALRESCIPAQVVAAIDVNTVANEVYKYNFPHTQLLAKTIEGITLEEFDRLSFDMILMSPPCQPFTRDLLIQTIENCGFQYQEFLLSPTSLGIPNSRLRYFLIAKLQSEPLPFQAPGQVLMEFPKIESVHPQKYAMDVENKIQEKNVEPNISFDGSIQCSGKDAILFKLETAEEIHRKNQQDSDLSVKMLKDFLEDDTDVNQYLLPPKSLLRYALLLDIVQPTCRRSVCFTKGYGSYIEGTGSVLQTAEDVQVENIYKSLTNLSQEEQITKLLILKLRYFTPKEIANLLGFPPEFGFPEKITVKQRYRLLGNSLNVHVVAKLIKILYE

SEQ ID NO: 271791 - DNA, 1038 bp, Artificial Sequence
  derived and/or modified sequence
atggagcccctgagagtgctggagctgtacagcggcgtgggcggcatgcaccacgccctgagagagagctgcatccccgcccaggtggtggccgccatcgacgtgaacaccgtggccaacgaggtgtacaagtacaacttcccccacacccagctgctggccaagaccatcgagggcatcaccctggaggagttcgacagactgagcttcgacatgatcctgatgagccccccctgccagcccttcaccagagacctgctgatccagaccatcgagaactgcggcttccagtaccaggagttcctgctgagccccaccagcctgggcatccccaacagcagactgagatacttcctgatcgccaagctgcagagcgagcccctgcccttccaggcccccggccaggtgctgatggagttccccaagatcgagagcgtgcacccccagaagtacgccatggacgtggagaacaagatccaggagaagaacgtggagcccaacatcagcttcgacggcagcatccagtgcagcggcaaggacgccatcctgttcaagctggagaccgccgaggagatccacagaaagaaccagcaggacagcgacctgagcgtgaagatgctgaaggacttcctggaggacgacaccgacgtgaaccagtacctgctgccccccaagagcctgctgagatacgccctgctgctggacatcgtgcagcccacctgcagaagaagcgtgtgcttcaccaagggctacggcagctacatcgagggcaccggcagcgtgctgcagaccgccgaggacgtgcaggtggagaacatctacaagagcctgaccaacctgagccaggaggagcagatcaccaagctgctgatcctgaagctgagatacttcacccccaaggagatcgccaacctgctgggcttcccccccgagttcggcttccccgagaagatcaccgtgaagcagagatacagactgctgggcaacagcctgaacgtgcacgtggtggccaagctgatcaagatcctgtacgagtag

SEQ ID NO: 271792 - DNA, 216 bp, Artificial Sequence
  derived and/or modified sequence
atggagcccctgagagtgctggagctgtacagcggcgtgggcggcatgcaccacgccctgagagagagctgcatccccgcccaggtggtggccgccatcgacgtgaacaccgtggccaacgaggtgtacaagtacaacttcccccacacccagctgctggccaagaccatcgagatcaccaagatcaccaaggtgtacagcttcggcaagtgctag

SEQ ID NO: 271793 - DNA, 354 bp, Artificial Sequence
  derived and/or modified sequence
atggagcccctgagagtgctggagctgtacagcggcgtgggcggcatgcaccacgccctgagagagagctgcatccccgcccaggtggtggccgccatcgacgtgaacaccgtggccaacgaggtgtacaagtacaacttcccccacacccagctgctggccaagaccatcgagagacccctggacaccaacaacagaaagctgtggctgagcgtgcccagagtgagcatcatcagcaacctgagctggcacagcaagttcaaggccaccatcttcagctactgcaaggccagcgtgagagccatcaccctgagcagcccctggagcggcaccgacggcgtgccccagaactag

SEQ ID NO: 271794 - DNA, 1038 bp, Artificial Sequence
  derived and/or modified sequence
atggaaccactccgagtgctagaactgtactccggtgttggcggaatgcaccatgctctgcgcgagagctgtatccccgcacaggttgtcgccgctattgacgtgaatacagtggctaatgaagtgtataaatacaacttccctcatacacagctgcttgctaagactatcgaggggatcacgctcgaggagtttgacagattgtcattcgatatgattctgatgtccccgccttgtcaaccgtttacacgggacctcctcatacaaacaatcgaaaactgcggattccagtaccaggagttcctgcttagtccaacaagtctaggaatccccaactccaggctgcgctacttcttgattgctaagctccagtcagagccactaccttttcaggctccagggcaggtcctgatggagtttccaaagatcgagagcgtacacccccagaaatacgcaatggacgttgagaacaagattcaggaaaagaacgttgagccgaacatcagctttgacggctccatccagtgttcaggtaaggatgctatattatttaagcttgagactgccgaagaaatccaccggaaaaatcaacaggactcagacctgagcgtgaagatgttgaaggattttttagaggacgataccgatgtaaaccagtatctactgccaccaaagtcccttttgagatacgccctgctgctggatattgtacagcctacttgccgacggtccgtgtgcttcacaaagggatacgggtcttacattgaaggaaccggttccgtgcttcagacagctgaggatgtacaagtcgagaatatatacaagtcgttgaccaacttatcgcaggaggaacaaattacaaagctcctgatactgaagctccggtattttacgcccaaggagatcgctaatcttctgggattcccaccagaattcggattccccgagaagattacagtaaagcagcgctacaggctcctcggtaactcactcaatgtgcacgtggtggccaagttgatcaaaattctgtacgagtag

SEQ ID NO: 271795 - DNA, 216 bp, Artificial Sequence
  derived and/or modified sequence
atggaacccctccgggtactggaattatactcaggagttggcggaatgcaccacgcccttcgtgagtcttgcataccagcccaggttgtcgctgccatcgatgtgaatacggtggcaaatgaggtgtataagtataatttcccacacacccagctgcttgccaagactatcgaaataactaaaataacaaaggtgtatagtttcggaaaatgctag

SEQ ID NO: 271796 - DNA, 354 bp, Artificial Sequence
  derived and/or modified sequence
atggaacccctgagggtcttagaactgtacagcggggtgggaggcatgcatcacgcactcagggagagctgtattccagcccaggtcgtcgcggccattgatgtgaataccgtggccaatgaagtgtacaagtataactttcctcacacccaactcctggccaagacgattgaaaggccacttgatactaacaatcgaaaactttggctgtctgtgccccgggtaagcattatctctaatctttcctggcacagcaagtttaaagccactatcttctcatattgcaaagcctccgtcagagccatcaccctgtcaagtccttggtccggcacggacggtgtcccacagaactag

SEQ ID NO: 271797 - DNA, 1038 bp, Artificial Sequence
  derived and/or modified sequence
atggagcccctgcgggtgctggagctgtacagcggcgtgggcggcatgcaccacgccctgcgggagagctgcatcccagcccaggtggtggccgccattgatgtgaacacagtggccaatgaggtgtacaagtacaacttcccccacacccagctgctggccaagaccatcgagggcatcaccctggaggagtttgaccggctgagctttgacatgatcctgatgagccccccctgccagcccttcacccgggacctgctgatccagaccatcgagaactgtggcttccagtaccaggagttcctgctgagccccaccagcctgggcatccccaacagccggctgcgctacttcctgattgccaagctgcagagcgagcccctgcccttccaggcccctggccaggtgctgatggagttccccaagattgaatctgtgcacccccagaagtatgccatggatgtggagaacaagatccaggagaagaatgtggagcccaacatcagctttgatggcagcatccagtgcagcggcaaggatgccatcctcttcaagctggagacagctgaggagatccacaggaagaaccagcaggacagcgacctgtctgtgaagatgctgaaggacttcctggaggatgacacagatgtgaaccagtacctgctgccccccaagagcctgctgcgctatgccctgctgctggacatcgtgcagcccacctgccgccgctctgtgtgcttcaccaagggctacggcagctacatcgagggcaccggctctgtgctgcagacagcagaagatgtgcaggtggagaacatctacaagagcctgaccaacctgagccaggaggagcagatcaccaagctgctgatcctgaagctgcgctacttcacccccaaggagatcgccaacctgctgggcttccccccagagtttggcttccctgagaagatcaccgtgaagcagcgctaccgcctgctgggcaacagcctgaatgtgcacgtggtggccaagctgatcaagatcctgtatgaatag

SEQ ID NO: 271798 - DNA, 216 bp, Artificial Sequence
  derived and/or modified sequence
atggagcccctgcgggtgctggagctgtacagcggcgtgggcggcatgcaccacgccctgcgggagagctgcatcccagcccaggtggtggccgccattgatgtgaacacagtggccaatgaggtgtacaagtacaacttcccccacacccagctgctggccaagaccatcgagatcaccaagatcaccaaggtgtacagctttgggaagtgctag

SEQ ID NO: 271799 - DNA, 354 bp, Artificial Sequence
  derived and/or modified sequence
atggagcccctgcgggtgctggagctgtacagcggcgtgggcggcatgcaccacgccctgcgggagagctgcatcccagcccaggtggtggccgccattgatgtgaacacagtggccaatgaggtgtacaagtacaacttcccccacacccagctgctggccaagaccatcgagcggcccctggacaccaacaacaggaagctgtggctgtctgtgccccgggtgtccatcatcagcaacctgtcctggcacagcaagttcaaggccaccatcttctcctactgcaaggcctctgtgcgggccatcaccctgagcagcccctggagcggcacagatggagtgccccagaactag

SEQ ID NO: 271800 - DNA, 1038 bp, Artificial Sequence
  derived and/or modified sequence
atggagcccctgcgggtgctggagctgtacagcggcgtgggcggcatgcaccatgcattgagggaaagctgtatccccgctcaggtggtggcagcaatagatgtgaataccgtggctaacgaggtttataagtacaattttccccacactcaattgctggccaaaaccatagagggcatcacgctggaagagtttgatagactttcctttgacatgatcctgatgtcacctccctgtcaaccttttacacgtgaccttcttatacaaactattgaaaattgcggctttcagtatcaagagttcctcctcagccctacaagtctagggatcccaaatagcaggctgcggtacttcctgatagcaaaactccagtcggagcccctgccttttcaagcacctggccaagttctcatggaattccccaaaatcgaatcggtccatcctcagaagtacgcaatggatgtggaaaataagattcaagaaaagaatgtggagccaaacatcagcttcgacgggtccatacagtgttcggggaaagacgcaattctgttcaaactcgagacagcggaggagattcacaggaagaaccagcaggatagtgacctcagcgttaaaatgttgaaggactttctcgaagatgatactgacgtcaatcagtatcttctgccacccaagtccttgctccgctatgccctccttctcgacatcgtgcagccgacttgcagacgctctgtttgctttaccaaaggttacggctcatacatcgaaggaacagggagtgttctccaaaccgccgaggacgtgcaggtcgagaacatctacaagagcctgacaaacttgagccaggaggaacagatcaccaaactgctgatcctcaagctgcgttatttcacccctaaggagatcgccaacttgctgggattcccaccagagttcggcttccctgagaaaatcactgttaaacagaggtatagactgctcggcaactctctgaacgtgcatgttgttgccaagcttatcaagatcctatacgagtag

SEQ ID NO: 271801 - DNA, 216 bp, Artificial Sequence
  derived and/or modified sequence
atggagcccctgcgggtgctggagctgtacagcggcgtgggcggcatgcatcacgccttacgtgagtcttgcatccccgcacaagtcgttgctgcaattgacgtgaatactgtcgccaatgaagtctacaagtacaattttccacacactcagcttcttgccaagaccatagaaataacaaaaatcaccaaagtgtacagcttcgggaaatgctag

SEQ ID NO: 271802 - DNA, 354 bp, Artificial Sequence
  derived and/or modified sequence
atggagcccctgcgggtgctggagctgtacagcggcgtgggcggcatgcatcatgccctcagggagtcctgcatcccagcccaggtcgtggcagccatcgatgtgaatactgtagcaaatgaagtgtataagtataattttccgcacacccagctcttagctaagacaattgagaggccactagatacgaacaatcgaaagctgtggctttctgtccccagggtaagtatcatatcgaatttgtcctggcacagcaaatttaaggcgaccatatttagttactgcaaggcctcggtgcgggcaatcacccttagcagcccgtggtctgggaccgatggtgtgcctcaaaactag

SEQ ID NO: 271803 - DNA, 1038 bp, Artificial Sequence
  derived and/or modified sequence
atggagcccctgcgtgtgctggagttgtactcgggagtcggcggaatgcaccacgctttgcgagagtcttgcatcccggctcaagttgtagctgcgatagatgttaacaccgtcgctaacgaggtctataagtacaacttccctcatacccagctgctggcaaaaactatcgaggggatcaccttggaagagtttgaccgattgtcctttgacatgattctaatgagtccaccttgtcagccgtttacaagggacttgctgatacagaccatcgagaattgtggattccagtaccaggagttcctcctgagccccacctcccttggcatcccgaattcgcggttgaggtacttccttattgcgaagctccaatctgagccactgcccttccaagctcccggacaggtgttgatggagtttcctaaaatcgaaagcgttcaccctcaaaagtatgctatggatgttgagaataagatacaggaaaaaaatgttgaacctaacatcagctttgacggtagcattcagtgctccgggaaggatgctattttgttcaagttggagacggccgaggagatacaccgcaaaaaccagcaagattcagacctttcggtgaagatgttgaaagattttctcgaagatgacaccgatgtgaatcagtatctactgccccctaagagcctgcttagatatgcccttttgttggatattgtgcagccaacatgccgcagaagcgtttgcttcacgaagggctatgggagctatattgagggaacaggtagtgtactccagactgcagaggatgtacaggtcgagaacatttacaagtccctgaccaatctgagtcaggaggaacagattacgaaactgctaatcctcaaactccggtattttaccccaaaggagatcgccaacttactgggctttccacccgagtttggtttccccgagaagattactgtgaaacagaggtaccggctcctggggaatagtttaaatgtgcacgtggtagccaagctcataaagattttgtacgagtag

SEQ ID NO: 271804 - DNA, 216 bp, Artificial Sequence
  derived and/or modified sequence
atggagccactcagagtgctggagctgtatagcggggttggagggatgcaccatgccctgagggaatcttgtatcccggcacaagttgtagccgcaatagacgtcaacacagttgctaatgaggtgtataagtataattttccacatacccagctcctggctaaaaccatagaaattacgaaaatcaccaaggtatattcttttggaaagtgctag

SEQ ID NO: 271805 - DNA, 354 bp, Artificial Sequence
  derived and/or modified sequence
atggagccgttgagagttcttgaactgtactccggggtggggggaatgcaccacgccctgcgagagagttgtatacctgcccaggtggtggcggctatcgacgtcaataccgtggcaaatgaagtctataaatacaatttcccccatacccagttgcttgccaagaccattgaaaggcccctcgataccaataacagaaaactatggctcagcgtgccaagggtcagcatcatatctaatctctcttggcattccaagttcaaagcaaccattttttcttattgtaaggcctccgtcagggccattactctctcctcaccctggtccggcactgatggggtaccccagaactag

SEQ ID NO: 271806 - DNA, 1208 bp, Artificial Sequence
  derived and/or modified sequence
cgcggggatggagcccctgcgggtgctggagctatacagcggcgtgggcggcatgcaccacgcgctgagagaaagctgtatacctgcacaagtggtggctgccattgatgtcaacactgtcgctaatgaagtatacaagtataattttcctcacacacagttacttgccaagacgattgaaggcattacactcgaagagtttgacagattatcttttgatatgattttaatgagccctccctgccagccattcacaagagacctcttgatacaaacaatagaaaattgtggctttcagtaccaagagtttctattatctccaacctctcttggcattccaaattcaaggctacgatattttcttattgcaaagcttcagtcagagccattaccctttcaagcccctggtcaggtactgatggagttccccaaaattgaatctgtacatccacaaaaatatgcaatggatgtagaaaataaaattcaagaaaagaacgttgaaccaaatattagctttgatggcagcatacagtgttctggaaaagatgccattctttttaagcttgaaactgcagaagaaattcacaggaaaaatcaacaagatagtgatctctctgtgaaaatgctaaaagattttcttgaagatgacactgacgtgaaccagtatcttttaccaccaaagtcattgctgcgatatgctcttctgttagacattgttcagcccacttgtagaaggtccgtgtgctttaccaaaggatatggaagctacatagaagggacagggtctgtgttacagactgcagaggatgtgcaggttgagaatatctacaaatcccttaccaatttgtcacaagaagaacagataacaaagctgttaatacttaaactgcgatatttcactcctaaagaaatagcaaatctccttggatttcctccagagttcggatttcctgagaagataacagtgaaacagcgttatcgcctacttggaaatagtctcaacgtgcatgtagtagctaaactaatcaaaatcttatatgaataattttgaaataactctgaaagatggtcatatgatattccttcattttcagagagtaattctgaaattctgttttgaactaattctggtgaaatttaactaaattattttaatctgtccttattaagaaatttggattttattaaaaaaatccatgtgtttcatc

SEQ ID NO: 271807 - DNA, 1830 bp, Artificial Sequence
  derived and/or modified sequence
atggacaccatggtgcagatccagcagaccggcggcctgaagaagctgctgagcttcgccgagaacagcaccatccccgacatccagaagaacgccgccaaggccatcaccaaggccgcctacgaccccgagaacagaaagctgttccacgagcaggaggtggagaagtgcctggtggccctgctgggcagcgagaacgacggcaccaagatcgccgccagccaggccatcagcgccatgtgcgagaacagcggcagcaaggacttcttcaacaaccagggcatcccccagctgatccagctgctgaagagcgacaacgaggaggtgagagaggccgccgccctggccctggccaacctgaccacctgcaaccccgccaacgccaacgccgccgccgaggccgacggcatcgaccccctgatcaacctgctgagcagcaagagagacggcgccatcgccaacgccgccaccgtgctgaccaacatggccatgcaggagcccctgagactgaacatccagaaccacgacatcatgcacgccatcatcagccccctgagaagcgccaacaccgtggtgcagagcaaggccgccctggccgtgaccgccaccgcctgcgacgtggaggccagaaccgagctgagaaacagcggcggcctggagcccctggtggagctgctgagaagcaagaacgacgaggtgagaaagcacgccagctgggccgtgatggtgtgcgccggcgacgagctgaccgccaacgagctgtgcagactgggcgccctggacatcctggaggaggtgaacgtgagcggcaccagaaagaacaagttcagcgaggccgcctacaacaagctgctgaacaacaacctgagcctgaagtacagccagaccggctacctgagcagcagcaacatcatcaacgacggcttctacgactacggcagaatcaaccccggcaccaagctgctgcccctgaaggagctgtgcctgcaggagcccagcgacctgagagccgtgctgctgatcaacagcaagagctacgtgagcccccccagcagcatggaggacaagagcgacgtgggctacggcagaagcatcagcagcagcagcagcctgagaagaagcagcaaggagaagaacaagaagaacagctaccacttcagcgccggcttcggcagccccatcgaggacaagagcgagcccgccagcggcagaaacaccgtgctgagcaagagcgccaccaaggagaagggctggagaaagagcaagggcaagaaggaggaggagaaggtgaaggaggaggaggaggtgatggtggtgcccaagttcgtgggcgagggcagcagcgacaaggagtggtgcccccccagcgaccccgacttcagcatgtacgtgtacgaggtgaccaagagcatcctgcccatcaccaacatcaaggagcagatcgaggacctggccaagtacgtggccgagaagatgggcggcaagatccccaaggagaagctgcccgacttcagctgggagctgcacatcagcgagctgaagttccagctgaagagcaacgtgatccccatcggccacgtgaagaagggcatcttctaccacagagccctgctgttcaaggccctggccgacagaatcggcatcggctgcagcctggtgagaggcgagtacggcagagcctggaacgaggtgatgctgcagaacgacagcagaaagggcgtgatcggcggcctgcccgcccccgagatgtacgtgatcgacctgatgttccaccccggcggcctgatgaagctgagaagcagagaggccgacctgtacagattcatctag

SEQ ID NO: 271808 - DNA, 1830 bp, Artificial Sequence
  derived and/or modified sequence
atggataccatggtgcaaatccaacagactggcggtctgaagaagttattgtcgttcgcagagaactctaccattcccgatattcagaagaacgctgcaaaggcgataaccaaagccgcctatgacccagagaatcggaagttgtttcacgaacaggaagtggagaaatgcctggtggctttactcggcagcgagaatgacggaactaaaatagcagcctctcaggccatcagtgccatgtgcgaaaattcaggcagcaaggacttctttaataaccagggaatcccccagcttatccagctgctaaaaagtgacaacgaagaagtgagggaggccgccgcactggcgcttgctaatctcacaacctgtaaccctgccaacgccaacgccgcggccgaggcagacggaatagacccactgataaatcttctgtcatcgaagcgtgacggagctattgccaacgctgccaccgtcctcactaatatggctatgcaagaacctttgaggctcaatatccagaatcacgatattatgcacgctataatcagccctcttcgctcagctaatacagtggtccagtctaaggcagcactagcagtgactgccacagcttgcgatgtcgaggcacggaccgaactgcgaaattctggaggcttggaacccttggttgaactcttgcggtccaaaaacgatgaggtgagaaagcatgcttcatgggctgtaatggtctgcgcgggcgacgagttgactgccaacgaactctgtagactgggggctctcgatatactggaggaagtgaacgtgtcaggcacacggaaaaataaatttagcgaggccgcctacaataagcttctgaataacaacttgtcactgaaatactctcagacaggatacctctcaagcagtaacatcataaatgacggtttctacgattatggacggataaatccaggcaccaagttactgccactcaaggagctctgtcttcaggaaccgtcggatctccgagctgtgttgctaataaattcaaagtcctatgtttccccaccatctagtatggaagataaaagcgacgtaggctacggtagatctataagctcgagcagcagcctgagaagatcatctaaggagaaaaataaaaaaaatagctaccacttttctgctggttttggcagtcccatcgaagataaatcagagccagcctccggccggaacaccgtcctgtccaagtctgccacaaaggaaaaaggctggcgtaaaagcaagggaaagaaagaagaggaaaaggtgaaggaagaagaggaggtgatggttgtgccaaaattcgtgggagagggttctagcgacaaggagtggtgtccccctagcgacccggacttctctatgtacgtgtatgaagtaacgaaaagcatattaccgatcactaatatcaaggaacagatcgaagatctcgccaagtacgtggccgaaaaaatgggagggaaaattccaaaggagaaattacctgacttctcttgggaactgcatatcagtgagctaaaattccagctgaaaagcaacgtcattcctataggacacgtaaagaaggggatcttctaccatcgagctctcctttttaaagctctggccgaccgcataggtatagggtgctcccttgtgcggggggagtatggtagagcatggaacgaggtcatgctgcagaacgattcaagaaaaggggtgatcggcggcctgcctgccccagaaatgtacgtcatcgacctgatgttccaccccggtgggctcatgaaactccggtcacgcgaagccgacttgtacagatttatctag

SEQ ID NO: 271809 - DNA, 1830 bp, Artificial Sequence
  derived and/or modified sequence
atggacaccatggtgcagatccagcagacaggaggcctgaagaagctgctgagctttgctgagaacagcaccatcccagacatccagaagaatgctgccaaggccatcaccaaggccgcctatgaccctgagaacaggaagctgttccacgagcaggaggtggagaagtgcctggtggccctgctgggctctgaaaatgatggcaccaagattgctgccagccaggccatcagcgccatgtgtgagaacagcggcagcaaggacttcttcaacaaccagggcatcccccagctgatccagctgctgaagagtgacaatgaggaggtgcgggaggccgccgccctggccctggccaacctgaccacctgcaacccagccaatgccaatgctgctgctgaggctgatggcatcgaccccctcatcaacctgctgagcagcaagagagatggagccatcgccaatgctgccaccgtgctgaccaacatggccatgcaggagcccctgcggctgaacatccagaaccacgacatcatgcacgccatcatcagccccctgcggagcgccaacacagtggtgcagagcaaggccgccctggccgtgacagccacagcctgtgatgtggaggccaggacagagctgaggaacagcggcggcctggagcccctggtggagctgctgcggagcaagaatgatgaggtgaggaagcacgcctcctgggccgtgatggtgtgtgctggagatgagctgacagccaatgagctgtgccgcctgggcgccctggacatcctggaggaggtgaatgtgtctggcaccaggaagaacaagttcagcgaggccgcctacaacaagctgctgaacaacaacctgagcctgaagtacagccagacaggctacctgagcagcagcaacatcatcaatgatggcttctatgactatggccgcatcaaccctggcaccaagctgctgcccctgaaggagctgtgcctgcaggagcccagcgacctgcgggctgtgctgctgatcaacagcaagagctatgtgtccccacccagctccatggaggacaagagtgatgtgggctacggccgcagcatcagcagcagcagcagcctgcggcgcagcagcaaggagaagaacaagaagaacagctaccacttctctgctggcttcggcagccccatcgaggacaagtctgagcccgccagcggcaggaacacagtgctgagcaagagcgccaccaaggagaagggctggaggaagagcaagggcaagaaggaggaggagaaggtgaaggaggaggaggaggtgatggtggtgcccaagtttgtgggggagggcagcagtgacaaggagtggtgcccccccagcgaccctgacttctccatgtatgtgtatgaggtgaccaagagcatcctgcccatcaccaacatcaaggagcagatcgaggacctggccaagtatgtggccgagaagatgggcggcaagatccccaaggagaagctgcctgacttctcctgggagctgcacatcagcgagctgaagttccagctgaagagcaatgtcatccccatcggccacgtgaagaagggcatcttctaccaccgggccctgctcttcaaggccctggccgaccgcatcggcatcggctgcagcctggtgcggggggagtatggccgggcctggaatgaggtgatgctgcagaatgacagcaggaagggcgtgattggaggcctgcctgcccctgagatgtatgtgattgacctgatgttccaccctgggggcctgatgaagctgcggagccgggaggccgacctgtaccgcttcatctag

SEQ ID NO: 271810 - DNA, 1830 bp, Artificial Sequence
  derived and/or modified sequence
atggacaccatggtgcagatccagcagaccggcggcctgaagaagctgcttagcttcgcagaaaattccactattccagacattcagaagaatgccgcgaaggcaatcactaaggccgcttacgatcctgagaacagaaagttattccacgaacaggaggtagagaagtgtctggtagcgctcctggggtctgaaaacgatggaacaaagatcgccgcctctcaggctattagcgccatgtgtgaaaatagcggttccaaggacttttttaacaaccaggggatcccccaactcatccagcttctgaagtccgacaacgaagaggtgagggaggcagcagctctggctctggccaatctcaccacctgcaaccctgccaatgctaacgccgcagctgaggccgacgggatcgacccccttattaatctcctgagtagcaaacgcgacggcgctattgccaacgccgccactgtgctaacaaacatggctatgcaagaaccgctgaggctaaacattcaaaatcatgacataatgcacgccatcatcagccctctgcgcagtgctaatacagttgtgcagagcaaggccgctttggccgtgactgcaaccgcttgtgatgtggaagcaaggaccgaattgcggaactccggcgggctcgaacccctggtagagttgcttcgctcaaaaaatgatgaggtaagaaagcatgcatcgtgggccgtcatggtttgcgctggcgacgaactgactgcaaacgagctgtgccgactgggcgctctggatatcttggaagaagtgaatgtgtcagggacgagaaagaacaagttttctgaagctgcatacaacaaactattgaataacaatttatctctgaaatacagtcagaccggctacttgtcttctagtaatatcattaatgacggtttttacgactatggccgcattaaccccgggactaagctcctgccactgaaagagttatgtttgcaggagccctccgatttacgggctgtgctgctgattaatagcaagagttacgtttctccacctagcagtatggaggataagtcagacgtggggtatggtagaagcatctcgtcttctagctcgttgcgtcgctcgtctaaagagaagaataaaaaaaacagctaccatttctcagctggctttggcagcccaatagaggacaaatccgagcctgccagcggacgcaatacagtgctgtcgaaaagtgctacaaaggagaaaggttggcggaaatcaaaaggcaaaaaagaagaggaaaaggttaaggaggaggaggaggtcatggtcgtacccaagtttgtgggagaggggtctagtgacaaggagtggtgtcctccatctgatccagatttttcaatgtacgtatacgaggttaccaagtccatccttcccattactaatatcaaggagcagatagaagacctcgccaaatacgtggccgagaagatgggagggaaaatccccaaggagaagctgccagatttttcctgggaactccacatctcggagctcaagttccagctcaagtctaatgtcatacctattgggcatgtcaagaaagggatcttctaccaccgggccctgctgtttaaagccctggcagatagaatcgggataggctgttccctggtacgaggcgagtatggtcgagcttggaacgaggtaatgctgcagaacgacagccgcaaaggtgtcattggtggcctgcctgcacccgaaatgtacgtgatcgatctgatgttccatccaggaggcctgatgaaactgagaagtagggaagcggatctgtaccgattcatatag

SEQ ID NO: 271811 - DNA, 1830 bp, Artificial Sequence
  derived and/or modified sequence
atggataccatggtgcagatccagcagacggggggtctaaagaagcttctgagtttcgcggaaaatagtaccatacccgacatccagaagaatgcggctaaggctatcaccaaggccgcatacgatccggagaaccggaagttgtttcacgagcaggaagttgagaaatgcctggtggcccttctgggctcagaaaatgatggaaccaaaatagccgcttctcaggccatctctgcgatgtgcgagaactcaggctccaaagactttttcaataatcagggcataccacagctcattcagctcctgaaaagtgacaatgaggaggtccgcgaagcagctgccttagccctagccaatctgactacctgtaaccctgctaatgcaaacgcagcagctgaggccgatggtatcgatccattaattaacctgctgtcctctaagagggatggagccattgccaatgcggcaactgtacttacgaatatggctatgcaggaaccactgcgccttaacattcaaaatcatgatattatgcacgccataatatctcctttacgctctgcaaacaccgttgtacaatccaaggccgctttggcggtaactgcaactgcttgcgacgtagaagccaggaccgagctccggaacagtggaggcctggagcctctcgtggagttgctccggtctaagaacgacgaggttcgtaaacatgccagctgggctgtgatggtgtgtgccggtgatgagctgactgcaaacgaattatgtcggctgggcgctctggacattttggaggaggtgaatgtgagcggcacccgaaaaaataaattttctgaagccgcatacaataaacttttaaacaataacctgtctctcaaatatagccagacaggctatctttcatcttcaaatattatcaacgatgggttctacgattacggaagaatcaatcccggaacgaaactcctgcccctgaaagagctgtgcctgcaggaaccttctgacctcagagcagtcctcctcataaactccaaatcatacgttagtccacctagcagcatggaagataagtccgacgtgggctacggcagatccatctcttccagctcaagcttgcgcagatccagcaaagagaagaataagaaaaactcttaccacttctcggcaggctttggcagtcccatagaagataagagcgagcctgcaagcggcaggaacaccgtgctctccaaaagcgccactaaggaaaaaggctggcggaagtctaaggggaaaaaagaggaggagaaggtgaaggaagaagaggaagtgatggtggtaccaaagtttgtgggggaggggtcctctgataaggagtggtgtcctccgtccgaccccgacttctctatgtatgtgtatgaggttacgaaatccattctgccgatcactaatatcaaggagcagatcgaagatctcgccaaatacgtggctgagaaaatgggcggaaaaattcctaaggaaaaactgcccgacttttcctgggaactgcatatcagcgaactcaaattccaactgaagtcgaacgtcattcctatcgggcacgtgaaaaaagggatattttatcacagagcgctgctatttaaagctctggctgatcggatcggtatcggctgtagtctggtgagaggcgagtacggcagagcttggaatgaggttatgctccaaaacgactcaagaaaaggcgtgattgggggactgccggctcctgagatgtatgtcatcgaccttatgttccacccaggaggtctcatgaagctccgctctcgcgaagctgatttgtacaggttcatttag

SEQ ID NO: 271812 - DNA, 2248 bp, Artificial Sequence
  derived and/or modified sequence
agctagctactcggcgggatctcccggcaggatgggtaaaaagataaagaaggaagtagagcctcctcctaaggatgtggtgaggaaaataaaacaaccctccttgaacttggagctgtggaacctttaactaagctactcacccatgaagacaaaattgtaagaagaaatgctactatgatatttggaatcctggcttctaataatgatgttaaaaaattgttaagggagttagatgtcatgaattctgtcattgcccagctcgctccagaaggaattgaatgaccttcatatagaagcacttgcagtgatagccaattgccttgaagacatggatactatggtgcagattcagcagacagggggtcttaaaaagctcctgtcatttgcagaaaactctacaattcctgatattcagaagaatgcagcaaaagccattactaaagcagcttatgatcctgaaaatagaaaactttttcatgaacaagaggttgaaaagtgccttgtagcccttttgggttctgaaaatgatggaactaaaattgctgcttcccaagctatttcagcaatgtgtgagaattcaggcagcaaagattttttcaataatcaggggattccacagttaattcagttgctaaaaagtgacaatgaagaggtacgggaagcagcagctctagccctggcaaacctaaccacttgcaaccctgctaatgcaaacgctgctgctgaagctgatggtattgatccattaataaacctcctgtctagtaaacgagatggagccattgccaacgctgctacagtattaacaaacatggccatgcaggagcccctgcgcctgaacatacagaatcacgacatcatgcatgccatcatcagcccactgcgttctgcaaacacagtcgtgcagagcaaagctgctctcgctgtcaccgcaactgcgtgtgacgttgaagcccggactgagttaagaaattctggtggattggagcccctggtagagctgctacgctccaagaatgatgaagtgaggaagcacgccagttgggcagtgatggtctgtgctggtgacgagctgacggccaatgaattatgcaggctcggggctttagatatccttgaagaagttaacgtatcaggaactcggaaaaataaattcagtgaggcagcttataataagttgctcaataacaatctttccctgaaatacagccagactggctatttgtcatcaagtaacataattaacgatggattctatgattatggtcggataaatcccggcaccaaactgttgcctttgaaggagctctgcttacaagaaccaagtgacctacgggctgtactcttaatcaacagtaaatcttacgtttctccaccttcatctatggaagataaatcagatgttggttatggacgaagtatttcttcttcatcttccttaagaagatcaagtaaagaaaagaacaaaaaaaatagttatcattttagtgctggatttggatctcccatagaagacaaatcagagccagcttctggacgaaatactgttctcagcaaaagcgccaccaaagaaaaaggatggaggaaaagcaaaggaaaaaaagaagaggaaaaagtgaaagaggaggaagaggttatggtggtaccaaaatttgttggtgaaggaagctctgacaaagaatggtgtcctccctctgaccctgatttctctatgtatgtgtatgaggtgaccaaatcaatactgccaataaccaatattaaggaacagattgaggatctggcaaagtatgtagcagaaaaaatgggtggtaagattccaaaagagaaactacctgatttcagctgggaacttcacataagtgaactgaaatttcaacttaaatccaatgttataccgattggacatgtcaaaaaaggaatcttctaccatcgagctttgcttttcaaggctctggctgatagaattggcattggttgctccctagttcgcggagagtacggtagagcgtggaatgaagtcatgctgcagaatgactctcggaagggagtgattgggggcctccccgctcctgagatgtacgtgattgacctcatgttccatccaggtggactgatgaagttgagaagtcgagaggctgatctttacagattcatttaagccatcagacgaacacaagagaggctcaaacaagaaattcactgtgtacactctctaagacattctccaaattgattttatctcttt

SEQ ID NO: 271813 - protein, 656 aa, Artificial Sequence
  derived and/or modified sequence
MAVPMPSKRRSLVVQTSMDAYTPPDTSSGSEDEGSVQGDSQGTPTSSQGSINMEHWISQAIHGSTTSTTSSSSTQSGGSGAAHRLADVMAQTHIENHSAPPDVTTYTSEHSIQVERPQGSTGSRTAPKYGNAELMETGDGVPVSSRVSAKIQQLVNTLKRPKRPPLREFFVDDFEELLEVQQPDPNQPKPEGAQMLAMRGEQLGVVTNWPPSLEAALQRWGTISPKAPCLTTMDTNGKPLYILTYGKLWTRSMKVAYSILHKLGTKQEPMVRPGDRVALVFPNNDPAAFMAAFYGCLLAEVVPVPIEVPLTRKDAGSQQIGFLLGSCGVTVALTSDACHKGLPKSPTGEIPQFKGWPKLLWFVTESKHLSKPPRDWFPHIKDANNDTAYIEYKTCKDGSVLGVTVTRTALLTHCQALTQACGYTEAETIVNVLDFKKDVGLWHGILTSVMNMMHVISIPYSLMKVNPLSWIQKVCQYKAKVACVKSRDMHWALVAHRDQRDINLSSLRMLIVADGANPWSISSCDAFLNVFQSKGLRQEVICPCASSPEALTVAIRRPTDDSNQPPGRGVLSMHGLTYGVIRVDSEEKLSVLTVQDVGLVMPGAIMCSVKPDGVPQLCRTDEIGELCVCAVATGTSYYGLSGMTKNTFEHTSNKGK

SEQ ID NO: 271814 - protein, 231 aa, Artificial Sequence
  derived and/or modified sequence
  misc_feature (1)..(1): Xaa can be any naturally occurring amino acid
XETIVNVLDFKKDVGLWHGILTSVMNMMHVISIPYSLMKVNPLSWIQKVCQYKAKVACVKSRDMHWALVAHRDQRDINLSSLRMLIVADGANPWSISSCDAFLNVFQSKGLRQEVICPCASSPEALTVAIRRPTDDSNQPPGRGVLSMHGLTYGVIRVDSEEKLSVLTVQDVGLVMPGAIMCSVKPDGVPQLCRTDEIGELCVCAVATGTSYYGLSGMTKNTFEHTSNKGK

SEQ ID NO: 271815 - protein, 371 aa, Artificial Sequence
  derived and/or modified sequence
MHGLTYGVIRVDSEEKLSVLTVQDVGLVMPGAIMCSVKPDGVPQLCRTDEIGELCVCAVATGTSYYGLSGMTKNTFEVFPMTSSGAPISEYPFIRTGLLGFVGPGGLVFVVGKMDGLMVVSGRRHNADDIVATALAVEPMKFVYRGRIAVFSVTVLHDERIVIVAEQRPDSTEEDSFQWMSRVLQAIDSIHQVGVYCLALVPANTLPKTPLGGIHLSETKQLFLEGSLHPCNVLMCPHTCVTNLPKPRQKQPEIGPASVMVGNLVSGKRIAQASGRDLGQIEDNDQARKFLFLSEVLQWRAQTTPDHILYTLLNCRVRRGAGLPWLLASRGLAWFLGALLLLSLNPFASVLWEFFLCFAILTETFVPRDCF

SEQ ID NO: 271816 - DNA, 564 bp, Artificial Sequence
  derived and/or modified sequence
atggccgatcgcagtctagaggggatggcactgccattagaagtgagggcccggttagctgagctcgagcttgagcttagcgagggtgatatcacacaaaaaggatacgaaaaaaagcgctccaaactgattggagcctacctaccccaaccacccacagctaacggagcggctgttgtacgttgtcgcctgcaacatagcgaaggcgcgccaagacggacttttaggtccgcccacatcggcgtgtgcgatgtgcgagaggcagctgcccgagagagagttgcctcaactgccggtaatcgtccactattttattttcgatttggagtagaccaggccttgccccaggaacgcagggcgcccgtgaccccttcgtcggcttccaggtatcataggagaagaagctccggcagtagagatgaaagatataggtccgacgtgcatacggaagctgtgcaggctgccttagctaaacacaaagagagaaagatggctgtcccaatgccgtcaaaacgacgtagtcttgtcgtgcagacctctatggatgcctatacaccaccttag

SEQ ID NO: 271817 - DNA, 564 bp, Artificial Sequence
  derived and/or modified sequence
atggctgacaggagcctggagggcatggccctgcccctggaggtgcgggcccggctggccgagctggagctggagctgtctgagggggacatcacccagaagggctatgagaagaagaggagcaagctgattggagcctacctgccccagcccccaacagccaatggagctgctgtggtgcgctgccgcctgcagcacagcgagggcgcccccaggaggaccttccgcagcgcccacatcggcgtgtgtgatgtgcgggaggccgccgcccgggagcgggtggccagcacagctggcaaccggcccctcttctacttccgcttcggcgtggaccaggccctgccccaggagcggcgggcccctgtgacccccagcagcgccagccgctaccacagaagaagaagcagcggcagcagagatgagcgctacagaagtgatgtgcacacagaagctgtgcaggccgccctggccaagcacaaggagaggaagatggctgtgcccatgcccagcaagaggaggagcctggtggtgcagacctccatggatgcctacaccccaccctag

SEQ ID NO: 271818 - DNA, 564 bp, Artificial Sequence
  derived and/or modified sequence
atggccgaccggagcctggagggcatggccctgcccctggaggtgagagctcggctcgcggagcttgaattggagttgtccgagggagatatcacccaaaaagggtacgagaagaagaggtccaagcttataggagcttacttgcctcagcccccgactgcaaacggggccgcagtggtgagatgtagactgcagcactcagagggagctcccaggcgcacctttcggtcggctcacatcggagtttgcgatgtaagggaagccgccgctagggaacgtgtggcaagcacggctggaaatcggcccctgttctactttaggtttggcgttgaccaggccctgccacaggaaaggcgcgcacctgtcaccccaagttcagcgtcccgttatcataggaggagaagttctggctccagggatgagaggtatcggtcagacgtgcataccgaagctgtacaggccgccttagctaagcataaagaacgtaaaatggcagtgccaatgccgtctaaacggaggtcactggtagtgcagacctctatggacgcttacaccccaccttag

SEQ ID NO: 271819 - DNA, 564 bp, Artificial Sequence
  derived and/or modified sequence
atggcagacagatctttggaggggatggccctgcccctagaggtccgcgctaggctggccgaactggagctcgagctcagtgaaggggacattacacagaagggatacgagaagaaaagaagtaagctaatcggagcatatcttcctcagccaccaacagccaatggcgctgccgtggtgcgatgtagactgcaacactccgaaggggctccacgaagaacatttagatccgcacacataggagtgtgtgacgttcgggaggctgccgcacgtgaaagagtggcctccactgcagggaatcggcctctgttctacttccgcttcggggtggaccaagcactccctcaggagaggagagccccagtgactccaagctcggcttctaggtatcacaggaggcggagctccggatcccgggatgagcgatatagatctgacgtccacaccgaggccgttcaagccgcattggcaaaacacaaggagaggaagatggctgtgccgatgcccagtaagcgccgatctttggtagtgcagacttcaatggacgcctatacgcctccttag

SEQ ID NO: 271820 - DNA, 564 bp, Artificial Sequence
  derived and/or modified sequence
atggccgacagaagcctggagggcatggccctgcccctggaggtgagagccagactggccgagctggagctggagctgagcgagggcgacatcacccagaagggctacgagaagaagagaagcaagctgatcggcgcctacctgccccagccccccaccgccaacggcgccgccgtggtgagatgcagactgcagcacagcgagggcgcccccagaagaaccttcagaagcgcccacatcggcgtgtgcgacgtgagagaggccgccgccagagagagagtggccagcaccgccggcaacagacccctgttctacttcagattcggcgtggaccaggccctgccccaggagagaagagcccccgtgacccccagcagcgccagcagataccacagaagaagaagcagcggcagcagagacgagagatacagaagcgacgtgcacaccgaggccgtgcaggccgccctggccaagcacaaggagagaaagatggccgtgcccatgcccagcaagagaagaagcctggtggtgcagaccagcatggacgcctacacccccccctag

SEQ ID NO: 271821 - DNA, 727 bp, Artificial Sequence
  derived and/or modified sequence
ctgaggaggcgccgaggggagggaggtccctgcgcgcccgccgcccgcctcccgcgcccgcgccgccgcctcctcctcggtgcggttccgccgggcgcgaggagccgccgagacctccgcctgcgaacaaagaggaggccgtgcggggcgcggcgcccgcggagcatggcggaccgcagcctggagggcatggcgctgcccctggaggtgcgggcgcgcctggccgagctggagctggagctgtcggaaggtgacatcacacaaaaaggatatgaaaagaagaggtcaaagttaattggagcctaccttccgcagcctccgacagcgaatggagctgccgtggttcggtgtagactgcagcacagtgaaggagcgccgaggagaacattccgctctgcccacatcggggtgtgcgacgtccgagaagctgcggctcgggagcgggtggccagcaccgcagggaaccggcctctgttttactttcgtttcggggtggaccaagctttgccgcaagaacgccgggctcctgtcactccttcctccgcctctcgctaccaccgccgacggtcttcagggtcacgagatgagcgctatcggtcagacgtccacacggaagctgtccaggcggctctggccaaacacaaagagcggaagatggcagtgcctatgccttccaaacgcaggtccctggtcgtgcagacctcgatggacgcctacacccctccag

SEQ ID NO: 271822 - protein, 198 aa, Artificial Sequence
  derived and/or modified sequence
MSHAATSAFCRSIKLQCELYPSREVAICLDPYCGLGFVLWCLCSVYSGHQSILIPPSELETNPALWLLAVSQYKVRDTFCSYSVMELCTKGLGSQTESLKARGLDLSRVRTCVVVAEERPRIALTQSFSKLFKDLGLHPRAVSTSFGCRVNLAICLQCWDYRHEPPRPAPKCFKMVYKEGVRSVGEDKIREKRTKTWR

SEQ ID NO: 271823 - protein, 187 aa, Artificial Sequence
  derived and/or modified sequence
MADRSLEGMALPLEVRARLAELELELSEGDITQKGYEKKRSKLIGAYLPQPPTANGAAVVRCRLQHSEGAPRRTFRSAHIGVCDVREAAARERVASTAGNRPLFYFRFGVDQALPQERRAPVTPSSASRYHRRRSSGSRDERYRSDVHTEAVQAALAKHKERKMAVPMPSKRRSLVVQTSMDAYTPP

SEQ ID NO: 271824 - protein, 481 aa, Artificial Sequence
  derived and/or modified sequence
IWVSRSACLMTTQLICKLLRSREAAAAVDVRTWPLILDTDDLPKKRPAQICKPCNPDTLAYLDFSVSTTGMLAGVKMSHAATSAFCRSIKLQCELYPSREVAICLDPYCGLGFVLWCLCSVYSGHQSILIPPSELETNPALWLLAVSQYKVRDTFCSYSVMELCTKGLGSQTESLKARGLDLSRVRTCVVVAEERPRIALTQSFSKLFKDLGLHPRAVSTSFGCRVNLAICLQGTSGPDPTTVYVDMRALRHDRVRLVERGSPHSLPLMESGKILPGVRIIIANPETKGPLGDSHLGEIWVHSAHNASGYFTIYGDESLQSDHFNSRLSFGDTQTIWARTGYLGFLRRTELTDANGERHDALYVVGALDEAMELRGMRYHPIDIETSVIRAHKSVTECAVFTWTNLLVVVVELDGSEQEALDLVPLVTNVVLEEHYLIVGVVVVVDIGVIPINSRGEKQRMHLRDGFLADQLDPIYVAYNM

SEQ ID NO: 271825 - DNA, 1358 bp, Artificial Sequence
  derived and/or modified sequence
actcagtgtcctgggatcagaggcaaagaccagggaggggcgggcactcaggtcagcaggggctatgctctgggtctgagtcctgccgagccccaccacccacttgggcagtgaagtcaacctttctgtgcccgaatcttctcatctgaaagtgaggaataatagccataggcttatggcccacggatgacagtaaccagcccccgggccggggtgtcctctccatgcatggactgacctatggggtcattcgtgtggactcggaagagaagctgtccgtgctcaccgtgcaggatgtcggcctcgtgatgcctggagccatcatgtgttcagtgaagccagacggggttcctcagctgtgcagaacggatgagatcggggagctgtgtgtgtgtgcagttgcgacgggcacgtcctactatggcctctctggcatgaccaagaacacctttgaggtgtttcccatgacaagctccggggctccgatcagtgaatacccattcataaggacaggcttgctggggttcgtgggtcccggaggcctcgtcttcgtggtgggcaagatggatggcctcatggtggtcagcgggcgcaggcacaacgccgacgacatcgtggccactgcgctggccgtagaacccatgaagtttgtctaccggggaaggatagccgtgttctcggtgaccgtgctgcacgacgagaggatcgtgatcgtggctgagcagaggcctgactccacggaagaggacagtttccagtggatgagccgtgtgctgcaggcgattgacagtatacatcaagttggagtttattgcctggccttggtgccagcaaacaccctccccaaaaccccgcttggtgggatccatttatcagaaacaaaacagctttttctggagggctctctgcacccctgcaatgtcctaatgtgcccccacacctgcgtcacaaacttgcctaagcctcgacagaagcagccagaaatcggccctgcctctgtgatggtggggaacctggtctctgggaagagaatcgcccaggccagtggcagagacctgggtcagatcgaagataacgaccaggcacgcaagttcctgttcctctcagaggtcttgcagtggagagcacagaccaccccggaccacatcctctacacgctgctcaactgtcgggtgaggcgcggagctggccttccctggctactggcctcaaggggcctagcctggttcctgggagcgctcctgcttctttctttgaatccttttgcttcagtcttatgggaattctttttatgttttgctattttgactgagacttttgtacctagggattgtttttaaacgtaaccatttgtgcag

SEQ ID NO: 271826 - protein, 444 aa, Artificial Sequence
  derived and/or modified sequence
MEVTADQPRWVSHHHPAVLNGQHPDTHHPGLSHSYMDAAQYPLPEEVDVLFNIDGQGNHVPPYYGNSVRATVQRYPPTHHGSQVCRPPLLHGSLPWLDGGKALGSHHTASPWNLSPFSKTSIHHGSPGPLSVYPPASSSSLSGGHASPHLFTFPPTPPKDVSPDPSLSTPGSAGSARQDEKECLKYQVPLPDSMKLESSHSRGSMTALGGASSSTHHPITTYPPYVPEYSSGLFPPSSLLGGSPTGFGCKSRPKARSSTEGRECVNCGATSTPLWRRDGTGHYLCNACGLYHKMNGQNRPLIKPKRRLSAARRAGTSCANCQTTTTTLWRRNANGDPVCNACGLYYKLHNINRPLTMKKEGIQTRNRKMSSKSKKCKKVHDSLEDFPKNSSFNPAALSRHMSSLSHISPFSHSSHMLTTPTPMHPPSSLSFGPHHPSSMVTAMG

SEQ ID NO: 271827 - protein, 130 aa, Artificial Sequence
  derived and/or modified sequence
MEVTADQPRWVSHHHPAVLNGQHPDTHHPGLSHSYMDAAQYPLPEEVDVLFNIDGQGNHVPPYYGNSVRATVQRYPPTHHGSQVCRPPLLHGSLPWLDGGKALGSHHTASPWNLRPCLQCLWALLQASQC

SEQ ID NO: 271828 - DNA, 1335 bp, Artificial Sequence
  derived and/or modified sequence
atggaggtgaccgccgaccagcccagatgggtgagccaccaccaccccgccgtgctgaacggccagcaccccgacacccaccaccccggcctgagccacagctacatggacgccgcccagtaccccctgcccgaggaggtggacgtgctgttcaacatcgacggccagggcaaccacgtgcccccctactacggcaacagcgtgagagccaccgtgcagagatacccccccacccaccacggcagccaggtgtgcagaccccccctgctgcacggcagcctgccctggctggacggcggcaaggccctgggcagccaccacaccgccagcccctggaacctgagccccttcagcaagaccagcatccaccacggcagccccggccccctgagcgtgtacccccccgccagcagcagcagcctgagcggcggccacgccagcccccacctgttcaccttcccccccaccccccccaaggacgtgagccccgaccccagcctgagcacccccggcagcgccggcagcgccagacaggacgagaaggagtgcctgaagtaccaggtgcccctgcccgacagcatgaagctggagagcagccacagcagaggcagcatgaccgccctgggcggcgccagcagcagcacccaccaccccatcaccacctaccccccctacgtgcccgagtacagcagcggcctgttcccccccagcagcctgctgggcggcagccccaccggcttcggctgcaagagcagacccaaggccagaagcagcaccgagggcagagagtgcgtgaactgcggcgccaccagcacccccctgtggagaagagacggcaccggccactacctgtgcaacgcctgcggcctgtaccacaagatgaacggccagaacagacccctgatcaagcccaagagaagactgagcgccgccagaagagccggcaccagctgcgccaactgccagaccaccaccaccaccctgtggagaagaaacgccaacggcgaccccgtgtgcaacgcctgcggcctgtactacaagctgcacaacatcaacagacccctgaccatgaagaaggagggcatccagaccagaaacagaaagatgagcagcaagagcaagaagtgcaagaaggtgcacgacagcctggaggacttccccaagaacagcagcttcaaccccgccgccctgagcagacacatgagcagcctgagccacatcagccccttcagccacagcagccacatgctgaccacccccacccccatgcacccccccagcagcctgagcttcggcccccaccaccccagcagcatggtgaccgccatgggctag

SEQ ID NO: 271829 - DNA, 1335 bp, Artificial Sequence
  derived and/or modified sequence
atggaagtgaccgccgatcaacctagatgggttagccaccaccacccagcagtactgaacggccaacatccagatacacaccatcccggactgagtcattcttatatggatgccgcccagtaccccctgcctgaagaggtcgatgtgctcttcaacattgacggccaaggaaaccatgttccaccttattacggtaactcagtgcgcgcaacagtgcaacgctacccccctacccatcacgggtcccaagtatgccggccgcccctcctgcatgggtcattgccatggctcgatggggggaaggctctgggatcccatcacactgcttccccctggaacctgtcccccttttccaagacctccatacatcatggaagcccaggccctttgtctgtctatcctccagcttcttcttcctccctaagtgggggacacgcttcccctcatctgtttactttccccccaactccccccaaagatgtctctcctgacccttcccttagtacgcccggttctgcgggatctgcacgccaggatgaaaaggaatgcctcaaatatcaggtcccactgccagacagcatgaagttggaaagtagccatagtcgagggtccatgaccgcacttggaggagcctcttcttccactcaccaccctattactacttacccaccctacgttcccgaatatagctccggcctgtttcccccttcctctctgttgggtggaagcccaaccggttttggctgtaagtcacgccccaaggcgcgaagtagcactgaaggaagagagtgtgtgaactgcggagcgacaagcacccccctctggcgacgggacggcacaggtcattacttgtgcaacgcttgtggcttatatcataagatgaatggccagaatcgacccctgatcaagcccaaacgcaggctttctgcggccagacgcgccggaacatcttgtgctaattgccagaccaccacgacaaccctgtggagacgaaatgctaatggagaccctgtctgtaacgcgtgcggactgtactacaaactccacaatataaataggcccttgaccatgaagaaggaggggatccaaacacgtaaccgaaagatgtcctcaaagtccaagaagtgtaaaaaggtgcacgatagccttgaggatttccccaagaacagcagctttaatccagctgcgctgagtaggcatatgtcctcacttagccatatatccccattcagtcactctagtcacatgctgacaacaccaactcctatgcatcctccgagcagcctgtcgtttggtcctcaccatccctcaagtatggttacagccatgggctag

SEQ ID NO: 271830 - DNA, 3078 bp, Artificial Sequence
  derived and/or modified sequence
ctgagctgcctggcgccgtcttgatactttcagaaagaatgcattccctgtaaaaaaaaaaaaaaaatactgagagagggagagagagagagaagaagagagagagacggagggagagcgagacagagcgagcaacgcaatctgaccgagcaggtcgtacgccgccgcctcctcctcctctctgctcttcgctacccaggtgacccgaggagggactccgcctccgagcggctgaggaccccggtgcagaggagcctggctcgcagaattgcagagtcgtcgcccctttttacaacctggtcccgttttattctgccgtacccagtttttggatttttgtcttccccttcttctctttgctaaacgacccctccaagataatttttaaaaaaccttctcctttgctcacctttgcttcccagccttcccatccccccaccgaaagcaaatcattcaacgacccccgaccctccgacggcaggagccccccgacctcccaggcggaccgccctccctccccgcgcgcgggttccgggcccggcgagagggcgcgagcacagccgaggccatggaggtgacggcggaccagccgcgctgggtgagccaccaccaccccgccgtgctcaacgggcagcacccggacacgcaccacccgggcctcagccactcctacatggacgcggcgcagtacccgctgccggaggaggtggatgtgctttttaacatcgacggtcaaggcaaccacgtcccgccctactacggaaactcggtcagggccacggtgcagaggtaccctccgacccaccacgggagccaggtgtgccgcccgcctctgcttcatggatccctaccctggctggacggcggcaaagccctgggcagccaccacaccgcctccccctggaatctcagccccttctccaagacgtccatccaccacggctccccggggcccctctccgtctaccccccggcctcgtcctcctccttgtcggggggccacgccagcccgcacctcttcaccttcccgcccaccccgccgaaggacgtctccccggacccatcgctgtccaccccaggctcggccggctcggcccggcaggacgagaaagagtgcctcaagtaccaggtgcccctgcccgacagcatgaagctggagtcgtcccactcccgtggcagcatgaccgccctgggtggagcctcctcgtcgacccaccaccccatcaccacctacccgccctacgtgcccgagtacagctccggactcttcccccccagcagcctgctgggcggctcccccaccggcttcggatgcaagtccaggcccaaggcccggtccagcacagaaggcagggagtgtgtgaactgtggggcaacctcgaccccactgtggcggcgagatggcacgggacactacctgtgcaacgcctgcgggctctatcacaaaatgaacggacagaaccggcccctcattaagcccaagcgaaggctgtctgcagccaggagagcagggacgtcctgtgcgaactgtcagaccaccacaaccacactctggaggaggaatgccaatggggaccctgtctgcaatgcctgtgggctctactacaagcttcacaatattaacagacccctgactatgaagaaggaaggcatccagaccagaaaccgaaaaatgtctagcaaatccaaaaagtgcaaaaaagtgcatgactcactggaggacttccccaagaacagctcgtttaacccggccgccctctccagacacatgtcctccctgagccacatctcgcccttcagccactccagccacatgctgaccacgcccacgccgatgcacccgccatccagcctgtcctttggaccacaccacccctccagcatggtcaccgccatgggttagagccctgctcgatgctcacagggcccccagcgagagtccctgcagtccctttcgacttgcatttttgcaggagcagtatcatgaagcctaaacgcgatggatatatgtttttgaaggcagaaagcaaaattatgtttgccactttgcaaaggagctcactgtggtgtctgtgttccaaccactgaatctggaccccatctgtgaataagccattctgactcatatcccctatttaacagggtctctagtgctgtgaaaaaaaaaatgctgaacattgcatataacttatattgtaagaaatactgtacaatgactttattgcatctgggtagctgtaaggcatgaaggatgccaagaagtttaaggaatatgggagaaatagtgtggaaattaagaagaaactaggtctgatattcaaatggacaaactgccagttttgtttcctttcactggccacagttgtttgatgcattaaaagaaaataaaaaaaagaaaaaagagaaaagaaaaaaaaagaaaaaagttgtaggcgaatcatttgttcaaagctgttggcctctgcaaaggaaataccagttctgggcaatcagtgttaccgttcaccagttgccgttgagggtttcagagagcctttttctaggcctacatgctttgtgaacaagtccctgtaattgttgtttgtatgtataattcaaagcaccaaaataagaaaagatgtagatttatttcatcatattatacagaccgaactgttgtataaatttatttactgctagtcttaagaactgctttctttcgtttgtttgtttcaatattttccttctctctcaatttttggttgaataaactagattacattcagttggcctaaggtggttgtgctcggagggtttcttgtttcttttccattttgtttttggatgatatttattaaatagcttctaagagtccggcggcatctgtcttgtccctattcctgcagcctgtgctgagggtagcagtgtatgagctaccagcgtgcatgtcagcgaccctggcccgacaggccacgtcctgcaatcggcccggctgcctcttcgccctgtcgtgttctgtgttagtgatcactgcctttaatacagtctgttggaataatattataagcataataataaagtgaaaatattttaaaacta

SEQ ID NO: 271831 - DNA, 1335 bp, Artificial Sequence
  derived and/or modified sequence
atggaggtgacagctgaccagccccgctgggtgagccaccaccaccctgctgtgctgaatggccagcacccagacacccaccaccctggcctgagccacagctacatggatgctgcccagtaccccctgcctgaggaggtggatgtgctcttcaacattgatggccagggcaaccacgtgcccccctactacggcaacagcgtgcgggccaccgtgcagcgctacccacccacccaccacggcagccaggtgtgcaggcctcccctgctgcacggcagcctgccctggctggatggcggcaaggccctgggcagccaccacacagccagcccctggaacctgagccccttcagcaagaccagcatccaccacggcagccctggccccctgtctgtgtaccccccagccagcagcagcagcctgagcggcggccacgccagcccccacctgttcaccttcccccccaccccacccaaggatgtgtccccagaccccagcctgagcaccccaggcagcgctggcagcgcccggcaggatgagaaggagtgcctgaagtaccaggtgcccctgcctgacagcatgaagctggagagcagccacagccggggctccatgacagccctgggcggggccagcagcagcacccaccaccccatcaccacctacccaccctacgtgcctgagtacagcagcggcctcttcccccccagcagcctgctgggcggcagccccactggatttggctgcaagagccggcccaaggcccggagcagcacagagggcagagaatgtgtgaactgtggggccaccagcacccccctgtggaggagagatggcaccggccactacctgtgcaatgcctgtggcctgtaccacaagatgaatggccagaaccggcccctcatcaagcccaagaggcggctgtctgctgcccggcgggccggcaccagctgtgccaactgccagaccaccaccaccaccctgtggaggagaaatgccaacggggaccctgtgtgcaatgcctgtggcctgtactacaagctgcacaacatcaaccggcccctgaccatgaagaaggagggcatccagaccaggaacaggaagatgagcagcaagagcaagaagtgcaagaaggtgcatgacagcctggaggacttccccaagaacagcagcttcaacccagctgccctgagccgccacatgagcagcctgagccacatcagccccttcagccacagcagccacatgctgaccacccccacccccatgcacccccccagcagcctgagctttggcccccaccaccccagctccatggtgacagccatgggctag

SEQ ID NO: 271832 - DNA, 1335 bp, Artificial Sequence
  derived and/or modified sequence
atggaggtgaccgccgaccagccccggtgggtgagccaccaccacccagcggtcttgaacggtcaacacccagatacgcatcatccagggctctcccattcttatatggacgctgctcagtacccgctcccagaagaggtagacgtgctgttcaacattgacgggcagggtaaccacgtccccccttactatggtaattcagtgagagccacagtgcagcggtacccacccacccatcatgggtctcaggtgtgcagacccccccttctgcatgggagcctgccctggctcgacggtggaaaagccctggggagtcatcatacagcctcaccctggaacttgtccccatttagtaagacctcaattcatcatggctctcctggtcccctcagtgtctaccctccggctagtagctcatctctctccggcggacacgccagcccccacctcttcacttttcccccaacaccccccaaggacgtcagtcccgacccctccctgtccacgcctgggagcgccggatcagcgaggcaggacgaaaaagaatgccttaagtatcaggtgcccctcccagattcaatgaaattggaatctagtcactctaggggaagcatgacagcattaggaggagcttcttccagcacacaccacccaatcacaacttaccctccatatgtgcctgagtacagtagtggtttgtttccgcctagttccctgctgggcggaagccctacgggcttcggctgcaagtcccggccaaaggcacggagctccactgagggcagagaatgtgtcaactgcggggcaacgtccacgcccctctggcgcagggatggaaccggccactacctgtgcaatgcctgtgggttgtaccacaagatgaatggacagaacaggcctttgattaagcctaaacgccggcttagcgctgcaaggagagctggcacaagctgtgcgaactgccagaccacaacaactacattgtggcggcgaaatgcgaatggcgatccagtgtgcaatgcatgtggactgtattataagctgcacaacattaatagacccctgaccatgaaaaaagaaggcatccaaaccagaaataggaaaatgagttccaagtcaaaaaagtgtaagaaagtccacgattctctggaagacttcccgaagaacagctctttcaacccagctgctctgagcagacatatgagctcactcagtcacatcagcccatttagtcacagcagccacatgctgacaaccccaactcccatgcacccgccctccagtctgagttttggtcctcatcaccctagttctatggtgacagctatgggatag

SEQ ID NO: 271833 - DNA, 1335 bp, Artificial Sequence
  derived and/or modified sequence
atggaggtgaccgccgatcaacccaggtgggtgagccatcaccacccagcggtgctgaacgggcaacaccccgatactcatcatccaggactatcgcatagctacatggatgcggcacaatacccacttcccgaagaagttgacgtgttatttaatatcgatggacaaggaaatcacgtcccgccatactacggaaacagcgtgcgggcaaccgtgcaaaggtacccacccactcatcacggctcacaggtgtgtcggcctcctttgctccatggttctctgccttggctcgatggtggcaaggcactcggaagccaccatacagcctccccttggaatctctcccccttcagcaagaccagcatccaccatgggtcaccaggccctctgtcagtgtacccaccagcctcttcttcatccctcagcggaggccatgcctccccccatctgttcacttttccccctactccccctaaagatgtgtcacccgatcctagtctgagtacaccgggaagcgcagggagcgccaggcaagacgaaaaggaatgtctcaagtatcaggtacccctgcctgactcgatgaaactcgaatcatcgcattcccgcggaagcatgacagccctgggtggggctagtagctccacccaccatccaattaccacctatcccccttacgtacctgagtatagcagtggtcttttccccccttctagtttgctcggcggaagccctaccgggtttggatgcaaatcgcgcccaaaagcaagaagctctacagagggccgtgagtgcgtgaactgtggggctacctcaactcctctgtggagacgagacgggacgggccactatctgtgcaatgcatgtggcctttaccataagatgaacggccagaataggccacttattaagccgaagcgtaggctctcagcagccagacgggcagggactagttgcgcaaattgccagaccactactactacgctgtggcgtcgcaacgccaatggggaccctgtttgcaacgcctgtgggctttactacaagttgcacaacattaatagacccctgacaatgaaaaaggaaggtatacagacacgcaaccggaaaatgagttctaagagcaagaagtgcaaaaaggtccatgacagcttagaagacttccccaaaaattccagtttcaatccggctgctctaagtaggcatatgtcaagtctctctcacatcagccctttcagtcacagctctcatatgctgacaacgcccacacctatgcacccacccagcagtctgtccttcggaccccaccatccgagcagtatggtcacagccatgggctag

SEQ ID NO: 271834 - protein, 31 aa, Artificial Sequence
  derived and/or modified sequence
IYLNVESVCTHRERSENMKGSRSSADSSRKH

SEQ ID NO: 271835 - DNA, 1874 bp, Artificial Sequence
  derived and/or modified sequence
tcgggcgcagccgcgaagatgccgttggaactgacgcagagccgagtgcagaagatctgggtgcccgtggaccacaggccctcgttgcccagatcctgtgggccaaagctgaccaactcccccaccgtcatcgtcatggtgggcctccccgcccggggcaagacctacatctccaagaagctgactcgctacctcaactggattggcgtccccacaaaagtgttcaacgtcggggagtatcgccgggaggctgtgaagcagtacagctcctacaacttcttccgccccgacaatgaggaagccatgaaagtccggaagcaatgtgccttagctgccttgagagatgtcaaaagctacctggcgaaagaagggggacaaattgcggttttcgatgccaccaatactactagagagaggagacacatgatccttcattttgccaaagaaaatgactttaaggcgtttttcatcgagtcggtgtgcgacgaccctacagttgtggcctccaatatcatggaagttaaaatctccagcccggattacaaagactgcaactcggcagaagccatggacgacttcatgaagaggatcagttgctatgaagccagctaccagcccctcgaccccgacaaatgcgacagggacttgtcgctgatcaaggtgattgacgtgggccggaggttcctggtgaaccgggtgcaggaccacatccagagccgcatcgtgtactacctgatgaacatccacgtgcagccgcgtaccatctacctgtgccggcacggcgagaacgagcacaacctccagggccgcatcgggggcgactcaggcctgtccagccggggcaagaagtttgccagtgctctgagcaagttcgtggaggagcagaacctgaaggacctgcgcgtgtggaccagccagctgaagagcaccatccagacggccgaggcgctgcggctgccctacgagcagtggaaggcgctcaatgagatcgacgcgggcgtctgtgaggagctgacctacgaggagatcagggacacctaccctgaggagtatgcgctgcgggagcaggacaagtactattaccgctaccccaccggggagtcctaccaggacctggtccagcgcttggagccagtgatcatggagctggagcggcaggagaatgtgctggtcatctgccaccaggccgtcctgcgctgcctgcttgcctacttcctggataagagtgcagaggagatgccctacctgaaatgccctcttcacaccgtcctgaaactgacgcctgtcgcttatggctgccgtgtggaatccatctacctgaacgtggagtccgtctgcacacaccgggagaggtcagagggtctcagtctgttccccaggctggagtgcggtggcgcagtcacggctcactgcagcctcaacctcctgggttcaagtgatcctcccgcctcagcctcccgcgtagctgagactacaggatgcaaagaagggacctaacccgctcatgagacgcaatagtgtcaccccgctagccagccccgaacccaccaaaaagcctcgcatcaacagctttgaggagcatgtggcctccacctcggccgccctgcccagctgcctgcccccggaggtgcccacgcagctgcctggacaaaacatgaaaggctcccggagcagcgctgactcctccaggaaacactgaggcagacgtgtcggttccattccatttccatttctgcagcttagcttgtgtcctgccctccgcccgaggcaaaacgtatcctgaggacttcttccggagagggtggggtggagcagcgggggagccttggccgaagagaaccatgcttggcaccgtctgtgtcccctcggccgct

SEQ ID NO: 271836 - protein, 202 aa, Artificial Sequence
  derived and/or modified sequence
MGGYCGYLANMGGLAAGADAAYIFEEPFDIRDLQSNVEHLTEKMKTTIQRGLVLRNESCSENYTTDFIYQLYSEEGKGVFDCRKNVLGHMQQGGAPSPFDRNFGTKISARAMEWITAKLKEARGRGKKFTTDDSICVLGISKRNVIFQPVAELKKQTDFEHRIPKEQWWLKLRPLMKILAKYKASYDVSDSGQLEHVQPWSV

SEQ ID NO: 271837 - protein, 103 aa, Artificial Sequence
  derived and/or modified sequence
  misc_feature (1)..(1): Xaa can be any naturally occurring amino acid
XFIYQLYSEEGKGVFDCRKNVLGHMQQGGAPSPFDRNFGTKISARAMEWITAKLKEARGRGKKFTTDDSICVLGISKRNVIFQPVAELKKQTDFETVSMQPPR

SEQ ID NO: 271838 - protein, 166 aa, Artificial Sequence
  derived and/or modified sequence
  misc_feature (1)..(1): Xaa can be any naturally occurring amino acid
XADGHRMLAIYDGFDGFAKGQIKEIGWTDVGGWTGQGGSILGTKRVLPGKYLEEIATQMRTHSINALLIIGGFEAYKSACDMAEARGRHQELCIPLCVVPATISNNVPGTEISLGSDTGLNAVVETCDRIKQSASGTKRRVFIIETMGGYCGYLANMGGLAAGADA

SEQ ID NO: 271839 - DNA, 501 bp, Artificial Sequence
  derived and/or modified sequence
taagctgatggccacagaatgctcgccatctacgatgggtttgacgggtttgctaagggccagatcaaagagatcggctggaccgacgtcggcggatggactggccaaggaggatctatcctcggaaccaaacgggtgttgccggggaaatatttggaagaaatcgcaactcagatgcgcacccactcaatcaatgccttactgattatcggtggcttcgaggcgtataagtctgcctgtgacatggccgaagcaagaggccggcaccaggagctgtgcatccccctgtgtgtggtgcctgcaactatctctaacaacgtccccggaaccgagataagtttaggatccgacactggtcttaatgccgttgtcgagacatgtgatcggatcaaacaatcagcttcgggcaccaagagaagagtatttatcattgaaaccatggggggctattgtgggtacctggctaacatgggcgggctcgccgctggggcggatgcatag

SEQ ID NO: 271840 - DNA, 501 bp, Artificial Sequence
  derived and/or modified sequence
tgagctgatggccacaggatgctggccatctatgatggctttgatggctttgccaagggccagatcaaggagatcggctggacagatgtgggcggctggacaggccagggcggcagcatcctgggcaccaagagggtgctgcccgggaagtacctggaggagatcgccacccagatgaggacccacagcatcaatgccctgctgatcatcggcggctttgaggcctacaagagcgcctgtgacatggccgaggcccggggccgccaccaggagctgtgcatccccctgtgtgtggtgcctgccaccatcagcaacaacgtgcccggcacagagatcagcctgggcagtgacaccggcctgaatgctgtggtggagacctgtgaccgcatcaagcagagcgccagcggcaccaagagaagagtcttcatcatcgagaccatgggcggctactgcggctacctggccaacatgggcggcctggccgccggggctgatgcctag

SEQ ID NO: 271841 - DNA, 501 bp, Artificial Sequence
  derived and/or modified sequence
tgagccgacggccaccggatgctggccatctacgacggcttcgacggttttgctaagggccaaatcaaagagatcggatggacagatgttggtggctggaccggccagggtggtagtatattaggtacaaaaagagtcttgcctggaaagtacctggaggagattgctacacaaatgcgcactcattctattaacgccctgctgatcatcggggggttcgaggcttacaaaagcgcttgtgatatggctgaagctcgcggaaggcaccaagagctgtgcattcccctgtgtgtggtccccgcaaccatctccaataacgttccgggcacagagataagcctgggatctgacacaggtctcaatgccgtagtggagacatgtgacagaatcaaacagagcgcgtcaggaaccaagaggagagtgtttatcattgagactatggggggatactgcgggtacttagctaacatgggagggcttgccgccggcgccgacgcgtag

SEQ ID NO: 271842 - DNA, 496 bp, Artificial Sequence
  derived and/or modified sequence
tgccgacggccacaggatgctcgccatctatgatggctttgacggcttcgccaagggccagatcaaagaaatcggctggacagatgtcgggggctggaccggccaaggaggctccattcttgggacaaaacgcgttctcccggggaagtacttggaagagatcgccacacagatgcgcacgcacagcatcaacgcgctgctgatcatcggtggattcgaggcttacaagagtgcgtgcgacatggccgaggcacgaggccgccaccaggagctttgcatccccctgtgtgtggtgccggccacgattagcaacaatgtcccaggcacagaaataagcctgggctccgacactggcctgaatgctgttgttgagacctgcgaccgcatcaagcagtccgccagcggaaccaagcggcgcgtgttcatcatcgagaccatgggcggctactgtggctacctggccaacatgggggggctcgcggccggagctgatgcc

SEQ ID NO: 271843 - DNA, 501 bp, Artificial Sequence
  derived and/or modified sequence
taagctgacggacaccgcatgctggccatatacgacgggttcgatggttttgcaaagggccagatcaaggagataggctggacggacgtgggaggctggaccggtcaaggtggaagcatccttggtactaagagggtgcttcctggcaagtatctagaggagatcgctacccaaatgcggacacactcgatcaacgccctgttaataattgggggattcgaagcctataaatctgcctgcgatatggctgaggcccgtggtcgacatcaggagttatgcatccctctttgcgtggtgcctgccacaataagcaataacgtgcctggtaccgagatttccctgggatcagatacaggactcaacgcagtggtggagacatgcgaccggataaaacagagtgcaagtggcacgaagagaagagtcttcatcattgagaccatgggcggatattgcgggtatttagcaaatatggggggtctcgccgcaggcgctgatgcttag

SEQ ID NO: 271844 - DNA, 501 bp, Artificial Sequence
  derived and/or modified sequence
tgagccgacggccacagaatgctggccatctacgacggcttcgacggcttcgccaagggccagatcaaggagatcggctggaccgacgtgggcggctggaccggccagggcggcagcatcctgggcaccaagagagtgctgcccggcaagtacctggaggagatcgccacccagatgagaacccacagcatcaacgccctgctgatcatcggcggcttcgaggcctacaagagcgcctgcgacatggccgaggccagaggcagacaccaggagctgtgcatccccctgtgcgtggtgcccgccaccatcagcaacaacgtgcccggcaccgagatcagcctgggcagcgacaccggcctgaacgccgtggtggagacctgcgacagaatcaagcagagcgccagcggcaccaagagaagagtgttcatcatcgagaccatgggcggctactgcggctacctggccaacatgggcggcctggccgccggcgccgacgcctag

SEQ ID NO: 271845 - DNA, 609 bp, Artificial Sequence
  derived and/or modified sequence
atgggcgggtattgcgggtatcttgccaacatgggcggactcgcggccggggccgatgccgcatatattttcgaagagcctttcgatatccgggacctccagtccaacgtggaacacctgactgaaaaaatgaaaaccaccatacagaggggactcgtattgcgaaatgagagttgctctgaaaactacacaactgattttatctatcaactttacagcgaagagggcaagggggtcttcgactgccgaaagaatgtgctgggccacatgcagcaagggggagctccgtctcccttcgaccgtaactttgggacaaaaatctccgcgcgggccatggagtggatcaccgccaaactaaaagaggccagaggacggggcaagaagttcactaccgatgactccatatgtgtgctgggtattagtaaacgcaacgtgatcttccagcccgtggcggagctcaaaaagcaaacagattttgaacaccgcattcctaaagagcagtggtggctcaaactcaggcccctgatgaaaatcctcgcgaagtacaaggcctcttatgatgtctctgatagtggccagctggagcacgtgcaaccgtggtccgtgtag

SEQ ID NO: 271846 - DNA, 633 bp, Artificial Sequence
  derived and/or modified sequence
atgaacgcagccgtgcgggccgtagttaggatgggaatttacgtgggagctaaagtctactttatctacgagggataccaagggatggtggatggtggttccaacatcgcagaggctgattgggagagcgtgtcatccatccttcaggtgggaggaacgattataggaagcgctcgttgccaggcttttcgtacgagagaaggtcgcctaaaggctgcttgtaatttgctacagcgtggcatcaccaacctgtgcgtcatcggtggagacgggagcttaacaggggcaaacctgtttaggaaagaatggagtgggctcttggaagagctggctcgcaacggacaaattgacaaagaagcagtgcaaaagtacgcttacttgaatgtggttggcatggtgggaagcatcgacaatgatttctgtggcactgatatgacaatcgggactgactccgcactgcatcgtatcatcgaagtcgttgatgccatcatgacgaccgcccagagccatcagaggacatttgttctggaggtgatgggcagacactgcggatatctggctcttgtgtctgccttagcgtgcggtgccgactgggtattccttccagaatcaccaccagaagaagggtggtag

SEQ ID NO: 271847 - DNA, 723 bp, Artificial Sequence
  derived and/or modified sequence
atggggcgccactgcggttatttggcgttggtttcagcactcgcatgcggggccgattgggtgttcctgcccgaatcccctccagaggagggctgggaggagcagatgtgcgtgaagctctccgagaatcgcgcccggaagaagaggcttaacataattatcgtggcggaaggggctatcgatacgcagaacaagcccatcacgtccgagaagattaaggagcttgtagtaacccagcttggttacgatacaagagtgacaattctaggacacgtgcagagaggtgggacaccatctgcctttgatagaatcctagccagccgtatgggggtggaagcagtgattgctctcctcgaggcaacccccgacacgccagcttgcgtggtctctctgaatgggaaccacgcagtgcggctgcccttgatggagtgtgtgcagatgacgcaggatgttcagaaagctatggatgaaaggaggttccaagacgcggtgaggctcagggggaggtctttcgcaggcaacctgaatacatacaagcggctagctataaagttacccgacgatcagattcctaaaaccaattgcaatgtggccgtgatcaatgtgggggctccagcagccggaatgaatgctgccgttcgcagcgccgtaagggtaggaatcgctgacgggcataggatgttggccatttatgacggcttcgacgggtttgctaagggctag

SEQ ID NO: 271848 - DNA, 501 bp, Artificial Sequence
  derived and/or modified sequence
atgaatgccgctgtgcgagccgttgttagaatgggcatttatgtcggtgctaaggtatatttcatctacgagggttaccaagggatggtggacggtggatctaatattgcagaggccgactgggagtctgtgagcagcatcttgcaagtgggaggaacaatcatcggctcagctcggtgccaagctttccgcacgcgcgagggcaggttgaaggcagcctgcaatctactccagcggggtattaccaacttatgcgtcatcggaggggatggctctctgacaggcgcgaaccttttccgtaaagaatggagtgggttgctcgaggagctcgccaggaatggacaaattgacaaagaggcagtgcaaaagtacgcctacctgaacgttgtcggtatggtgggatccatagacaacgatttctgcgggacggatatgaccatagggacagattcagctctgcaccgcatcatcgaggtggtcgacgctataatgaccacatag

SEQ ID NO: 271849 - DNA, 312 bp, Artificial Sequence
  derived and/or modified sequence
taattcatctaccagttatatagcgaagagggtaaaggggtgtttgattgccgcaaaaacgtgcttgggcatatgcagcagggcggcgctccttctcccttcgacaggaactttggcactaaaatctccgctagggccatggagtggatcactgccaagctaaaagaggccaggggacgggggaagaaattcaccaccgatgactctatatgcgtcttagggatctcgaaacggaacgtgatatttcagccagtcgctgaactaaagaagcagaccgatttcgagaccgtatccatgcagcccccacgctag

SEQ ID NO: 271850 - DNA, 609 bp, Artificial Sequence
  derived and/or modified sequence
atgggcggctactgcggctacctggccaacatgggcggcctggccgccggggctgatgctgcctacatctttgaggagccctttgacatccgggacctgcagagcaatgtggagcacctgacagagaagatgaagaccaccatccagaggggcctggtgctgagaaatgaaagctgcagcgagaactacaccacagacttcatctaccagctgtacagcgaggagggcaaaggagtgtttgactgcaggaagaatgtgctgggccacatgcagcagggcggggcccccagcccctttgacaggaactttggcaccaagatcagcgcccgggccatggagtggatcacagccaagctgaaggaggcccggggccggggcaagaagttcaccacagatgacagcatctgtgtgctgggcatcagcaagagaaatgtcatcttccagcctgtggccgagctgaagaagcagacagactttgagcaccgcatccccaaggagcagtggtggctgaagctgcggcccctgatgaagatcctggccaagtacaaggccagctatgatgtgtctgattctggccagctggagcacgtgcagccctggagcgtgtag

SEQ ID NO: 271851 - DNA, 633 bp, Artificial Sequence
  derived and/or modified sequence
atgaatgctgctgtgcgggctgtggtgaggatgggcatctacgtgggcgccaaggtgtacttcatctatgagggctaccagggcatggtggatggcggcagcaacattgctgaggccgactgggagagcgtgagcagcatcctgcaggtgggcggcaccatcatcggcagcgcccgctgccaggccttccgcacccgggagggccgcctgaaggccgcctgcaacctgctgcagaggggcatcaccaacctgtgtgtgattggaggagatggcagcctgaccggggccaacctcttcaggaaggagtggagcggcctgctggaggagctggccagaaatggccagattgacaaggaggccgtgcagaagtatgcctacctgaatgtggtgggcatggtgggcagcattgacaatgacttctgtggcacagacatgaccatcggcacagattctgccctgcaccgcatcatcgaggtggtggatgccatcatgaccacagcccagagccaccagaggacctttgtgctggaggtgatgggccgccactgcggctacctggccctggtgtctgccctggcctgtggggctgactgggtgttcctgcctgagagccccccagaggagggctggtag

SEQ ID NO: 271852 - DNA, 723 bp, Artificial Sequence
  derived and/or modified sequence
atgggccgccactgcggctacctggccctggtgtctgccctggcctgtggggctgactgggtgttcctgcctgagagccccccagaggagggctgggaggagcagatgtgtgtgaagctgtctgagaacagagccaggaagaagaggctgaacatcatcatcgtggccgagggcgccatcgacacccagaacaagcccatcaccagcgagaagatcaaggagctggtggtgacccagctgggctatgacaccagggtgaccatcctgggccacgtgcagagaggaggcaccccatctgcctttgaccgcatcctggccagcaggatgggcgtggaggccgtgattgccctgctggaggccaccccagacaccccagcctgtgtggtgtccctgaatggaaatcatgctgtgcggctgcccctgatggagtgtgtgcagatgacccaggatgtgcagaaggccatggatgagcggcgcttccaggatgctgtgcggctgcggggccgcagctttgctggcaacctgaacacctacaagaggctggccatcaagctgcctgatgaccagatccccaagaccaactgcaatgtggccgtcatcaacgtgggcgccccagctgctggcatgaatgctgctgtgcgctctgctgtgcgggtgggcattgctgatggccacaggatgctggccatctatgatggctttgatggctttgccaagggctag

SEQ ID NO: 271853 - DNA, 501 bp, Artificial Sequence
  derived and/or modified sequence
atgaatgctgctgtgcgggctgtggtgaggatgggcatctacgtgggcgccaaggtgtacttcatctatgagggctaccagggcatggtggatggcggcagcaacattgctgaggccgactgggagagcgtgagcagcatcctgcaggtgggcggcaccatcatcggcagcgcccgctgccaggccttccgcacccgggagggccgcctgaaggccgcctgcaacctgctgcagaggggcatcaccaacctgtgtgtgattggaggagatggcagcctgaccggggccaacctcttcaggaaggagtggagcggcctgctggaggagctggccagaaatggccagattgacaaggaggccgtgcagaagtatgcctacctgaatgtggtgggcatggtgggcagcattgacaatgacttctgtggcacagacatgaccatcggcacagattctgccctgcaccgcatcatcgaggtggtggatgccatcatgaccacctag

SEQ ID NO: 271854 - DNA, 312 bp, Artificial Sequence
  derived and/or modified sequence
tgattcatctaccagctgtacagcgaggagggcaagggcgtgtttgactgcaggaagaatgtgctgggccacatgcagcagggcggggcccccagcccctttgacaggaactttggcaccaagatcagcgcccgggccatggagtggatcacagccaagctgaaggaggcccggggccggggcaagaagttcaccacagatgacagcatctgtgtgctgggcatcagcaagagaaatgtcatcttccagcctgtggccgagctgaagaagcagacagactttgagaccgtgtccatgcagcccccaagatag

SEQ ID NO: 271855 - DNA, 609 bp, Artificial Sequence
  derived and/or modified sequence
atgggcggctactgcggctacctggccaacatgggcggcctggccgccggcgctgacgcagcatacattttcgaagagccattcgacatccgtgacttgcagtcaaatgttgagcatttgaccgagaagatgaaaacaactattcagcgcggtcttgtgctcaggaatgaatcatgtagtgaaaactacaccactgattttatttatcagttatacagcgaagagggcaagggggtcttcgattgccgcaagaacgttctgggtcacatgcaacaaggaggcgcacccagtccttttgataggaatttcggaactaagatttctgccagggctatggaatggatcactgcgaagctgaaagaagcgagaggcaggggaaagaaatttaccactgacgattctatctgcgtactggggatatccaagcggaatgtcatctttcaacctgtggccgagttgaaaaaacagacagatttcgaacacagaataccaaaagagcaatggtggctgaagcttaggcctctcatgaaaattctcgctaagtataaggccagttacgatgtttcagacagcggacagcttgaacatgtgcagccctggtcggtgtag

SEQ ID NO: 271856 - DNA, 633 bp, Artificial Sequence
  derived and/or modified sequence
atgaacgccgccgtgcgggccgtggtgcggatgggcatctacgtgggcgctaaggtctatttcatttacgagggctaccagggtatggttgatggaggatccaatatagccgaggcagactgggaatcagtaagttcgattctgcaggtcggaggcactattattggaagcgctcggtgccaggcgtttcgcacccgcgaaggcagacttaaggcggcttgcaatttgctccaacgaggaattacaaacttatgcgtgatcggaggcgatggatccctaacaggcgcgaatctgttccgtaaagagtggtccggactgctagaagaattagctcggaacgggcagattgacaaggaggcagtgcaaaagtacgcttaccttaacgtggttgggatggtgggctccattgacaatgatttctgtggcactgacatgaccattggcacagatagcgccttacatcggatcattgaggtcgtcgatgcaatcatgactacagcccagagtcatcagagaacattcgtgcttgaagtaatgggtcgccattgcggatatctggccttggtgtcagctctcgcctgtggtgcggactgggtgtttctccccgagtcccctcccgaggaaggttggtag

SEQ ID NO: 271857 - DNA, 723 bp, Artificial Sequence
  derived and/or modified sequence
atgggccggcactgcggctacctggccctggtgagcgccctggcctgcggcgctgattgggttttccttccagaatctccaccagaagagggatgggaagagcagatgtgtgtcaaactatccgagaaccgtgccagaaaaaaaaggctgaatatcatcatagtggcagagggagctatagatacccagaacaagccaatcacttccgagaagattaaggagctggtagtgacccaacttggatatgatacccgggtcacgatcctgggacacgtccagagaggcggcaccccatctgctttcgacagaattcttgcatctcgcatgggtgtcgaggccgttatcgccctccttgaggcaaccccagatactccggcctgtgtggtgtctctgaacggcaaccacgcggtacgactcccacttatggagtgcgtccagatgacgcaagacgtccaaaaagctatggacgagaggagatttcaggacgcggtgaggttacggggacgttcctttgcaggcaatctgaacacctacaagcgactggctatcaaattgcctgacgatcaaatccctaaaactaactgcaatgtcgccgtgattaacgtaggggcccctgccgccggtatgaatgctgccgtgagatccgcagtgcgcgtcggaatcgcagacgggcataggatgttggctatctacgatggctttgacggatttgccaaaggatag

SEQ ID NO: 271858 - DNA, 501 bp, Artificial Sequence
  derived and/or modified sequence
atgaacgccgccgtgcgggccgtggtgcggatgggcatctacgtgggtgctaaggtatatttcatttatgagggctaccaggggatggtggatggcggctctaatatcgcagaagccgattgggaatctgtgtcctcaattcttcaggtgggcggtacgattatcggaagcgcgcggtgccaggcctttcggactcgcgaaggccggctcaaggccgcatgcaaccttctgcaacgtggcataaccaatctttgcgtcatcggtggggacggctcactgacaggtgccaatctttttcggaaggaatggtccggattgctggaagagttggcaaggaatgggcaaatcgataaggaggcagtgcagaagtacgcttatctcaacgtggtgggaatggtgggaagcatcgacaatgatttttgtgggactgacatgacaattgggaccgacagcgccctccacaggattatcgaggtggtcgatgcgatcatgaccacatag

SEQ ID NO: 271859 - DNA, 312 bp, Artificial Sequence
  derived and/or modified sequence
tgattcatctaccagctgtacagcgaggagggcaagggcgtgttcgattgtcgaaagaacgtgctgggccatatgcagcaggggggggctccgagcccattcgaccggaattttggcaccaaaatctccgctcgggctatggaatggatcactgctaaattaaaagaagcaagagggaggggtaaaaaatttactaccgatgactccatctgcgtgcttggaataagcaagcgaaatgttatcttccagccagtggcagagcttaaaaaacagacagatttcgaaaccgttagtatgcaaccaccacgatag

SEQ ID NO: 271860 - DNA, 1698 bp, Artificial Sequence
  derived and/or modified sequence
gaactggatcagatttatgttttttatagatggggtcctttctgtgtgaacggattggagggtcccggggtgggagctgaggcccaggaagagggcgttgcagccggactgatgtatgggtgggaaggcggccgatgcatttctttgccatttttctccccgccgagcttgggtcctcatggagggcggatggcagacatttcactctgggatccgatgcctgtgcatctggaagacttccccaggtgcctgggtctaagaaccaccatctgcctttgagtagagtttccataaatgtaacattcgccaatggatggaagatggccgcacctctaaaatcacagggagcttttcagaagaaaatagaatagcacagcggttctcacggactaagctggcaggggacagtcccctaacatctcagctaacacctaacggtgtctgtgtccggtgaaagcggcttcagcagggacagtcacagagcagcgtggagtgagctggcttgtggggtcgtcttttccgtccccttctatggggcctgggagaagggagcggcagatggccaggcccccaaaacgggacatcgaggtcacctccaggtggctgccatggtggggttgcgggggaccacgttcacacccactccgagggcacatcctggctgctgcacacccttcacctctgcgggatgctgggaccgcatgtttgggcgcggtgggggggccttgctgcactcactcttgggggagctctgggatggtgggcgcgccccgggcctgggctggagtgactgatcgcttctctgtgaccagacctgcgaccgcatcaagcagtccgccagcggaaccaagcggcgcgtgttcatcatcgagaccatgggcggctactgtggctacctggccaacatgggggggctcgcggccggagctgatgccgcatacattttcgaagagcccttcgacatcagggatctgcagtccaacgtggagcacctgacggagaaaatgaagaccaccatccagagaggccttgtgctcagaaatgagagctgcagtgaaaactacaccaccgacttcatttaccagctgtattcagaagagggcaaaggcgtgtttgactgcaggaagaacgtgctgggtcacatgcagcagggtggggcaccctctccatttgatagaaactttggaaccaaaatctctgccagagctatggagtggatcactgcaaaactcaaggaggcccggggcagaggaaaaaaatttaccaccgatgattccatttgtgtgctgggaataagcaaaagaaacgttatttttcaacctgtggcagagctgaagaagcaaacggattttgagcacaggattcccaaagaacagtggtggctcaagctacggcccctcatgaaaatcctggccaagtacaaggccagctatgacgtgtcggactcaggccagctggaacatgtgcagccctggagtgtctgacccagtcccgcctgcatgtgcctgcagccaccgtggactgtctgtttttgtaacacttaagttattttatcagcactttatgcacgtattattgacattaatacctaatcggcgagtgcccatctgccccacctgctccagtgcgtgctgtctgtggagtgtgtctcatgctttcagatgtgcatatgagcagaattaattaaacatttgccta

SEQ ID NO: 271861 - DNA, 705 bp, Artificial Sequence
  derived and/or modified sequence
ttaaggaagttcacctccagatgtactcagagggcctggtcttagctgccacagatttacaaacccttacagtatgaacgctgccgtccgtgccgtggtgcgcatgggtatctacgtgggggccaaggtgtacttcatctacgagggctaccagggcatggtggacggaggctcaaacatcgcagaggccgactgggagagtgtctccagcatcctgcaagtgggcgggacgatcattggcagtgcgcggtgccaggccttccgcacgcgggaaggccgcctgaaggctgcttgcaacctgctgcagcgaggcatcaccaacctgtgtgtgatcggcggggacgggagcctcaccggggccaacctcttccggaaggagtggagtgggctgctggaggagctggccaggaacggccagatcgataaggaggccgtgcagaagtacgcctacctcaacgtggtgggcatggtgggctccatcgacaatgatttctgcggcaccgacatgaccatcggcacggactccgccctgcacaggatcatcgaggtcgtcgacgccatcatgaccacggcccagagccaccagaggaccttcgttctggaggtgatgggacgacactgtgggtacctggccctggtgagtgccttggcctgcggtgcggactgggtgttccttccagaatctccaccagaggaaggctggga

SEQ ID NO: 271862 - DNA, 1140 bp, Artificial Sequence
  derived and/or modified sequence
gtttccgtgggagagatccagccgtggctgtcgacagcagctgccgactgtgcccaatagagaaggtatctgggaaagagcccagcacggggccggggagtgtgagtgtgtcctggcacaggcaggcagaaggtgtccaacgtgcaactggagagcgcagaggtggctcaagtccccttcctcgcaggagtctggaaggctactgcatagcgtttgccttagtagaaaatggaccatttttgaagcctaggtccctgcaggcctcctggctaactcggctgtcaaagccccttttctctgctttctgagctgtttccaggactgagtgggtgctccctctgtttctctgctttctgagctgtgtccggggctccctctgtttctcttccagccaccagaggaccttcgttctggaggtgatgggacgacactgtgggtacctggccctggtgagtgccttggcctgcggtgcggactgggtgttccttccagaatctccaccagaggaaggctgggaggagcagatgtgtgtcaaactctcggagaaccgtgcccggaaaaaaaggctgaatattattattgtggctgaaggagcaattgatacccaaaataaacccatcacctctgagaaaatcaaagagcttgtcgtcacgcagctgggctatgacacacgtgtgaccatcctcgggcacgtgcagagaggagggaccccttcggcattcgacaggatcttggccagccgcatgggagtggaggcagtcatcgccttgctagaggccaccccggacaccccagcttgcgtcgtgtcactgaacgggaaccacgccgtgcgcctgccgctgatggagtgcgtgcagatgactcaggatgtgcagaaggcgatggacgagaggagatttcaagatgcggttcgactccgagggaggagctttgcgggcaacctgaacacctacaagcgacttgccatcaagctgccggatgatcagatcccaaagaccaattgcaacgtagctgtcatcaacgtgggggcacccgcggctgggatgaacgcagccgtacgctcagctgtgcgcgtgggcattgccgacggccacaggatgctcgccatctatgatggctttgacggcttcgccaagggcc

SEQ ID NO: 271863 - DNA, 453 bp, Artificial Sequence
  derived and/or modified sequence
acttcatttaccagctgtattcagaagagggcaaaggcgtgtttgactgcaggaagaacgtgctgggtcacatgcagcagggtggggcaccctctccatttgatagaaactttggaaccaaaatctctgccagagctatggagtggatcactgcaaaactcaaggaggcccggggcagaggaaaaaaatttaccaccgatgattccatttgtgtgctgggaataagcaaaagaaacgttatttttcaacctgtggcagagctgaagaagcaaacggattttgagacggtttccatgcagccgccgcggtgaactcccgtctggtggacactcccccagggcctcggtgtgatggagtttcctgaatcagcgcaggcagacgtgggacacccttgtgcaccttttcattttacttctgtttttaaataaaggccctaaatgctgcttaaaataa

SEQ ID NO: 271864 - DNA, 609 bp, Artificial Sequence
  derived and/or modified sequence
atgggcggatactgtggctacctggctaatatggggggactggccgcaggagcagatgcggcatatatatttgaggagccatttgatatacgggatctgcagagcaatgtcgagcaccttacggagaagatgaaaaccaccattcagcgaggtctcgtgctgaggaatgaatcttgttcagagaactacactactgatttcatctaccagttgtactccgaagaggggaagggtgtatttgattgtcgaaagaatgtacttggtcacatgcagcagggaggggctccctcacccttcgaccggaattttggcacgaaaatctccgccagagccatggaatggataaccgccaaactgaaggaggcccgaggtaggggcaaaaaattcacaaccgatgacagcatctgtgtcctgggcatcagcaagagaaatgtcatctttcagcctgtggcagagctgaagaagcaaacggatttcgagcacagaattccaaaggagcagtggtggctcaagctgcgacctttgatgaagatcctggcaaaatacaaggcctcatacgacgtaagtgatagtgggcaacttgagcacgtgcagccctggtccgtctag

SEQ ID NO: 271865 - DNA, 633 bp, Artificial Sequence
  derived and/or modified sequence
atgaatgctgctgtgcgggctgtggtgcggatggggatctacgtgggcgctaaagtgtatttcatttatgaagggtaccaaggcatggtggatggtggttcaaatattgcagaggcggattgggagtccgtctcaagtattctgcaggttggcggtactatcatcggcagcgctaggtgccaggcattccgcacaagggagggccgactgaaggccgcatgtaatctgttacagaggggcattaccaatctctgcgtgattgggggagatggaagccttaccggtgcgaacttgttcaggaaggaatggagtgggctgctggaggaactggccaggaatggacagatcgacaaagaggccgttcagaaatatgcttacctgaacgtggtcggcatggttggctcgattgacaatgatttttgcgggacagacatgacgataggaacagatagtgcactccacaggataattgaggtggtggacgcaataatgacgactgcgcagagccatcagagaaccttcgtgctggaggtcatgggtaggcattgtggatatttggccctcgtgagtgctctggcctgtggcgcagattgggtgtttctccccgaaagtcctcctgaggaagggtggtag

SEQ ID NO: 271866 - DNA, 723 bp, Artificial Sequence
  derived and/or modified sequence
atgggcagacattgtggctacttagccctggtgtctgctctggcctgtggagccgactgggtattcctccctgaatctccaccagaagagggctgggaagagcagatgtgtgttaaactttctgagaatagggctcggaagaaacggctgaacatcatcatcgtcgcagagggggctatagacactcaaaacaagcccatcacctctgaaaagatcaaagagctagtggtgactcagctaggctatgacacccgcgttaccatactcgggcatgtgcagcgcggaggcaccccaagtgcctttgatcgtatactcgcttctcgaatgggagtagaggccgtgatcgctctcctggaggccaccccagataccccagcttgtgtcgtgtcccttaacgggaaccatgcggtccgccttccactgatggagtgtgtccaaatgacacaggacgtccagaaggcgatggatgagaggaggtttcaagacgcagtccggctgaggggcagatcatttgcaggtaatctgaacacctacaagcggcttgccataaagctccccgacgaccagattccaaaaactaactgcaatgttgccgtgataaatgtgggagcaccagcagctggcatgaatgctgccgttaggtcagccgtgagggtaggaatagcggacgggcacagaatgctcgccatctatgatggtttcgacggatttgccaaaggttag

SEQ ID NO: 271867 - DNA, 501 bp, Artificial Sequence
  derived and/or modified sequence
atgaacgcagccgtccgagcagtggttcggatggggatctacgtaggggcaaaggtgtacttcatctacgagggctaccagggaatggtggacggcggatcaaacatcgcggaagccgactgggaatccgtgagtagcattctgcaggttggaggaaccatcatcggtagtgccagatgccaggcgttcaggacacgcgagggaaggttgaaagctgcctgtaacctgctgcagcggggaattactaatctgtgtgtaatagggggagacggctccctaaccggggcaaacctgttccgaaaggaatggagcggcctcctagaggagctggctaggaacggacagatagacaaagaggctgttcagaagtatgcttatctcaatgtggtgggaatggtaggcagcattgacaatgacttttgcggtacggatatgaccataggaacggatagcgcgttacacagaatcatagaggtagtggacgccataatgaccacatag

SEQ ID NO: 271868 - DNA, 312 bp, Artificial Sequence
  derived and/or modified sequence
tgatttatttaccagctgtatagtgaagaggggaaaggcgtatttgactgccgcaagaacgttctgggccatatgcagcaagggggagccccatccccgtttgaccgcaattttgggaccaaaatctccgcaagggccatggagtggattacggctaaacttaaagaagcaaggggcagaggaaagaagtttactacagatgacagcatttgcgttttagggatctccaagaggaacgtgatctttcagccagtcgctgagcttaaaaaacagacagatttcgagacagttagcatgcagccccctcgctag

SEQ ID NO: 271869 - DNA, 609 bp, Artificial Sequence
  derived and/or modified sequence
atgggcggctactgcggctacctggccaacatgggcggcctggccgccggcgccgacgccgcctacatcttcgaggagcccttcgacatcagagacctgcagagcaacgtggagcacctgaccgagaagatgaagaccaccatccagagaggcctggtgctgagaaacgagagctgcagcgagaactacaccaccgacttcatctaccagctgtacagcgaggagggcaagggcgtgttcgactgcagaaagaacgtgctgggccacatgcagcagggcggcgcccccagccccttcgacagaaacttcggcaccaagatcagcgccagagccatggagtggatcaccgccaagctgaaggaggccagaggcagaggcaagaagttcaccaccgacgacagcatctgcgtgctgggcatcagcaagagaaacgtgatcttccagcccgtggccgagctgaagaagcagaccgacttcgagcacagaatccccaaggagcagtggtggctgaagctgagacccctgatgaagatcctggccaagtacaaggccagctacgacgtgagcgacagcggccagctggagcacgtgcagccctggagcgtgtag

SEQ ID NO: 271870 - DNA, 633 bp, Artificial Sequence
  derived and/or modified sequence
atgaacgccgccgtgagagccgtggtgagaatgggcatctacgtgggcgccaaggtgtacttcatctacgagggctaccagggcatggtggacggcggcagcaacatcgccgaggccgactgggagagcgtgagcagcatcctgcaggtgggcggcaccatcatcggcagcgccagatgccaggccttcagaaccagagagggcagactgaaggccgcctgcaacctgctgcagagaggcatcaccaacctgtgcgtgatcggcggcgacggcagcctgaccggcgccaacctgttcagaaaggagtggagcggcctgctggaggagctggccagaaacggccagatcgacaaggaggccgtgcagaagtacgcctacctgaacgtggtgggcatggtgggcagcatcgacaacgacttctgcggcaccgacatgaccatcggcaccgacagcgccctgcacagaatcatcgaggtggtggacgccatcatgaccaccgcccagagccaccagagaaccttcgtgctggaggtgatgggcagacactgcggctacctggccctggtgagcgccctggcctgcggcgccgactgggtgttcctgcccgagagcccccccgaggagggctggtag

SEQ ID NO: 271871 - DNA, 723 bp, Artificial Sequence
  derived and/or modified sequence
atgggcagacactgcggctacctggccctggtgagcgccctggcctgcggcgccgactgggtgttcctgcccgagagcccccccgaggagggctgggaggagcagatgtgcgtgaagctgagcgagaacagagccagaaagaagagactgaacatcatcatcgtggccgagggcgccatcgacacccagaacaagcccatcaccagcgagaagatcaaggagctggtggtgacccagctgggctacgacaccagagtgaccatcctgggccacgtgcagagaggcggcacccccagcgccttcgacagaatcctggccagcagaatgggcgtggaggccgtgatcgccctgctggaggccacccccgacacccccgcctgcgtggtgagcctgaacggcaaccacgccgtgagactgcccctgatggagtgcgtgcagatgacccaggacgtgcagaaggccatggacgagagaagattccaggacgccgtgagactgagaggcagaagcttcgccggcaacctgaacacctacaagagactggccatcaagctgcccgacgaccagatccccaagaccaactgcaacgtggccgtgatcaacgtgggcgcccccgccgccggcatgaacgccgccgtgagaagcgccgtgagagtgggcatcgccgacggccacagaatgctggccatctacgacggcttcgacggcttcgccaagggctag

SEQ ID NO: 271872 - DNA, 501 bp, Artificial Sequence
  derived and/or modified sequence
atgaacgccgccgtgagagccgtggtgagaatgggcatctacgtgggcgccaaggtgtacttcatctacgagggctaccagggcatggtggacggcggcagcaacatcgccgaggccgactgggagagcgtgagcagcatcctgcaggtgggcggcaccatcatcggcagcgccagatgccaggccttcagaaccagagagggcagactgaaggccgcctgcaacctgctgcagagaggcatcaccaacctgtgcgtgatcggcggcgacggcagcctgaccggcgccaacctgttcagaaaggagtggagcggcctgctggaggagctggccagaaacggccagatcgacaaggaggccgtgcagaagtacgcctacctgaacgtggtgggcatggtgggcagcatcgacaacgacttctgcggcaccgacatgaccatcggcaccgacagcgccctgcacagaatcatcgaggtggtggacgccatcatgaccacctag

SEQ ID NO: 271873 - DNA, 312 bp, Artificial Sequence
  derived and/or modified sequence
tgattcatctaccagctgtacagcgaggagggcaagggcgtgttcgactgcagaaagaacgtgctgggccacatgcagcagggcggcgcccccagccccttcgacagaaacttcggcaccaagatcagcgccagagccatggagtggatcaccgccaagctgaaggaggccagaggcagaggcaagaagttcaccaccgacgacagcatctgcgtgctgggcatcagcaagagaaacgtgatcttccagcccgtggccgagctgaagaagcagaccgacttcgagaccgtgagcatgcagccccccagatag

SEQ ID NO: 271874 - DNA, 6407 bp, Artificial Sequence
  derived and/or modified sequence
atgacggagggccgccgatgtcaagtacatcttcttgatgacaggaagctggaactcctagtacagcccaagctgttggccaaggagcttcttgaccttgtggcttctcacttcaatctgaaggaaaaggagtactttggaatagcattcacagatgaaacgggacacttaaactggcttcagctagatcgaagagtattggaacatgacttccctaaaaagtcaggacccgtggttttatacttttgtgtcaggttctatatagaaagcatttcatacctgaaggataatgctaccattgagcttttctttctgaacgcgaagtcctgcatctacaaggagcttattgacgttgacagcgaagtggtgtttgaattagcttcctatattttacaggaggcaaagggagatttttctagcaatgaagttgtgaggagtgacttgaagaagctgccagcccttcccacccaagccctgaaggagcacccttccctggcctactgtgaagacagagtcattgagcactacaagaaactgaacggtcagacaagaggtcaagcaatcgtaaactacatgagcatcgtggagtctctcccaacctacggggttcactattatgcagtgaaggacaagcagggcataccatggtggctgggcctgagctacaaagggatcttccagtatgactaccatgataaagtgaagccaagaaagatattccaatggagacagttggaaaacctgtacttcagagaaaagaagttttccgtggaagttcatgacccacgcagggcttcagtgacaaggaggacgtttgggcacagcggcattgcagtgcacacgtggtatgcatgtccggcattgatcaagtccatctgggctatggccataagccaacaccagttctatctggacagaaagcagagtaagtccaaaatccatgcagcacgcagcctgagtgagatcgccatcgacctgaccgagacggggacgctgaagacctcgaagctggccaacatgggtagcaaggggaagatcatcagcggcagcagcggcagcctgctgtcttcaggttctcaggaatcagatagctcgcagtcggccaagaaggacatgctggctgccttgaagtccaggcaggaagctctggaggaaaccctgcgtcagaggctggaggaactgaagaagctgtgtctccgagaagctgagctcacgggcaagctgccagtagaatatcccctggatccaggggaggaaccacccattgttcggagaagaataggaacagccttcaaactggatgaacagaaaatcctgcccaaaggagaggaagctgagctggaacgcctggaacgagagtttgccattcagtcccagattacggaggccgcccgccgcctagccagtgaccccaacgtcagcaaaaaactgaagaaacaaaggaaaacctcgtatctgaatgcactgaagaaactgcaggagattgaaaatgcaatcaatgagaaccgcatcaagtctgggaagaaacccacccagagggcttcgctgatcatagacgatggaaacattgccagtgaagacagctccctctcagatgcccttgttcttgaggatgaagactctcaggttaccagcacaatatcccccctacattctcctcacaagggactccctcctcggccaccgtcgcacaacaggcctcctcctccccagtccctggagggactccgacagatgcactatcaccgcaacgactatgacaagtcacccatcaagcccaaaatgtggagtgagtcctctttagatgaaccctatgagaaggtcaagaagcgctcctctcacagccattccagcagccacaagcgcttccccagcacaggaagctgtgcggaagccggcggaggaagcaactccttgcagaacagccccatccgcggcctcccgcactggaactcccagtccagcatgccgtccacgccagacctgcgggtccggagtccccactacgtccattccacgaggtcggtggacatcagccccacccgactgcacagcctcgcactgcactttaggcaccggagctccagcctggagtcccagggcaagctcctgggctcggaaaacgacaccgggagccccgacttctacaccccgcggactcgtagcagcaacggctcagaccccatggacgactgctcgtcgtgcaccagccactcgagctcggagcactactacccggcgcagatgaacgccaactactccacgctggccgaggactcgccgtccaaggcgcgccagaggcagaggcagcggcagcgggcggcgggcgcactgggctcagccagctcgggcagcatgcccaacctggcggcgcgcgggggtgcggggggcgcggggggcgcggggggcggtgtgtacctgcacagccagagccagcccagctcgcagtaccgcatcaaggagtacccgctgtacatcgagggcggcgccacgcccgtggtggtgcgcagcctggagagcgaccaggagggccactacagcgtcaaggctcagttcaagacgtccaactcctacacggcgggcggcctgttcaaggagagctggcgcggcggcggcggcgacgagggcgacacgggccgcctgacgccgtcgcgatcgcagatcctgcggactccgtcgctgggccgcgagggcgcccacgacaagggcgcgggccgtgccgccgtctcagacgagctgcgccagtggtaccagcgttccaccgcctcgcacaaggagcacagccgcctgtcgcacaccagctccacctcctcggacagcggctcgcagtacagcacctcctcccagagcaccttcgtggcgcacagcagggtcaccaggatgccccagatgtgcaaggccacgtcagctgccttacctcaaagccagagaagctcgacaccgtcaagtgaaattggagccacccccccaagcagcccccaccacatcctaacctggcagactggagaagcaacagaaaactcacccattctggatgggtctgagtctccacctcaccaaagtactgatgaatagaggagctacaatgatagctgtttcctggattcctccctctatccagaactagctgatgtccagtggtacgggcaggaaaaagccaagcccgggaccctcgtgtgagccagcccggcctaatctgaccgcctcaacgccattctgagatcacctcactgcctctcatttgccttacccagacgcaccgtcaccctgcaccagctttggccctcagcactttttttctcctgtctccgcattccctcccccttgaaaacctgactgaggagacattctggaaggttccggtcccactgtgtgtcccctggcgctcttgcccatagagagccagacaccaatcctcaatggcaccttggtggcttccctctgccatgacagcccctaggccaggaaccatcaggggggccagccggcatccaattcctgcggataagtagcgttgggagagaacgggaaaggggacttgagttacagggtgacccagaaagacgattcagctgtgtccagcctgccacccatacgtaggccaaccaagcacttcatgaagaggaggcctcgtggcatattcagtttacacctgaaatattccttgatgggacagcttgtggggatggctatgggggaaggggaggttgagaaaggaagttctcgacaccagaaatgcatcggaggaccacaatcagttctatgctgccaaagattaaaaataaataaaaacataaaaaattaagaggggccaagaggaagacattctttctgcaaggaaatttcttttaaattctgaactgctactacacacaagtgaaagtcaaccctatgtaaactggtgtcctctctctagccctctcccttactggcccacttctctctccgtagagagcctgaaaaactgccccaatgccacggtaaaggcgaggaagtcttggctggcgttgctgactcacagtcgccatccatctggacacaaagagagacctgtgggagtcgtagagggtactgttagccccggtccatgcagggggttcagccgagcccaagactcaaagctgctttcctttcaggatttgtagtaacgtaaggtgataatggccaaaagtggttctctctcattaaaccaaccagtaaaagcgtatcctatttttttgcacaaggtgtttcattttcgtttttatgggaaaccaagggaaaagcacattgcgatccattcagtgtttaactgtcgtggctcattttctgttcgttagcacttgtgtgacaaaagagctcagatccgacttctcctatgtgtcacttattccaagaacccaactatgcccttaggtagaaagatttgactcgtgtgtctactagccaacaggcagagcagggttgaaaaaaatatcagctcccaaagggcccatgtgtctacatcatcagttactgtcatgcaccacatttgtgtgcagataccaaaagaggaggaaagaagaaaaaaattaatgtgtgggagctgcacgtttacatgttttgagctatgcttcaaacacaactggaaagccatcaatcttcaaaggcctcaaaaatacttttatagtaacaagtgcacgactttagttgggttattcaagatggcacaaaaaggtttccgcagaggtggtatgctgtgcttttggcgcaagtggtggggggatggggtgggggtggaatttttttctcactctaatgacttcctattggaaaggcattgacagccagggacaggagccagggtgggggtagttttgtgggaaagcagaactgaagttagcttaagcataaaaacaaagaaaaatcttcgcttttcatgtatgtggaatccaagaataaccataggctctaccagaccagaagggtaaggatggacactaaaatgaaacaaataccaaggtattccttctgctgcagcctggagaccaccgagagtcgagctggggcacacacacacctggccgggacccggcagggacaaggcgggccgtggcctcctccaccaagtctctctagacaattcagggcctgctttccccagctccatgcatggctggactggtgattccagggtgcagaagggattcatattcccagaacgctttaagtgtacacctgcaggataaagagataccggttacattattaaatgattctagggattcactgggggatatttttgttgcttttactttcatggttagagctacaaagaacagtgattttttttttttctcccttccccattcagaaacattatacattgggccatttttctttctcccaaagaagattcatggatagtcagactgaactgtgtgcaacaggaaaagtcaaaagggaaaaggtagctgatgaggttacatggttacatgttctacatcatgcatagtagcttgaaatctagtctggagaaaactggatcaagattctagcccactggagttgcaaggaatgagaggcaaaaattctaaagatttgggttatattttcaacttgggggacagagagaaatggagagcaggaattacagttccaacaaacatcatgatagtctggtagtcaagacagagattaagtaaaacaggttttactgtttagctgagttcagttaatacaaaatgtacataaaacgttagtcctttgagactgacatgattaatgatcagtgtggtgggaaatgatgtagttattgtacacaagcacttgcaaactctttatccctatttctttaaaacaaaataaggtgaaatacgaagtccttggtctgatataaagcccctattggattcttcggatgcgtaaaagaaattgcctgtttcagccagaagactggtgaaaacacatacatcagactatgttgtgagccaggttgattttttattttattatatgcaggtgagtgttgaaactgttaaaattccaatttgttttcattcagtattagtttagttctaaatatagcaaaccccatccaggtgctatcagatgaccagttactgcttagttaactaggtgtaaagttttacatatacattaatgtcaatagtttattacaagttgtgtaaaatggactctagtttaataatgggggaaaaaagattaggttgctcctgaaactgactgtagagcatgtaaaatgattttactggattctgttcaactgtaatcaatgaaaaagatgtacgttgtagacaaagttgcagaattaaaaaaagaaatctgcttttaatttattctttttgtattaagaatttgtatagtacctttacattttgcaaaacagtgttgtcaacacttattaaagcattttcaaaatgaaaaga

SEQ ID NO: 271875 - protein, 706 aa, Artificial Sequence
  derived and/or modified sequence
MSPFLRIGLSNFDCGSCQSCQGEAVNPYCAVLVKEYVESENGQMYIQKKPTMYPPWDSTFDAHINKGRVMQIIVKGKNVDLISETTVELYSLAERCRKNNGKTEIWLELKPQGRMLMNARYFLEMSDTKDMNEFETEGFFALHQRRGAIKQAKVHHVKCHEFTATFFPQPTFCSVCHEFVWGLNKQGYQCRQCNAAIHKKCIDKVIAKCTGSAINSRETMFHKERFKIDMPHRFKVYNYKSPTFCEHCGTLLWGLARQGLKCDACGMNVHHRCQTKVANLCGINQKLMAEALAMIESTQQARCLRDTEQIFREGPVEIGLPCSIKNEARPPCLPTPGKREPQGISWESPLDEVDKMCHLPEPELNKERPSLQIKLKIEDFILHKMLGKGSFGKVFLAEFKKTNQFFAIKALKKDVVLMDDDVECTMVEKRVLSLAWEHPFLTHMFCTFQTKENLFFVMEYLNGGDLMYHIQSCHKFDLSRATFYAAEIILGLQFLHSKGIVYRDLKLDNILLDKDGHIKIADFGMCKENMLGDAKTNTFCGTPDYIAPEILLGQKYNHSVDWWSFGVLLYEMLIGQSPFHGQDEEELFHSIRMDNPFYPRWLEKEAKDLLVKLFVREPEKRLGVRGDIRQHPLFREINWEELERKEIDPPFRPKVKSPFDCSNFDKEFLNEKPRLSFADRALINSMDQNMFRNFSFMNPGMERLIS

SEQ ID NO: 271876 - protein, 581 aa, Artificial Sequence
  derived and/or modified sequence
MDTKDMNEFETEGFFALHQRRGAIKQAKVHHVKCHEFTATFFPQPTFCSVCHEFVWGLNKQGYQCRQCNAAIHKKCIDKVIAKCTGSAINSRETMFHKERFKIDMPHRFKVYNYKSPTFCEHCGTLLWGLARQGLKCDACGMNVHHRCQTKVANLCGINQKLMAEALAMIESTQQARCLRDTEQIFREGPVEIGLPCSIKNEARPPCLPTPGKREPQGISWESPLDEVDKMCHLPEPELNKERPSLQIKLKIEDFILHKMLGKGSFGKVFLAEFKKTNQFFAIKALKKDVVLMDDDVECTMVEKRVLSLAWEHPFLTHMFCTFQTKENLFFVMEYLNGGDLMYHIQSCHKFDLSRATFYAAEIILGLQFLHSKGIVYRDLKLDNILLDKDGHIKIADFGMCKENMLGDAKTNTFCGTPDYIAPEILLGQKYNHSVDWWSFGVLLYEMLIGQSPFHGQDEEELFHSIRMDNPFYPRWLEKEAKDLLVKLFVREPEKRLGVRGDIRQHPLFREINWEELERKEIDPPFRPKVKSPFDCSNFDKEFLNEKPRLSFADRALINSMDQNMFRNFSFMNPGMERLIS

SEQ ID NO: 271877 - DNA, 3285 bp, Artificial Sequence
  derived and/or modified sequence
ccgccagccccgccagtccccgcgcagtccccgcgcagtccccgcgcagtcccagcgccaccgggcagcagcggcgccgtgctcgctccagggcgcaaccatgtcgccatttcttcggattggcttgtccaactttgactgcgggtcctgccagtcttgtcagggcgaggctgttaacccttactgtgctgtgctcgtcaaagagtatgtcgaatcagagaacgggcagatgtatatccagaaaaagcctaccatgtacccaccctgggacagcacttttgatgcccatatcaacaagggaagagtcatgcagatcattgtgaaaggcaaaaacgtggacctcatctctgaaaccaccgtggagctctactcgctggctgagaggtgcaggaagaacaacgggaagacagaaatatggttagagctgaaacctcaaggccgaatgctaatgaatgcaagatactttctggaaatgagtgacacaaaggacatgaatgaatttgagacggaaggcttctttgctttgcatcagcgccggggtgccatcaagcaggcaaaggtccaccacgtcaagtgccacgagttcactgccaccttcttcccacagcccacattttgctctgtctgccacgagtttgtctggggcctgaacaaacagggctaccagtgccgacaatgcaatgcagcaattcacaagaagtgtattgataaagttatagcaaagtgcacaggatcagctatcaatagccgagaaaccatgttccacaaggagagattcaaaattgacatgccacacagatttaaagtctacaattacaagagcccgaccttctgtgaacactgtgggaccctgctgtggggactggcacggcaaggactcaagtgtgatgcatgtggcatgaatgtgcatcatagatgccagacaaaggtggccaacctttgtggcataaaccagaagctaatggctgaagcgctggccatgattgagagcactcaacaggctcgctgcttaagagatactgaacagatcttcagagaaggtccggttgaaattggtctcccatgctccatcaaaaatgaagcaaggccgccatgtttaccgacaccgggaaaaagagagcctcagggcatttcctgggagtctccgttggatgaggtggataaaatgtgccatcttccagaacctgaactgaacaaagaaagaccatctctgcagattaaactaaaaattgaggattttatcttgcacaaaatgttggggaaaggaagttttggcaaggtcttcctggcagaattcaagaaaaccaatcaatttttcgcaataaaggccttaaagaaagatgtggtcttgatggacgatgatgttgagtgcacgatggtagagaagagagttctttccttggcctgggagcatccgtttctgacgcacatgttttgtacattccagaccaaggaaaacctcttttttgtgatggagtacctcaacggaggggacttaatgtaccacatccaaagctgccacaagttcgacctttccagagcgacgttttatgctgctgaaatcattcttggtctgcagttccttcattccaaaggaatagtctacagggacctgaagctagataacatcctgttagacaaagatggacatatcaagatcgcggattttggaatgtgcaaggagaacatgttaggagatgccaagacgaataccttctgtgggacacctgactacatcgccccagagatcttgctgggtcagaaatacaaccactctgtggactggtggtccttcggggttctcctttatgaaatgctgattggtcagtcgcctttccacgggcaggatgaggaggagctcttccactccatccgcatggacaatcccttttacccacggtggctggagaaggaagcaaaggaccttctggtgaagctcttcgtgcgagaacctgagaagaggctgggcgtgaggggagacatccgccagcaccctttgtttcgggagatcaactgggaggaacttgaacggaaggagattgacccaccgttccggccgaaagtgaaatcaccatttgactgcagcaatttcgacaaagaattcttaaacgagaagccccggctgtcatttgccgacagagcactgatcaacagcatggaccagaatatgttcaggaacttttccttcatgaaccccgggatggagcggctgatatcctgaatcttgcccctccagagacaggaaagaatttgccttctccctgggaactggttcaagagacactgcttgggttcctttttcaacttggaaaaagaaagaaacactcaacaataaagactgagacccgttcgcccccatgtgacttttatctgtagcagaaaccaagtctacttcactaatgacgatgccgtgtgtctcgtctcctgacatgtctcacagacgctcctgaagttaggtcattactaaccatagttatttacttgaaagatgggtctccgcacttggaaaggtttcaagacttgatactgcaataaattatggctcttcacctgggcgccaactgctgatcaatgaaatgcttgttgaatcaggggcaaacggagtacagacgtctcaagactgaaacggccccattgcctggtctagtagcggatctcactcagccgcagacaagtaatcactaacccgttttattctattcctatctgtggatgtgtaaatggctggggggccagccctggataggtttttatgggaattctttacaataaacatagcttgtaacttgagatctacaaatccattcatcctgattgggcatgaaatccatggtcaagaggacaagtggaaagtgagagggaaggtttgctagacaccttcgcttgttatcttgtcaagatagaaaagatagtatcatttcacccttgccagtaaaaacctttccatccacccattctcagcagactccagtattggcacagtcactcactgccattctcacactataacaagaaaagaaatgaagtgcataagtctcctgggaaaagaaccttaaccccttctcgtgccatgactggtgatttcatgactcataagcccctccgtaggcatcattcaagatcaatggcccatgcatgctgtttgcagcagtcaattgagttgaattagaattccaaccatacattttaaaggtatttgtgctgtgtgtatattttgataaaatgttgtgacttcatggcaaacaggtggatgtgtaaaaatggaataaaaaaaaaaaaagagtc

SEQ ID NO: 271878 - DNA, 7648 bp, Artificial Sequence
  derived and/or modified sequence
agagcctcggtggtttgcagcagtggaaccaggcaggcccagttgtgggtaggagaggccgtcacctgttgaggcctcccccccacacccccgcatcgccctgccctggcagagcccagcccccagtccccggagagcgcgcctgaggacggacggacggacggacggacagacctagggacggagggccaggggcaggggagatccaagaggccccgcgctggaatgcagttttctcgggcgagggagactttgcaccggagtggaaaatagtttggggtggggtttcgcaccgtcccctcctccccagccccgggccccctcccaggcgctttctgggagcttttagaactgcgctctgaagtttccagagagcgaggagcttttgcggcaggcagagacaatggaagaaaatgaaagccagaaatgtgagccgtgccttccttactcagcagacagaagacagatgcaggaacaaggcaaaggcaatctgcatgtaacatcaccagaagatgcagaatgccgcagaaccaaggaacgcctttctaatggaaacagtcgtggttcagtttccaagtcttcccgcaatatcccaaggagacacaccctaggggggccccgaagttccaaggaaatactgggaatgcaaacatctgagatggatcggaagagagaagcgttcctagaacatctgaagcagaagtacccccaccacgcctctgcaatcatgggtcaccaagagaggctgagagaccagacaaggagccccaaactgtctcacagtcctcaaccacccagtctgggtgacccggtcgagcatttatcagagacgtccgctgattctttggaagccatgtctgagggggatgctccaacccctttttccagaggcagccggactcgtgcgagccttcctgtggtgaggtcaaccaaccagacgaaagaaagatctctgggggttctctatctccagtatggagatgaaaccaagcagctcaggatgccgaatgaaatcacaagtgcagacacaatccgtgctctcttcgtaagtgcctttccacagcagctcaccatgaaaatgctggaatcgcccagtgtcgccatttacatcaaagatgaaagcagaaatgtctattatgaattaaatgatgtaaggaacattcaagacagatcactcctcaaagtgtacaacaaggatcctgcacatgcgtttaatcacacaccaaaaactatgaatggagacatgaggatgcagagagaacttgtttatgcaagaggagatggccctggggcccctcgccccggatctactgctcatccaccccatgcgattccaaattccccaccgtctactccagtgccccattccatgcccccctccccgtccagaattccttatgggggcacccgctccatggttgttcctggcaatgccaccatccccagggacagaatctccagcctgccagtctccagacccatctctccaagcccaagcgccattttagaaagaagagatgtcaagcctgatgaagacatgagtggcaaaaacattgcaatgtacagaaatgagggtttctatgctgatccttacctttatcacgagggacggatgagcatagcctcatcccatggtggacacccactggatgtccccgaccacatcattgcatatcaccgcaccgccatccggtcagcgagtgcttattgtaacccctcaatgcaagcggaaatgcatatggaacaatcactgtacagacagaaatcaaggaaatatccggatagccatttgcctacactgggctccaaaacaccccctgcctctcctcacagagtcagtgacctgaggatgatagacatgcacgctcactataatgcccacggcccccctcacaccatgcagccagaccgggcctctccgagccgccaggcctttaaaaaggagccaggcaccttggtgtatatagaaaagccacggagcgctgcaggattatccagccttgtagacctcggccctcctctaatggagaagcaagtttttgcctacagcacggcgacaatacccaaagacagagagaccagcgagaaaatgatgaaaaccacagccaacaggaaccacacagatagtgcaggaacgccccatgtgtctggtgggaagatgctcagtgctctggagtccacggtgcctcccagccagcctccacctgtgggcacctcagccatccacatgagcctgcttgagatgaggcggagcgtggcggaactcaggctccagctccagcagatgcggcagctccagctgcagaaccaggagttgctgagggcaatgatgaagaaggccgagctggaaatcagtggcaaagtgatggaaacaatgaagagactggaggatcccgtgcagcgacagcgcgtcctagtggagcaagagagacaaaaatatcttcatgaggaagagaagatcgtcaagaagttgtgcgagttggaagactttgttgaagacttgaagaaggactccacggcagccagccgattggttactctgaaagacgtggaagacggggctttcctcctgcgtcaagtgggagaggctgtagctaccctgaaaggagaatttccaaccttacaaaacaagatgcgagccatcctgcgcatagaagtggaggccgtgcggtttctgaaggaggagccacacaagctggacagtctcctgaagcgtgtgcgcagcatgacagacgtcctgaccatgctgcggagacatgtcactgatgggctcctgaaaggcacggacgcagcccaagccgcacagtacatggctatggaaaaggccacagccgcagaagtcctgaagagtcaggaggaggcagcccacacctccggccagcccttccacagcacaggtgcccctggcgatgcgaagtcggaagtggtgcctttgtccggcatgatggttcgccacgcgcagagctcccctgtggtcatccagccctcccagcactccgtggccctgctgaaccctgctcagaacttgcctcacgtggccagctccccagccgtcccccaggaagcaacctccactctgcagatgtcgcaggctccgcagtccccacagatacccatgaatgggtctgccatgcagagcttgttcattgaagaaatccacagtgtgagtgccaagaacagggcagtgtctatcgagaaagcagaaaagaaatgggaggaaaaaaggcaaaatctggatcactataatgggaaagagtttgagaagctcctagaagaagctcaggccaatatcatgaagtcaataccaaatctggagatgccgccagccacaggcccactgccaaggggagatgccccagtggacaaggtggaactttcagaagattctccaaattcggaacaggacttggaaaagctggggggaaagtcgccccctcctcctccgccacctcctcgtcgaagctacctgccaggatcgggactcaccaccacgaggtcaggcgatgtggtctacaccggcagaaaggagaacatcaccgctaaggcaagcagtgaagatgctggaccaagcccacagaccagagctacaaaatatccagcagaggagcctgcttcagcctggaccccatccccaccgcctgtcaccacctcctcctcaaaggatgaggaggaagaagaagaagaaggagacaaaataatggcagaactccaggcattccagaagtgttcctttatggatgtaaattcaaacagtcatgctgagccatcccgggctgacagtcacgttaaagacactaggtcgggcgccacagtgccacccaaggagaagaagaatttggaatttttccatgaagatgtacggaaatctgatgttgaatatgaaaatggcccccaaatggaattccaaaaggttaccacaggggctgtaagacctagtgaccctcctaagtgggaaagaggaatggagaatagtatttctgatgcatcaagaacatcagaatataaaactgagatcataatgaaggaaaattccatatccaatatgagtttactcagagacagtagaaactattcccaggaaactgtgcctaaggccagtttcggtttctctggcattagtccattagaagatgaaataaacaaagggtctaaaatctcaggcctgcaatactctatacctgacaccgagaaccagacgctgaattacggaaagacaaaggagatggaaaagcaaaatacggataagtgtcacgtttcctctcacactagactaacagaatcaagcgtgcatgattttaaaacagaagatcaagaggttatcacgacagattttggccaagttgttctaagacccaaggaggcaaggcatgctaacgtgaaccctaatgaggatggagaatcaagttcaagttctcccactgaagaaaatgcagccactgacaatattgccttcatgattaccgaaaccactgtccaggttctttccagtggggaggtgcatgatattgttagccaaaagggagaagacatacagacggttaatatcgatgccagaaaagagatgaccccccgacaagaagggactgacaatgaggatccagtcgtgtgcctggacaagaaaccagtgatcatcattttcgatgagcccatggacatccggtctgcctataagagactttcaactatctttgaggaatgtgatgaggaattagagagaatgatgatggaggaaaagatagaggaggaggaagaggaggaaaatggggattctgtagtccagaataataacacttcccagatgtctcataagaaggtggccccaggcaatcttagaaccggacaacaggtggaaacaaagtcacagccacactccctggccacagagaccagaaacccaggaggacaggaaatgaacagaacggagctgaacaagttcagccacgtggattctccaaattcggaatgcaagggtgaggacgcgaccgatgaccagtttgaaagccccaagaaaaagtttaaattcaaattccctaagaagcaactcgccgctctcactcaagccattcgcaccggaactaaaacagggaagaagactttgcaagtggtagtctatgaagaagaggaagaggatggcaccctgaaacagcacaaagaagccaagcgcttcgaaatcgctaggtctcaacctgaagacacccctgaaaacacagtgaggaggcaagagcagcccagcatcgagagtacatctccgatttcaagaactgatgaaattagaaaaaacacctacagaacattggatagcctggagcagaccattaaacagctcgaaaatacaatcagtgaaatgagtcccaaagccctagttgatacctcatgttcttccaacagagattctgttgcaagttcatcccacatagcccaagaggcctctccccgacccttgctagttccggatgaaggtcccactgccctagagccccctacgtcgataccttcagcttcacgtaagggctccagcggggccccacagacgagcaggatgcctgtccccatgagtgccaagaacagacccggaaccctggacaaacccggcaagcagtccaaactgcaggatccccgccaatatcgtcaggctaatggaagtgctaagaaatctggtggggactttaagcctacttccccctccttacctgcttctaagattccagccctttctcccagctctgggaaaagcagttctctgccctcttctagtggtgacagctctaacctccctaatccacctgctactaaaccatcgattgcttctaaccctctcagcccccaaacaggaccacctgctcactctgcctccctcatcccttctgtctctaatggctctttgaagtttcagagcctcactcatacaggtaaaggtcaccatctttcattctcaccgcagagtcaaaatggccgagcaccccctcctttgtcattttcctcctcccctccttctcctgcctcctccgtctcactgaatcaaggtgccaagggcaccaggaccatccatactcccagcctcaccagctacaaggcacagaatggaagttcaagcaaagccaccccatccacagcaaaagaaacctcttaaaggtcaaatcctattaggcacaagtcggagttacatttaaaaaaaattaacagtctacaacaactgttttcacaagagaatgtaacatattgctgtatcgtttgaggcttaatgctaaatatgtgctaaatactggattaatagatttcagtaaagctcgttcgttttgtttggttttctttttacctagttgctatagtgtctacagtctatactcaatacctataaaatgcagtaagcatgtgttacagaaagaggttctggtgggagagaaaggtgcgtgtgagacaggagaattgtcttaagcatataaaacatgtatgattccagaattttagtatgttttgtataaaactatttttcattacggagactagaagtgaacagagaattacacaagtgtgactatacaaattgtaaaacagatactataatatttccttttattttagtgttatttagctttattacagatttctatttttgtcaaaacttcatggttcctttcaagatcttttttgccaaaacattttgatactatagcattgtacatttgaaagtagtgttctagactataaaaccaatgaacttctacatgagccctacagacaggcatgtgtagaaggcaatttatcaaacctattgcactgccatgaaaagtgtgtataataatttgctagcccaagcaagctagttttctttgcttgcttcttttctttcttttttccttccttttttttttttttttcttttttaacatgttgagattctctagttgttttctttggcgtatctaaccccttcttttgttttctgagacctggtaacccacgctcttgcattgtggattttaaaatgtatactctgtacggttctgtaaaccgaaaaacttttgtaaatatataaatatacatagacataaaaatactgtatgtgacagcacatagagtagttttcccacaccaaagttaatttttatgcatgctttaaaagtatatatcgggaccggcagaaatggaagtatccatacatttttaaaaagcaacaagtttgcacagctagagtgtttttgtaaataaatgtatttgtataacacagtcatgtaatatacagaactataagcagagactttgcaaaactaaataaagggctgcatgcttattattttttgtaccttgtcactataactacttcctagtcaaagaacgaaatgtaactgttaccgagttaaatgtttttccgctttgagggatgtaaccacatccactcagaggacactacttttctgaaagctctggggtgactaatgatgagttcctaataaattaattgcaagtgtggtgccttggatgtggcctgttggctcgctttcttctctgtggcttatcaaggtgtagatgacagaaagcaaacctggatacagagtttccaccctcagttcctggaggggctcttattattttctctctttttaaaaaacttccagtagaagtaaagtggaaataaaatgtctttatc

SEQ ID NO: 271879 - DNA, 4386 bp, Artificial Sequence
  derived and/or modified sequence
atgcagagagagctggtgtacgccagaggcgacggccccggcgcccccagacccggcagcaccgcccaccccccccacgccatccccaacagcccccccagcacccccgtgccccacagcatgccccccagccccagcagaatcccctacggcggcaccagaagcatggtggtgcccggcaacgccaccatccccagagacagaatcagcagcctgcccgtgagcagacccatcagccccagccccagcgccatcctggagagaagagacgtgaagcccgacgaggacatgagcggcaagaacatcgccatgtacagaaacgagggcttctacgccgacccctacctgtaccacgagggcagaatgagcatcgccagcagccacggcggccaccccctggacgtgcccgaccacatcatcgcctaccacagaaccgccatcagaagcgccagcgcctactgcaaccccagcatgcaggccgagatgcacatggagcagagcctgtacagacagaagagcagaaagtaccccgacagccacctgcccaccctgggcagcaagaccccccccgccagcccccacagagtgagcgacctgagaatgatcgacatgcacgcccactacaacgcccacggccccccccacaccatgcagcccgacagagccagccccagcagacaggccttcaagaaggagcccggcaccctggtgtacatcgagaagcccagaagcgccgccggcctgagcagcctggtggacctgggcccccccctgatggagaagcaggtgttcgcctacagcaccgccaccatccccaaggacagagagaccagcgagaagatgatgaagaccaccgccaacagaaaccacaccgacagcgccggcaccccccacgtgagcggcggcaagatgctgagcgccctggagagcaccgtgccccccagccagcccccccccgtgggcaccagcgccatccacatgagcctgctggagatgagaagaagcgtggccgagctgagactgcagctgcagcagatgagacagctgcagctgcagaaccaggagctgctgagagccatgatgaagaaggccgagctggagatcagcggcaaggtgatggagaccatgaagagactggaggaccccgtgcagagacagagagtgctggtggagcaggagagacagaagtacctgcacgaggaggagaagatcgtgaagaagctgtgcgagctggaggacttcgtggaggacctgaagaaggacagcaccgccgccagcagactggtgaccctgaaggacgtggaggacggcgccttcctgctgagacaggtgggcgaggccgtggccaccctgaagggcgagttccccaccctgcagaacaagatgagagccatcctgagaatcgaggtggaggccgtgagattcctgaaggaggagccccacaagctggacagcctgctgaagagagtgagaagcatgaccgacgtgctgaccatgctgagaagacacgtgaccgacggcctgctgaagggcaccgacgccgcccaggccgcccagtacatggccatggagaaggccaccgccgccgaggtgctgaagagccaggaggaggccgcccacaccagcggccagcccttccacagcaccggcgcccccggcgacgccaagagcgaggtggtgcccctgagcggcatgatggtgagacacgcccagagcagccccgtggtgatccagcccagccagcacagcgtggccctgctgaaccccgcccagaacctgccccacgtggccagcagccccgccgtgccccaggaggccaccagcaccctgcagatgagccaggccccccagagcccccagatccccatgaacggcagcgccatgcagagcctgttcatcgaggagatccacagcgtgagcgccaagaacagagccgtgagcatcgagaaggccgagaagaagtgggaggagaagagacagaacctggaccactacaacggcaaggagttcgagaagctgctggaggaggcccaggccaacatcatgaagagcatccccaacctggagatgccccccgccaccggccccctgcccagaggcgacgcccccgtggacaaggtggagctgagcgaggacagccccaacagcgagcaggacctggagaagctgggcggcaagagcccccccccccccccccccccccccagaagaagctacctgcccggcagcggcctgaccaccaccagaagcggcgacgtggtgtacaccggcagaaaggagaacatcaccgccaaggccagcagcgaggacgccggccccagcccccagaccagagccaccaagtaccccgccgaggagcccgccagcgcctggacccccagccccccccccgtgaccaccagcagcagcaaggacgaggaggaggaggaggaggagggcgacaagatcatggccgagctgcaggccttccagaagtgcagcttcatggacgtgaacagcaacagccacgccgagcccagcagagccgacagccacgtgaaggacaccagaagcggcgccaccgtgccccccaaggagaagaagaacctggagttcttccacgaggacgtgagaaagagcgacgtggagtacgagaacggcccccagatggagttccagaaggtgaccaccggcgccgtgagacccagcgacccccccaagtgggagagaggcatggagaacagcatcagcgacgccagcagaaccagcgagtacaagaccgagatcatcatgaaggagaacagcatcagcaacatgagcctgctgagagacagcagaaactacagccaggagaccgtgcccaaggccagcttcggcttcagcggcatcagccccctggaggacgagatcaacaagggcagcaagatcagcggcctgcagtacagcatccccgacaccgagaaccagaccctgaactacggcaagaccaaggagatggagaagcagaacaccgacaagtgccacgtgagcagccacaccagactgaccgagagcagcgtgcacgacttcaagaccgaggaccaggaggtgatcaccaccgacttcggccaggtggtgctgagacccaaggaggccagacacgccaacgtgaaccccaacgaggacggcgagagcagcagcagcagccccaccgaggagaacgccgccaccgacaacatcgccttcatgatcaccgagaccaccgtgcaggtgctgagcagcggcgaggtgcacgacatcgtgagccagaagggcgaggacatccagaccgtgaacatcgacgccagaaaggagatgacccccagacaggagggcaccgacaacgaggaccccgtggtgtgcctggacaagaagcccgtgatcatcatcttcgacgagcccatggacatcagaagcgcctacaagagactgagcaccatcttcgaggagtgcgacgaggagctggagagaatgatgatggaggagaagatcgaggaggaggaggaggaggagaacggcgacagcgtggtgcagaacaacaacaccagccagatgagccacaagaaggtggcccccggcaacctgagaaccggccagcaggtggagaccaagagccagccccacagcctggccaccgagaccagaaaccccggcggccaggagatgaacagaaccgagctgaacaagttcagccacgtggacagccccaacagcgagtgcaagggcgaggacgccaccgacgaccagttcgagagccccaagaagaagttcaagttcaagttccccaagaagcagctggccgccctgacccaggccatcagaaccggcaccaagaccggcaagaagaccctgcaggtggtggtgtacgaggaggaggaggaggacggcaccctgaagcagcacaaggaggccaagagattcgagatcgccagaagccagcccgaggacacccccgagaacaccgtgagaagacaggagcagcccagcatcgagagcaccagccccatcagcagaaccgacgagatcagaaagaacacctacagaaccctggacagcctggagcagaccatcaagcagctggagaacaccatcagcgagatgagccccaaggccctggtggacaccagctgcagcagcaacagagacagcgtggccagcagcagccacatcgcccaggaggccagccccagacccctgctggtgcccgacgagggccccaccgccctggagccccccaccagcatccccagcgccagcagaaagggcagcagcggcgccccccagaccagcagaatgcccgtgcccatgagcgccaagaacagacccggcaccctggacaagcccggcaagcagagcaagctgcaggaccccagacagtacagacagtag

SEQ ID NO: 271880 - DNA, 4599 bp, Artificial Sequence
  derived and/or modified sequence
atgcagagagagctggtgtacgccagaggcgacggccccggcgcccccagacccggcagcaccgcccaccccccccacgccatccccaacagcccccccagcacccccgtgccccacagcatgccccccagccccagcagaatcccctacggcggcaccagaagcatggtggtgcccggcaacgccaccatccccagagacagaatcagcagcctgcccgtgagcagacccatcagccccagccccagcgccatcctggagagaagagacgtgaagcccgacgaggacatgagcggcaagaacatcgccatgtacagaaacgagggcttctacgccgacccctacctgtaccacgagggcagaatgagcatcgccagcagccacggcggccaccccctggacgtgcccgaccacatcatcgcctaccacagaaccgccatcagaagcgccagcgcctactgcaaccccagcatgcaggccgagatgcacatggagcagagcctgtacagacagaagagcagaaagtaccccgacagccacctgcccaccctgggcagcaagaccccccccgccagcccccacagagtgagcgacctgagaatgatcgacatgcacgcccactacaacgcccacggccccccccacaccatgcagcccgacagagccagccccagcagacaggccttcaagaaggagcccggcaccctggtgtacatcgagaagcccagaagcgccgccggcctgagcagcctggtggacctgggcccccccctgatggagaagcaggtgttcgcctacagcaccgccaccatccccaaggacagagagaccagcgagaagatgatgaagaccaccgccaacagaaaccacaccgacagcgccggcaccccccacgtgagcggcggcaagatgctgagcgccctggagagcaccgtgccccccagccagcccccccccgtgggcaccagcgccatccacatgagcctgctggagatgagaagaagcgtggccgagctgagactgcagctgcagcagatgagacagctgcagctgcagaaccaggagctgctgagagccatgatgaagaaggccgagctggagatcagcggcaaggtgatggagaccatgaagagactggaggaccccgtgcagagacagagagtgctggtggagcaggagagacagaagtacctgcacgaggaggagaagatcgtgaagaagctgtgcgagctggaggacttcgtggaggacctgaagaaggacagcaccgccgccagcagactggtgaccctgaaggacgtggaggacggcgccttcctgctgagacaggtgggcgaggccgtggccaccctgaagggcgagttccccaccctgcagaacaagatgagagccatcctgagaatcgaggtggaggccgtgagattcctgaaggaggagccccacaagctggacagcctgctgaagagagtgagaagcatgaccgacgtgctgaccatgctgagaagacacgtgaccgacggcctgctgaagggcaccgacgccgcccaggccgcccagtacatggccatggagaaggccaccgccgccgaggtgctgaagagccaggaggaggccgcccacaccagcggccagcccttccacagcaccggcgcccccggcgacgccaagagcgaggtggtgcccctgagcggcatgatggtgagacacgcccagagcagccccgtggtgatccagcccagccagcacagcgtggccctgctgaaccccgcccagaacctgccccacgtggccagcagccccgccgtgccccaggaggccaccagcaccctgcagatgagccaggccccccagagcccccagatccccatgaacggcagcgccatgcagagcctgttcatcgaggagatccacagcgtgagcgccaagaacagagccgtgagcatcgagaaggccgagaagaagtgggaggagaagagacagaacctggaccactacaacggcaaggagttcgagaagctgctggaggaggcccaggccaacatcatgaagagcatccccaacctggagatgccccccgccaccggccccctgcccagaggcgacgcccccgtggacaaggtggagctgagcgaggacagccccaacagcgagcaggacctggagaagctgggcggcaagagcccccccccccccccccccccccccagaagaagctacctgcccggcagcggcctgaccaccaccagaagcggcgacgtggtgtacaccggcagaaaggagaacatcaccgccaaggccagcagcgaggacgccggccccagcccccagaccagagccaccaagtaccccgccgaggagcccgccagcgcctggacccccagccccccccccgtgaccaccagcagcagcaaggacgaggaggaggaggaggaggagggcgacaagatcatggccgagctgcaggccttccagaagtgcagcttcatggacgtgaacagcaacagccacgccgagcccagcagagccgacagccacgtgaaggacaccagaagcggcgccaccgtgccccccaaggagaagaagaacctggagttcttccacgaggacgtgagaaagagcgacgtggagtacgagaacggcccccagatggagttccagaaggtgaccaccggcgccgtgagacccagcgacccccccaagtgggagagaggcatggagaacagcatcagcgacgccagcagaaccagcgagtacaagaccgagatcatcatgaaggagaacagcatcagcaacatgagcctgctgagagacagcagaaactacagccaggagaccgtgcccaaggccagcttcggcttcagcggcatcagccccctggaggacgagatcaacaagggcagcaagatcagcggcctgcagtacagcatccccgacaccgagaaccagaccctgaactacggcaagaccaaggagatggagaagcagaacaccgacaagtgccacgtgagcagccacaccagactgaccgagagcagcgtgcacgacttcaagaccgaggaccaggaggtgatcaccaccgacttcggccaggtggtgctgagacccaaggaggccagacacgccaacgtgaaccccaacgaggacggcgagagcagcagcagcagccccaccgaggagaacgccgccaccgacaacatcgccttcatgatcaccgagaccaccgtgcaggtgctgagcagcggcgaggtgcacgacatcgtgagccagaagggcgaggacatccagaccgtgaacatcgacgccagaaaggagatgacccccagacaggagggcaccgacaacgaggaccccgtggtgtgcctggacaagaagcccgtgatcatcatcttcgacgagcccatggacatcagaagcgcctacaagagactgagcaccatcttcgaggagtgcgacgaggagctggagagaatgatgatggaggagaagatcgaggaggaggaggaggaggagaacggcgacagcgtggtgcagaacaacaacaccagccagatgagccacaagaaggtggcccccggcaacctgagaaccggccagcaggtggagaccaagagccagccccacagcctggccaccgagaccagaaaccccggcggccaggagatgaacagaaccgagctgaacaagttcagccacgtggacagccccaacagcgagtgcaagggcgaggacgccaccgacgaccagttcgagagccccaagaagaagttcaagttcaagttccccaagaagcagctggccgccctgacccaggccatcagaaccggcaccaagaccggcaagaagaccctgcaggtggtggtgtacgaggaggaggaggaggacggcaccctgaagcagcacaaggaggccaagagattcgagatcgccagaagccagcccgaggacacccccaccagcatccccagcgccagcagaaagggcagcagcggcgccccccagaccagcagaatgcccgtgcccatgagcgccaagaacagacccggcaccctggacaagcccggcaagcagagcaagctgcaggaccccagacagtacagacaggccaacggcagcgccaagaagagcggcggcgacttcaagcccaccagccccagcctgcccgccagcaagatccccgccctgagccccagcagcggcaagagcagcagcctgcccagcagcagcggcgacagcagcaacctgcccaacccccccgccaccaagcccagcatcgccagcaaccccctgagcccccagaccggcccccccgcccacagcgccagcctgatccccagcgtgagcaacggcagcctgaagttccagagcctgacccacaccggcaagggccaccacctgagcttcagcccccagagccagaacggcagagcccccccccccctgagcttcagcagcagcccccccagccccgccagcagcgtgagcctgaaccagggcgccaagggcaccagaaccatccacacccccagcctgaccagctacaaggcccagaacggcagcagcagcaaggccacccccagcaccgccaaggagaccagctag

SEQ ID NO: 271881 - DNA, 4386 bp, Artificial Sequence
  derived and/or modified sequence
atgcaaagagagctagtgtatgcccggggcgacggacccggtgctccgaggcctgggagtactgcgcacccccctcacgcaatacccaattcacctccgagtactccagttccccattctatgcctccctctccaagccgcatcccatatggagggacccgatctatggtggtgcccgggaacgccactattccacgagacagaatctcaagccttccagtctccagaccaatatccccgagcccatctgccatcctggagagacgcgatgtgaaacccgacgaagacatgtccggcaaaaatatagctatgtaccgtaatgaagggttttacgccgatccctatttgtatcacgaaggacggatgagcattgcctccagccatggaggccatccactggacgtcccagatcatatcattgcttatcacagaacggctatacgcagtgccagtgcgtactgtaatccctcaatgcaggctgaaatgcacatggagcaaagcctgtaccgccagaaatctcggaagtatcccgacagccacctcccaactctaggatcaaaaaccccaccagccagcccccatagagtcagcgatctccgtatgatcgacatgcacgctcactataatgcacatggaccaccccatacaatgcaaccagatagggcatcacctagtagacaggcattcaaaaaggagcctggaacattagtgtacatcgagaaaccaaggagcgccgccgggctcagcagcctggtagacttaggcccaccgttgatggaaaaacaggtatttgcatactctaccgcgactatccccaaagatagggaaacatcggagaagatgatgaaaaccaccgcaaacaggaatcacacagatagcgctgggactcctcacgtttctggcggtaaaatgctatccgcactagaatccaccgttcctccaagccagcctcctcctgtggggacttccgccatccacatgagcttgctcgagatgagacgttctgttgccgagctgcgactgcaacttcagcagatgcgtcagctgcagctgcagaaccaggaactactcagggctatgatgaagaaggccgagctcgagatatctgggaaagtgatggaaacaatgaagcggctggaagacccagtacagcgtcaaagagtcctggtcgaacaggagaggcagaagtatctccacgaggaggaaaaaatcgtgaagaagctttgcgaattggaggactttgtggaagatctcaaaaaagacagcaccgcagctagtcgactagtgaccctgaaggacgtcgaggacggagcctttttgctgcgacaggtcggggaggcggtcgcaacacttaaaggagagtttcctaccctgcaaaataaaatgcgagctatactgcggattgaagttgaggccgtgagatttctgaaggaggaaccccacaaactcgattcactgctaaaaagagtgaggtccatgacagatgtgttgactatgctaagacgacacgtgacagacggcctgctcaagggcacggatgcggcacaagctgctcagtacatggccatggagaaggccaccgccgctgaggtactgaagtctcaagaagaagcagcccacacctcagggcaaccatttcactctaccggcgcgcccggcgacgccaaaagtgaggtggtgccactttctggaatgatggtgcggcacgcccagtcatctcctgtcgtgattcagccctctcagcacagtgtagcactgctcaatcccgcgcaaaatttgccacatgtggcatccagtccagccgtccctcaggaggccacctccactttacagatgtcacaggctcctcagagccctcagattccaatgaacggtagtgccatgcagagcctcttcatagaggaaatccattccgtatccgccaagaatcgcgccgtaagcattgagaaggctgaaaaaaagtgggaagaaaaacgtcagaacctggaccattacaacgggaaagaatttgaaaagttgctcgaggaggcccaggccaacataatgaagtcaattccgaatttagaaatgccacccgcaacaggacctttgccaagaggggacgccccggtcgataaagtggagcttagtgaggatagccctaactccgagcaagacctggagaagctcggaggcaagtccccacccccgccccctcctcccccgagacgctcttacctgccgggatccggcctgaccactacccgtagcggcgatgtggtgtacacgggccgtaaggagaacatcacggccaaggccagcagcgaggacgcaggcccttcacctcagacccgcgctactaaataccctgcggaagaaccagctagtgcttggacacccagtccccctccggtcacaaccagcagctccaaagatgaagaagaagaggaagaagagggggacaaaatcatggccgagctacaggcctttcagaaatgctcctttatggatgtgaacagtaacagccatgcagaaccctccagagcggattcacacgtgaaggatacgcggagcggggccaccgttccccctaaagagaaaaagaacttggaattctttcacgaggacgtccgaaagagtgacgttgagtatgaaaacggaccccaaatggaattccagaaggtcactacaggcgccgtgagacctagcgacccacccaaatgggagcggggaatggagaactccatttcagatgcatccagaacatctgagtacaagacagagattatcatgaaggagaactcaatctccaacatgtctctgctcagagactcgagaaattactcccaagagactgtgcccaaggctagttttggcttttccggaatcagccccctggaggatgagattaataagggtagcaagatcagcgggcttcagtacagcattcctgataccgagaaccagactctcaactacggcaagactaaggaaatggaaaaacaaaataccgataagtgccatgtgtctagccataccaggctcacagagtcctcagtacatgattttaaaaccgaggatcaggaagtcattaccactgactttggacaggtggtgctccggccgaaggaggctcggcatgctaatgtaaaccccaacgaggacggcgaatcttccagctccagccccactgaagaaaatgctgccactgacaatatcgccttcatgatcaccgaaaccactgtgcaggtcctgtcgtccggagaagtccatgacatcgtatcccagaagggagaggatatccaaacggttaatattgatgcccggaaggagatgactcctaggcaggaggggaccgacaacgaggaccccgttgtgtgtcttgacaaaaaacctgtgatcatcatttttgacgagccaatggacatacgctccgcttacaaacgactgtcaacgatctttgaagagtgtgacgaggagcttgaacgcatgatgatggaggaaaaaattgaggaggaagaagaggaggaaaatggagactccgtcgtgcaaaataacaacacatcgcagatgtcccacaaaaaggtcgcacctggtaacttgaggactggccagcaggtcgaaactaagagccagccacactctttggccacagaaacccgaaaccctggtggtcaagagatgaaccgcaccgaactcaataagttctcccacgtggattcacctaattcggagtgcaagggagaggacgcaactgatgaccagttcgaatcacctaaaaagaagttcaagtttaagtttccaaaaaagcagctggctgccttgacccaggcgatcaggaccggtaccaaaaccggtaagaagaccctccaagttgtcgtgtacgaggaagaagaggaggatggaaccctgaagcaacataaggaagctaaacgctttgagatagcgcgtagtcagccggaggatacacccgagaacaccgttcgtcgtcaggaacaacctagcattgaatccacaagtccaattagccgcactgacgaaatccgtaaaaacacttacaggaccctcgatagtctcgagcagaccatcaaacagcttgagaacacaatttctgagatgagtcccaaggctttggtggacacctcgtgttcaagcaaccgggactcagtggcgtcctcctcacacattgcacaagaagcttccccacgccctctgctggtccccgatgaaggcccgacagctctcgaacctcccacttcaatcccgagcgccagcagaaaggggtctagcggcgctcctcaaacttcgcggatgcctgtgccaatgagtgccaagaatcgacccgggaccctggacaaacccggcaaacaatcaaaactccaggacccacgacagtatcggcagtag

SEQ ID NO: 271882 - DNA, 4599 bp, Artificial Sequence
  derived and/or modified sequence
atgcagcgtgaactcgtatatgccagaggcgacggcccaggcgccccacggcctgggtcaacagcccacccaccacacgctataccaaactccccaccttccaccccagtacctcacagcatgccaccatccccttcccgcatcccgtatggaggtactaggtcaatggtcgttcccggaaacgccactattccccgggacaggattagcagccttcctgtgagccggccgatttctcccagcccgagcgcaatattggagaggagagatgtgaaacctgatgaagatatgtcgggcaaaaatatcgctatgtatcgcaacgaaggattttatgctgacccttatctttaccacgaaggaagaatgtctatcgcttccagccatggcgggcatcctctagatgttcctgaccatattatcgcttaccacagaacagccattcggtcagcctccgcctattgtaatcctagcatgcaagccgaaatgcacatggagcaatccctgtatagacagaagtctaggaagtatcccgattcgcatttgcctacccttggctccaaaactccccctgcttccccacaccgggtgtctgacttgcgcatgattgacatgcacgcgcattataacgcacatgggcctccacacacaatgcagcctgatcgggcaagtccaagcagacaggcttttaaaaaggagccaggcaccctagtgtatatagaaaaaccccgaagtgctgccggtctttcttctctagtggacttagggccacctctcatggagaaacaagtctttgcctattctacggccactatacccaaagaccgcgagacctccgagaaaatgatgaaaactaccgcaaatcgaaaccatacggattccgctgggaccccgcacgtctcagggggaaaaatgctctccgccctagaatccaccgttcccccctcacagcccccgcctgtaggcaccagtgctatccatatgtctctgttggagatgcgacgatccgtggcagagttaagactccagctgcaacagatgcgccagttgcagctccagaatcaggagttacttcgtgcgatgatgaagaaggcagagcttgaaatatccggtaaagtgatggagaccatgaagaggctcgaggatcccgtgcagcgccagagggtgctggtggagcaggaacgacagaagtacctgcacgaagaggaaaaaatagttaaaaaactgtgcgaactcgaggatttcgtggaagatttaaagaaggacagcacagccgcttccagattggtgaccctgaaggacgtggaagatggggcgtttttactgaggcaggttggcgaagctgtcgcaaccttgaaaggcgaattcccaaccctgcagaacaagatgagagctatcttacggatagaggttgaagccgtcagatttcttaaggaggaaccccacaagttggacagtctcctgaaacgagtgagatctatgacagatgttctgactatgctcaggcgccacgtgactgacggcttattgaagggcacagacgccgctcaagccgcccagtatatggccatggagaaggccactgctgccgaagtattaaagagccaggaggaagctgcccacacctctggccagcctttccattcaaccggggcccctggcgatgcgaagtcagaagtggtcccattgtcaggcatgatggttagacacgcccaatcgtctccggtcgtgattcagccatctcagcattccgttgcacttttgaatccagcccaaaacctacctcacgtggctagcagtccagcagtgccacaagaagccacctctacactccagatgtcacaggccccacaatctccccaaatccccatgaatggcagcgccatgcagagccttttcatcgaggaaatacacagcgtctccgcaaagaatagagccgtgtcgatcgaaaaggctgagaagaagtgggaggagaagcggcagaatctggaccactataacggaaaagagtttgagaagttacttgaggaagcgcaggccaacataatgaagagtatccccaatcttgaaatgcccccagccacgggcccgctgccgcgcggagatgctccggtagacaaggtggagctatccgaggatagccctaatagtgaacaggatctcgagaagcttggaggaaagtcaccacctccacctcccccaccgccccggcgaagctatctgcccggaagcgggcttaccaccacgcgctccggggatgtagtctacacgggacggaaagagaacattaccgctaaagctagcagcgaggatgccggaccgtccccacagactcgagccaccaaatacccggctgaggagcccgctagcgcctggactccttcgcctccgcccgtcacaacttcatcgagcaaagatgaggaagaagaggaggaggaaggggacaagatcatggccgaactgcaggcttttcagaaatgtagctttatggatgtcaactctaatagccacgctgagcctagtcgggccgattcgcacgtaaaagacactagatctggtgccaccgtgccacctaaggaaaagaaaaacctcgaattcttccacgaggatgtgcgaaagagcgacgttgagtacgaaaatggaccacagatggagtttcaaaaggttacaacgggcgccgtccggccttccgaccctcctaagtgggagcgtggcatggaaaactccatatccgacgcctcaaggacaagcgagtataagactgaaattattatgaaggagaactcaatatccaacatgtcacttctgagagatagtaggaactactctcaggagactgtcccgaaggcgagttttgggttctccggaatctccccattagaggacgagatcaacaagggttcaaagattagtgggctccagtacagcatcccagacactgagaatcagacattgaactacggaaaaacaaaagagatggagaagcagaacactgataaatgtcatgtttcatcccataccagactcaccgaaagttcagtgcacgatttcaagaccgaggatcaggaggtcataaccaccgactttggccaggtcgtactgcgaccaaaagaagcgagacacgccaacgtcaatccaaacgaagatggagagagttcttccagctctcccactgaagagaatgccgcaaccgacaacatcgccttcatgatcacagaaactactgtacaagtgctgagctccggggaggtccatgatattgtttctcagaaaggggaggacatccagaccgtgaatattgatgctaggaaagagatgaccccgcggcaagaaggaacagacaacgaagacccagtcgtttgtttggataagaaaccagtcatcataatcttcgacgagccaatggatatacgtagcgcctataaacgtttaagcacaattttcgaggaatgtgacgaggagttagagcggatgatgatggaggagaaaattgaagaagaggaggaggaggagaacggcgactcggtggtacagaacaataacacaagtcagatgtcacataagaaggtggcccccgggaatctacggaccggtcagcaggttgagactaagtcccagccccacagcttggcaacagagacaaggaatccgggcggacaagaaatgaatcggacagaactcaacaagttcagtcatgtcgacagccccaattctgaatgtaagggcgaggacgcgactgacgaccaatttgagtcccctaaaaagaaatttaaattcaagtttccgaagaagcagttagccgccctcacccaggccatcaggacaggcaccaaaactgggaagaaaacacttcaggtggttgtgtacgaagaagaggaggaagacgggaccctcaagcagcacaaggaggcaaaaagatttgaaatagcaaggtctcaacccgaggacacacccacaagcatacccagcgcctctaggaagggctcatccggtgctccccagacctcccgcatgccagtcccaatgtccgctaaaaaccggccagggacgctcgataagccaggcaaacagtcgaagctccaggaccctcgtcagtacaggcaggctaatggatcagccaagaaatccggtggagactttaagcccacaagccctagtctgccggcatcgaaaattccagccctatccccttcctcaggaaagtcttccagcctaccctcctctagtggcgactcctcaaatctcccgaaccctcctgctacaaagccaagcattgccagcaatccgttatctccacagacgggcccaccagcccacagtgctagcctgattcctagcgtgagcaacggcagtttgaagtttcagtctctcacccacaccgggaaaggccaccacttgtcattcagtcctcagagccagaacggacgtgctcctcccccattgtccttttcctctagcccaccgtctcccgcttcctccgtcagcctgaatcagggcgccaaaggcacacgcacgattcatacacccagcctcacaagttacaaggctcagaatggctctagctccaaggccactccatctaccgctaaggagacttcttag

SEQ ID NO: 271883 - DNA, 4386 bp, Artificial Sequence
  derived and/or modified sequence
atgcagcgggagctggtgtatgcccggggagatggccctggggccccccggcccggcagcacagcccaccccccccacgccatccccaacagcccccccagcacccctgtgccccacagcatgccacccagccccagccgcatcccctacggcggcaccaggtccatggtggtgcctggaaatgccaccatcccccgggaccgcatcagcagcctgcctgtgtcccggcccatcagccccagccccagcgccatcctggagaggagagatgtgaagccagatgaggacatgtctgggaagaacatcgccatgtacagaaatgaaggcttctacgccgacccctacctgtaccacgagggccgcatgagcatcgccagcagccacggcggccaccccctggatgtgcctgaccacatcatcgcctaccacaggacagccatccgcagcgccagcgcctactgcaaccccagcatgcaggccgagatgcacatggagcagagcctgtaccggcagaagagcaggaagtacccagacagccacctgcccaccctgggcagcaagaccccaccagccagcccccaccgggtgtctgacctgaggatgattgacatgcacgcccactacaatgcccacggccccccccacaccatgcagcctgaccgggccagccccagccggcaggccttcaagaaggagcccggcaccctggtgtacatcgagaagcccaggtctgctgctggcctgagcagcctggtggacctgggcccccccctgatggagaagcaggtgtttgcctacagcacagccaccatccccaaggaccgggagaccagcgagaagatgatgaagaccacagccaacagaaaccacacagattctgctggcaccccccacgtgtctgggggcaagatgctgagcgccctggagagcacagtgccccccagccagcccccacctgtgggcaccagcgccatccacatgagcctgctggagatgagaagatctgtggccgagctgcggctgcagctgcagcagatgaggcagctgcagctgcagaaccaggagctgctgcgggccatgatgaagaaggccgagctggagatcagcggcaaggtgatggagaccatgaagaggctggaggaccctgtgcagaggcagagggtgctggtggagcaggagcggcagaagtacctgcacgaggaggagaagatcgtgaagaagctgtgtgagctggaggactttgtggaggacctgaagaaggacagcacagctgccagccggctggtgaccctgaaggatgtggaggatggagccttcctgctgcggcaggtgggggaggccgtggccaccctgaagggggagttccccaccctgcagaacaagatgagggccatcctgcgcatcgaggtggaggccgtgcgcttcctgaaggaggagccccacaagctggacagcctgctgaagagggtgcgctccatgacagatgtgctgaccatgctgcggagacatgtgacagatggcctgctgaagggcacagatgctgcccaggccgcccagtacatggccatggagaaggccacagctgctgaggtgctgaagagccaggaggaggccgcccacaccagcggccagcccttccacagcactggagcccctggagatgccaagtctgaggtggtgcccctgagcggcatgatggtgagacatgcccagagcagccctgtggtgatccagcccagccagcacagcgtggccctgctgaacccagcccagaacctgccccacgtggccagcagccctgctgtgccccaggaggccaccagcaccctgcagatgagccaggccccccagagcccccagatccccatgaatggcagcgccatgcagagcctcttcatcgaggagatccacagcgtgtctgccaagaacagagctgtgtccattgagaaggccgagaagaagtgggaggagaagaggcagaacctggaccactacaacgggaaggagtttgagaagctgctggaggaggcccaggccaacatcatgaagagcatccccaacctggagatgcccccagccaccggccccctgcccagaggagatgcccctgtggacaaggtggagctgtctgaggacagccccaacagcgagcaggacctggagaagctgggcggcaagagccccccacctcctcctcctccaccccggcgcagctacctgcccggcagcggcctgaccaccaccaggtctggagatgtggtgtacacaggcaggaaggagaacatcacagccaaggccagcagtgaagatgctggccccagcccccagacccgggccaccaagtacccagctgaggagcccgccagcgcctggacccccagccccccacctgtgaccaccagcagcagcaaggatgaggaggaggaggaggaggagggggacaagatcatggccgagctgcaggccttccagaagtgcagcttcatggatgtgaacagcaacagccatgctgagcccagcagagctgacagccacgtgaaggacaccaggtctggggccaccgtgccccccaaggagaagaagaacctggagttcttccatgaagatgtgaggaagagtgatgtggagtatgaaaatggcccccagatggagttccagaaggtgaccaccggggctgtgcggcccagcgacccccccaagtgggagcggggcatggagaacagcatcagtgatgccagcaggaccagcgagtacaagacagagatcatcatgaaggagaacagcatcagcaacatgagcctgctgcgggacagcaggaactacagccaggagaccgtgcccaaggccagctttggcttcagcggcatcagccccctggaggatgagatcaacaagggcagcaagatcagcggcctgcagtacagcatcccagacacagagaaccagaccctgaactacggcaagaccaaggagatggagaagcagaacacagacaagtgccacgtgagcagccacacccggctgacagagagctctgtgcatgacttcaagacagaggaccaggaggtgatcaccacagactttggccaggtggtgctgcggcccaaggaggcccggcatgccaacgtgaaccccaatgaagatggagagagcagcagcagcagccccacagaagaaaatgctgccacagacaacatcgccttcatgatcacagagaccaccgtgcaggtgctgagcagcggggaggtgcatgacatcgtgtcccagaagggggaggacatccagacagtgaacattgatgccaggaaggagatgaccccccggcaggagggcacagacaatgaagatcctgtggtgtgcctggacaagaagcctgtgatcatcatctttgatgagcccatggacatccgcagcgcctacaagaggctgagcaccatctttgaagaatgtgatgaggagctggagaggatgatgatggaggagaagattgaggaggaggaggaggaggagaatggagacagcgtggtgcagaacaacaacaccagccagatgagccacaagaaggtggcccctggcaacctgaggacaggccagcaggtggagaccaagagccagccccacagcctggccacagagaccaggaaccctgggggccaggagatgaacagaacagagctgaacaagttcagccacgtggacagccccaacagcgagtgcaagggggaggatgccacagatgaccagtttgagagccccaagaagaagttcaagttcaagttccccaagaagcagctggccgccctgacccaggccatcagaacaggcaccaagacaggcaagaagaccctgcaggtggtggtgtatgaggaggaggaggaggatggcaccctgaagcagcacaaggaggccaagagatttgagatcgcccggagccagcctgaggacaccccagagaacacagtgcggcggcaggagcagcccagcattgagagcaccagccccatcagcaggacagatgagatcaggaagaacacctaccgcaccctggacagcctggagcagaccatcaagcagctggagaacaccatcagcgagatgagccccaaggccctggtggacaccagctgcagcagcaacagagacagcgtggccagcagcagccacatcgcccaggaggccagcccccggcccctgctggtgcctgatgagggccccacagccctggagccccccaccagcatccccagcgccagcaggaagggcagcagcggggccccccagaccagcaggatgcctgtgcccatgtctgccaagaacagacctggcaccctggacaagccaggcaagcagagcaagctgcaggacccccggcagtaccggcagtag

SEQ ID NO: 271884 - DNA, 4599 bp, Artificial Sequence
  derived and/or modified sequence
atgcagcgggagctggtgtatgcccggggagatggccctggggccccccggcccggcagcacagcccaccccccccacgccatccccaacagcccccccagcacccctgtgccccacagcatgccacccagccccagccgcatcccctacggcggcaccaggtccatggtggtgcctggaaatgccaccatcccccgggaccgcatcagcagcctgcctgtgtcccggcccatcagccccagccccagcgccatcctggagaggagagatgtgaagccagatgaggacatgtctgggaagaacatcgccatgtacagaaatgaaggcttctacgccgacccctacctgtaccacgagggccgcatgagcatcgccagcagccacggcggccaccccctggatgtgcctgaccacatcatcgcctaccacaggacagccatccgcagcgccagcgcctactgcaaccccagcatgcaggccgagatgcacatggagcagagcctgtaccggcagaagagcaggaagtacccagacagccacctgcccaccctgggcagcaagaccccaccagccagcccccaccgggtgtctgacctgaggatgattgacatgcacgcccactacaatgcccacggccccccccacaccatgcagcctgaccgggccagccccagccggcaggccttcaagaaggagcccggcaccctggtgtacatcgagaagcccaggtctgctgctggcctgagcagcctggtggacctgggcccccccctgatggagaagcaggtgtttgcctacagcacagccaccatccccaaggaccgggagaccagcgagaagatgatgaagaccacagccaacagaaaccacacagattctgctggcaccccccacgtgtctgggggcaagatgctgagcgccctggagagcacagtgccccccagccagcccccacctgtgggcaccagcgccatccacatgagcctgctggagatgagaagatctgtggccgagctgcggctgcagctgcagcagatgaggcagctgcagctgcagaaccaggagctgctgcgggccatgatgaagaaggccgagctggagatcagcggcaaggtgatggagaccatgaagaggctggaggaccctgtgcagaggcagagggtgctggtggagcaggagcggcagaagtacctgcacgaggaggagaagatcgtgaagaagctgtgtgagctggaggactttgtggaggacctgaagaaggacagcacagctgccagccggctggtgaccctgaaggatgtggaggatggagccttcctgctgcggcaggtgggggaggccgtggccaccctgaagggggagttccccaccctgcagaacaagatgagggccatcctgcgcatcgaggtggaggccgtgcgcttcctgaaggaggagccccacaagctggacagcctgctgaagagggtgcgctccatgacagatgtgctgaccatgctgcggagacatgtgacagatggcctgctgaagggcacagatgctgcccaggccgcccagtacatggccatggagaaggccacagctgctgaggtgctgaagagccaggaggaggccgcccacaccagcggccagcccttccacagcactggagcccctggagatgccaagtctgaggtggtgcccctgagcggcatgatggtgagacatgcccagagcagccctgtggtgatccagcccagccagcacagcgtggccctgctgaacccagcccagaacctgccccacgtggccagcagccctgctgtgccccaggaggccaccagcaccctgcagatgagccaggccccccagagcccccagatccccatgaatggcagcgccatgcagagcctcttcatcgaggagatccacagcgtgtctgccaagaacagagctgtgtccattgagaaggccgagaagaagtgggaggagaagaggcagaacctggaccactacaacgggaaggagtttgagaagctgctggaggaggcccaggccaacatcatgaagagcatccccaacctggagatgcccccagccaccggccccctgcccagaggagatgcccctgtggacaaggtggagctgtctgaggacagccccaacagcgagcaggacctggagaagctgggcggcaagagccccccacctcctcctcctccaccccggcgcagctacctgcccggcagcggcctgaccaccaccaggtctggagatgtggtgtacacaggcaggaaggagaacatcacagccaaggccagcagtgaagatgctggccccagcccccagacccgggccaccaagtacccagctgaggagcccgccagcgcctggacccccagccccccacctgtgaccaccagcagcagcaaggatgaggaggaggaggaggaggagggggacaagatcatggccgagctgcaggccttccagaagtgcagcttcatggatgtgaacagcaacagccatgctgagcccagcagagctgacagccacgtgaaggacaccaggtctggggccaccgtgccccccaaggagaagaagaacctggagttcttccatgaagatgtgaggaagagtgatgtggagtatgaaaatggcccccagatggagttccagaaggtgaccaccggggctgtgcggcccagcgacccccccaagtgggagcggggcatggagaacagcatcagtgatgccagcaggaccagcgagtacaagacagagatcatcatgaaggagaacagcatcagcaacatgagcctgctgcgggacagcaggaactacagccaggagaccgtgcccaaggccagctttggcttcagcggcatcagccccctggaggatgagatcaacaagggcagcaagatcagcggcctgcagtacagcatcccagacacagagaaccagaccctgaactacggcaagaccaaggagatggagaagcagaacacagacaagtgccacgtgagcagccacacccggctgacagagagctctgtgcatgacttcaagacagaggaccaggaggtgatcaccacagactttggccaggtggtgctgcggcccaaggaggcccggcatgccaacgtgaaccccaatgaagatggagagagcagcagcagcagccccacagaagaaaatgctgccacagacaacatcgccttcatgatcacagagaccaccgtgcaggtgctgagcagcggggaggtgcatgacatcgtgtcccagaagggggaggacatccagacagtgaacattgatgccaggaaggagatgaccccccggcaggagggcacagacaatgaagatcctgtggtgtgcctggacaagaagcctgtgatcatcatctttgatgagcccatggacatccgcagcgcctacaagaggctgagcaccatctttgaagaatgtgatgaggagctggagaggatgatgatggaggagaagattgaggaggaggaggaggaggagaatggagacagcgtggtgcagaacaacaacaccagccagatgagccacaagaaggtggcccctggcaacctgaggacaggccagcaggtggagaccaagagccagccccacagcctggccacagagaccaggaaccctgggggccaggagatgaacagaacagagctgaacaagttcagccacgtggacagccccaacagcgagtgcaagggggaggatgccacagatgaccagtttgagagccccaagaagaagttcaagttcaagttccccaagaagcagctggccgccctgacccaggccatcagaacaggcaccaagacaggcaagaagaccctgcaggtggtggtgtatgaggaggaggaggaggatggcaccctgaagcagcacaaggaggccaagagatttgagatcgcccggagccagcctgaggacacccccaccagcatccccagcgccagcaggaagggcagcagcggggccccccagaccagcaggatgcctgtgcccatgtctgccaagaacagacctggcaccctggacaagccaggcaagcagagcaagctgcaggacccccggcagtaccggcaggccaatggaagtgccaagaagtctggaggagacttcaagcccaccagccccagcctgcctgccagcaagatcccagccctgagccccagcagcggcaagagcagcagcctgcccagcagcagcggggacagcagcaacctgcccaaccccccagccaccaagcccagcatcgccagcaaccccctgagcccccagacaggccccccagcccacagcgccagcctcatccccagcgtgtccaatggcagcctgaagttccagagcctgacccacacaggcaagggccaccacctgtccttcagcccccagagccagaatggccgggcccccccacccctgtccttcagcagcagcccccccagccctgccagctctgtgtccctgaaccagggcgccaagggcaccaggaccatccacacccccagcctgaccagctacaaggcccagaatggcagcagcagcaaggccacccccagcacagccaaggagaccagctag

SEQ ID NO: 271885 - DNA, 4386 bp, Artificial Sequence
  derived and/or modified sequence
atgcagcgggagctggtgtacgcccggggcgacggccccggcgccccccggcctgggagcaccgctcaccccccacatgctattcccaacagcccacccagcacccccgtgccgcactcaatgcccccgagcccctctcgaataccttatggtggcacccgaagcatggtggtgcccggaaatgcaaccatccctagagatcggataagctcccttccagttagtcgccccatttctccctctccttctgcaatcctggagcggcgggacgtgaagcccgatgaggacatgtctggcaagaacatagctatgtaccgcaatgaggggttttacgctgatccttacctgtatcacgagggtagaatgtcgattgcctcctctcacggcggacacccgcttgacgtgccggatcacataatcgcatatcacagaactgcgattagaagtgcttctgcctactgtaatccctctatgcaagcggaaatgcatatggaacagtccctataccgacagaaatcccggaagtatccagatagtcatcttccaacactcggaagcaaaactcccccagctagccctcatagggtttcagatttgcggatgatagatatgcacgcccactataacgctcacggtcctccgcataccatgcagcccgatcgcgcctcaccttccaggcaggccttcaaaaaggagcccggcactttggtctatatagagaagccacgctccgcagcgggattgagtagcctagtcgatctggggccaccactgatggagaagcaggtcttcgcttactccaccgcaacaataccaaaggatcgcgagacaagtgagaagatgatgaaaaccacggcaaaccggaaccataccgatagcgctgggacccctcatgtttctgggggcaagatgctgtccgcgctcgaatctaccgtcccgccttctcagccccctccagtggggaccagcgcgatccacatgtccttgctggagatgagacggagcgtagctgagctgcgtctacagttgcagcagatgcggcagctacagctgcagaaccaggaactgctaagggcgatgatgaagaaagcggagcttgagatttccggaaaagtaatggaaacaatgaaacgcttagaagaccctgtgcagcgacagcgagtcttagttgagcaggaacggcagaagtatcttcatgaagaagagaagatagtgaagaagctttgcgagctggaggattttgtggaagacctcaagaaggactcaacagctgcgtcccggttggtgactcttaaggatgtggaagatggagccttcctgctccgccaggtaggagaggcagtggctacgttgaagggagaatttcctacactgcagaacaaaatgcgagccatcctgaggatcgaggtcgaagcggtgcggttccttaaggaggaaccccacaagctagacagtctgttgaagcgggtgcggtctatgaccgacgtgctcaccatgctcaggcgacatgtgaccgatggcttactgaagggtaccgatgctgcccaagccgctcagtatatggccatggaaaaggctacagccgctgaggtcttaaaaagccaggaggaggccgctcatactagtggtcagccttttcactcaactggtgctcccggcgacgctaaaagcgaagttgtgccgttgtctggcatgatggtgcgccacgctcagtcttcccccgtggttatacagccaagccaacatagcgtggccctgcttaatccagcacaaaacctgccacacgtggcaagtagcccagccgttccacaagaggctaccagcacgttgcagatgtcccaggcacctcagtcaccccagatcccgatgaacggctctgctatgcagagcttgttcatcgaagaaattcacagtgtctccgctaaaaatcgggcagtgagtatcgagaaggcagagaaaaaatgggaggagaaaagacagaatctggaccattataatggcaaggagtttgagaagttacttgaggaggcgcaagctaatattatgaagtcaatccctaatttggagatgccaccagctacaggcccattgccacgcggagacgcccctgtggataaggtggagctctccgaagactctcccaattctgaacaggacttggaaaagctggggggcaaatcacccccacccccccccccgccgcctcgacggagctacctgcccgggtccggcctgactacaacacggtcaggggatgtggtgtatacaggcagaaaagagaacatcacagcgaaagcttcttctgaagatgcaggtccgagccctcagaccagagccactaaatatccagctgaggagcccgctagtgcatggactccttcaccgccccccgtcacaacttcctcgtcaaaggacgaggaagaggaagaagaggagggcgacaagataatggctgagctgcaggcttttcagaaatgcagttttatggatgttaatagcaattcccacgccgagccctctagggccgactcgcatgtgaaagacactcggtcaggcgccactgtacctcccaaagagaaaaaaaaccttgaatttttccatgaggatgtgaggaaatccgacgtggagtatgagaacggaccccagatggagtttcaaaaggtgacaacaggggcagtgagaccctcagatccaccgaaatgggaacgaggcatggagaactcaatctccgacgcctccaggacttctgaatacaagaccgaaataatcatgaaggagaactctataagcaatatgtcgctcctcagagatagtcggaattactctcaagagacagtgcctaaagctagcttcggcttctctgggattagtccactggaggatgagattaataaaggatcgaagatttcagggctgcaatacagcatcccggacacagaaaatcagaccctaaactacggaaaaacaaaggaaatggaaaaacagaacacagacaagtgccacgtgagctcccacacgcgtctgacagagagctcagtccacgatttcaaaaccgaagatcaggaagtgattactacagacttcggtcaagtggttctcagaccaaaagaagccaggcacgccaacgtcaacccgaatgaggatggggaaagttcctcgtccagcccgaccgaggaaaatgccgctaccgacaacattgcctttatgatcacagagactaccgtacaggttctctcatcaggggaggtccacgacatcgtgtcccagaaaggggaggatatccaaacggttaatattgatgctaggaaagagatgacccctaggcaagaaggcacagataatgaggatccagttgtgtgcttggacaaaaaaccagtgataatcatttttgacgagcccatggacattaggtctgcctacaagagactgtccacaatctttgaggagtgtgatgaagagctcgaaagaatgatgatggaagaaaaaatcgaagaagaggaagaggaagagaatggggatagtgttgtgcagaacaataatactagtcagatgagtcataaaaaagtggcacccggcaacttacggacaggccagcaggttgaaaccaaatcccagccccattccctggcaacagagacccggaatcctggggggcaagaaatgaacagaacggagcttaataagttctcccacgtcgatagccccaactcagaatgcaaaggagaggacgctactgacgaccagttcgagtcccccaagaagaagttcaaattcaagtttcctaaaaagcagctggccgcactaacacaagccatacgaacagggacgaagactggaaagaagacgctccaggtggttgtatacgaagaagaagaagaggacggcactcttaaacagcataaggaggcgaagaggttcgagattgccaggagccagcccgaagacacccctgaaaacacagtgcggcggcaagagcagcctagcatcgagtctacctcaccaatatcacgcacagacgagatcaggaaaaacacctacaggactctggatagcctcgaacagacgataaagcagctagagaacaccatctctgagatgagcccgaaggcactcgtggacacatcctgttccagcaaccgggacagcgtggcctcttcttctcacattgcccaggaagccagcccaagacccttgctcgtcccggacgagggtccgaccgcgttggaaccaccgaccagcataccctctgccagccggaaaggctcgagcggcgcaccccagacatctaggatgccggtgcccatgagtgccaagaaccgacccggcacattggacaagccaggcaaacagagcaagctacaagaccccagacaatatcgacaatag

SEQ ID NO: 271886 - DNA, 4599 bp, Artificial Sequence
  derived and/or modified sequence
atgcagcgggagctggtgtacgcccggggcgacggccccggcgcccctagaccaggctctacagctcatcccccccatgccatccccaacagtcctccatctaccccagtgcctcacagcatgcctccaagccccagcagaataccctatggtggaacacgtagtatggtggtgcctggtaacgctacaattccacgggatcggatttcaagcttgccagtgagccggcctatatccccttccccttccgcgatcctggagcgccgggatgtcaagcccgatgaggacatgagtggcaaaaacatcgcgatgtatcggaacgaaggcttctatgccgacccttatctgtaccacgagggaaggatgtctatagccagctcccatggtggccacccgctggacgtacctgaccacatcatcgcttaccatcggacagcaattagatccgcctctgcatactgcaacccatccatgcaggccgagatgcatatggagcagtcattgtaccggcaaaagtccaggaagtaccctgacagccacttacccacccttggctccaagacccctcctgcaagccctcacagagtctctgatctcagaatgatcgacatgcatgcccattacaatgctcatggacccccccacaccatgcagccagatagggcttcaccttcccgacaggccttcaagaaagagcctggcacccttgtctacatcgagaagcctcggagtgccgcaggactgtcctccctggtggacttggggccgccactaatggagaagcaagtgtttgcttattccacagcaactatccctaaggaccgcgagactagtgaaaaaatgatgaagaccacagcgaatcggaaccatacagacagtgctggcactccacatgtatcaggaggcaagatgctatcggcgcttgagtcaaccgtgccaccatctcagccaccccctgttgggacttccgccatccatatgtcacttctggaaatgagacgcagcgttgctgagctgcgcttacaactccagcagatgaggcagctgcagctacagaaccaggagctgcttagagcaatgatgaagaaggctgaactggagatttccggaaaagtcatggagaccatgaaacgccttgaagaccccgttcagcggcagcgtgtgctggtagaacaagagagacaaaagtacctgcacgaagaagagaagattgtcaagaagttatgcgagctggaggattttgtggaggacctgaagaaggattccacagcggcttctcgcctggtcactttgaaggacgtggaggacggagcgttccttcttaggcaggtgggcgaagccgtcgcgaccctcaaaggcgagttccctacactgcaaaacaagatgagagccatccttcgaatcgaggtcgaggccgtgaggtttctgaaagaagagccccacaagctggacagcctcctgaagcgggtgagatcaatgaccgatgttctcacgatgttgcgtagacacgtcacagatggactgctgaagggaaccgatgccgcccaagcggcccaatacatggctatggagaaggccaccgcagctgaagtgctaaagtcccaggaagaggcagcccatacatctggtcagccgttccactctaccggcgcgccgggggatgcaaagagtgaggtcgtacctctcagcggtatgatggttcggcacgcccaaagctctcccgttgtgatacagccttcccagcattctgtggccctcctgaatcctgcccaaaaccttccccacgtggcctcaagccctgctgtccctcaagaagcgacttcaacattacagatgagccaagcaccgcagtccccgcagattcccatgaatggctccgccatgcagtccttattcatcgaggaaattcactcagtgtccgctaaaaatagggccgtgtcaatcgagaaggccgagaaaaagtgggaggaaaaacgacagaatctcgaccactacaatggaaaggagtttgaaaaacttctggaggaagcccaggcaaatatcatgaagagcatccccaatctggaaatgccccctgcaacagggcctcttccccgaggagacgctcccgtcgacaaggtcgagctgtccgaggatagccccaactctgagcaggatctggaaaagctgggaggtaagtcaccgccacctccaccccctccacccaggcgcagttatctccctggatcagggctcaccacaacaagatctggggacgtcgtctacactgggcggaaagagaacatcaccgccaaagcctcttcagaagacgcaggcccttccccacagaccagagcgaccaagtacccagccgaagagccagccagcgcttggaccccctctccaccccccgtgactacaagcagctctaaagacgaggaagaagaagaggaggagggagacaaaatcatggcagaactccaggcttttcaaaagtgttcatttatggacgtgaactccaatagccacgctgaacccagccgcgccgacagtcacgtcaaggataccagatctggcgctacagtaccacccaaagagaagaagaacctggagttttttcatgaggacgtgcgcaagtccgatgtagagtatgagaatgggccgcagatggagtttcagaaagtgactacaggcgcagtgagaccttcagaccctcccaagtgggagaggggtatggagaattccatctccgatgcctcccgcacttcggagtataagactgaaattatcatgaaggagaattcaattagcaacatgtcactgcttcgcgatagccgcaattactcgcaggaaacagttccaaaggcgtcattcgggttttcaggcatttccccattagaagatgaaatcaataaaggaagcaagatctcaggcttgcagtactccataccagatactgagaaccagacccttaactacgggaagacaaaggagatggagaaacaaaacaccgacaagtgtcacgtatcatctcacacccgcttgaccgagtcctctgttcatgacttcaaaacagaggatcaagaggtgattacaacagatttcggccaggtagtgctgaggcccaaggaagcacgacacgcgaacgtgaacccgaacgaggacggcgaatcatccagctctagccctacagaggagaacgccgcgaccgacaatattgctttcatgatcactgagactaccgtacaggtgctgagtagcggtgaagtacatgatatcgttagccagaaaggcgaagatatccaaaccgttaacatagatgccagaaaagaaatgactccgcgccaggaagggacggacaatgaagatccggtggtttgcctagacaagaagccagttatcattattttcgatgaacccatggacatacgaagcgcttacaaacgcctgagcactatttttgaagagtgtgacgaagaactggagaggatgatgatggaggaaaaaatagaagaggaggaggaagaagagaatggtgactccgtggtccagaacaacaacaccagtcagatgagtcataaaaaagtcgctcccggcaacctcagaaccggtcagcaggttgagactaaatcgcaaccgcatagcctggccaccgagaccagaaaccctggtggccaggagatgaacaggactgaactgaataagtttagccacgtggatagtccaaacagtgagtgcaaaggtgaggatgccactgacgatcaattcgaatctcctaaaaagaaatttaagttcaagttcccaaagaaacagctggctgccctcacccaggccattcgaaccgggactaagacaggcaaaaagacattgcaggtggtcgtgtatgaagaggaagaagaggatggtacactaaagcagcacaaagaggccaaacgcttcgagatagcccgaagccagcccgaagatacaccaacgtctattcctagtgcctcccggaaagggagctccggagctccacagacgagcaggatgcccgtgcccatgagtgccaaaaacaggcctggtactctggataagcccggcaagcaaagcaagctgcaagatccgaggcagtatcgacaagcaaatggaagtgcgaaaaagtcaggaggggacttcaaaccaacctcaccctcgctcccagcttcaaagattcccgcactcagcccttcaagcggcaaaagctcatctctgccctcaagctcaggagatagttcaaatctcccaaacccgcccgccacaaaacctagtattgcatcaaacccactgtccccacagactggcccccctgctcacagcgcctctttaattccttctgtgtctaatgggagcctcaaatttcagtcgctgacccacaccgggaagggccatcatctttccttttccccccagagccagaacgggcgtgccccccctcctctgtcatttagctcgtcccctccaagtccagcatcctcagtttccctcaatcagggagccaagggtaccagaaccattcacactccatctttgacttcctacaaagctcagaacggctcgtcctcgaaggccacacctagtaccgcaaaagagacatcctag

SEQ ID NO: 271887 - DNA, 4386 bp, Artificial Sequence
  derived and/or modified sequence
atgcagcgagagttagtgtacgcacgcggagatgggcctggcgctcccaggccagggtcaacagctcatcctccccacgccatccctaactcgcccccatccacccccgtaccccatagtatgccgccatctccctctcggatcccctacggtggcaccagatctatggtggtccctggtaacgccacaatcccacgcgacaggatctcttctttgcccgttagcagaccaatctcgcccagcccttcggcaattcttgaacgccgtgacgtcaagccagacgaggatatgtccggaaagaatatagcaatgtacagaaacgaagggttttatgccgacccttacctctaccacgaggggagaatgtcgattgcctcatcgcacgggggacaccctcttgatgtgccagatcatattatcgcatatcaccgcaccgcaattagaagtgcttctgcatactgtaaccctagcatgcaagccgagatgcatatggagcagtcactgtataggcaaaaatccagaaagtacccagacagtcacctgccaaccctgggctcaaagaccccacccgctagtccacacagagttagtgatttgcggatgattgacatgcacgctcactataatgctcacgggccaccccacactatgcaacctgatcgcgcttctccttcgaggcaggcgttcaagaaggagcccggaactctcgtgtacattgagaaacctcgatccgccgctggtctctccagcctggtcgacctgggtcctccactgatggagaagcaagtgttcgcgtattctaccgctactatcccaaaggacagagaaaccagtgagaagatgatgaaaactaccgccaaccggaaccacacagacagcgcgggtactcctcatgtttctggagggaaaatgctttctgcactcgagagcaccgtccccccttcgcagccgccaccagttgggactagcgcaattcacatgagtctgctcgaaatgcgtagatctgttgccgaacttagactgcagctccaacagatgaggcagctgcaattacagaatcaggagctgctccgtgcgatgatgaagaaagccgagttagaaatttcaggaaaggtgatggaaaccatgaagaggctagaagatcccgttcaaaggcagagggtcctcgttgagcaggagcgacagaagtacctccatgaggaagagaagatcgttaagaagctctgcgaactggaggacttcgttgaagatcttaaaaaagatagtacggctgccagccggttggttacgcttaaggatgttgaggacggtgcctttctccttcgacaagtgggggaagccgtggctacactcaagggggagttccccactctccagaacaaaatgagagcgattctcaggatagaggttgaggccgtaagatttttgaaggaagaaccccataagctcgactccctgcttaaacgcgtcaggtccatgaccgacgtgctgacaatgctgcgcaggcatgtaactgacggactcttgaaaggaaccgacgctgctcaggccgctcaatatatggccatggagaaagcaaccgccgctgaggttctaaagagtcaggaggaggcagctcatactagcggtcagccattccactccacaggcgcacctggcgacgctaaaagcgaggtggtccccctcagtggcatgatggtgagacatgctcagtcctcccctgtggtgatccagccctcacagcatagtgtggctcttttgaatcctgcccaaaacttaccccacgtggccagttcacccgctgtgccccaagaggcaaccagcactctccaaatgtcacaggctccacagagcccacaaatacccatgaacggtagcgccatgcagagcctattcatcgaggaaattcattccgtctctgctaaaaatcgtgccgtctccatcgaaaaggcagagaaaaagtgggaggaaaaacgccagaaccttgaccactataacgggaaagaattcgagaaactgcttgaggaggctcaggctaacatcatgaagagcattccaaatctggagatgccacccgctacgggccctcttcctagaggcgatgcgcctgtcgacaaagtcgagttgagtgaagacagtccaaattcagaacaggaccttgagaagctgggaggcaaatccccacctcccccacctccacctccccgacggagttacctgcccggttctggactgaccaccacgaggtccggcgatgtcgtgtacaccgggcgtaaggaaaacattaccgcaaaggcctccagtgaagacgccggacccagcccccaaaccagagccacgaaatatcctgccgaggagccagcctctgcctggacgccctcaccaccaccagtgactacctcatcctctaaggatgaggaagaagaagaagaagagggtgataagataatggcagagctgcaggcatttcagaaatgttcattcatggacgtgaactcgaatagccacgccgaaccctctcgcgcagactctcacgtgaaagacacgcgtagtggagcaaccgtgccccctaaggagaagaaaaacctggagttctttcatgaagacgtgagaaaatccgacgttgaatacgagaacggcccacagatggagtttcagaaggtaaccacaggggcagtcaggccgagtgaccctcccaagtgggaaagggggatggagaacagtatttccgacgcatctagaacatccgaatataagaccgagattatcatgaaagagaactctatttcaaacatgagcctcctgcgggattccaggaattacagtcaagagaccgtacctaaagcttcgttcggcttttccggaatctcaccactggaggacgagatcaacaaaggcagcaagattagcggtcttcagtactcgattccagatacagaaaaccagacactcaattatggaaaaaccaaggagatggagaagcagaacacagataaatgccacgtgagctcccatacccgcctaacagagagctcagtgcacgacttcaaaactgaggatcaggaggtcataactacagacttcgggcaggtagtgcttcgaccaaaagaagcgcgacacgcaaatgtgaaccccaatgaagacggagaaagctcctcgagttcccccaccgaggagaacgctgccaccgacaacatagcttttatgatcacagagacgaccgtgcaggtgctgagttccggcgaggtgcatgatattgtaagccagaaaggggaagacatccaaaccgtgaatattgacgctaggaaggagatgacaccacgacaggaggggaccgacaatgaagacccagtcgtgtgcctggataagaagcctgtgatcatcatctttgacgaaccaatggatatccggagcgcttacaaacggctctcaacaatttttgaagagtgtgacgaagagcttgagaggatgatgatggaggaaaagattgaagaggaagaagaggaggagaacggagacagtgtggtccagaacaacaatacctctcagatgtctcacaagaaagtcgccccaggcaaccttcgtacgggtcagcaggtcgaaactaaatcccagcctcacagcttggccacagaaacccgcaatccaggaggtcaagagatgaaccggactgaactgaacaagttcagccacgtggatagtcccaatagcgaatgtaagggcgaagatgccacagacgaccagtttgagtcaccgaaaaaaaaatttaagtttaaatttccaaaaaagcagttggccgcactcacccaggccattagaactggcaccaagacaggaaagaaaaccttgcaggttgtggtctatgaggaggaagaagaggacggcacgttgaaacagcacaaggaagccaaacgctttgagattgccagatctcaacccgaggatacccctgagaacaccgtgcgcagacaagaacagccatcaattgagtcaaccagcccgattagtagaacagatgaaatccgaaaaaacacgtaccgcacactagattctttagaacagaccatcaagcagctcgagaatacgatcagtgagatgtccccaaaagctctggtcgatactagctgcagctcaaatagggattcagttgcatcctcttcccatattgctcaggaagcctcgccccgacccttacttgttccggacgaggggccaacagcactcgaacctccaacaagcatcccttccgcatcaaggaaagggtcctcaggcgcaccacagacatcccgaatgcccgtacctatgagcgcaaaaaacaggcctggtactcttgacaagcctgggaagcagagcaaacttcaggatcctcgccagtatcgccagtag

SEQ ID NO: 271888 - DNA, 4599 bp, Artificial Sequence
  derived and/or modified sequence
atgcagcgcgaattagtgtacgcccgaggggacgggcctggagccccacggccagggtctaccgcgcaccctcctcatgctatcccaaattcaccccctagtaccccggttccccactcaatgcctcctagcccaagcaggataccatatggagggacacgtagtatggtcgtccccggaaatgccacgattcccagagacaggatttcttcactccccgtttctcgccctatttcaccctctcccagcgctattttagagagacgcgacgtgaagccagacgaagatatgagtggaaaaaacattgccatgtatcgcaatgaggggttctacgcggatccctatctgtatcacgagggacggatgtcaattgctagcagtcacggaggacatccgctggacgttcctgaccatatcatcgcatatcaccgcaccgctattcggagcgcctccgcatactgcaatccaagcatgcaagcggaaatgcacatggagcagtccctatatcggcagaagtcccggaagtacccagatagccacctgccgacacttggctccaagacccccccagcctctccccatagggtctcggatctaaggatgattgatatgcacgcccattacaatgcccacgggcctccccataccatgcagccagaccgggcaagtccgtctaggcaagcgttcaaaaaagagccagggacgctcgtgtacattgaaaaaccaaggagtgccgcagggctctcctctttggtagatctggggccacctctgatggagaagcaggtttttgcttattccaccgcaacaatacctaaagaccgagaaacaagtgagaagatgatgaagaccaccgccaatcgtaatcatactgattctgccggtaccccacacgtttctggaggcaaaatgctatctgcactggaaagtaccgtgccccctagccaaccgccacctgtggggacatcagctatccacatgagcctgctcgagatgagacggagtgtggccgagcttagactgcagttgcagcagatgaggcagctccagttgcagaatcaggagttgctgcgtgcaatgatgaaaaaagctgagctggagataagtggtaaggtgatggagacaatgaaacggctcgaagatccggtccagcgtcagcgtgtgctggtggaacaggaaaggcagaagtacctgcacgaggaagagaagatcgtgaagaaactgtgtgagctggaggacttcgtggaagacctgaagaaggattccactgcagccagccgcctggtgacattaaaggatgtggaagacggggcatttctgctcagacaagttggcgaggccgtcgctactctcaaaggtgagtttcccaccctgcagaacaaaatgagggcaattcttcgcatcgaagtggaagctgtgcgctttttaaaggaagagccccataaactggattccctgttgaagcgggtgcgatcgatgacggatgtgctgacaatgctcaggaggcatgttacggatggccttctgaaaggcacagatgcggctcaggcagcccagtatatggcaatggaaaaggccactgctgctgaagtgcttaagtctcaagaggaggctgcgcacacgtccggccagccgttccacagcaccggagctcccggagacgctaagtcggaggtcgtacctttgtccgggatgatggttagacacgcccagagttcacctgtcgtcattcagcccagccagcattcagttgccctcctgaatcctgcccagaatctgccccacgtggcttccagcccagccgtgccccaagaggccacaagcacactgcagatgagtcaggcaccccagagcccacagatcccaatgaacggctctgccatgcagtctcttttcattgaagaaatccactccgtgtcggctaagaatagggcagtgtctattgagaaggcggaaaagaaatgggaagagaagcggcagaatttggatcactataacggaaaggagtttgaaaaacttttggaagaggcccaggctaacatcatgaaaagcatcccaaatctggagatgccacccgctactgggccactccctcggggagacgcgcctgttgataaagttgagctgagcgaggactcccccaacagtgagcaggatctggagaagctaggcggaaaatctcccccacccccaccccctccacctcggagaagctatctacccggatcagggctgacaacaactcgcagtggtgacgtggtctatactggccgaaaggaaaacatcaccgccaaggcctccagcgaagatgcaggacctagtccccagacccgagcaaccaagtatccggctgaagagcccgctagcgcctggacacccagtccccctcctgtaaccaccagcagctctaaggatgaagaggaggaagaggaagaaggagacaagatcatggcagagttgcaggctttccagaagtgctcatttatggacgtgaacagcaactcgcacgcggaacctagcagggctgattcccacgtcaaagatacgaggagtggagctaccgtgccacccaaagaaaagaagaacttggagttcttccacgaggatgttagaaagagcgacgtcgagtacgagaatgggcctcaaatggaatttcagaaggttaccactggggcagtacgcccatccgacccccctaaatgggaacggggaatggagaatagcatttcagatgcctcacgtacttccgaatacaaaactgagataatcatgaaagagaattcaatcagcaacatgagcctgctccgcgattctaggaattacagccaggagaccgtgcccaaggcaagttttggattctcagggatctcccctcttgaagatgagatcaataaaggcagcaaaattagcggattgcaatactcgatccccgacaccgagaaccagacgttgaactacggcaaaactaaagaaatggaaaagcagaacacagacaagtgtcatgtatcgagtcatactaggctgactgaaagtagcgtgcacgattttaaaaccgaggatcaggaggttattactacggattttgggcaggttgtattgaggccaaaggaagcacgacatgcaaatgtgaatccaaatgaggacggtgaatccagcagtagctctcccacagaggaaaacgccgcaactgacaacatagcatttatgattaccgagaccactgtccaagtcttaagcagcggcgaagtccatgatattgtgtcccagaagggtgaggatattcagaccgtgaatatcgacgctagaaaggaaatgaccccacgacaggaaggtacagacaatgaggatccggtggtttgcctcgacaagaagccagttattatcatttttgatgagcccatggacatccgatctgcctacaaacgcctatcgaccatatttgaagagtgcgacgaggagctagagaggatgatgatggaggaaaaaatagaggaggaagaagaagaggagaacggtgactccgtggtacagaataacaacactagccagatgagccacaaaaaagttgcccctggtaacttgagaaccggtcagcaggtcgagacaaagtcgcagcctcactctctcgcaactgaaactagaaaccccggagggcaggagatgaaccgaacagagctgaataagttctcacacgtggactctccgaacagcgagtgcaagggggaagacgccacagacgatcagtttgagtctccaaaaaaaaagtttaaatttaaatttccgaagaagcagctcgctgcgctcactcaagcaataaggactgggacaaaaacaggcaagaaaacgcttcaggtcgttgtatacgaagaggaggaggaagatgggaccctgaaacagcataaggaagctaaaaggttcgagatcgctcggtcccaacccgaagacacgccaacctcgataccgagcgccagtagaaagggcagcagtggggcaccccagactagtcgcatgccggtgcccatgagcgccaagaatcgaccaggaacactggacaagcctggtaagcaatcgaaacttcaggaccccaggcaatatagacaggcaaacggctccgccaagaagagcggaggggattttaaacctacatccccatctctccctgcaagtaaaatccccgctctcagtcctagctctggaaaatctagttctctgccgagcagctcgggcgatagtagcaacctccccaatccacccgctactaagcctagtatagcaagtaaccccctttcaccgcaaacggggcctcccgcacactcagcttccctaatccccagtgtgtcaaacggatcccttaagttccagagcttaacccacaccggaaaaggtcatcacctctcattcagcccccagtcccaaaatggacgggctccgccaccgctttccttttcttcttcccccccaagtcccgcatcttcagtgtcacttaaccagggagccaaaggcactcggacgatccacacaccatctctcacatcatacaaggcgcaaaatgggagctctagtaaggctacgcctagcacagctaaggagactagctag

SEQ ID NO: 271889 - protein, 1001 aa, Artificial Sequence
  derived and/or modified sequence
MKVTVCFGRTRVVVPCGDGHMKVFSLIQQAVTRYRKAIAKDPNYWIQVHRLEHGDGGILDLDDILCDVADDKDRLVAVFDEQDPHHGGDGTSASSTGTQSPEIFGSELGTNNVSAFQPYQATSEIEVTPSVLRANMPLHVRRSSDPALIGLSTSVSDSNFSSEEPSRKNPTRWSTTAGFLKQNTAGSPKTCDRKKDENYRSLPRDTSNWSNQFQRDNARSSLSASHPMVGKWLEKQEQDEDGTEEDNSRVEPVGHADTGLEHIPNFSLDDMVKLVEVPNDGGPLGIHVVPFSARGGRTLGLLVKRLEKGGKAEHENLFRENDCIVRINDGDLRNRRFEQAQHMFRQAMRTPIIWFHVVPAANKEQYEQLSQSEKNNYYSSRFSPDSQYIDNRSVNSAGLHTVQRAPRLNHPPEQIDSHSRLPHSAHPSGKPPSAPASAPQNVFSTTVSSGYNTKKIGKRLNIQLKKGTEGLGFSITSRDVTIGGSAPIYVKNILPRGAAIQDGRLKAGDRLIEVNGVDLVGKSQEEVVSLLRSTKMEGTVSLLVFRQEDAFHPRELNAEPSQMQIPKETKAEDEDIVLTPDGTREFLTFEVPLNDSGSAGLGVSVKGNRSKENHADLGIFVKSIINGGAASKDGRLRVNDQLIAVNGESLLGKTNQDAMETLRRSMSTEGNKRGMIQLIVARRISKCNELKSPGSPPGPELPIETALDDRERRISHSLYSGIEGLDESPSRNAALSRIMGKYQLSPTVNMPQDDTVIIEDDRLPVLPPHLSDQSSSSSHDDVGFVTADAGTWAKAAISDSADCSLSPDVDPVLAFQREGFGRQIADETKLNTVDDQKAGSPSRDVGPSLGLKKSSSLESLQTAVAEVTLNGDIPFHRPRPRIIRGRGCNESFRAAIDKSYDKPAVDDDDEGMETLEEDTEESSRSGRESVSTASDQPSHSLERQMNGNQEKGDKTDRKKDKTGKEKKKDRDKEKDKMKAKKGMLKGLGDMFSLAKLKPEKR

SEQ ID NO: 271890 - DNA, 3006 bp, Artificial Sequence
  derived and/or modified sequence
atgaaagttacagtctgtttcggaaggactcgggtagtggttccgtgcggagacgggcatatgaaggtgttttctctcatccagcaggctgtcacacggtaccggaaagcaatcgccaaagatcccaactattggattcaggtacaccggctagagcatggagatggcggcattctcgacttagacgatatattatgcgacgtcgctgatgacaaggatcgcctggtggctgtatttgatgagcaggacccccaccatggtggtgacggtacatctgccagtagtacaggaacacaatcaccagagattttcggaagcgaactggggactaacaatgtttccgcctttcaaccttatcaagctaccagcgaaattgaggtgacaccatcagtactcagagctaatatgccgctccatgtgagaagaagctctgatcccgctcttattgggcttagcaccagcgtgtcagactcaaactttagctcagaggagccatcccgtaagaatcccacccgttggagtactacagccggatttctaaaacagaataccgccggctctcctaaaacctgcgatagaaaaaaagatgaaaattacaggtccttacctagggacaccagcaactggtctaatcagtttcaacgcgataacgctaggtcaagcctaagtgcctcccaccccatggtgggtaagtggttggagaaacaggagcaagacgaggatggtaccgaagaagacaatagccgtgtcgagccggtgggccatgccgatacgggattagaacacatacctaatttcagcttggatgatatggttaagttggtagaggttccaaacgatggtggacctttggggatccatgttgtccctttcagcgcccggggcgggaggacactggggctactcgtgaagcggctggaaaaaggcggcaaagccgaacacgagaatctctttcgggaaaatgactgtatcgtaagaatcaatgatggggacctaaggaatcgacgctttgagcaggcccagcacatgttccgccaagctatgagaacgccgattatctggttccacgtcgtccccgccgcgaataaggaacagtacgaacagctgtcacagtctgaaaaaaacaactattattcctccagattctcccccgattctcagtacatcgacaacagatcagtcaatagcgcgggcctccacaccgtgcagcgggcaccccggcttaatcatccccctgaacagatcgactcacactctcggctccctcactctgctcacccctccggaaaaccgccttcggcacccgcgtcggcacctcagaacgtattcagtaccacagtgtcctcaggctacaataccaaaaagataggaaagaggttaaatattcagctgaagaagggcaccgaaggcctgggctttagcatcacgagcagagacgttactatcgggggctctgcacctatctacgtcaagaacatcttgcctcggggggctgccatccaggatggtcggctaaaagccggagaccgcctcatagaggtcaacggggtggacctggtcggcaagagccaggaagaagtcgtctccctccttaggagcacaaagatggagggcaccgtctccctcctggtgttcaggcaagaggacgcctttcaccctcgtgagctgaatgcagagcctagccaaatgcaaatacctaaggagacaaaggccgaggacgaggatattgtgctaacgccggacggtactagggaatttttgacgttcgaggtgccactcaatgatagtggctcggccgggctgggcgtgtccgtgaaggggaatcgctctaaagaaaatcacgcagacttggggatctttgtgaagagcatcataaacgggggtgcagctagtaaggatggccggctccgggtaaatgaccagttgatcgctgtgaatggggagtctctccttggtaagactaaccaggacgcaatggagactttaaggaggagcatgtccaccgagggcaacaagaggggaatgatccagctgattgttgcacggcgaatttccaaatgcaatgaactcaaaagtccggggagcccaccagggcctgagctgccaatcgaaacagcactggatgatcgcgaaaggagaataagtcatagcctctatagcggcatagaaggactggacgaatccccgagtagaaacgccgcactctcccgcatcatggggaagtatcagctatcaccgactgtgaatatgccccaagacgacacagtgataattgaggacgatagactccctgtcttgccgccccatttaagcgaccagtcttcgtcttcctctcacgacgatgtgggcttcgttaccgctgacgccggtacatgggccaaagccgccatcagtgattctgccgattgcagcttatccccagacgtggaccccgtgctggcatttcagagggagggatttggccggcaaatcgccgatgagacgaagctgaacactgtcgatgatcagaaggcaggcagcccgtccagagacgtggggccatctctgggactcaagaagtcaagcagcctagagagtttacaaacggccgtagccgaggtgactctcaatggcgatattccatttcatcgtcctaggccccgcattatccgggggcgggggtgtaacgagtcttttcgcgccgctatagataagagctatgataagccagccgtggatgatgacgacgagggcatggaaacactagaggaggatactgaggagtctagcaggagcggtagagagtcagtttccacagcatctgaccaaccctcacacagtctagagcgtcaaatgaacgggaatcaggaaaaaggcgataagacagataggaagaaagacaagacaggaaaggagaaaaaaaaggaccgtgacaaagagaaggacaagatgaaggctaaaaagggaatgctcaaaggactgggcgatatgttctcattagcaaagctgaagcccgagaagcggtag

SEQ ID NO: 271891 - DNA, 3006 bp, Artificial Sequence
  derived and/or modified sequence
atgaaggtgacagtgtgctttggaagaaccagggtggtggtgccctgtggagatggccacatgaaggtgttcagcctcatccagcaggccgtgacccgctacaggaaggccatcgccaaggaccccaactactggatccaggtgcaccggctggagcacggagatggcggcatcctggacctggatgacatcctgtgtgatgtggctgatgacaaggaccggctggtggccgtgtttgatgagcaggacccccaccacggcggagatggcaccagcgccagcagcacaggcacccagagccctgagatcttcggcagcgagctgggcaccaacaacgtgtctgccttccagccctaccaggccaccagcgagattgaggtgacccccagcgtgctgcgggccaacatgcccctgcacgtgagaagaagcagtgaccctgccctgattggcctgagcacctctgtgtctgacagcaacttcagcagcgaggagcccagcaggaagaaccccacccgctggagcaccacagctggcttcctgaagcagaacacagctggcagccccaagacctgtgacaggaagaaggatgagaactaccgcagcctgccccgggacaccagcaactggagcaaccagttccagagggacaatgcccggagcagcctgagcgccagccaccccatggtgggcaagtggctggagaagcaggagcaggatgaagatggaacagaggaggacaacagccgggtggagcctgtgggccacgccgacaccggcctggagcacatccccaacttcagcctggatgacatggtgaagctggtggaggtgcccaatgatggcggccccctgggcatccacgtggtgcccttcagcgcccggggcggccgcaccctgggcctgctggtgaagaggctggagaagggcggcaaggccgagcatgaaaatctcttccgggagaatgactgcatcgtgcgcatcaatgatggagacctgaggaacagaagatttgagcaggcccagcacatgttccggcaggccatgaggacccccatcatctggttccacgtggtgcctgctgccaacaaggagcagtatgagcagctgagccagagcgagaagaacaactactacagcagccgcttctccccagacagccagtacatcgacaacagatctgtgaacagcgctggcctgcacacagtgcagagggccccccggctgaaccaccccccagagcagattgacagccacagccggctgccccacagcgcccaccccagcggcaagcccccatctgccccagccagcgccccccagaatgtgttcagcaccaccgtgagcagcggctacaacaccaagaagattggcaagaggctgaacatccagctgaagaagggcacagagggcctgggcttcagcatcaccagcagagatgtgaccatcggcggcagcgcccccatctacgtgaagaacatcctgcccaggggggccgccatccaggacggccgcctgaaggccggggacaggctcatcgaggtgaatggagtggacctggtgggcaagagccaggaggaggtggtgtccctgctgcggagcaccaagatggagggcaccgtgtccctgctggtgttccggcaggaggatgccttccacccccgggagctgaatgctgagcccagccagatgcagatccccaaggagaccaaggccgaggatgaggacatcgtgctgaccccagatggcacccgggagttcctgacctttgaggtgcccctgaatgacagcggcagcgctggcctgggcgtgtctgtgaagggcaacagaagcaaggagaaccacgccgacctgggcatctttgtgaagagcatcatcaatggaggagctgccagcaaggatggccgcctgcgggtgaatgaccagctgattgctgtgaatggagagagcctgctgggcaagaccaaccaggatgccatggagaccctgcggcgctccatgagcacagagggcaacaagaggggcatgatccagctgattgtggcccggcgcatcagcaagtgcaatgagctgaagagccctggcagccccccaggccctgagctgcccattgaaacagccctggatgaccgggagcggcgcatcagccacagcctgtacagcggcatcgagggcctggatgagagccccagcagaaatgctgccctgagccgcatcatgggcaagtaccagctgagccccaccgtgaacatgccccaggatgacaccgtcatcattgaagatgaccggctgcctgtgctgcccccccacctgagtgaccagagcagcagcagcagccatgatgatgtgggctttgtgacagcagatgctggcacctgggccaaggccgccatcagtgacagcgctgactgcagcctgagcccagatgtggaccctgtgctggccttccagcgggagggcttcggccggcagattgctgatgagaccaagctgaacacagtggatgaccagaaggccggcagccccagcagagatgtgggccccagcctgggcctgaagaagagcagcagcctggagagcctgcagacagctgtggccgaggtgaccctgaatggagacatccccttccaccggccccggccccgcatcatccggggccggggctgcaatgaaagcttccgggccgccatcgacaagagctatgacaagccagctgtggatgatgatgatgagggcatggagaccctggaggaggacacagaggagagcagccgcagcggccgggagagcgtgtccacagccagtgaccagcccagccacagcctggagcggcagatgaatggaaaccaggagaagggggacaagacagacaggaagaaggacaagacaggcaaggagaagaagaaggaccgggacaaggagaaggacaagatgaaggccaagaagggcatgctgaagggcctgggggacatgttcagcctggccaagctgaagccagagaagaggtag

SEQ ID NO: 271892 - DNA, 3006 bp, Artificial Sequence
  derived and/or modified sequence
atgaaggtgaccgtgtgcttcggccggacccgggtggtggtgccctgtggcgacggtcacatgaaggtcttcagcctcatccagcaggccgtgacccggtaccggaaggcaatagccaaggatccaaattattggatacaagtgcaccggctggagcatggggatggaggtatcctggatcttgatgacattctctgtgacgtagcagatgacaaggaccgcctggtggcggtctttgacgaacaggaccctcatcacggcggcgacggcaccagcgccagctcaactggaacccagtcccctgaaatatttgggtcagaactcggcacaaataatgtctccgcatttcaaccctaccaggcaacaagcgaaattgaagtgactccatctgtcctgcgggccaacatgcctctgcatgtccgccgaagctctgacccagccctgattgggttgagtaccagcgtatccgacagtaatttttcatccgaagaaccttccagaaaaaatcctacaagatggtcgaccaccgctggcttcctgaagcagaacaccgccgggtcacccaaaacttgtgatcgaaagaaagatgagaactatcggtccctgccccgtgacacctctaattggtccaatcagtttcagcgggacaacgctcgctccagtctgtcagcttcccatcccatggtagggaaatggttggaaaagcaggagcaggatgaggatgggacagaggaagataattcacgggttgagccagtgggccacgcagataccggactggaacacataccaaacttttctctggatgatatggtcaaactggttgaagtgccgaatgacggcggtcctctcggcatccatgtagtgcctttcagtgcccgagggggccgcaccctcggacttctggtgaaaagactcgaaaagggaggcaaagctgaacacgaaaacttatttagggagaacgattgtattgtccgaattaacgacggggacttgcggaaccggcgttttgaacaagcccaacatatgtttaggcaggctatgagaacacctatcatttggttccatgtggtccccgctgcgaacaaggagcagtacgaacagttgtcccaatctgagaagaataattattacagctctagattttctcctgactcccagtacatcgataatcgatcagtaaactctgcaggactgcataccgtccaacgcgcacccagactaaatcacccccccgaacaaatcgactctcacagcaggctcccccattcagctcacccaagcggaaagcccccaagcgcaccagctagcgccccacaaaatgtcttttcgaccaccgtgtcctctgggtacaacacgaagaaaatcggtaagcgactcaacatacagcttaagaagggtacagagggcctcggattctctattactagtcgagatgtaaccattggtgggagtgctccaatttatgtgaagaatatattacctagaggagcagcaatacaggacggaagactaaaggctggcgatagactgatcgaggtcaatggagttgatctggtagggaaatcacaggaagaagtagtctccctattgcgcagcacgaaaatggaagggacagtttctctgctcgttttccggcaggaagatgcattccatcccagggaattgaatgctgaaccttcccaaatgcaaattccgaaagagacaaaggctgaagatgaagacatagtgctcacccctgatggtacacgggagtttctgacctttgaagtgcccctgaatgattctgggtcagccggcctgggcgtgtcagtaaaggggaatcggtcaaaagaaaaccacgccgacttgggtatctttgttaaatccatcatcaacggcggcgctgcctcaaaagacggccgactgcgcgtgaatgaccagttaatagcggtaaacggagagtcccttctcggcaaaactaaccaggatgcaatggagaccctgaggcggagtatgagcacagagggaaacaaacgcggcatgattcagctcattgttgcaaggcgcattagcaagtgcaatgaactaaaaagccccggctcaccccccggacctgagctgcctatcgaaacagccctcgacgacagagagcgccggatttcacattcgctctattccgggatagaaggcctggacgaatcaccatctcggaatgccgcactcagccgaatcatggggaagtaccaactaagtccaactgtcaatatgccccaagacgacaccgtaattatcgaggacgaccggctgcccgttttacctccacatctttcggaccagtccagtagttcatcacatgatgacgtaggctttgtcactgccgatgcggggacctgggcaaaggcagcaatatctgactctgcagactgctctctctccccagatgtggatccggtgctggccttccagcgggagggtttcgggagacagattgccgacgagaccaaactaaacactgtggatgatcaaaaggctggatccccatccagagatgttgggccgtccctaggactgaagaagagttcttctctcgaatcactacagacagccgtggcagaggttaccctcaatggagatatccctttccacaggccccggcccaggatcatacgtgggagaggatgtaatgaatccttccgcgcagcaattgacaagtcatatgacaaacctgctgtcgatgacgatgatgagggcatggagaccttggaggaggacacagaagagtcttctagatcgggtcgcgagagtgtgtctacagcctccgaccagccctctcacagcttggagagacagatgaacgggaaccaggagaaaggcgataaaaccgatcggaaaaaagataagaccggaaaagagaagaagaaagaccgggacaaggagaaggataaaatgaaggccaagaaaggcatgctgaaaggtctaggggatatgttctctctcgctaagctgaagcctgaaaaacggtag

SEQ ID NO: 271893 - DNA, 3420 bp, Artificial Sequence
  derived and/or modified sequence
gcggccccgagcgagcgccagcgccacacagccccgggcagccgccggcgagcgcgccgcgacgccgaacaggtggccggaggctgcgggcgccgcggcggggagaggcgaggcaagccccgggcgaagcgaggcgaggcgagggcggccgggccgggcatgcgagctgagcggccccccggcgtcgccgccgcctgcccgcgcccctagccgcccgcgcgcccgagtccccagcggctcctccgcgcccagcgtcctcggtcccggcctcggctgctccggctgcgctcggcgaggggcgcgggcccgcccgcggcggcggcggcatgaaagtgaccgtgtgcttcggacggacccgggtggtcgtgccgtgcggggacggccacatgaaagttttcagcctcatccagcaggcggtgacccgctaccggaaggccatcgccaaggatccaaactactggatacaggtgcatcgcttggaacatggagatggaggaatactagaccttgatgacattctttgtgatgtagcagacgataaagacagactggtagcagtgtttgatgagcaggatccacatcacggaggtgatggcaccagtgccagttccacgggtacccagagcccagagatatttggtagtgagcttggcaccaacaatgtctcagcctttcagccttaccaagcaacaagtgaaattgaggtcacaccttcagtccttcgagcaaatatgcctcttcatgttcgacgcagtagtgacccagctctaattggcctctccacttctgtcagtgatagtaatttttcctctgaagagccttcaaggaaaaatcccacacgctggtcaacaacagctggcttcctcaagcagaacactgctgggagtcctaaaacctgcgacaggaagaaagatgaaaactacagaagcctcccgcgggatactagtaactggtctaaccaatttcagagagacaatgctcgctcgtctctgagtgccagtcacccaatggtgggcaagtggctggagaaacaagaacaggatgaggatgggacagaagaggataacagtcgtgttgaacctgttggacatgctgacacgggtttggagcatatacccaacttttctctggatgatatggtaaagctcgtagaagtccccaacgatggagggcctctgggaatccacgtagtgcctttcagtgctcgaggcggcagaaccctggggttattagtaaaacgattggagaaaggtggtaaagctgaacatgaaaatctttttcgtgagaatgattgcattgtcaggattaatgatggcgaccttcgaaatagaagatttgaacaagcacaacatatgtttcgccaagccatgcgtacacccatcatttggttccatgtggttcctgcagcaaataaagagcagtatgaacaactatcccaaagtgagaagaacaattactattcaagccgttttagccctgacagccagtatattgacaacaggagtgtgaacagtgcagggcttcacacggtgcagagagcaccccgactgaaccacccgcctgagcagatagactctcactcaagactacctcatagcgcacacccctcgggaaaaccaccatccgctccagcctcggcacctcagaatgtatttagtacgactgtaagcagtggttataacaccaaaaaaataggcaagaggcttaatatccagcttaagaaaggtacagaaggtttgggattcagcatcacttccagagatgtaacaataggtggctcagctccaatctatgtgaaaaacattctcccccggggggcggccattcaggatggccgacttaaggcaggagacagacttatagaggtaaatggagtagatttagtgggcaaatcccaagaggaagttgtttcgctgttgagaagcaccaagatggaaggaactgtgagccttctggtctttcgccaggaagacgccttccacccaagggaactgaatgcagagccaagccagatgcagattccaaaagaaacgaaagcagaagatgaggatattgttcttacacctgatggcaccagggaatttctgacatttgaagtcccacttaatgattcaggatctgcaggccttggtgtcagtgtcaaaggtaaccggtcaaaagagaaccacgcagatttgggaatctttgtcaagtccattattaatggaggagcagcatctaaagatggaaggcttcgggtgaatgatcaactgatagcagtaaatggagaatccctgttgggcaagacaaaccaagatgccatggaaaccctaagaaggtctatgtctactgaaggcaataaacgaggaatgatccagcttattgttgcaaggagaataagcaagtgcaatgagctgaagtcacctgggagcccccctggacctgagctgcccattgaaacagcgttggatgatagagaacgaagaatttcccattccctctacagtgggattgaggggcttgatgaatcgcccagcagaaatgctgccctcagtaggataatgggtaaataccagctgtcccctacagtgaatatgccccaagatgacactgtcattatagaagatgacaggttgccagtgcttcctccacatctctctgaccagtcctcttccagctcccatgatgatgtggggtttgtgacggcagatgctggtacttgggccaaggctgcaatcagtgattcagccgactgctctttgagtccagatgttgatccagttcttgcttttcaacgagaaggatttggacgtcagatagctgacgagactaaactcaatacagtggatgaccagaaagcaggttctcccagcagagatgtgggtccttccctgggtctgaagaagtcaagctcgttggagagtctgcagaccgcagttgccgaggtgactttgaatggggatattcctttccatcgtccacggccgcggataatcagaggcaggggatgcaatgagagcttcagagctgccatcgacaaatcttatgataaacccgcggtagatgatgatgatgaaggcatggagaccttggaagaagacacagaagaaagttcaagatcagggagagagtctgtatccacagccagtgatcagccttcccactctctggagagacaaatgaatggaaaccaagagaaaggtgataagactgatagaaaaaaggataaaactggaaaagaaaagaagaaagatagagataaggagaaggataaaatgaaagccaagaagggaatgctgaagggcttgggagacatgttcagccttgccaaactgaagcccgagaagagatgaacaacaaagcgattcaaaacatgtcttgaacagcacatattgcacagttgttgttttttttaaacaaacaataaatttacttttaatg

SEQ ID NO: 271894 - DNA, 3006 bp, Artificial Sequence
  derived and/or modified sequence
atgaaagttactgtgtgtttcggaaggacgcgggtggttgtcccttgtggtgatggccacatgaaagtgttctcactgatacagcaggcagtgactcggtaccgaaaggcaatcgctaaagatcctaactattggatccaagtccacagactggaacatggagacgggggtatcttggacctcgatgacatcctctgtgacgtcgctgatgacaaggatcggctcgtggccgtatttgacgagcaggacccacaccatggcggagatggcactagtgcctcctctactggcactcagtcaccggaaattttcggttccgaattaggtaccaataatgtgtccgcattccagccttaccaggctacctcagaaatcgaggtcacacctagcgtgttacgcgctaatatgcccctgcatgtgaggagatcttctgatcctgccctgatcggcctgtctactagcgtgagcgattctaacttctctagcgaagagccatcgcgcaagaatccaacaaggtggtctactaccgctgggtttttgaagcagaacaccgctggttctccaaagacttgtgatagaaaaaaagatgagaactacagaagcctccctagggacacaagtaactggagcaatcagtttcaacgcgataacgcgaggtccagtctgtccgcgtcccaccctatggtgggcaaatggctggaaaagcaggagcaggatgaagacggtactgaagaggataattcgagggtggaaccagtggggcatgcggatacaggccttgagcacatccctaacttttccctggatgatatggtgaagctcgtagaagtcccaaatgatggtggcccattggggatccacgtggtgcctttctccgccagaggagggagaacactgggattgctggttaaacgcctcgagaagggcggaaaggcggagcacgagaacctctttcgcgagaacgactgtatcgtgcgtatcaatgatggagacctgcggaatagaaggtttgaacaggcgcagcatatgttccgacaggcaatgagaactcccattatctggttccacgttgttcctgctgccaacaaagaacagtacgaacagttgtcacaatccgagaaaaacaattactacagctcccggttcagccccgactctcaatacatagacaatagatctgttaactccgcaggcctgcataccgtacagagagcccctcggcttaaccatccacccgagcagattgattctcattccagactcccacacagcgcccacccaagtggtaagcccccttcggccccagcctctgctccccaaaacgtgttctccaccactgtgagttctggctacaatacgaagaagataggaaaaaggctgaacattcaactgaagaaaggcactgaaggactcgggttctccataacatctcgggacgtgaccattggcggttcagccccaatctacgtgaagaacatcttgccacggggagcagctatccaggacggaaggctgaaggccggagaccgcctgattgaggtgaatggcgtggacttggtgggaaaaagtcaggaggaggtggtctccctcctacgctctactaagatggagggcacagtatctctgctggttttccgacaagaagatgccttccaccctagggagcttaacgctgaaccttcacagatgcagattcctaaggaaacaaaggcggaggacgaggacattgtgctcacgccagatggcacacgcgagttcctgactttcgaagtaccactgaacgattccgggtcagcagggctgggtgtcagcgtcaaaggaaaccggtcgaaggaaaaccacgccgaccttggtatctttgtaaagagtattataaacggcggtgctgcctccaaggatggaaggctgcgcgtgaatgatcagttgattgccgtcaacggcgagtcactcttagggaagaccaatcaggatgctatggaaacgctgagacggtcaatgagcactgaggggaataaacggggaatgatccaactgatcgtcgccaggcggattagcaagtgtaatgagctgaagtcccctggaagtccgcctgggccagaactgcccatcgagaccgccttggacgatagagaacgcagaatttcccactcactgtactcagggattgagggcctcgacgagagcccttctagaaatgctgcacttagcagaatcatgggaaagtaccagctgtcccctaccgtgaatatgcctcaggatgacaccgtgattatcgaggatgatcgtttgcccgtcctgcctcctcacctgtctgatcaaagttcaagttcatcccacgacgacgtgggattcgtcactgccgatgcgggaacatgggctaaggcagccatcagcgactcggcagattgctctctctcccctgacgtagaccctgtgctggccttccaacgagaaggctttggccgtcagatcgccgatgagacaaagctgaatactgtcgacgaccagaaggcgggttctcctagcagggatgttggccctagcctgggactgaaaaagtcatcatccctggagtctctgcagactgcggtcgctgaggtaactctgaatggcgatattccctttcaccgcccaaggcctcgcatcattcggggacgcggttgcaacgagagttttcgggctgccatcgacaagagctacgataaaccagccgtggatgatgacgatgaagggatggaaacactcgaggaggacacagaggagtcttctaggtccgggagggagtccgtgtccacagcctccgatcagcccagccacagcctggagaggcagatgaatggaaaccaagaaaaaggagataaaactgacagaaaaaaggacaagacagggaaagagaagaaaaaggatcgcgacaaggagaaagacaaaatgaaagctaaaaaggggatgctgaaggggctcggggacatgttctctctcgcgaagctaaagcccgaaaaacgctag

SEQ ID NO: 271895 - DNA, 3006 bp, Artificial Sequence
  derived and/or modified sequence
atgaaggtgaccgtgtgcttcggcagaaccagagtggtggtgccctgcggcgacggccacatgaaggtgttcagcctgatccagcaggccgtgaccagatacagaaaggccatcgccaaggaccccaactactggatccaggtgcacagactggagcacggcgacggcggcatcctggacctggacgacatcctgtgcgacgtggccgacgacaaggacagactggtggccgtgttcgacgagcaggacccccaccacggcggcgacggcaccagcgccagcagcaccggcacccagagccccgagatcttcggcagcgagctgggcaccaacaacgtgagcgccttccagccctaccaggccaccagcgagatcgaggtgacccccagcgtgctgagagccaacatgcccctgcacgtgagaagaagcagcgaccccgccctgatcggcctgagcaccagcgtgagcgacagcaacttcagcagcgaggagcccagcagaaagaaccccaccagatggagcaccaccgccggcttcctgaagcagaacaccgccggcagccccaagacctgcgacagaaagaaggacgagaactacagaagcctgcccagagacaccagcaactggagcaaccagttccagagagacaacgccagaagcagcctgagcgccagccaccccatggtgggcaagtggctggagaagcaggagcaggacgaggacggcaccgaggaggacaacagcagagtggagcccgtgggccacgccgacaccggcctggagcacatccccaacttcagcctggacgacatggtgaagctggtggaggtgcccaacgacggcggccccctgggcatccacgtggtgcccttcagcgccagaggcggcagaaccctgggcctgctggtgaagagactggagaagggcggcaaggccgagcacgagaacctgttcagagagaacgactgcatcgtgagaatcaacgacggcgacctgagaaacagaagattcgagcaggcccagcacatgttcagacaggccatgagaacccccatcatctggttccacgtggtgcccgccgccaacaaggagcagtacgagcagctgagccagagcgagaagaacaactactacagcagcagattcagccccgacagccagtacatcgacaacagaagcgtgaacagcgccggcctgcacaccgtgcagagagcccccagactgaaccacccccccgagcagatcgacagccacagcagactgccccacagcgcccaccccagcggcaagccccccagcgcccccgccagcgccccccagaacgtgttcagcaccaccgtgagcagcggctacaacaccaagaagatcggcaagagactgaacatccagctgaagaagggcaccgagggcctgggcttcagcatcaccagcagagacgtgaccatcggcggcagcgcccccatctacgtgaagaacatcctgcccagaggcgccgccatccaggacggcagactgaaggccggcgacagactgatcgaggtgaacggcgtggacctggtgggcaagagccaggaggaggtggtgagcctgctgagaagcaccaagatggagggcaccgtgagcctgctggtgttcagacaggaggacgccttccaccccagagagctgaacgccgagcccagccagatgcagatccccaaggagaccaaggccgaggacgaggacatcgtgctgacccccgacggcaccagagagttcctgaccttcgaggtgcccctgaacgacagcggcagcgccggcctgggcgtgagcgtgaagggcaacagaagcaaggagaaccacgccgacctgggcatcttcgtgaagagcatcatcaacggcggcgccgccagcaaggacggcagactgagagtgaacgaccagctgatcgccgtgaacggcgagagcctgctgggcaagaccaaccaggacgccatggagaccctgagaagaagcatgagcaccgagggcaacaagagaggcatgatccagctgatcgtggccagaagaatcagcaagtgcaacgagctgaagagccccggcagcccccccggccccgagctgcccatcgagaccgccctggacgacagagagagaagaatcagccacagcctgtacagcggcatcgagggcctggacgagagccccagcagaaacgccgccctgagcagaatcatgggcaagtaccagctgagccccaccgtgaacatgccccaggacgacaccgtgatcatcgaggacgacagactgcccgtgctgcccccccacctgagcgaccagagcagcagcagcagccacgacgacgtgggcttcgtgaccgccgacgccggcacctgggccaaggccgccatcagcgacagcgccgactgcagcctgagccccgacgtggaccccgtgctggccttccagagagagggcttcggcagacagatcgccgacgagaccaagctgaacaccgtggacgaccagaaggccggcagccccagcagagacgtgggccccagcctgggcctgaagaagagcagcagcctggagagcctgcagaccgccgtggccgaggtgaccctgaacggcgacatccccttccacagacccagacccagaatcatcagaggcagaggctgcaacgagagcttcagagccgccatcgacaagagctacgacaagcccgccgtggacgacgacgacgagggcatggagaccctggaggaggacaccgaggagagcagcagaagcggcagagagagcgtgagcaccgccagcgaccagcccagccacagcctggagagacagatgaacggcaaccaggagaagggcgacaagaccgacagaaagaaggacaagaccggcaaggagaagaagaaggacagagacaaggagaaggacaagatgaaggccaagaagggcatgctgaagggcctgggcgacatgttcagcctggccaagctgaagcccgagaagagatag

SEQ ID NO: 271896 - protein, 1296 aa, Artificial Sequence
  derived and/or modified sequence
MKVTVCFGRTRVVVPCGDGHMKVFSLIQQAVTRYRKAIAKDPNYWIQVHRLEHGDGGILDLDDILCDVADDKDRLVAVFDEQDPHHGGDGTSASSTGTQSPEIFGSELGTNNVSAFQPYQATSEIEVTPSVLRANMPLHVRRSSDPALIGLSTSVSDSNFSSEEPSRKNPTRWSTTAGFLKQNTAGSPKTCDRKDEDGTEEDNSRVEPVGHADTGLEHIPNFSLDDMVKLVEVPNDGGPLGIHVVPFSARGGRTLGLLVKRLEKGGKAEHENLFRENDCIVRINDGDLRNRRFEQAQHMFRQAMRTPIIWFHVVPAANKEQYEQLSQSEKNNYYSSRFSPDSQYIDNRSVNSAGLHTVQRAPRLNHPPEQIDSHSRLPHSAHPSGKPPSAPASAPQNVFSTTVSSGYNTKKIGKRLNIQLKKGTEGLGFSITSRDVTIGGSAPIYVKNILPRGAAIQDGRLKAGDRLIEVNGVDLVGKSQEEVVSLLRSTKMEGTVSLLVFRQEDAFHPRELKAEDEDIVLTPDGTREFLTFEVPLNDSGSAGLGVSVKGNRSKENHADLGIFVKSIINGGAASKDGRLRVNDQLIAVNGESLLGKTNQDAMETLRRSMSTEGNKRGMIQLIVARRISKCNELKSPGSPPGPELPIETALDDRERRISHSLYSGIEGLDESPSRNAALSRIMGKYQLSPTVNMPQDDTVIIEDDRLPVLPPHLSDQSSSSSHDDVGFVTADAGTWAKAAISDSADCSLSPDVDPVLAFQREGFGRQSMSEKRTKQFSDASQLDFVKTRKSKSMDLGIADETKLNTVDDQKAGSPSRDVGPSLGLKKSSSLESLQTAVAEVTLNGDIPFHRPRPRIIRGRGCNESFRAAIDKSYDKPAVDDDDEGMETLEEDTEESSRSGRESVSTASDQPSHSLERQMNGNQEKGDKTDRKKDKTGKEKKKDRDKEKDKMKAKKGMLKGLGDMFRFGKHRKDDKIEKTGKIKIQESFTSEEERIRMKQEQERIQAKTREFRERQARERDYAEIQDFHRTFGCDDELMYGGVSSYEGSMALNARPQSPREGHMMDALYAQVKKPRNSKPSPVDSNRSTPSNHDRIQRLRQEFQQAKQDEDVEDRRRTYSFEQPWPNARPATQSGRHSVSVEVQMQRQRQEERESSQQAQRQYSSLPRQSRKNASSVSQDSWEQNYSPGEGFQSAKENPRYSSYQGSRNGYLGGHGFNARVMLETQELLRQEQRRKEQQMKKQPPSEGPSNYDSYKKVQDPSYAPPKGPFRQDVPPSPSQVARLNRLQTPEKGRPFYS

SEQ ID NO: 271897 - DNA, 3891 bp, Artificial Sequence
  derived and/or modified sequence
atgaaggtgaccgtctgtttcgggcggacacgggtggtggtcccatgcggcgacggtcacatgaaggtgtttagcctgattcagcaggccgtgaccagatacagaaaagccatcgccaaggatcccaactactggatccaagtgcacaggctagaacacggggatggagggattcttgatctcgatgatatcttgtgcgatgtggcagacgacaaggataggctggtcgcagtttttgacgaacaggacccacatcacggcggtgacggtaccagtgcctcctccactggcacccagtcgcctgaaattttcggtagcgaactgggtaccaacaacgtaagtgcttttcagccctaccaagcaaccagtgagattgaggttactcccagcgtgctgagagccaatatgccactccacgtgcggaggtcttcagacccagcgcttatagggctgtctacttcagtctccgacagcaactttagctccgaagaaccttcacgcaagaaccccacaagatggagtacaacagccggtttcttgaagcagaataccgcaggaagcccaaaaacatgcgaccgcaaagacgaggatgggactgaggaggataatagccgcgtagagcccgtgggacatgctgacaccggccttgagcacatccctaacttcagcttagacgatatggtcaaactcgtggaggtgccaaatgatgggggcccgctgggaatccacgtcgtgccatttagcgcaaggggcgggcggaccttaggcctcttggtcaagcggcttgaaaaaggtggaaaagccgagcacgaaaacctgttcagagagaacgattgcatcgtgcgcattaacgatggggatttgcggaatcggagattcgaacaggcgcagcacatgttccggcaggcaatgcgcaccccaattatatggttccatgtagttcccgccgcgaacaaggaacaatatgaacagttaagccagagcgagaagaataattattactcatcacgcttctctccggattcccagtatattgacaaccggtccgtgaacagcgccggtctccacacagtgcagcgagcacctaggttgaaccaccctcctgagcagattgatagccactctaggctgccacacagcgctcatcctagcgggaaacccccatctgcgcccgcgtcggcaccccagaacgtgttctccactacggtgtctagcggatataatactaaaaaaatcgggaagaggctgaacatccagctgaagaaagggactgagggcttgggcttctccattacatctagggacgtcaccatcggcggctctgcgcccatctatgtgaaaaatatcttgccccgcggcgccgctattcaggatggcagactgaaggccggggatagactcattgaagttaatggcgtagacctcgtaggtaaatcccaggaggaagttgtgagccttctgcggtccacaaagatggagggcacagtgagcctgctggtgtttaggcaagaggacgcgttccatccaagggagctcaaagcagaggacgaagatatcgtcttaacaccagacggaaccagggagtttttaaccttcgaggttcctctgaacgatagtggttcagccggcctgggagtgtcagtaaaagggaatcgctctaaggaaaaccacgcagatcttggtatcttcgtcaaatcgataattaacggcggtgccgccagcaaagacggccgcttgcgggtcaatgaccagctgattgccgttaatggcgaatcgttgttgggtaaaaccaatcaggatgccatggaaacactcagacggtctatgagcactgagggaaacaagagagggatgattcagttgatagtagcgcggcgaattagcaaatgcaatgaactgaaatcacccggctccccccccggcccagagttgccgattgagacagcactcgacgatcgagagagacgcatttcacacagtctgtactctggtattgaagggctggatgaatctccatccaggaacgcagccctgtcacgaattatgggcaaataccagctctctcccactgtgaatatgccacaggacgacacagttattatcgaagatgataggctgcctgtgctgccaccacacttatcagaccagagttcttcttcaagtcacgacgacgtgggatttgttaccgctgacgccggtacctgggccaaggcagctatttccgactcggctgactgctctctgtctcccgacgtggaccctgtactggcctttcaaagggaaggcttcggacgacaatctatgtccgaaaaacgcactaagcaattcagtgatgcttcacagctggatttcgtgaagacccggaaatctaaaagcatggatctaggcattgccgatgagacaaaactgaataccgtggacgatcaaaaagctggatccccctctcgtgatgtgggccccagcctggggctgaaaaaaagctcttcattggagtcattgcagaccgctgtggccgaggtgaccttaaacggggatataccatttcacagaccccgccctcgcattatccggggacgcggatgcaacgagagtttccgcgccgcaattgataaaagttatgacaagccagccgtcgatgatgacgatgaaggcatggaaactctggaggaagacaccgaggagagtagcagaagcgggcgcgagagtgtttctaccgcatccgatcagccttctcacagtctcgaaaggcagatgaacggtaatcaagagaaaggcgataagacagacagaaaaaaggacaaaaccggaaaagaaaagaaaaaggaccgcgacaaagagaaagataagatgaaagccaagaagggtatgctgaaaggtttgggcgacatgtttcggtttggcaagcacagaaaggacgataaaatcgaaaagacgggcaagattaagattcaggagtctttcacatccgaggaagagcggatccgaatgaaacaggagcaagagaggatacaggcaaagacgcgcgaattccgagagagacaggcacgcgagcgggactacgcggaaattcaggatttccaccgcactttcgggtgcgatgatgagctgatgtacggaggcgtgagctcttatgaaggcagtatggcacttaacgctcgaccacagtcgcctcgggaggggcacatgatggacgctctctatgcccaggtaaagaaaccaaggaattccaagccctcccccgtcgacagcaacagatctacaccttcgaaccacgacaggattcagcgactgaggcaggagttccagcaggccaagcaggacgaggatgtggaagaccgcagacgcacctattctttcgaacagccatggcccaacgcaaggcccgcaacacagtcagggcgccattccgtctctgtggaggtccagatgcaacggcagcgtcaggaggagcgcgagtcatcccagcaggcccagaggcagtatagcagcctacctcggcagtctcgcaaaaatgccagttcagtgagccaagattcatgggaacagaactattcaccaggggaggggttccagagcgcgaaggagaatccccgctattcctcgtaccagggatccaggaacggatacctcgggggacacggcttcaacgctcgagtgatgttagaaactcaggagttgctgcggcaggaacagcgaaggaaggaacagcagatgaagaagcagcctcccagcgagggcccctctaattacgatagctataagaaagtgcaagacccatcttacgctcctcctaagggaccctttagacaggacgttcctccgtccccctcacaagtggctagactgaacaggttgcagactccagagaaggggcggccattttatagttag

SEQ ID NO: 271898 - DNA, 3891 bp, Artificial Sequence
  derived and/or modified sequence
atgaaggtgacagtgtgctttggaagaaccagggtggtggtgccctgtggagatggccacatgaaggtgttcagcctcatccagcaggccgtgacccgctacaggaaggccatcgccaaggaccccaactactggatccaggtgcaccggctggagcacggagatggcggcatcctggacctggatgacatcctgtgtgatgtggctgatgacaaggaccggctggtggccgtgtttgatgagcaggacccccaccacggcggagatggcaccagcgccagcagcacaggcacccagagccctgagatcttcggcagcgagctgggcaccaacaacgtgtctgccttccagccctaccaggccaccagcgagattgaggtgacccccagcgtgctgcgggccaacatgcccctgcacgtgagaagaagcagtgaccctgccctgattggcctgagcacctctgtgtctgacagcaacttcagcagcgaggagcccagcaggaagaaccccacccgctggagcaccacagctggcttcctgaagcagaacacagctggcagccccaagacctgtgacaggaaggatgaagatggaacagaggaggacaacagccgggtggagcctgtgggccacgccgacaccggcctggagcacatccccaacttcagcctggatgacatggtgaagctggtggaggtgcccaatgatggcggccccctgggcatccacgtggtgcccttcagcgcccggggcggccgcaccctgggcctgctggtgaagaggctggagaagggcggcaaggccgagcatgaaaatctcttccgggagaatgactgcatcgtgcgcatcaatgatggagacctgaggaacagaagatttgagcaggcccagcacatgttccggcaggccatgaggacccccatcatctggttccacgtggtgcctgctgccaacaaggagcagtatgagcagctgagccagagcgagaagaacaactactacagcagccgcttctccccagacagccagtacatcgacaacagatctgtgaacagcgctggcctgcacacagtgcagagggccccccggctgaaccaccccccagagcagattgacagccacagccggctgccccacagcgcccaccccagcggcaagcccccatctgccccagccagcgccccccagaatgtgttcagcaccaccgtgagcagcggctacaacaccaagaagattggcaagaggctgaacatccagctgaagaagggcacagagggcctgggcttcagcatcaccagcagagatgtgaccatcggcggcagcgcccccatctacgtgaagaacatcctgcccaggggggccgccatccaggacggccgcctgaaggccggggacaggctcatcgaggtgaatggagtggacctggtgggcaagagccaggaggaggtggtgtccctgctgcggagcaccaagatggagggcaccgtgtccctgctggtgttccggcaggaggatgccttccacccccgggagctgaaggcagaagatgaagatattgtgctgaccccagatggcacccgggagttcctgacctttgaggtgcccctgaatgattctggcagcgctggcctgggcgtgtctgtgaagggcaacagaagcaaagaaaatcatgctgacctgggcatctttgtgaagagcatcatcaatggaggagctgccagcaaggatggccgcctgcgggtgaatgaccagctgattgctgtgaatggagagagcctgctgggcaagaccaaccaggatgccatggagaccctgcggcgctccatgagcacagagggcaacaagaggggcatgatccagctgattgtggcccggcgcatcagcaaatgtaatgagctgaagagccctggcagccccccaggccctgagctgcccatcgagacagccctggatgaccgggagcggcgcatcagccacagcctgtacagcggcatcgagggcctggatgagagccccagcagaaatgctgccctgagccgcatcatgggcaagtaccagctgagccccaccgtgaacatgccccaggatgacaccgtcatcattgaagatgaccggctgcctgtgctgcccccccacctgagtgaccagagcagcagcagcagccatgatgatgtgggctttgtgacagcagatgctggcacctgggccaaggccgccatcagtgacagcgctgactgcagcctgagcccagatgtggaccctgtgctggccttccagcgggagggcttcggccggcagagcatgtctgagaagaggaccaagcagttcagtgatgccagccagctggactttgtgaagaccaggaagagcaagtccatggacctgggcattgctgatgagaccaagctgaacacagtggatgaccagaaggccggcagccccagcagagatgtgggccccagcctgggcctgaagaagagcagcagcctggagagcctgcagacagctgtggccgaggtgaccctgaatggagacatccccttccaccggccccggccccgcatcatccggggccggggctgcaatgaaagcttccgggccgccatcgacaagagctatgacaagccagctgtggatgatgatgatgagggcatggagaccctggaggaggacacagaggagagcagccgcagcggccgggagagcgtgtccacagccagtgaccagcccagccacagcctggagcggcagatgaatggaaaccaggagaagggggacaagacagacaggaagaaggacaagacaggcaaggagaagaagaaggaccgggacaaggagaaggacaagatgaaggccaagaagggcatgctgaagggcctgggggacatgttccgctttgggaagcacaggaaggatgacaagattgagaagacaggcaagatcaagatccaggagagcttcaccagcgaggaggagcgcatccgcatgaagcaggagcaggagcgcatccaggccaagacccgggagttccgggagcggcaggcccgggagcgggactatgcagagatccaggacttccacaggaccttcggctgtgatgatgagctgatgtatggaggagtgtcctcctatgagggctccatggccctgaatgcccggccccagagcccccgggagggccacatgatggatgccctgtatgcccaggtgaagaagcccaggaacagcaagcccagccctgtggacagcaacagaagcacccccagcaaccacgaccgcatccagaggctgcggcaggagttccagcaggccaagcaggatgaagatgtggaggacagaagaaggacctacagctttgagcagccctggcccaatgcccggcctgccacccagagcggccgccacagcgtgtctgtggaggtgcagatgcagaggcagaggcaggaggagcgggagagcagccagcaggcccagaggcagtacagcagcctgccccggcagagcaggaagaatgccagctctgtgtcccaggacagctgggagcagaactacagccctggagagggcttccagagcgccaaggagaacccccgctacagcagctaccagggcagcagaaatggctacctgggcggccacggcttcaatgcccgggtgatgctggagacccaggagctgctgcggcaggagcagaggaggaaggagcagcagatgaagaagcagccccccagcgagggccccagcaactatgacagctacaagaaggtgcaggaccccagctatgccccacccaagggccccttccggcaggatgtgccccccagccccagccaggtggcccggctgaaccggctgcagaccccagagaagggccggcccttctacagctag

SEQ ID NO: 271899 - DNA, 3891 bp, Artificial Sequence
  derived and/or modified sequence
atgaaggtgaccgtgtgcttcggccggacccgggtggtggtgccctgcggagatggacatatgaaggtgttctcactcatccagcaggccgtgactcggtaccgtaaggctatagcaaaggatcctaactattggatccaggtgcacagactcgaacacggggatgggggcatcttggacctggacgatatcctttgcgacgtggccgacgataaggaccgccttgtggcagtcttcgacgaacaggacccacaccatggaggcgatggaacctccgctagctcgactggtacacagagtccggagatattcggttcagagctggggacaaacaacgtgagtgcgtttcaaccctatcaggcgacctccgagatcgaggtgactccttcggtgctgcgggccaatatgcccttacacgtccggagaagtagtgatcctgcgttgataggcttgtccactagcgtgagtgacagcaattttagctccgaggaaccttctcggaagaaccctacaagatggagcaccacagctggtttcctgaagcagaacacggcgggctcaccaaagacatgcgacagaaaggacgaagacggaacggaggaagacaattcccgcgttgagccagttgggcacgccgacactggactggagcacattcctaattttagtcttgatgatatggtgaagctcgtggaagtgccaaacgatggcgggcctttaggaatccatgtggtgccttttagtgctcgcgggggccggaccttaggcctgttggtgaagaggcttgagaaaggcggaaaggccgagcacgagaatctctttcgagaaaacgactgcatagtccgcatcaacgacggtgatctccgcaaccgacggtttgagcaggcccagcacatgttcaggcaagctatgcgaacacccataatatggttccatgtcgtgccagcagccaataaagagcagtatgagcagttgtcgcaaagtgaaaaaaacaactactattcctcccgtttttctccagactcccaatatatcgacaatcggtctgtgaatagtgcaggattacacaccgtgcagagagcccccaggctcaaccacccaccagagcagatcgatagccattctaggctcccccactcagcccatcccagcggcaaaccccccagcgcccccgcatcagctccccagaatgtgttctcaactacggtttcttccggctacaataccaagaagattggaaagcgattaaacattcagcttaaaaaggggactgaagggcttggtttttctatcacttctcgggacgtaaccattggaggctcagctccgatctatgtgaagaatatcttaccacgtggggcagcgatccaggatggcagactgaaggccggggatcggctcattgaagtcaatggggtagatttggttggaaaaagccaagaggaggtggtctcactgctccgctccacgaagatggagggaactgtaagtcttctggtgttccgacaagaggatgccttccaccctcgtgaactgaaagctgaagacgaagacattgttctgactccggacggcacccgcgagtttttgacatttgaggtgcccttaaatgattctggcagtgctgggctgggagtgagcgtgaaaggaaaccggtctaaggaaaaccacgctgatctggggatctttgttaagagcatcattaacggaggagccgctagcaaagatggcagactccgggtaaatgaccagttgatcgctgtgaatggggagtccctccttgggaagacaaaccaggatgccatggagactctccgaagaagcatgagcactgagggcaacaagcgggggatgattcagctgatagtcgcccgtaggattagtaagtgtaatgagctaaagagcccagggtcccctcccgggcccgaactccctatcgaaacagctcttgacgatcgggaacgtagaatctcccacagcctctactccgggatagagggtctggatgaatctccaagcagaaatgctgctctatctagaattatgggcaaatatcagctctctccgacagtgaacatgcctcaggatgatacagtaatcatagaggacgacaggttgccagtgttgcccccacacctttcagaccaatcctccagctcttcccacgacgacgtcggatttgtgaccgccgatgccggtacctgggccaaagccgcaatctcagacagcgccgactgttctctgtcgccagatgtggatcccgtcctggcctttcaacgggagggctttgggaggcagtcaatgagtgaaaaaaggacaaaacagtttagtgatgccagccaattagacttcgtgaagactagaaaaagcaaaagcatggacctgggcatcgccgatgaaacaaaactaaataccgtcgacgaccaaaaagccggctcacccagccgggatgttggcccgagcctgggattgaagaagagttccagtcttgagagcttgcagacagcagtggctgaggtcaccctgaacggtgacattccatttcataggcctcgtccccggattatccgaggcaggggttgcaatgaaagcttccgagcagccattgacaaatcatacgacaagcccgctgtcgacgatgatgacgaaggcatggagactcttgaggaggacactgaggaaagtagcagatccggacgagagtctgtgtcaaccgcatcagaccagccgtcgcacagcctcgagcgccaaatgaacggcaatcaggagaagggtgacaagaccgatagaaaaaaggataaaaccggaaaggagaaaaagaaagatagggacaaagagaaggacaagatgaaggctaagaaggggatgcttaaaggactgggtgacatgttccgattcgggaagcaccggaaggatgataaaatcgagaaaactggcaaaattaagattcaggaaagttttacatccgaggaggagcggataaggatgaagcaggaacaggaaaggattcaggccaagacacgtgagtttcgcgaacggcaggcgagggagcgagattatgcagagatacaagactttcacaggacctttgggtgtgatgatgaactcatgtacggaggagtgagctcctacgaagggtcaatggctcttaacgccaggccacaaagccccagagagggacatatgatggatgcattgtatgctcaggttaaaaaacctagaaactcaaagccgtcgccagtggattcaaatcgctcaactcccagcaaccatgacaggatccagcggcttcgccaggaatttcaacaggctaagcaggacgaggacgttgaggatcgccggaggacatactctttcgagcagccatggcctaatgcacggccggcgactcagtcaggacgacactctgtcagtgtggaggttcagatgcagaggcagcgccaagaggaacgcgagtccagtcaacaggctcagcggcagtattcatccctgcctcgtcagagccgcaaaaacgcatcctctgtgagtcaggactcctgggaacagaattactctccaggagagggtttccagtctgctaaagagaacccacgctactccagctaccaggggagtcgcaacggttatctggggggacacggctttaatgcccgcgttatgctggagacccaggaacttctcaggcaggagcagcgccggaaggaacaacagatgaagaagcaaccaccatctgaaggcccaagcaactatgacagttataaaaaggtacaggacccctcctacgctccacctaagggcccattccgccaggatgtgcctcctagtccgtcccaagtggctcggctgaataggctgcaaacacctgagaagggtaggcctttttactcgtag

SEQ ID NO: 271900 - DNA, 5825 bp, Artificial Sequence
  derived and/or modified sequence
gcggccccgagcgagcgccagcgccacacagccccgggcagccgccggcgagcgcgccgcgacgccgaacaggtggccggaggctgcgggcgccgcggcggggagaggcgaggcaagccccgggcgaagcgaggcgaggcgagggcggccgggccgggcatgcgagctgagcggccccccggcgtcgccgccgcctgcccgcgcccctagccgcccgcgcgcccgagtccccagcggctcctccgcgcccagcgtcctcggtcccggcctcggctgctccggctgcgctcggcgaggggcgcgggcccgcccgcggcggcggcggcatgaaagtgaccgtgtgcttcggacggacccgggtggtcgtgccgtgcggggacggccacatgaaagttttcagcctcatccagcaggcggtgacccgctaccggaaggccatcgccaaggatccaaactactggatacaggtgcatcgcttggaacatggagatggaggaatactagaccttgatgacattctttgtgatgtagcagacgataaagacagactggtagcagtgtttgatgagcaggatccacatcacggaggtgatggcaccagtgccagttccacgggtacccagagcccagagatatttggtagtgagcttggcaccaacaatgtctcagcctttcagccttaccaagcaacaagtgaaattgaggtcacaccttcagtccttcgagcaaatatgcctcttcatgttcgacgcagtagtgacccagctctaattggcctctccacttctgtcagtgatagtaatttttcctctgaagagccttcaaggaaaaatcccacacgctggtcaacaacagctggcttcctcaagcagaacactgctgggagtcctaaaacctgcgacaggaaggatgaggatgggacagaagaggataacagtcgtgttgaacctgttggacatgctgacacgggtttggagcatatacccaacttttctctggatgatatggtaaagctcgtagaagtccccaacgatggagggcctctgggaatccacgtagtgcctttcagtgctcgaggcggcagaaccctggggttattagtaaaacgattggagaaaggtggtaaagctgaacatgaaaatctttttcgtgagaatgattgcattgtcaggattaatgatggcgaccttcgaaatagaagatttgaacaagcacaacatatgtttcgccaagccatgcgtacacccatcatttggttccatgtggttcctgcagcaaataaagagcagtatgaacaactatcccaaagtgagaagaacaattactattcaagccgttttagccctgacagccagtatattgacaacaggagtgtgaacagtgcagggcttcacacggtgcagagagcaccccgactgaaccacccgcctgagcagatagactctcactcaagactacctcatagcgcacacccctcgggaaaaccaccatccgctccagcctcggcacctcagaatgtatttagtacgactgtaagcagtggttataacaccaaaaaaataggcaagaggcttaatatccagcttaagaaaggtacagaaggtttgggattcagcatcacttccagagatgtaacaataggtggctcagctccaatctatgtgaaaaacattctcccccggggggcggccattcaggatggccgacttaaggcaggagacagacttatagaggtaaatggagtagatttagtgggcaaatcccaagaggaagttgtttcgctgttgagaagcaccaagatggaaggaactgtgagccttctggtctttcgccaggaagacgccttccacccaagggaactgaaagcagaagatgaggatattgttcttacacctgatggcaccagggaatttctgacatttgaagtcccacttaatgattcaggatctgcaggccttggtgtcagtgtcaaaggtaaccggtcaaaagagaaccacgcagatttgggaatctttgtcaagtccattattaatggaggagcagcatctaaagatggaaggcttcgggtgaatgatcaactgatagcagtaaatggagaatccctgttgggcaagacaaaccaagatgccatggaaaccctaagaaggtctatgtctactgaaggcaataaacgaggaatgatccagcttattgttgcaaggagaataagcaagtgcaatgagctgaagtcacctgggagcccccctggacctgagctgcccattgaaacagcgttggatgatagagaacgaagaatttcccattccctctacagtgggattgaggggcttgatgaatcgcccagcagaaatgctgccctcagtaggataatgggtaaataccagctgtcccctacagtgaatatgccccaagatgacactgtcattatagaagatgacaggttgccagtgcttcctccacatctctctgaccagtcctcttccagctcccatgatgatgtggggtttgtgacggcagatgctggtacttgggccaaggctgcaatcagtgattcagccgactgctctttgagtccagatgttgatccagttcttgcttttcaacgagaaggatttggacgtcagagtatgtcagaaaaacgcacaaagcaattttcagatgccagtcaattggatttcgttaaaacacgaaaatcaaaaagcatggatttaggtatagctgacgagactaaactcaatacagtggatgaccagaaagcaggttctcccagcagagatgtgggtccttccctgggtctgaagaagtcaagctcgttggagagtctgcagaccgcagttgccgaggtgactttgaatggggatattcctttccatcgtccacggccgcggataatcagaggcaggggatgcaatgagagcttcagagctgccatcgacaaatcttatgataaacccgcggtagatgatgatgatgaaggcatggagaccttggaagaagacacagaagaaagttcaagatcagggagagagtctgtatccacagccagtgatcagccttcccactctctggagagacaaatgaatggaaaccaagagaaaggtgataagactgatagaaaaaaggataaaactggaaaagaaaagaagaaagatagagataaggagaaggataaaatgaaagccaagaagggaatgctgaagggcttgggagacatgttcaggtttggcaaacatcgaaaagatgacaagattgagaaaacgggtaaaataaaaatacaggaatcctttacatcagaagaggagaggatacgaatgaagcaggagcaggagaggattcaagccaaaactcgagaatttagggaacgacaagctcgagagcgtgactatgctgaaattcaagattttcatcggacatttggctgtgatgatgagttaatgtatgggggagtttcttcttatgaaggttccatggctctcaacgctagacctcagagcccacgagaagggcatatgatggatgctttgtatgcccaagtcaagaagccgcggaattccaaaccctcacctgtagacagtaacagatcaactcctagcaatcatgatcggatacagcgtctgaggcaagaatttcagcaagcaaagcaagatgaagatgtagaagatcgtcggcggacctatagttttgagcaaccctggccgaacgcacggccggcgacgcagagcgggcgacactcggtgtccgtggaggtgcagatgcagcggcagcggcaggaggagcgcgagagctcccagcaggcccagcgccagtacagctctctgcctcggcaaagcaggaaaaatgccagctcggtctcccaggactcttgggagcagaactactcccctggggaaggcttccagagtgccaaagagaaccccaggtactccagctaccaaggctccaggaacggctacctgggaggacatggcttcaacgccagggtcatgctggaaactcaggagctccttcgccaggaacagaggcggaaggagcagcagatgaagaagcagcctccttccgaggggcccagcaactatgactcgtataagaaagtccaggaccccagttacgcccctcccaaggggcccttccggcaagatgtgcccccctccccttctcaggttgcgaggctgaacagacttcagactcctgagaaagggaggcccttctattcctgagcacgcaaataacggatgcttcatgtcgcgcaataaaagacattttcctatgaagacttgtattttgggagtttttttaaaacctcgatggtactatggagtatttctgttgttggtatcagtgcctttaagcggtgtaggcaaagaaatggaaggccttaatgtctttgccactatgtctcaagtgtctgtttcatggaaggatttcccaccctgtgacaatcatctgtttgaggtgttcatatgctctgcgcctctccacagtaccaggaatctcggccctactcatgagttgtccgcggcttggttgtaacatccctgcaccacttgcagtgacaaattcacctgaagtggaggatgacgtgcggccctgtttctccctctaagttctcttagctatgggatgacatcttagtctctggtggaggaaaagtgggcgacatacaccaaaaattggggctttctggtacttcacagcacagccatttgtcgtactttgtcatcactgtggttttctctttcctttctcagctctttgtgacgggagagtcggtcatcctattacagaagctaagccatagtccaacattgtttggtcaccatgggggtccttttgtaactgccttatgactcaacattaccaataaagtgatgatcctggtctgcgtttatacatacgcttgttcggtcctgttcctgacacgtgggttgagtcaccacagctctgtgtggggaacgtgggagacaggagtggctcctgccgggggaagctgggcctgccattggccctgtgtctatcatgaggggagagctaagaaagaaattctcctaggaagagctcatggcccagtacatcctagtaattattttaattagtttttgttctgacagcttgtcaggaagggcacagaatgggacagagataaaccagacagtcattttgatctgctctctacggtttttcaagtcagaggcaattgatgcttgtctaatgcatccacacactgcatgtctgactggcgatgccgcgctcctaagtagttctgccatgaaacataaaagacaaaggaaaagccgttacacatcacacagagaacattttcgggtcccacagcggtggtggcaggaagctcactctcgcgtcagtattagagtgtgtgtgtgggtctcggggatctcggtggctcccatcttccttcattgttctgaacatcctgtattgtaaaccatggctggggtgctaaagtgcctgtgaatcccgatgtggaaaaagctggaggtgaaagctcagcataccatgtatttactttaaaaacagaaaaaaagacatgtatggatatgtctattttttttttattggcacattgtatttttgtgttgacttgtttttagaaatgatgtgtccacacacgtacccgtgtctcttctgcatttctgtgtcatggttctgtttcttaatcacgtgcggcggtgtctaagtggtgttaccagtgtacgcgcagtgaccttggatgacagtggctctttctcacagcctcccctgagctgtgagaaacagctttctctgtacatatgcaactcctaataaaaggcatatttcttcctgtt

SEQ ID NO: 271901 - DNA, 3891 bp, Artificial Sequence
  derived and/or modified sequence
atgaaggtgacggtgtgcttcgggaggaccagggtcgttgtgccctgcggtgatggacatatgaaagtattttcattaattcaacaggcagtcacacgatataggaaggctatcgctaaagacccgaactactggattcaggtgcacaggcttgagcatggagatgggggtattcttgatttagacgatatcctgtgcgacgtggctgatgacaaagaccgtttggtagctgtgtttgatgaacaagaccctcatcatggaggcgacggcacttcagctagttctacagggacacagtctcctgagatctttgggtccgagctaggtaccaataacgtgtctgcctttcagccataccaagctacttccgagattgaggtgacacccagcgtgctgagagctaacatgcctctccatgtccggcgatcctccgatccggctcttattggcctgtccacttctgtaagtgatagcaacttttctagcgaggaaccgtctaggaagaaccctacccggtggagcaccaccgccggatttctcaagcagaatacagcgggttcacccaagacttgtgaccgcaaagatgaagacggtactgaggaagataactctcgggtggaacccgtgggccatgccgataccggattggaacacattccgaacttctccctggacgatatggtgaagctcgtggaggtgcctaatgatgggggtcccctcggcattcatgtcgtgcccttctccgctaggggtggccgtaccctgggcctgttggtgaaacgtttggagaaaggcggaaaggctgaacacgagaatctgttccgcgaaaacgattgcatcgtgcggattaacgatggcgacctgcgtaacaggcggtttgaacaagcccaacatatgttccgacaggccatgcgcactccaataatttggtttcacgtggttcctgctgccaacaaggaacaatacgagcagctgtcccagtccgagaagaacaattactattcttcccgattttcccctgatagtcagtatatagacaatcgctccgtgaacagcgctgggctccacaccgtccaaagagcccctcgcctgaatcacccccctgagcagatcgacagccactctcgtttacctcactcagctcaccccagcggcaaacccccaagtgcacctgcaagcgccccacagaacgtcttcagcacgaccgtgtcgagcggctacaacactaagaagataggcaagcggttaaacattcagctcaagaagggaactgaaggccttggctttagcataacctctagggacgtgaccatcgggggttctgcgccaatttatgtgaaaaacattttgccaaggggagccgcaattcaggatgggcgacttaaagctggggatcgcctcattgaagtgaacggcgtcgacctcgtgggcaagtcccaggaggaagtggtttccctgcttaggagcaccaagatggagggaaccgtgtcgctcctggtctttaggcaggaggacgcctttcacccacgcgagctcaaagccgaggacgaggacattgtactcaccccagatggcacacgcgagtttctcacctttgaggtccctttaaatgactccggctctgctggcctcggcgtgtctgtcaagggcaacagatctaaggagaaccacgcagacctcggaattttcgtcaagtctatcataaacgggggagcagcctccaaggatggtaggttgcgcgtgaacgaccagctgatcgcagtgaacggcgaatctcttcttggtaaaaccaatcaagatgctatggagactctaaggcgctccatgtcaactgagggcaacaagcgaggcatgatccaactgattgtcgccaggcggatttctaaatgcaatgagctgaagagccccggtagtccacccggacctgagctgcctatagaaactgcattggacgaccgcgaaaggcggatatcccactctctgtacagcgggatcgaggggctcgatgaatcccctagcagaaacgcagcactctctcgaattatgggaaaatatcagctgtctcccacagtgaatatgccgcaggatgatactgtcatcatcgaagatgacagactgcctgttttgcccccacacctgagcgaccaatcctcatcctccagccacgacgatgtgggcttcgtgaccgctgacgctgggacttgggccaaggccgctatcagcgattctgcagactgctctctgtcccccgacgtagaccccgtgctggccttccagcgggagggcttcggaagacagtctatgtctgagaagcgtactaagcagttttctgacgcatctcaactcgacttcgtgaaaactcgaaagagcaagtctatggatttagggatagcagacgaaacaaagctcaacactgtcgatgatcagaaggctggctctccgagccgtgacgtcggtccctctctagggctgaagaagtctagttcgttggaatcactccagactgcggttgccgaagtgacattgaatggcgacatccctttccaccggcctcggccaaggatcatcaggggccgaggttgtaatgagtcattccgtgccgctattgacaaaagctatgataagccagctgttgacgatgatgatgaagggatggaaaccctcgaggaggacacagaagagtcttcgcgatccgggagagaaagtgtgtctaccgctagcgaccagcccagtcactctctcgagcgacaaatgaatggcaaccaggagaaaggcgataagactgacaggaagaaagacaagacaggtaaagagaagaaaaaggaccgcgacaaagagaaagacaagatgaaagccaagaagggaatgctcaaaggattaggcgacatgtttaggttcggtaagcataggaaagatgataagattgaaaagacaggtaaaatcaagatacaagagtcattcaccagtgaagaagaacgcatccggatgaaacaagagcaagagcgcattcaggccaaaactagggaatttagggaacgccaagctcgcgaacgagattatgcggaaatacaagactttcataggacattcggctgcgatgacgagctgatgtacggcggagtgtcctcttatgagggttccatggccctaaatgcacggcctcaatcccctcgggaagggcacatgatggacgctctgtatgcccaagtgaagaaaccacgtaattcaaaaccgtctccggttgattctaaccggagcaccccaagcaatcatgataggattcagagactgagacaggaatttcagcaggccaagcaagatgaagacgtggaagacaggagacggacctactcctttgagcaaccttggcccaacgctcggccagccacacagagtggccgacattcggtctccgtggaggtgcagatgcaacgccagcgacaggaagagagggagtccagccaacaagcccagagacagtactctagcctgccccgacagagtcggaagaacgcctcctccgtctcacaggatagctgggagcagaattattccccaggggaagggtttcagtcggctaaagagaaccctcggtacagcagctaccaggggagtcggaatggctacttagggggtcacgggttcaacgctcgcgtgatgctagaaacccaggaattgttgcgccaagagcagcgacgtaaggagcagcagatgaagaagcagcctcccagcgagggcccaagcaattacgactcttacaaaaaagtgcaggacccctcctacgcaccgcctaaggggccatttaggcaggatgtgccacccagccccagccaagtggccagactgaatagactccagacacccgagaagggtagaccattctacagttag

SEQ ID NO: 271902 - DNA, 3891 bp, Artificial Sequence
  derived and/or modified sequence
atgaaggtgaccgtgtgcttcggcagaaccagagtggtggtgccctgcggcgacggccacatgaaggtgttcagcctgatccagcaggccgtgaccagatacagaaaggccatcgccaaggaccccaactactggatccaggtgcacagactggagcacggcgacggcggcatcctggacctggacgacatcctgtgcgacgtggccgacgacaaggacagactggtggccgtgttcgacgagcaggacccccaccacggcggcgacggcaccagcgccagcagcaccggcacccagagccccgagatcttcggcagcgagctgggcaccaacaacgtgagcgccttccagccctaccaggccaccagcgagatcgaggtgacccccagcgtgctgagagccaacatgcccctgcacgtgagaagaagcagcgaccccgccctgatcggcctgagcaccagcgtgagcgacagcaacttcagcagcgaggagcccagcagaaagaaccccaccagatggagcaccaccgccggcttcctgaagcagaacaccgccggcagccccaagacctgcgacagaaaggacgaggacggcaccgaggaggacaacagcagagtggagcccgtgggccacgccgacaccggcctggagcacatccccaacttcagcctggacgacatggtgaagctggtggaggtgcccaacgacggcggccccctgggcatccacgtggtgcccttcagcgccagaggcggcagaaccctgggcctgctggtgaagagactggagaagggcggcaaggccgagcacgagaacctgttcagagagaacgactgcatcgtgagaatcaacgacggcgacctgagaaacagaagattcgagcaggcccagcacatgttcagacaggccatgagaacccccatcatctggttccacgtggtgcccgccgccaacaaggagcagtacgagcagctgagccagagcgagaagaacaactactacagcagcagattcagccccgacagccagtacatcgacaacagaagcgtgaacagcgccggcctgcacaccgtgcagagagcccccagactgaaccacccccccgagcagatcgacagccacagcagactgccccacagcgcccaccccagcggcaagccccccagcgcccccgccagcgccccccagaacgtgttcagcaccaccgtgagcagcggctacaacaccaagaagatcggcaagagactgaacatccagctgaagaagggcaccgagggcctgggcttcagcatcaccagcagagacgtgaccatcggcggcagcgcccccatctacgtgaagaacatcctgcccagaggcgccgccatccaggacggcagactgaaggccggcgacagactgatcgaggtgaacggcgtggacctggtgggcaagagccaggaggaggtggtgagcctgctgagaagcaccaagatggagggcaccgtgagcctgctggtgttcagacaggaggacgccttccaccccagagagctgaaggccgaggacgaggacatcgtgctgacccccgacggcaccagagagttcctgaccttcgaggtgcccctgaacgacagcggcagcgccggcctgggcgtgagcgtgaagggcaacagaagcaaggagaaccacgccgacctgggcatcttcgtgaagagcatcatcaacggcggcgccgccagcaaggacggcagactgagagtgaacgaccagctgatcgccgtgaacggcgagagcctgctgggcaagaccaaccaggacgccatggagaccctgagaagaagcatgagcaccgagggcaacaagagaggcatgatccagctgatcgtggccagaagaatcagcaagtgcaacgagctgaagagccccggcagcccccccggccccgagctgcccatcgagaccgccctggacgacagagagagaagaatcagccacagcctgtacagcggcatcgagggcctggacgagagccccagcagaaacgccgccctgagcagaatcatgggcaagtaccagctgagccccaccgtgaacatgccccaggacgacaccgtgatcatcgaggacgacagactgcccgtgctgcccccccacctgagcgaccagagcagcagcagcagccacgacgacgtgggcttcgtgaccgccgacgccggcacctgggccaaggccgccatcagcgacagcgccgactgcagcctgagccccgacgtggaccccgtgctggccttccagagagagggcttcggcagacagagcatgagcgagaagagaaccaagcagttcagcgacgccagccagctggacttcgtgaagaccagaaagagcaagagcatggacctgggcatcgccgacgagaccaagctgaacaccgtggacgaccagaaggccggcagccccagcagagacgtgggccccagcctgggcctgaagaagagcagcagcctggagagcctgcagaccgccgtggccgaggtgaccctgaacggcgacatccccttccacagacccagacccagaatcatcagaggcagaggctgcaacgagagcttcagagccgccatcgacaagagctacgacaagcccgccgtggacgacgacgacgagggcatggagaccctggaggaggacaccgaggagagcagcagaagcggcagagagagcgtgagcaccgccagcgaccagcccagccacagcctggagagacagatgaacggcaaccaggagaagggcgacaagaccgacagaaagaaggacaagaccggcaaggagaagaagaaggacagagacaaggagaaggacaagatgaaggccaagaagggcatgctgaagggcctgggcgacatgttcagattcggcaagcacagaaaggacgacaagatcgagaagaccggcaagatcaagatccaggagagcttcaccagcgaggaggagagaatcagaatgaagcaggagcaggagagaatccaggccaagaccagagagttcagagagagacaggccagagagagagactacgccgagatccaggacttccacagaaccttcggctgcgacgacgagctgatgtacggcggcgtgagcagctacgagggcagcatggccctgaacgccagaccccagagccccagagagggccacatgatggacgccctgtacgcccaggtgaagaagcccagaaacagcaagcccagccccgtggacagcaacagaagcacccccagcaaccacgacagaatccagagactgagacaggagttccagcaggccaagcaggacgaggacgtggaggacagaagaagaacctacagcttcgagcagccctggcccaacgccagacccgccacccagagcggcagacacagcgtgagcgtggaggtgcagatgcagagacagagacaggaggagagagagagcagccagcaggcccagagacagtacagcagcctgcccagacagagcagaaagaacgccagcagcgtgagccaggacagctgggagcagaactacagccccggcgagggcttccagagcgccaaggagaaccccagatacagcagctaccagggcagcagaaacggctacctgggcggccacggcttcaacgccagagtgatgctggagacccaggagctgctgagacaggagcagagaagaaaggagcagcagatgaagaagcagccccccagcgagggccccagcaactacgacagctacaagaaggtgcaggaccccagctacgccccccccaagggccccttcagacaggacgtgccccccagccccagccaggtggccagactgaacagactgcagacccccgagaagggcagacccttctacagctag

SEQ ID NO: 271903 - protein, 747 aa, Artificial Sequence
  derived and/or modified sequence
MVKLVEVPNDGGPLGIHVVPFSARGGRTLGLLVKRLEKGGKAEHENLFRENDCIVRINDGDLRNRRFEQAQHMFRQAMRTPIIWFHVVPAANKEQYEQLSQSEKNNYYSSRFSPDSQYIDNRSVNSAGLHTVQRAPRLNHPPEQIDSHSRLPHSAHPSGKPPSAPASAPQNVFSTTVSSGYNTKKIGKRLNIQLKKGTEGLGFSITSRDVTIGGSAPIYVKNILPRGAAIQDGRLKAGDRLIEVNGVDLVGKSQEEVVSLLRSTKMEGTVSLLVFRQEDAFHPRELKAEDEDIVLTPDGTREFLTFEVPLNDSGSAGLGVSVKGNRSKENHADLGIFVKSIINGGAASKDGRLRVNDQLIAVNGESLLGKTNQDAMETLRRSMSTEGNKRGMIQLIVARRISKCNELKSPGSPPGPELPIETALDDRERRISHSLYSGIEGLDESPSRNAALSRIMGKYQLSPTVNMPQDDTVIIEDDRLPVLPPHLSDQSSSSSHDDVGFVTADAGTWAKAAISDSADCSLSPDVDPVLAFQREGFGRQSMSEKRTKQFSDASQLDFVKTRKSKSMDLVADETKLNTVDDQKAGSPSRDVGPSLGLKKSSSLESLQTAVAEVTLNGDIPFHRPRPRIIRGRGCNESFRAAIDKSYDKPAVDDDDEGMETLEEDTEESSRSGRESVSTASDQPSHSLERQMNGNQEKGDKTDRKKDKTGKEKKKDRDKEKDKMKAKKGMLKGLGDMFSLAKLKPEKR

SEQ ID NO: 271904 - DNA, 2244 bp, Artificial Sequence
  derived and/or modified sequence
atggtaaaattggtggaggtgccaaacgacggaggtcccctcggaatccacgtggttcccttctctgccaggggaggcaggaccctgggtctcctggtcaagcgtcttgaaaaagggggtaaagcagagcacgagaacctgtttagagaaaacgattgcatcgtgcgcatcaatgacggtgatctcagaaatcgcaggtttgagcaggcccagcacatgtttcgacaggccatgcgaacacctatcatctggtttcatgtggtccccgccgccaacaaagaacagtacgagcaactgagtcagagtgagaagaacaactactactcatcccggttctccccagatagtcagtacattgacaatcggagtgtgaactccgctggacttcatacagtccagagggcccctaggctgaatcacccacccgaacagattgacagccattcccgccttccacactccgcccatccaagcggcaaacccccttctgcccccgcttccgctccccagaatgtgtttagcacgaccgtgtcttccggctataataccaagaaaatcggaaaacgcctcaatattcagctgaagaaaggcacggagggacttggattttctataacctctcgtgacgtgaccatcgggggttccgccccaatttatgtcaagaacatcctcccccgcggggctgccattcaggacggccggttgaaggccggagaccggttgatagaggtcaatggcgtcgatttagtcggcaaatctcaggaggaggtggtcagcctgctccgttccactaagatggaaggcacagtgtctctgttggtgtttagacaagaggacgcttttcacccacgcgagctgaaagctgaggatgaggacattgtgctcacccctgatggcacacgggaatttcttacgttcgaggtgccactgaatgacagcggaagtgctggacttggcgtgtccgtgaagggaaatcggtctaaagaaaaccacgccgatttgggtatcttcgtgaagagcattatcaacggcggcgccgcctctaaggacggacggttgcgggtcaatgatcagctgattgccgtcaatggcgagagcctgctgggcaaaaccaaccaagacgctatggagactctcagaagaagcatgagcactgaggggaataagagaggcatgatccagctgatcgtggccaggcgcatttccaagtgtaacgagctcaaatcaccaggcagccctcccggaccagaactgcccattgaaacagcacttgacgatcgcgagcggcgcatctcgcactccctctattctggtatagagggattagatgaaagcccttccagaaatgcagctctttccaggatcatgggcaagtaccaactgtcacctactgtgaacatgcctcaagatgacactgttatcattgaagacgaccgcctgccagtgctgccaccccacttatctgatcagtctagcagctcatctcacgatgatgtgggattcgtaaccgcagacgccggtacttgggccaaagccgctattagcgattctgccgactgttctctctcgccagatgtggatccagtcctggcgtttcagagggagggcttcggcagacagtcaatgagcgagaaaagaaccaagcaattcagtgatgcatcccagctggatttcgtgaagacgcggaagagcaagagtatggatctcgtagcagacgagaccaaactgaacaccgtcgacgaccaaaaagctggctccccatctagggacgtggggcctagtctgggcttgaagaagtcaagctccttggaaagcctccaaacagccgtggccgaagtgaccctgaacggcgatatcccttttcatagaccaagaccacgtattattagagggcggggctgcaacgagtccttccgcgcagctatcgacaagtcctacgacaaaccagctgtcgacgacgatgatgaaggcatggagaccctggaggaggacaccgaggaatcctcccggagcggcagggaatctgtgtccaccgcctccgaccagccctcccactcattagagcggcaaatgaacggtaaccaggagaagggcgacaagacagacaggaagaaggacaagaccggaaaggagaagaagaaagaccgagataaggaaaaagacaaaatgaaagcgaagaaaggcatgctcaagggactgggagatatgttttccctcgctaagctgaagcccgaaaagcggtag

SEQ ID NO: 271905 - DNA, 2244 bp, Artificial Sequence
  derived and/or modified sequence
atggtgaagctggtggaggtgcccaatgatggcggccccctgggcatccacgtggtgcccttcagcgcccggggcggccgcaccctgggcctgctggtgaagaggctggagaagggcggcaaggccgagcatgaaaatctcttccgggagaatgactgcatcgtgcgcatcaatgatggagacctgaggaacagaagatttgagcaggcccagcacatgttccggcaggccatgaggacccccatcatctggttccacgtggtgcctgctgccaacaaggagcagtatgagcagctgagccagagcgagaagaacaactactacagcagccgcttctccccagacagccagtacatcgacaacagatctgtgaacagcgctggcctgcacacagtgcagagggccccccggctgaaccaccccccagagcagattgacagccacagccggctgccccacagcgcccaccccagcggcaagcccccatctgccccagccagcgccccccagaatgtgttcagcaccaccgtgagcagcggctacaacaccaagaagattggcaagaggctgaacatccagctgaagaagggcacagagggcctgggcttcagcatcaccagcagagatgtgaccatcggcggcagcgcccccatctacgtgaagaacatcctgcccaggggggccgccatccaggacggccgcctgaaggccggggacaggctcatcgaggtgaatggagtggacctggtgggcaagagccaggaggaggtggtgtccctgctgcggagcaccaagatggagggcaccgtgtccctgctggtgttccggcaggaggatgccttccacccccgggagctgaaggcagaagatgaagatattgtgctgaccccagatggcacccgggagttcctgacctttgaggtgcccctgaatgattctggcagcgctggcctgggcgtgtctgtgaagggcaacagaagcaaagaaaatcatgctgacctgggcatctttgtgaagagcatcatcaatggaggagctgccagcaaggatggccgcctgcgggtgaatgaccagctgattgctgtgaatggagagagcctgctgggcaagaccaaccaggatgccatggagaccctgcggcgctccatgagcacagagggcaacaagaggggcatgatccagctgattgtggcccggcgcatcagcaaatgtaatgagctgaagagccctggcagccccccaggccctgagctgcccatcgagacagccctggatgaccgggagcggcgcatcagccacagcctgtacagcggcatcgagggcctggatgagagccccagcagaaatgctgccctgagccgcatcatgggcaagtaccagctgagccccaccgtgaacatgccccaggatgacaccgtcatcattgaagatgaccggctgcctgtgctgcccccccacctgagtgaccagagcagcagcagcagccatgatgatgtgggctttgtgacagcagatgctggcacctgggccaaggccgccatcagtgacagcgctgactgcagcctgagcccagatgtggaccctgtgctggccttccagcgggagggcttcggccggcagagcatgtctgagaagaggaccaagcagttcagtgatgccagccagctggactttgtgaagaccaggaagagcaagtccatggacctggtggctgatgagaccaagctgaacacagtggatgaccagaaggccggcagccccagcagagatgtgggccccagcctgggcctgaagaagagcagcagcctggagagcctgcagacagctgtggccgaggtgaccctgaatggagacatccccttccaccggccccggccccgcatcatccggggccggggctgcaatgaaagcttccgggccgccatcgacaagagctatgacaagccagctgtggatgatgatgatgagggcatggagaccctggaggaggacacagaggagagcagccgcagcggccgggagagcgtgtccacagccagtgaccagcccagccacagcctggagcggcagatgaatggaaaccaggagaagggggacaagacagacaggaagaaggacaagacaggcaaggagaagaagaaggaccgggacaaggagaaggacaagatgaaggccaagaagggcatgctgaagggcctgggggacatgttcagcctggccaagctgaagccagagaagaggtag

SEQ ID NO: 271906 - DNA, 2244 bp, Artificial Sequence
  derived and/or modified sequence
atggtgaagctggtggaggtgcccaacgacggcggccccctgggcatacacgtggtacccttctccgctcgcgggggacggacacttggcctgctcgtgaaaaggctcgaaaagggcggaaaagccgaacatgaaaatctctttagggaaaacgattgtattgtcaggatcaatgacggcgacctccgcaaccgccgcttcgagcaggcccagcacatgtttagacaagctatgcggacgcctataatttggtttcacgtggtgcccgccgcaaacaaggagcagtatgagcagctctctcaatccgagaaaaacaattattactccagtcgcttctccccagacagtcagtatatcgataataggagcgtgaatagcgccgggctacacacagtccagagggcacctagattgaaccaccccccagaacagattgattcgcactctcgtttaccacattcagcccaccctagcggaaaacctccctctgccccagcatcggcaccccagaacgtctttagtacaaccgtgagcagtggctacaataccaaaaagatcggaaagagactgaatatccagttgaaaaaaggaacagaaggcctcgggttcagtataacttcccgggacgtaactattggcggaagcgcacctatatatgtgaaaaacatactgccacggggggcagctatccaggacggacggcttaaggccggcgaccgactcattgaagtgaatggggtcgatctcgtcggtaagtctcaggaggaggtcgtgtcgttgctgagatctacgaagatggagggcacagtttctcttctggtgtttcgccaggaggacgccttccatcctcgggagctgaaggccgaggatgaagacatcgtgctgacaccggatggaacgagagaatttctgacatttgaagtgcccctcaatgactcgggctctgccggtctgggagtcagcgtgaaagggaaccggagcaaggaaaatcatgcagatctggggattttcgtgaaaagtatcattaatgggggggctgcctctaaagacgggaggctccgcgttaatgatcagctcatcgccgtgaatggagaatcccttctcggcaagactaaccaagatgctatggaaaccttaaggcgctcaatgagtacggaagggaacaagagggggatgatacagctgatagtcgcacgcaggatttctaaatgcaatgagctaaagagcccaggcagcccacccgggccagagctgcccattgaaacagccctagatgaccgcgaacgaagaatcagtcattctctctactctggtatcgaagggctggatgagtctccgtctcgcaatgccgcactcagcagaatcatgggcaagtatcagctatcgcccaccgttaacatgcctcaggacgacaccgtcatcatcgaagacgatagactgccagtactgccaccgcacctcagcgatcagagcagctctagtagccacgacgacgtaggctttgtgaccgcagatgctggcacttgggcgaaagctgcaatttctgacagcgcagattgctctttgagccccgatgtggatcccgtcctggcatttcagagggaaggcttcggccggcaatctatgagtgaaaagcggacaaagcagttcagcgatgcgtcacagctggactttgtcaaaacccgcaagtcaaagagtatggacctcgttgcggatgaaacaaaactgaataccgttgatgatcagaaggcaggttccccgtcacgcgacgtcggcccttcgctggggctgaagaaaagtagctctcttgaatccctgcaaactgctgttgccgaagtgaccttgaacggggacatacccttccaccggcctaggcctaggattattcggggcaggggatgcaacgaatctttccgagctgcgattgacaaatcttacgacaagccagcggttgatgacgacgacgagggtatggaaactttagaggaggacacagaagaatcttcccgctccggcagagagagtgtgtccacagcctccgatcagccctcccacagcctcgaaaggcagatgaatgggaaccaggaaaagggggataaaactgatcgaaagaaggataaaacgggtaaggagaaaaagaaggacagagataaagagaaagataaaatgaaagctaagaaagggatgctcaagggactcggagatatgttctcccttgccaaactgaaaccagagaaacgctag

SEQ ID NO: 271907 - DNA, 2475 bp, Artificial Sequence
  derived and/or modified sequence
cttttaactgtaacttattgaaggtctcctacatttttaacactgaggatgaggatgggacagaagaggataacagtcgtgttgaacctgttggacatgctgacacgggtttggagcatatacccaacttttctctggatgatatggtaaagctcgtagaagtccccaacgatggagggcctctgggaatccacgtagtgcctttcagtgctcgaggcggcagaaccctggggttattagtaaaacgattggagaaaggtggtaaagctgaacatgaaaatctttttcgtgagaatgattgcattgtcaggattaatgatggcgaccttcgaaatagaagatttgaacaagcacaacatatgtttcgccaagccatgcgtacacccatcatttggttccatgtggttcctgcagcaaataaagagcagtatgaacaactatcccaaagtgagaagaacaattactattcaagccgttttagccctgacagccagtatattgacaacaggagtgtgaacagtgcagggcttcacacggtgcagagagcaccccgactgaaccacccgcctgagcagatagactctcactcaagactacctcatagcgcacacccctcgggaaaaccaccatccgctccagcctcggcacctcagaatgtatttagtacgactgtaagcagtggttataacaccaaaaaaataggcaagaggcttaatatccagcttaagaaaggtacagaaggtttgggattcagcatcacttccagagatgtaacaataggtggctcagctccaatctatgtgaaaaacattctcccccggggggcggccattcaggatggccgacttaaggcaggagacagacttatagaggtaaatggagtagatttagtgggcaaatcccaagaggaagttgtttcgctgttgagaagcaccaagatggaaggaactgtgagccttctggtctttcgccaggaagacgccttccacccaagggaactgaaagcagaagatgaggatattgttcttacacctgatggcaccagggaatttctgacatttgaagtcccacttaatgattcaggatctgcaggccttggtgtcagtgtcaaaggtaaccggtcaaaagagaaccacgcagatttgggaatctttgtcaagtccattattaatggaggagcagcatctaaagatggaaggcttcgggtgaatgatcaactgatagcagtaaatggagaatccctgttgggcaagacaaaccaagatgccatggaaaccctaagaaggtctatgtctactgaaggcaataaacgaggaatgatccagcttattgttgcaaggagaataagcaagtgcaatgagctgaagtcacctgggagcccccctggacctgagctgcccattgaaacagcgttggatgatagagaacgaagaatttcccattccctctacagtgggattgaggggcttgatgaatcgcccagcagaaatgctgccctcagtaggataatgggtaaataccagctgtcccctacagtgaatatgccccaagatgacactgtcattatagaagatgacaggttgccagtgcttcctccacatctctctgaccagtcctcttccagctcccatgatgatgtggggtttgtgacggcagatgctggtacttgggccaaggctgcaatcagtgattcagccgactgctctttgagtccagatgttgatccagttcttgcttttcaacgagaaggatttggacgtcagagtatgtcagaaaaacgcacaaagcaattttcagatgccagtcaattggatttcgttaaaacacgaaaatcaaaaagcatggatttagtagctgacgagactaaactcaatacagtggatgaccagaaagcaggttctcccagcagagatgtgggtccttccctgggtctgaagaagtcaagctcgttggagagtctgcagaccgcagttgccgaggtgactttgaatggggatattcctttccatcgtccacggccgcggataatcagaggcaggggatgcaatgagagcttcagagctgccatcgacaaatcttatgataaacccgcggtagatgatgatgatgaaggcatggagaccttggaagaagacacagaagaaagttcaagatcagggagagagtctgtatccacagccagtgatcagccttcccactctctggagagacaaatgaatggaaaccaagagaaaggtgataagactgatagaaaaaaggataaaactggaaaagaaaagaagaaagatagagataaggagaaggataaaatgaaagccaagaagggaatgctgaagggcttgggagacatgttcagccttgccaaactgaagcccgagaagagatgaacaacaaagcgattcaaaacatgtcttgaacagcacatattgcacagttgttgttttttttaaacaaacaataaatttacttttaatg

SEQ ID NO: 271908 - DNA, 2244 bp, Artificial Sequence
  derived and/or modified sequence
atggtgaaactcgttgaggttcccaatgatgggggaccactcggcattcacgtcgtcccattttctgccagaggcggtagaacccttggtttgcttgtgaaaaggttggagaagggagggaaggcagaacacgagaacctgttccgggagaacgattgtatcgtacgcataaatgatggagatctgcgcaaccgaagattcgagcaagcccagcacatgttcagacaggcaatgcgcacccctatcatatggttccatgtggtccctgctgcaaacaaggagcagtacgaacaactctctcagtcagagaaaaataattactatagctcaaggttctccccagattcccagtacatcgataaccggtccgtgaacagtgccggacttcatacagttcagagagcccctcgtctgaatcatccaccagagcagatcgacagccacagcaggttaccccactctgcgcatccatctggtaagcccccttctgcacctgcctcagcccctcagaacgtgttcagtacaacggtgagtagtggctataacacaaagaaaattggaaaaaggcttaacattcagcttaagaaaggcactgagggactcggcttttctatcacgagccgggacgtcactatcggcggttccgcacctatctacgtcaaaaatatcctccccagaggagcagcaatacaggacgggaggctgaaggccggtgataggctcatagaggttaacggagtggacctggttggtaagtcccaagaggaggtcgtgagtttactgcggtccacgaagatggagggaactgtgagccttctggtctttaggcaggaagacgccttccatccacgagagctcaaagctgaggacgaagacatagtgctaactcctgacggtacgagggaattcctgacgtttgaggtgcccttgaatgacagcggctcagcgggacttggtgtttcagtcaagggcaacagaagcaaggagaaccacgccgatcttggtatcttcgtgaagtcaattatcaacggaggggcagcatcgaaggatggcagactgcgcgtgaatgaccagctgatcgccgtcaatggcgagagcctcttgggtaaaacaaatcaggatgcaatggagacactgcgcagatctatgtcgactgaggggaacaaacgaggcatgatacagttgatcgtggcccgacggatctcaaaatgcaatgagctgaaatcaccaggatcaccacctggacccgagttacctatcgagactgccttggatgatagggaaaggcgaatctcccatagcctatactccggaattgaggggctggacgagagtccaagccgaaacgcagccctcagcagaattatgggtaagtatcagctcagccccacggttaacatgccacaggatgacacagtgatcatcgaagatgatagactgcccgtgctgcctccacatctgagtgaccagtcaagctcctctagccacgacgacgtgggctttgtgactgccgatgccggaacttgggcaaaggccgcaattagtgattcagccgattgctccctttcccctgacgtcgaccccgtcctcgctttccagagggaaggtttcggccgacagagcatgagtgagaagcgtacaaaacaatttagcgatgcttctcaattggactttgttaaaaccaggaagtcaaagtcaatggatctcgtagccgatgagacgaagttgaataccgtggatgaccagaaggcaggatctcccagtcgggacgtgggccctagccttggcttgaaaaagagttccagcctggaaagcctacagacagctgtggctgaagtcacacttaatggcgacattccgtttcaccgacccaggccacgaatcattaggggaaggggttgcaacgaatcatttcgggctgcaatcgacaagagttatgacaagccagcagtggacgacgatgacgagggtatggagaccctggaggaagacaccgaagagagttccaggagcggtcgggaatctgtcagcactgcctctgaccagccatcccactctctggagcgacagatgaacgggaatcaggagaaaggcgataaaaccgacaggaagaaggacaaaacgggcaaggaaaaaaaaaaggaccgcgataaggagaaagacaagatgaaggccaagaagggcatgctgaagggtctcggcgatatgttttccctggcaaaactgaaaccagaaaagcgctag

SEQ ID NO: 271909 - DNA, 2244 bp, Artificial Sequence
  derived and/or modified sequence
atggtgaagctggtggaggtgcccaacgacggcggccccctgggcatccacgtggtgcccttcagcgccagaggcggcagaaccctgggcctgctggtgaagagactggagaagggcggcaaggccgagcacgagaacctgttcagagagaacgactgcatcgtgagaatcaacgacggcgacctgagaaacagaagattcgagcaggcccagcacatgttcagacaggccatgagaacccccatcatctggttccacgtggtgcccgccgccaacaaggagcagtacgagcagctgagccagagcgagaagaacaactactacagcagcagattcagccccgacagccagtacatcgacaacagaagcgtgaacagcgccggcctgcacaccgtgcagagagcccccagactgaaccacccccccgagcagatcgacagccacagcagactgccccacagcgcccaccccagcggcaagccccccagcgcccccgccagcgccccccagaacgtgttcagcaccaccgtgagcagcggctacaacaccaagaagatcggcaagagactgaacatccagctgaagaagggcaccgagggcctgggcttcagcatcaccagcagagacgtgaccatcggcggcagcgcccccatctacgtgaagaacatcctgcccagaggcgccgccatccaggacggcagactgaaggccggcgacagactgatcgaggtgaacggcgtggacctggtgggcaagagccaggaggaggtggtgagcctgctgagaagcaccaagatggagggcaccgtgagcctgctggtgttcagacaggaggacgccttccaccccagagagctgaaggccgaggacgaggacatcgtgctgacccccgacggcaccagagagttcctgaccttcgaggtgcccctgaacgacagcggcagcgccggcctgggcgtgagcgtgaagggcaacagaagcaaggagaaccacgccgacctgggcatcttcgtgaagagcatcatcaacggcggcgccgccagcaaggacggcagactgagagtgaacgaccagctgatcgccgtgaacggcgagagcctgctgggcaagaccaaccaggacgccatggagaccctgagaagaagcatgagcaccgagggcaacaagagaggcatgatccagctgatcgtggccagaagaatcagcaagtgcaacgagctgaagagccccggcagcccccccggccccgagctgcccatcgagaccgccctggacgacagagagagaagaatcagccacagcctgtacagcggcatcgagggcctggacgagagccccagcagaaacgccgccctgagcagaatcatgggcaagtaccagctgagccccaccgtgaacatgccccaggacgacaccgtgatcatcgaggacgacagactgcccgtgctgcccccccacctgagcgaccagagcagcagcagcagccacgacgacgtgggcttcgtgaccgccgacgccggcacctgggccaaggccgccatcagcgacagcgccgactgcagcctgagccccgacgtggaccccgtgctggccttccagagagagggcttcggcagacagagcatgagcgagaagagaaccaagcagttcagcgacgccagccagctggacttcgtgaagaccagaaagagcaagagcatggacctggtggccgacgagaccaagctgaacaccgtggacgaccagaaggccggcagccccagcagagacgtgggccccagcctgggcctgaagaagagcagcagcctggagagcctgcagaccgccgtggccgaggtgaccctgaacggcgacatccccttccacagacccagacccagaatcatcagaggcagaggctgcaacgagagcttcagagccgccatcgacaagagctacgacaagcccgccgtggacgacgacgacgagggcatggagaccctggaggaggacaccgaggagagcagcagaagcggcagagagagcgtgagcaccgccagcgaccagcccagccacagcctggagagacagatgaacggcaaccaggagaagggcgacaagaccgacagaaagaaggacaagaccggcaaggagaagaagaaggacagagacaaggagaaggacaagatgaaggccaagaagggcatgctgaagggcctgggcgacatgttcagcctggccaagctgaagcccgagaagagatag

SEQ ID NO: 271910 - DNA, 540 bp, Artificial Sequence
  derived and/or modified sequence
atgcagattcccaaggagaccaaagccgaggacgaagatattgtgctcacacccgacggaaccagagagttcctgactttcgaagtacccttaaacgatagtggaagtgccgggcttggggtgtcggtcaaaggcaatcgcagtaaagagaaccacgccgaccttggcatattcgtgaagagcatcattaatggtggagccgcctctaaagacggccggctgcgggtgaatgatcagctcatagctgtgaacggcgaaagcctgctcggaaagacaaatcaagacgccatggaaactctgagacggtctatgagcacagagggaaataaacgcggaatgatccagctgatagtggccagaagaatctctaagtgcaatgagctgaagtcgccagggagtccgcccggccctgagcttcccattgagacagccctcgatgacagggagaggaggatttctcattccctctattctggaattgagggactggatgagagcccatctaggaatgctgctctatcccgtatcatgggcacctag

SEQ ID NO: 271911 - DNA, 540 bp, Artificial Sequence
  derived and/or modified sequence
atgcagatccccaaggagaccaaggccgaggatgaggacatcgtgctgaccccagatggcacccgggagttcctgacctttgaggtgcccctgaatgacagcggcagcgctggcctgggcgtgtctgtgaagggcaacagaagcaaggagaaccacgccgacctgggcatctttgtgaagagcatcatcaatggaggagctgccagcaaggatggccgcctgcgggtgaatgaccagctgattgctgtgaatggagagagcctgctgggcaagaccaaccaggatgccatggagaccctgcggcgctccatgagcacagagggcaacaagaggggcatgatccagctgattgtggcccggcgcatcagcaagtgcaatgagctgaagagccctggcagccccccaggccctgagctgcccattgaaacagccctggatgaccgggagcggcgcatcagccacagcctgtacagcggcatcgagggcctggatgagagccccagcagaaatgctgccctgagccgcatcatgggcacctag

SEQ ID NO: 271912 - DNA, 540 bp, Artificial Sequence
  derived and/or modified sequence
atgcagatccccaaggagaccaaggccgaggacgaggacatcgtgctcactccagatggcactcgggagttcttgaccttcgaagttccactcaacgactccggcagcgcaggcctgggagtctctgtcaaaggcaacaggtctaaggagaatcacgcagatctgggaatctttgtaaagagtatcattaacggcggggcagccagcaaggatggccgcctccgggtgaatgatcagctcattgctgttaacggcgaatcgctactagggaaaactaatcaggatgctatggaaacgctccggcgctcaatgagtactgaaggaaataaacgaggaatgattcagctaattgtggcccggagaatttctaagtgtaatgagctgaaatcaccaggatcccccccaggccccgagctgccgatcgaaacagccctggatgacagggaacgaagaatctcacacagtctctacagcggaatcgaagggctggatgagagtccaagtaggaatgctgccctgtctcgtataatggggacttag

SEQ ID NO: 271913 - DNA, 799 bp, Artificial Sequence
  derived and/or modified sequence
gcagagccaagccagatgcagattccaaaagaaacgaaagcagaagatgaggatattgttcttacacctgatggcaccagggaatttctgacatttgaagtcccacttaatgattcaggatctgcaggccttggtgtcagtgtcaaaggtaaccggtcaaaagagaaccacgcagatttgggaatctttgtcaagtccattattaatggaggagcagcatctaaagatggaaggcttcgggtgaatgatcaactgatagcagtaaatggagaatccctgttgggcaagacaaaccaagatgccatggaaaccctaagaaggtctatgtctactgaaggcaataaacgaggaatgatccagcttattgttgcaaggagaataagcaagtgcaatgagctgaagtcacctgggagcccccctggacctgagctgcccattgaaacagcgttggatgatagagaacgaagaatttcccattccctctacagtgggattgaggggcttgatgaatcgcccagcagaaatgctgccctcagtaggataatgggaacataggacttgccatactgaatcagaccattggtccaccagttcctgtaacctgcgtcctgcctccaatccctgatgcttcagaggaaggcgaaaaactaaaactaaaactcaaaccaaaaaaatccctaaattcagctagtgaccttttgaaatgctgtatatatgagttgaagagtcattcattttcttcctagtctgttgccccgattttgttagctacagcttcattagtcctcttcggtttgca

SEQ ID NO: 271914 - DNA, 540 bp, Artificial Sequence
  derived and/or modified sequence
atgcagatacctaaagaaaccaaagcagaggacgaggatatagtgctcacccccgacgggaccagagagtttctgacattcgaggtccctctgaatgacagtggcagtgccggtctcggggtgtcggtgaaggggaacagatcaaaggaaaaccacgcagacctcggtatctttgtcaagagcataattaatggcggagcagcgagtaaagacggccgtctgagggtcaacgaccagctgattgctgtcaacggagagtcactgctcgggaagactaaccaggacgcgatggagaccttgagacggtcgatgtccacagaaggaaataagcgtgggatgatccagttgattgtagcccgaaggatatccaaatgcaatgaactcaagagcccgggatcccccccaggaccagaactgccgattgaaacagcgctggacgaccgcgaacgcagaatttcacacagtttgtacagcgggatagagggcctcgacgagtctccatcccgaaacgcagcactcagtcgcattatgggaacctag

SEQ ID NO: 271915 - DNA, 540 bp, Artificial Sequence
  derived and/or modified sequence
atgcagatccccaaggagaccaaggccgaggacgaggacatcgtgctgacccccgacggcaccagagagttcctgaccttcgaggtgcccctgaacgacagcggcagcgccggcctgggcgtgagcgtgaagggcaacagaagcaaggagaaccacgccgacctgggcatcttcgtgaagagcatcatcaacggcggcgccgccagcaaggacggcagactgagagtgaacgaccagctgatcgccgtgaacggcgagagcctgctgggcaagaccaaccaggacgccatggagaccctgagaagaagcatgagcaccgagggcaacaagagaggcatgatccagctgatcgtggccagaagaatcagcaagtgcaacgagctgaagagccccggcagcccccccggccccgagctgcccatcgagaccgccctggacgacagagagagaagaatcagccacagcctgtacagcggcatcgagggcctggacgagagccccagcagaaacgccgccctgagcagaatcatgggcacctag

SEQ ID NO: 271916 - protein, 1958 aa, Artificial Sequence
  derived and/or modified sequence
MMATRRTGLSEGDGDKLKACEVSKNKDGKEQSETVSLSEDETFSWPGPKTVTLKRTSQGFGFTLRHFIVYPPESAIQFSYKDEENGNRGGKQRNRLEPMDTIFVKQVKEGGPAFEAGLCTGDRIIKVNGESVIGKTYSQVIALIQNSDTTLELSVMPKDEDILQVLQFTKDVTALAYSQDAYLKGNEAYSGNARNIPEPPPICYPWLPSAPSAMAQPVEISPPDSSLSKQQTSTPVLTQPGRAYRMEIQVPPSPTDVAKSNTAVCVCNESVRTVIVPSEKVVDLLSNRNNHTGPSHRTEEVRYGVSEQTSLKTVSRTTSPPLSIPTTHLIHQPAGSRSLEPSGILLKSGNYSGHSDGISSSRSQAVEAPSVSVNHYSPNSHQHIDWKNYKTYKEYIDNRRLHIGCRTIQERLDSLRAASQSTTDYNQVVPNRTTLQGRRRSTSHDRVPQSVQIRQRSVSQERLEDSVLMKYCPRSASQGALTSPSVSFSNHRTRSWDYIEGQDETLENVNSGTPIPDSNGEKKQTYKWSGFTEQDDRRGICERPRQQEIHKSFRGSNFTVAPSVVNSDNRRMSGRGVGSVSQFKKIPPDLKTLQSNRNFQTTCGMSLPRGISQDRSPLVKVRSNSLKAPSTHVTKPSFSQKSFVSIKDQRPVNHLHQNSLLNQQTWVRTDSAPDQQVETGKSPSLSGASAKPAPQSSENAGTSDLELPVSQRNQDLSLQEAETEQSDTLDNKEAVILREKPPSGRQTPQPLRHQSYILAVNDQETGSDTTCWLPNDARREVHIKRMEERKASSTSPPGDSLASIPFIDEPTSPSIDHDIAHIPASAVISASTSQVPSIATVPPCLTTSAPLIRRQLSHDHESVGPPSLDAQPNSKTERSKSYDEGLDDYREDAKLSFKHVSSLKGIKIADSQKSSEDSGSRKDSSSEVFSDAAKEGWLHFRPLVTDKGKRVGGSIRPWKQMYVVLRGHSLYLYKDKREQTTPSEEEQPISVNACLIDISYSETKRKNVFRLTTSDCECLFQAEDRDDMLAWIKTIQESSNLNEEDTGVTNRDLISRRIKEYNNLMSKAEQLPKTPRQSLSIRQTLLGAKSEPKTQSPHSPKEESERKLLSKDDTSPPKDKGTWRKGIPSIMRKTFEKKPTATGTFGVRLDDCPPAHTNRYIPLIVDICCKLVEERGLEYTGIYRVPGNNAAISSMQEELNKGMADIDIQDDKWRDLNVISSLLKSFFRKLPEPLFTNDKYADFIEANRKEDPLDRLKTLKRLIHDLPEHHYETLKFLSAHLKTVAENSEKNKMEPRNLAIVFGPTLVRTSEDNMTHMVTHMPDQYKIVETLIQHHDWFFTEEGAEEPLTTVQEESTVDSQPVPNIDHLLTNIGRTGVSPGDVSDSATSDSTKSKGSWGSGKDQYSRELLVSSIFAAASRKRKKPKEKAQPSSSEDELDNVFFKKENVEQCHNDTKEESKKESETLGRKQKIIIAKENSTRKDPSTTKDEKISLGKESTPSEEPSPPHNSKHNKSPTLSCRFAILKESPRSLLAQKSSHLEETGSDSGTLLSTSSQASLARFSMKKSTSPETKHSEFLANVSTITSDYSTTSSATYLTSLDSSRLSPEVQSVAESKGDEADDERSELISEGRPVETDSESEFPVFPTALTSERLFRGKLQEVTKSSRRNSEGSELSCTEGSLTSSLDSRRQLFSSHKLIECDTLSRKKSARFKSDSGSLGDAKNEKEAPSLTKVFDVMKKGKSTGSLLTPTRGESEKQEPTWKTKIADRLKLRPRAPADDMFGVGNHKVNAETAKRKSIRRRHTLGGHRDATEISVLNFWKVHEQSGERESELSAVNRLKPKCSAQDLSISDWLARERLRTSTSDLSRGEIGDPQTENPSTREIATTDTPLSLHCNTGSSSSTLASTNRPLLSIPPQSPDQINGESFQNVSKNASSAANAQPHKLSETPGSKAEFHPCL

SEQ ID NO: 271917 - protein, 1131 aa, Artificial Sequence
  derived and/or modified sequence
MMATRRTGLSEGDGDKLKACEVSKNKDGKEQSETVSLSEDETFSWPGPKTVTLKRTSQGFGFTLRHFIVYPPESAIQFSYKDEENGNRGGKQRNRLEPMDTIFVKQVKEGGPAFEAGLCTGDRIIKVNGESVIGKTYSQVIALIQNSDTTLELSVMPKDEDILQVLQFTKDVTALAYSQDAYLKGNEAYSGNARNIPEPPPICYPWLPSAPSAMAQPVEISPPDSSLSKQQTSTPVLTQPGRAYRMEIQVPPSPTDVAKSNTAVCVCNESVRTVIVPSEKVVDLLSNRNNHTGPSHRTEEVRYGVSEQTSLKTVSRTTSPPLSIPTTHLIHQPAGSRSLEPSGILLKSGNYSGHSDGISSSRSQAVEAPSVSVNHYSPNSHQHIDWKNYKTYKEYIDNRRLHIGCRTIQERLDSLRAASQSTTDYNQVVPNRTTLQGRRRSTSHDRVPQSVQIRQRSVSQERLEDSVLMKYCPRSASQGALTSPSVSFSNHRTRSWDYIEGQDETLENVNSGTPIPDSNGEKKQTYKWSGFTEQDDRRGICERPRQQEIHKSFRGSNFTVAPSVVNSDNRRMSGRGVGSVSQFKKIPPDLKTLQSNRNFQTTCGMSLPRGISQDRSPLVKVRSNSLKAPSTHVTKPSFSQKSFVSIKDQRPVNHLHQNSLLNQQTWVRTDSAPDQQVETGKSPSLSGASAKPAPQSSENAGTSDLELPVSQRNQDLSLQEAETEQSDTLDNKEAVILREKPPSGRQTPQPLRHQSYILAVNDQETGSDTTCWLPNDARREVHIKRMEERKASSTSPPGDSLASIPFIDEPTSPSIDHDIAHIPASAVISASTSQVPSIATVPPCLTTSAPLIRRQLSHDHESVGPPSLDAQPNSKTERSKSYDEGLDDYREDAKLSFKHVSSLKGIKIADSQKSSEDSGSRKDSSSEVFSDAAKEGWLHFRPLVTDKGKRVGGSIRPWKQMYVVLRGHSLYLYKDKREQTTPSEEEQPISVNACLIDISYSETKRKNVFRLTTSDCECLFQAEDRDDMLAWIKTIQESSNLNEEDTGVTNRDLISRRIKEYNNLMSKAEQLPKTPRQSLSIRQTLLGAKSEPKTQSPHSPKEESERKLLSKDDTSPPKDKGTWRKGIPSIM

SEQ ID NO: 271918 - DNA, 5877 bp, Artificial Sequence
  derived and/or modified sequence
atgatggcaacacgcaggaccggcctgtccgaaggtgacggagataaactcaaagcctgcgaagtctctaagaataaagacggaaaagagcaatccgagacagtgtcactgtccgaagacgagacattctcctggcctggccccaagactgtaaccctgaagcggacttcgcaagggtttggttttaccctcagacacttcattgtctaccccccagaaagtgccattcagttttcttacaaagacgaggagaatggcaaccgcggggggaaacagcgcaaccgcctggaacccatggatacaatctttgtaaagcaggttaaagaggggggaccggctttcgaggcaggcctgtgcacaggcgaccggattatcaaggtgaatggggagtctgttatcggtaagacgtattcacaggttattgccttgatccaaaattctgatacaaccttggagcttagtgtcatgcccaaggacgaagacatcctacaggtactccagttcaccaaggacgtcacggcgctagcttattctcaagacgcttatctcaaaggaaatgaggcctattccggcaacgccaggaacatccctgaaccccctcccatctgctacccctggttgccttccgctcccagcgctatggctcagcctgtggaaatcagccctcccgatagttcgctctcaaaacaacagaccagcactcctgtcctgacacaacccggacgggcctaccggatggagatccaggtgccacccagtcccacagatgtagctaagagtaatacagccgtgtgtgtgtgtaatgagagcgtgcgcacagttattgtgccatccgaaaaagtcgttgacctccttagtaaccgaaacaaccacaccggcccttcccatagaacagaggaggtccggtacggcgtgagcgaacagacatctctcaaaactgtttctagaacaaccagtccacctctgtcaattccaacaacgcacctgattcatcagccagctggaagtcgctctctggaaccatcaggtattctgctaaaatcaggtaattattctgggcactctgacggcatctcctcaagtcgcagtcaggcggtcgaggccccgtccgtgtcagtgaaccactactccccgaacagccaccagcacatagactggaagaattacaaaacctataaggagtatatagataaccggcggctgcacatcggatgccggacaatacaggaacggctcgattcgctgagagctgcaagccaatccacgacagactacaatcaggtcgtcccaaatcgcacaacactgcagggccgcagacgttccacctcacatgaccgggttccacaaagcgtccagatcagacaaagatctgtcagccaggagagactcgaagactcagtgcttatgaaatattgtcctagatctgctagtcagggggcccttacaagcccctccgtttctttttctaaccataggacccgaagttgggactatatagagggtcaggacgagactctagagaatgtgaattcagggacgccaatacccgattccaacggggaaaagaagcagacatataagtggtctggttttacagagcaagatgataggagggggatttgtgagcggccgaggcagcaggaaatccacaagtcctttaggggcagcaattttacggtcgcaccatcagtcgttaattctgataaccgcaggatgtcaggcagaggcgtaggaagtgtcagtcaatttaaaaaaattcctcctgatctgaaaactctgcagagcaaccgaaacttccagactacctgcgggatgtctttgcctaggggaatttcccaggaccgcagtcccctggtcaaggtacggtccaattccttgaaagccccaagcacccatgtcacgaagccatcttttagccagaaatcgttcgtgagcatcaaagatcagcgacctgtcaaccatttgcatcagaatagcctgttgaatcagcagacctgggtgcggacggacagcgctcctgaccagcaggttgaaaccgggaagtcaccatctttgtctggcgcctcagccaagcctgccccccagagcagcgagaacgcagggacttctgatttggagcttccagtcagtcagcgcaatcaggatctgtccctccaggaggccgagacggaacagagtgacaccctggacaacaaggaggctgtgatattacgcgagaagccccccagtggtcgccagacgccccaaccgctgagacaccagtcatacatcctcgcagttaatgaccaggagaccgggtctgacactacatgttggctgccaaacgatgcgaggcgcgaggtgcatatcaaaagaatggaggaaaggaaggcttcctctaccagcccaccaggagattcactcgcgtccattccatttatcgatgagcctaccagtccgtctatcgaccacgatatcgcgcacatccctgcctccgctgtcatcagcgcaagcaccagccaagttccatccatcgcaacagtgcccccttgcctgactacatcagcccctctcataagaaggcagctcagccacgaccatgaatccgtaggaccccccagcttggacgctcagccaaactccaagactgaaaggtcaaagtcctacgacgaaggcttggacgattacagagaagacgctaaactgtctttcaagcatgttagcagtttgaaagggattaaaattgccgactcccagaagtcatctgaggactcagggagccgcaaagactcgagttcagaagttttctctgacgctgcgaaagagggctggttgcactttcggccattagtgacggacaaggggaagagagtgggagggtccataaggccctggaaacagatgtacgtcgtgcttcgcgggcacagcctgtacctgtataaagacaagcgagagcagacgaccccatctgaggaagaacagcctataagtgtgaacgcgtgcctgatcgatatcagttattccgagactaagagaaaaaacgtctttcggctaaccacatccgattgcgaatgcctgttccaagctgaagacagagacgatatgctggcatggatcaagactatccaggagtcaagtaacctcaatgaagaggacaccggtgttacgaatagagatctaatctcacgccggattaaggagtataacaacctaatgagtaaagccgagcagctcccaaaaacaccaaggcagtccctctctatcagacagacattactgggagctaaaagcgagcccaaaactcagtcaccacattcacctaaagaggaatccgaacggaaactgctcagcaaggacgatactagcccccctaaggataagggtacgtggcggaaaggcataccgtctataatgagaaaaacctttgagaaaaaaccaacagccacaggaacttttggagttaggcttgatgattgccccccagcccacaccaatagatacatacctctgatcgtggacatatgttgtaagctcgtagaggagcgcggtttagagtacaccggtatataccgggtacctggcaataatgccgcaatttctagcatgcaagaagagttgaacaaaggcatggccgacatcgacattcaagatgataaatggagggacctgaacgtaataagctcacttttgaaatccttcttcagaaagctgcccgagcctttgtttactaacgataagtacgccgacttcatcgaggctaacagaaaggaagatccactggaccgactgaaaacactgaagcgcctgatacatgatctcccggagcatcattatgaaactctgaaattcttgtcagcgcacctaaagactgtcgctgagaatagcgaaaagaacaaaatggaaccacggaacctagcgattgtcttcggacctacactggtgcggaccagcgaggacaacatgacccacatggtgactcacatgccagaccaatacaagattgtcgaaactctgattcagcatcatgattggttttttacagaggagggagcagaggagccccttacaaccgtgcaggaagaaagcaccgtggattcacagcccgtgccgaacatcgatcacctcctgactaatattgggaggactggagtctccccgggggacgttagtgactccgcaacctctgattcgactaaaagcaaggggtcctgggggtcaggtaaggaccaatacagccgggagctcctcgtctcaagtatctttgcggctgcctccaggaaacggaaaaaacccaaggaaaaggctcagccatctagctctgaggacgaactagataatgtgtttttcaagaaagagaacgtggagcagtgtcacaatgacacaaaagaagaatctaagaaagaatctgaaacgctcgggcgaaaacagaagatcataattgcaaaggagaattctactagaaaagatccctcaactacgaaagatgagaagatatccctgggcaaggagtcaacacccagtgaggaaccatccccaccacacaactctaagcacaataaatccccaacactgtcttgtcggttcgccattctcaaggaatccccccggagtcttctcgcacagaagagcagccatctagaagagactgggagcgattcaggcactttactgtctacctcatcccaagccagcctggccaggttttccatgaagaagtcaactagccccgaaactaagcacagtgaatttctcgccaatgtctcgaccatcacctccgactactctaccactagtagtgctacttatttaacgtcactcgattcctctaggctgtcaccggaggttcagagtgtggccgaatcaaagggcgacgaggcagatgacgagcgctccgaactgatatctgaaggaagacctgtcgagacagacagcgagtccgaatttccggttttccctacagcattaactagtgagaggttgttccggggcaagctgcaggaggtgacgaaaagttcaaggagaaatagcgagggcagtgagctcagctgcaccgaagggagtcttacttcatctttggattctcggcgtcaactgttctcctcacacaaattaatcgagtgtgacactctgtcccgaaaaaaatctgcaagatttaagtccgactcaggcagcctgggagacgcaaaaaacgaaaaggaagctccatcccttactaaagtctttgacgtcatgaagaaggggaaatcgaccggatccctgctgacccccacgcggggcgagtctgaaaaacaggagcctacgtggaaaacaaaaattgcagatcggttgaagctgcgtcccagagcccctgcagatgacatgttcggcgttggtaatcacaaggtgaacgcggagaccgccaagcgaaagagcattcgccgccggcacaccctggggggccatcgtgacgcaacggagattagcgttctgaatttctggaaggtccatgaacagtctggtgagcgcgagtcagagcttagcgctgttaacaggctcaagccaaagtgttccgctcaggatcttagcattagcgactggctagcgcgagagaggcttagaacgagcacctcggacctttcacgaggcgagattggtgatccccagaccgaaaatccaagcacccgggaaatcgccacaaccgatacccccctatctctgcactgtaatactgggtccagtagttcaacgcttgcttccacgaaccggccacttctgagcattcctccccagagcccagatcagatcaatggagagagtttccaaaacgtctcgaaaaatgcgagcagtgctgcaaatgcccagccccacaagttatccgaaaccccagggagcaaggctgagtttcacccctgcctgtag

SEQ ID NO: 271919 - DNA, 3396 bp, Artificial Sequence
  derived and/or modified sequence
atgatggccacccggagaactgggctttctgagggagacggggataaattaaaagcatgcgaagtcagcaagaacaaagacggaaaggaacagagtgaaacagttagcctttctgaggatgaaaccttcagctggccaggacctaagaccgtaaccctgaagcggaccagccagggatttggattcaccctccgccactttatcgtttatccaccggaatctgctatccagtttagctacaaggatgaggaaaacggtaaccgcggcggcaagcagcgcaataggctagagcccatggacaccatcttcgtcaaacaagtgaaggagggtgggcctgctttcgaagctgggctctgtaccggcgaccggattatcaaggtgaacggcgagagcgttatcggcaagacctatagccaggtaattgccctgatccagaatagcgacactaccttggagctctcggtcatgcctaaagatgaagacattctgcaggtgctccaattcacaaaagacgtgaccgccctagcatactctcaggacgcctacttaaagggcaatgaagcctactccggaaacgcacggaacatccccgagccaccgccaatctgttacccctggttaccctctgccccttctgcgatggcgcaaccagtcgaaatctcacctccagatagtagcctttccaagcagcaaacatcaacgcctgtgttaactcagccaggtcgggcgtatagaatggagattcaggtgcccccctcacccactgatgtcgccaagagcaacaccgccgtctgcgtgtgtaatgagtctgtcaggacggtaattgtgcctagtgagaaagttgttgacctgttgagcaatcggaataaccacacaggaccctcgcatagaacggaggaagtgaggtatggggtgtctgagcagacaagccttaagaccgtgagccgaaccacatcaccacctctttccatacccactacccacctgatacaccaacctgccggctccaggtcactggaaccttctggaatcctgttgaaatctggcaactatagcggccactcggatgggatcagctcatcacggtcccaggccgtggaggccccatccgtttcagtgaatcactattcccctaactcccaccagcatatcgattggaaaaactacaagacttacaaagaatacatcgacaatcggagattacacataggctgtaggactatacaggagagacttgactctcttagagcggcatcacagagtacaacagattacaatcaagttgtgcccaacaggactactctgcagggtagacggagatccacctctcacgaccgggttccacaatctgtgcagatcaggcaacgctccgttagccaggagagactcgaagattcagtgcttatgaaatactgccctagatcagcctcgcagggagccctgacctccccatccgtgagcttcagcaatcaccgcaccaggtcgtgggattacatcgagggccaggacgaaaccctggaaaacgtgaacagtggcactcccattccagatagtaatggggaaaagaagcaaacctacaaatggtctggcttcacagagcaagatgatagacgcggaatatgtgaacgtcctcggcaacaggagatccacaagtcattccgaggttctaacttcacagtggcgccttccgttgtcaattccgataaccgccgcatgtctggcagaggcgtcgggagcgtgagccaatttaagaagattccccctgatctcaaaacattgcagtccaaccgtaacttccaaacaacgtgcgggatgtccctcccaagagggataagtcaggacaggtcaccgctcgtgaaggtgagaagcaacagtctcaaagccccatccacgcacgtgacaaagcccagtttctctcagaaatcttttgtgtcaataaaggaccagcgccctgtgaaccacctacaccagaacagcctgttgaatcagcagacttgggtccggaccgactctgcaccagatcaacaggtggagacggggaaatctccatcccttagcggggcttctgctaagcccgcccctcagtcgagcgaaaacgctggtacttcggatctggaactccccgttagtcagcgcaatcaggatctgagcttacaggaagcggaaacagagcagtcagacactctcgataacaaggaagctgttatcctccgcgaaaagcccccaagtggcagacaaaccccacagcccctcaggcaccagagttatatcttagcagtgaatgatcaagagaccggctctgacacgacatgttggttgcccaacgacgctaggcgcgaggttcacatcaagcggatggaagaacggaaagcctcctcaaccagcccccctggggattcgctcgcgtccatcccgttcatagatgaacccacttctccaagcatcgatcatgacatcgctcatatcccagcttctgcagtaatctctgcctcaacatcccaggtcccatctatcgccaccgtccctccctgtttgacaacatctgccccattgatcaggcgacaacttagccacgatcacgaaagcgttggtccccccagcctcgatgcgcaacccaacagtaagactgagagaagcaagagttatgatgaaggacttgacgactacagggaagacgcaaaattatcattcaagcatgtgtcctctctaaaggggatcaagatagcagattcacagaaaagctcggaggatagcggctcaagaaaagatagctccagtgaagtgttttctgatgcagcgaaagagggttggctacactttagacccttggtgaccgataaaggaaagcgggttgggggaagcatccgcccctggaagcagatgtatgttgtcttgagggggcacagcctctacctgtacaaagacaagcgggaacagaccactccatctgaagaggagcagcccatttccgttaacgcatgcctcatcgatatcagctactctgagaccaaaagaaagaacgtttttaggctgacgactagcgattgcgaatgcctgttccaagcggaggacagagacgacatgctggcttggatcaaaacaatccaggaatccagcaatctgaacgaggaggacacaggcgtgactaatagggaccttatctcaagacggatcaaggaatataataatctgatgagcaaagcagagcagttacctaaaacaccacggcagagtttgagcatcagacaaacactgctcggggcaaaaagtgaacccaaaacgcagagcccacacagccctaaagaggaaagcgaaaggaagctgcttagcaaggacgacacgtctccccccaaagacaagggtacctggcgaaagggcatcccatctatcatgtag

SEQ ID NO: 271920 - DNA, 5877 bp, Artificial Sequence
  derived and/or modified sequence
atgatggccaccaggagaacaggcctgtctgaaggagatggagacaagctgaaggcctgtgaggtgtccaagaacaaggatggcaaggagcagagcgagaccgtgtccctgtctgaagatgagaccttctcctggccaggccccaagacagtgaccctgaagaggaccagccagggcttcggcttcaccctgcggcacttcatcgtgtacccacctgagagcgccatccagttctcctacaaggatgaggagaatggaaacagaggaggcaagcagaggaaccggctggagcccatggacaccatctttgtgaagcaggtgaaggagggcggccctgcctttgaggccggcctgtgcaccggggaccgcatcatcaaggtgaatggagagagcgtgattggcaagacctacagccaggtgattgccctgatccagaacagcgacaccaccctggagctgtctgtgatgcccaaggatgaggacatcctgcaggtgctgcagttcaccaaggatgtgacagccctggcctacagccaggatgcctacctgaagggaaatgaggcctacagcggaaatgccaggaacatccctgagcccccacccatctgctacccctggctgcccagcgcccccagcgccatggcccagcctgtggagatcagccccccagacagcagcctgagcaagcagcagaccagcacccctgtgctgacccagcccggccgggcctacaggatggagatccaggtgccccccagccccacagatgtggccaagagcaacacagctgtgtgtgtgtgcaatgaatctgtgaggacagtgattgtgcccagcgagaaggtggtggacctgctgagcaacagaaacaaccacacaggccccagccacaggacagaggaggtgcgctatggagtgtctgagcagaccagcctgaagacagtgtccaggaccaccagcccccccctgagcatccccaccacccacctgatccaccagcctgctggcagccgcagcctggagcccagcggcatcctgctgaagagcggcaactacagcggccacagtgatggcatcagcagcagccgcagccaggccgtggaggcccccagcgtgtctgtgaaccactacagccccaacagccaccagcacatcgactggaagaactacaagacctacaaggagtacatcgacaacagaaggctgcacatcggctgcaggaccatccaggagcggctggacagcctgcgggccgccagccagagcaccacagactacaaccaggtggtgcccaacagaaccaccctgcagggcagaagaagaagcaccagccatgacagagtgccccagagcgtgcagatccggcagaggtctgtgtcccaggagcggctggaggacagcgtgctgatgaagtactgccccaggtctgccagccagggcgccctgaccagccccagcgtgtccttcagcaaccacaggaccaggtcctgggactacatcgagggccaggatgagaccctggagaatgtgaacagcggcacccccatcccagacagcaatggagagaagaagcagacctacaagtggagcggcttcacagagcaggatgacagaagaggcatctgtgagcggccccggcagcaggagatccacaagagcttccggggcagcaacttcaccgtggcccccagcgtggtgaacagcgacaacagaaggatgagcggccggggcgtgggctctgtgtcccagttcaagaagatccccccagacctgaagaccctgcagagcaacagaaacttccagaccacctgtggcatgagcctgccccggggcatcagccaggacaggagccccctggtgaaggtgcgcagcaacagcctgaaggcccccagcacccacgtgaccaagcccagcttcagccagaagagctttgtgtccatcaaggaccagaggcctgtgaaccacctgcaccagaacagcctgctgaaccagcagacctgggtgaggacagattctgccccagaccagcaggtggagaccgggaagagccccagcctgagcggggccagcgccaagccagccccccagagcagtgaaaatgccggcaccagtgacctggagctgcctgtgtcccagaggaaccaggacctgagcctgcaggaggccgagacagagcagagcgacaccctggacaacaaggaggccgtcatcctgcgggagaagcccccatctggccggcagaccccccagcccctgcggcaccagagctacatcctggccgtgaatgaccaggagactggaagtgacaccacctgctggctgcccaatgatgcccggcgggaggtgcacatcaagaggatggaggagaggaaggccagcagcaccagccccccaggggacagcctggccagcatccccttcattgatgagcccaccagccccagcattgaccatgacatcgcccacatcccagccagcgctgtgatcagcgccagcaccagccaggtgcccagcatcgccaccgtgcccccctgcctgaccaccagcgcccccctcatccggcggcagctgagccatgaccacgagagcgtgggcccccccagcctggatgcccagcccaacagcaagacagagaggagcaagagctatgatgagggcctggatgactacagagaagatgccaagctgtccttcaagcacgtgagcagcctgaagggcatcaagattgctgacagccagaagagcagcgaggacagcggcagcaggaaggacagcagcagcgaggtgttcagtgatgctgccaaggagggctggctgcacttccggcccctggtgacagacaagggcaagagggtgggcggcagcatccggccctggaagcagatgtatgtggtgctgcggggccacagcctgtacctgtacaaggacaagcgggagcagaccaccccatctgaggaggagcagcccatctctgtgaatgcctgcctgattgacatctcctacagcgagaccaagaggaagaatgtgttccggctgaccaccagtgactgtgaatgtctcttccaggctgaagatagagatgacatgctggcctggatcaagaccatccaggagagcagcaacctgaatgaggaggacaccggggtgaccaacagagacctgatcagccgccgcatcaaggagtacaacaacctgatgagcaaggccgagcagctgcccaagaccccccggcagagcctgagcatccggcagaccctgctgggcgccaagtctgagcccaagacccagagcccccacagccccaaggaggagagcgagaggaagctgctgagcaaggatgacaccagcccccccaaggacaagggcacctggaggaagggcatccccagcatcatgaggaagacctttgagaagaagcccacagccaccggcacctttggagtgcggctggatgactgccccccagcccacaccaaccgctacatccccctcatcgtggacatctgctgcaagctggtggaggagcggggcctggagtacacaggcatctacagagtgcccggcaacaatgctgccatcagctccatgcaggaggagctgaacaagggcatggctgacatcgacatccaggatgacaagtggagggacctgaatgtcatcagcagcctgctgaagagcttcttcaggaagctgcctgagcccctcttcaccaatgacaagtatgctgacttcatcgaggccaacaggaaggaggaccccctggaccggctgaagaccctgaagaggctcatccatgacctgcctgagcaccactatgagaccctgaagttcctgagcgcccacctgaagacagtggccgagaacagcgagaagaacaagatggagcccaggaacctggccatcgtgtttggccccaccctggtgaggaccagcgaggacaacatgacccacatggtgacccacatgccagaccagtacaagatcgtggagaccctcatccagcaccacgactggttcttcacagaggagggcgctgaggagcccctgaccaccgtgcaggaggagagcacagtggacagccagcctgtgcccaacatcgaccacctgctgaccaacatcggccgcactggagtgtccccaggagatgtgtctgattctgccaccagtgacagcaccaagagcaagggctcctggggcagcggcaaggaccagtacagccgggagctgctggtgagcagcatctttgctgctgccagcaggaagaggaagaagcccaaggagaaggcccagcccagcagcagtgaagatgagctggacaacgtgttcttcaagaaggaaaatgtggagcagtgccacaatgacaccaaggaggagagcaagaaggagagcgagaccctgggcaggaagcagaagatcatcatcgccaaggagaacagcaccaggaaggaccccagcaccaccaaggatgagaagatcagcctgggcaaggagagcacccccagcgaggagcccagccccccccacaacagcaagcacaacaagagccccaccctgagctgccgctttgccatcctgaaggagagccccaggagcctgctggcccagaagagcagccacctggaggagaccggcagtgacagcggcaccctgctgagcaccagcagccaggccagcctggcccgcttctccatgaagaagagcaccagccctgagaccaagcacagcgagttcctggccaacgtgtccaccatcaccagtgactacagcaccaccagcagcgccacctacctgaccagcctggacagcagccggctgagccctgaggtgcagagcgtggccgagagcaaaggagatgaagcagatgatgagaggtctgagctgatcagcgagggccggcctgtggagacagattctgagagcgagttccctgtgttccccacagccctgaccagcgagcggctcttccggggcaagctgcaggaggtgaccaagagcagcagaagaaattctgagggcagcgagctgagctgcacagagggcagcctgaccagcagcctggacagccggcggcagctgttcagcagccacaagctgattgaatgtgacaccctgagcaggaagaagagcgcccgcttcaagagtgacagcggcagcctgggagatgccaagaatgagaaggaggcccccagcctgaccaaggtgtttgatgtgatgaagaagggcaagagcacaggcagcctgctgacccccaccagaggagagagcgagaagcaggagcccacctggaagaccaagattgctgaccggctgaagctgcggccccgggccccagcagatgacatgtttggagtgggcaaccacaaggtgaatgctgagacagccaagaggaagagcatcagaagaagacacaccctgggcggccacagagatgccacagagatctctgtgctgaacttctggaaggtgcatgagcagagcggggagcgggagagcgagctgtctgctgtgaaccggctgaagcccaagtgcagcgcccaggacctgagcatcagtgactggctggcccgggagcggctgcggaccagcaccagtgacctgagcagaggagagatcggggacccccagacagagaaccccagcacccgggagatcgccaccacagacacccccctgagcctgcactgcaacacaggcagcagcagcagcaccctggccagcaccaaccggcccctgctgagcatccccccccagagcccagaccagatcaacggggagagcttccagaatgtgtccaagaatgccagcagcgctgccaatgcccagccccacaagctgtctgagaccccaggcagcaaggccgagttccacccctgcctgtag

SEQ ID NO: 271921 - DNA, 3396 bp, Artificial Sequence
  derived and/or modified sequence
atgatggccaccaggagaacaggcctgtctgaaggagatggagacaagctgaaggcctgtgaggtgtccaagaacaaggatggcaaggagcagagcgagaccgtgtccctgtctgaagatgagaccttctcctggccaggccccaagacagtgaccctgaagaggaccagccagggcttcggcttcaccctgcggcacttcatcgtgtacccacctgagagcgccatccagttctcctacaaggatgaggagaatggaaacagaggaggcaagcagaggaaccggctggagcccatggacaccatctttgtgaagcaggtgaaggagggcggccctgcctttgaggccggcctgtgcaccggggaccgcatcatcaaggtgaatggagagagcgtgattggcaagacctacagccaggtgattgccctgatccagaacagcgacaccaccctggagctgtctgtgatgcccaaggatgaggacatcctgcaggtgctgcagttcaccaaggatgtgacagccctggcctacagccaggatgcctacctgaagggaaatgaggcctacagcggaaatgccaggaacatccctgagcccccacccatctgctacccctggctgcccagcgcccccagcgccatggcccagcctgtggagatcagccccccagacagcagcctgagcaagcagcagaccagcacccctgtgctgacccagcccggccgggcctacaggatggagatccaggtgccccccagccccacagatgtggccaagagcaacacagctgtgtgtgtgtgcaatgaatctgtgaggacagtgattgtgcccagcgagaaggtggtggacctgctgagcaacagaaacaaccacacaggccccagccacaggacagaggaggtgcgctatggagtgtctgagcagaccagcctgaagacagtgtccaggaccaccagcccccccctgagcatccccaccacccacctgatccaccagcctgctggcagccgcagcctggagcccagcggcatcctgctgaagagcggcaactacagcggccacagtgatggcatcagcagcagccgcagccaggccgtggaggcccccagcgtgtctgtgaaccactacagccccaacagccaccagcacatcgactggaagaactacaagacctacaaggagtacatcgacaacagaaggctgcacatcggctgcaggaccatccaggagcggctggacagcctgcgggccgccagccagagcaccacagactacaaccaggtggtgcccaacagaaccaccctgcagggcagaagaagaagcaccagccatgacagagtgccccagagcgtgcagatccggcagaggtctgtgtcccaggagcggctggaggacagcgtgctgatgaagtactgccccaggtctgccagccagggcgccctgaccagccccagcgtgtccttcagcaaccacaggaccaggtcctgggactacatcgagggccaggatgagaccctggagaatgtgaacagcggcacccccatcccagacagcaatggagagaagaagcagacctacaagtggagcggcttcacagagcaggatgacagaagaggcatctgtgagcggccccggcagcaggagatccacaagagcttccggggcagcaacttcaccgtggcccccagcgtggtgaacagcgacaacagaaggatgagcggccggggcgtgggctctgtgtcccagttcaagaagatccccccagacctgaagaccctgcagagcaacagaaacttccagaccacctgtggcatgagcctgccccggggcatcagccaggacaggagccccctggtgaaggtgcgcagcaacagcctgaaggcccccagcacccacgtgaccaagcccagcttcagccagaagagctttgtgtccatcaaggaccagaggcctgtgaaccacctgcaccagaacagcctgctgaaccagcagacctgggtgaggacagattctgccccagaccagcaggtggagaccgggaagagccccagcctgagcggggccagcgccaagccagccccccagagcagtgaaaatgccggcaccagtgacctggagctgcctgtgtcccagaggaaccaggacctgagcctgcaggaggccgagacagagcagagcgacaccctggacaacaaggaggccgtcatcctgcgggagaagcccccatctggccggcagaccccccagcccctgcggcaccagagctacatcctggccgtgaatgaccaggagactggaagtgacaccacctgctggctgcccaatgatgcccggcgggaggtgcacatcaagaggatggaggagaggaaggccagcagcaccagccccccaggggacagcctggccagcatccccttcattgatgagcccaccagccccagcattgaccatgacatcgcccacatcccagccagcgctgtgatcagcgccagcaccagccaggtgcccagcatcgccaccgtgcccccctgcctgaccaccagcgcccccctcatccggcggcagctgagccatgaccacgagagcgtgggcccccccagcctggatgcccagcccaacagcaagacagagaggagcaagagctatgatgagggcctggatgactacagagaagatgccaagctgtccttcaagcacgtgagcagcctgaagggcatcaagattgctgacagccagaagagcagcgaggacagcggcagcaggaaggacagcagcagcgaggtgttcagtgatgctgccaaggagggctggctgcacttccggcccctggtgacagacaagggcaagagggtgggcggcagcatccggccctggaagcagatgtatgtggtgctgcggggccacagcctgtacctgtacaaggacaagcgggagcagaccaccccatctgaggaggagcagcccatctctgtgaatgcctgcctgattgacatctcctacagcgagaccaagaggaagaatgtgttccggctgaccaccagtgactgtgaatgtctcttccaggctgaagatagagatgacatgctggcctggatcaagaccatccaggagagcagcaacctgaatgaggaggacaccggggtgaccaacagagacctgatcagccgccgcatcaaggagtacaacaacctgatgagcaaggccgagcagctgcccaagaccccccggcagagcctgagcatccggcagaccctgctgggcgccaagtctgagcccaagacccagagcccccacagccccaaggaggagagcgagaggaagctgctgagcaaggatgacaccagcccccccaaggacaagggcacctggaggaagggcatccccagcatcatgtag

SEQ ID NO: 271922 - DNA, 5877 bp, Artificial Sequence
  derived and/or modified sequence
atgatggccacccggcggaccggcctgagcgagggcgacggcgacaaattaaaggcttgcgaggtgtctaagaacaaagacggaaaagagcaatccgagaccgtttcattatcggaggatgaaacattctcctggcctggcccaaagacagttactctgaaacgcacatcccaaggcttcggttttacacttcggcactttatcgtgtaccctccagaaagtgccatccagttctcctacaaggatgaagagaatggaaacagaggtggaaaacagcggaacagactagagccaatggatacaatcttcgtaaagcaagtgaaagaaggcggacctgcctttgaggctggactgtgcactggtgatagaattattaaggtgaacggggagagcgtgatcggcaaaacatacagtcaggtgatcgcactgatccagaactccgacacaaccttggagctgtctgtcatgccgaaggatgaagacatcttacaggtgctccagtttacaaaggatgtaactgcactggcctactcacaggacgcttatctgaagggaaatgaggcatacagtggtaatgctagaaatattccggagccacctcctatctgctatccctggctgccttctgccccctctgcaatggcacaacccgtggaaatcagcccgccagattcaagtttgagcaagcagcagacttcaaccccagtgcttacacagccggggagggcctaccggatggagattcaggtgcccccttctcccacggatgtggcaaaatcaaatacggctgtctgcgtgtgtaatgagagcgtcagaacagtcatcgtgccatccgaaaaggtggtggatttgttaagcaatcgaaacaaccataccgggccgagtcacaggaccgaagaggtgagatacggtgtaagcgagcaaacctctttgaaaactgtgagccgcactacctctcctcccctgtccatccctactacgcacctcattcatcagccagcagggtcaaggtcccttgaaccgtcaggcatcctgttaaaatccgggaattatagcggacacagtgatggcatttcatctagcaggtcccaggccgtcgaggccccatcagtgagcgtgaatcactatagcccgaatagccatcagcatattgactggaaaaattataagacttacaaggagtacatcgataaccgccgactccacatcgggtgccgcactatccaagagagactggattctttgcgagcagcctcccagagcacaacagactacaaccaagtcgtgcccaacaggactacactacaggggagacgacgctcaacaagtcacgacagagttccgcagagcgtgcagatcagacagagaagtgtcagccaggaacggctggaggattcagttctgatgaagtactgtccccgatcggctagccagggcgcgctgacctccccgtcagtgtctttttcgaaccaccgtactcgttcttgggactacatcgaaggccaagacgagaccctggaaaatgttaacagcggcacccctatccccgatagcaacggcgagaagaagcaaacgtataaatggagcggcttcacagagcaggacgaccggagaggaatctgcgagcgaccgcggcagcaggagattcacaaaagctttagaggttctaactttactgtggccccaagcgtagtaaacagcgacaatcgtagaatgagcggcagaggtgtgggcagcgtctcacaattcaagaagatccctcccgatttgaagaccctacaatccaatcggaatttccagacaacctgcgggatgagcctccctcgcggcatcagtcaggatcgcagtcccctcgttaaagtgcgcagcaactccctgaaggccccatcgacacatgtcaccaaaccatcctttagccagaaatcatttgtcagcattaaggatcagaggcccgtgaatcaccttcaccagaactcattgctcaaccaacaaacatgggtccggacagacagcgcgcctgaccagcaggtcgagaccggcaaatcaccttcgctcagcggcgcttccgcgaagcccgccccacagtcatccgaaaatgcaggaacatcggacctggaactgcctgttagccaaagaaatcaggatctgagcctgcaggaagccgaaaccgagcagtcagacacccttgataataaagaagcggtgatcctgcgcgaaaaacctccttccggacgccagactcctcagccactgcgtcaccaatcctatattctggcagttaatgatcaggagacgggatctgatacaacctgttggctgcccaacgacgcaaggagggaagttcatattaaacggatggaggagcggaaggctagctccaccagtcccccgggcgattctcttgcgtccataccttttatcgacgagcccacttccccctccatcgatcatgacattgctcacattccggcctcggcagtgatctcagctagtacatcacaggttcccagtatagcgactgtgcctccttgcttgaccacttcagctcccttaattcggaggcagctgtcgcacgatcacgaaagcgtggggcccccaagtctcgatgcacagccgaatagtaagactgagagaagtaagtcttacgatgaaggcttagatgattatagggaagacgcaaagctctctttcaagcatgtgtcatctttgaagggcattaagattgcggatagccagaaatctagtgaggattcaggatcccgcaaagactcatcgagcgaagtattcagcgacgccgcgaaggagggatggctgcacttccgcccactcgttacggacaagggaaaacgggtggggggttctatccgaccctggaagcagatgtatgtcgtgttgcgaggacactctctgtacctgtataaggacaagcgggaacagaccaccccgtctgaagaggagcaacccatcagcgtgaatgcctgcttgatcgacatatcctatagcgaaacgaagaggaaaaatgtgtttcgcctgacgacttcagattgcgagtgcctgttccaagcagaggacagagatgatatgctcgcatggattaagaccatccaggagagtagcaatctgaacgaagaagacaccggcgtgaccaaccgggatctgatctctcgaagaattaaagaatacaataaccttatgtccaaggccgagcagctgcctaaaaccccccgacaatccttgtcaatccgacagaccctgcttggggcgaagtcagaaccaaagacacagtccccccacagccctaaagaagagagtgaaaggaaactgctctcaaaggatgacactagcccccccaaggacaaaggaacctggaggaaaggcatcccttcgattatgagaaaaacatttgaaaagaaaccaacagcaaccggcacgtttggcgtgaggctggacgactgtccccccgctcataccaaccgctatattccgcttattgtcgacatatgctgtaagttggttgaggagaggggactcgaatatacagggatctacagggtgcccgggaacaacgctgctatctcttctatgcaggaggagttgaacaaggggatggccgatatagacatccaagatgataaatggcgcgacctcaacgtgatttctagtctcttgaaatctttcttccggaagttacccgagcctctattcaccaatgacaagtacgccgatttcatcgaagcgaaccgcaaggaggatccactagaccgtctcaaaacgctcaagcgtctgattcatgacttacctgaacatcactacgagaccttaaaatttctaagcgcccatttaaagacggtggccgagaattccgagaaaaataagatggaacctcggaatctcgccatcgtgtttggcccgactttagtaagaacatccgaggataatatgacccacatggtaacgcatatgcccgaccagtataagatcgtggaaaccctaatccagcaccacgactggttttttactgaggagggggctgaggaacctctcacaacagtgcaggaggaatcaaccgtggatagtcagcccgtacccaacatagaccacctgctgactaatataggcaggaccggggtcagccctggggacgttagtgactccgccactagcgattcaacaaagtccaaagggtcttgggggtctggcaaagatcagtacagtagggagctcttggtgtcttcaatctttgcagccgctagccgaaaaagaaaaaagcccaaggagaaggcacaaccaagctcgtcagaagacgaactggacaacgtcttctttaagaaggaaaacgtagagcaatgccacaatgacacaaaggaagaatcgaagaaagagagtgaaactttgggacgcaaacagaagatcataattgctaaagagaactcaactaggaaagaccctagtaccaccaaagacgagaaaatttccctaggcaaagagagcactccatccgaggaaccctctccaccacacaattctaaacacaacaagtcaccaacacttagctgccgatttgccattctaaaagagagccctcggtcactcctcgcccagaagtcatcacaccttgaagaaacagggtcagactcaggaacgttgcttagtacctcgagtcaggcatccttggccaggtttagtatgaaaaaatcaactagcccggaaacaaaacactccgaattcctggcaaatgtctcgacaattaccagcgactattccaccacctccagcgccacttacctgacctcactcgacagcagcagactcagcccagaggtacagtcagtcgcagagtcaaagggagatgaggcagacgacgaacgcagcgagttgatatccgaggggaggcctgttgaaactgatagtgaaagtgagtttccagtgtttcccactgcattgacatcggaaaggctttttcgtggaaagctgcaggaggtcaccaagagcagcagacggaattccgagggctctgaactcagctgcactgaaggttctttgacttcaagcctggactccaggcgccagttattttcgagtcacaagctgattgaatgcgatacattatctagaaaaaagagtgccaggttcaagagcgactccggcagtctgggcgacgccaaaaacgaaaaagaagctccatctctgactaaggtgttcgatgtgatgaagaagggtaaaagtacaggctctctgttgacgcccactcgcggcgagagcgaaaagcaggaacctacatggaaaaccaagattgccgacagactgaagctgcgaccccgtgcaccggccgacgacatgtttggtgtcggcaatcacaaggtgaacgcagagacggctaagcgcaaaagtatcaggcgccgccatacattaggcgggcaccgcgatgccaccgaaatctcagtgctcaacttctggaaggtgcacgagcaatccggcgagcgtgagagcgagttaagtgcagtaaaccggttgaaacctaagtgcagtgctcaggatctctcaatcagcgactggcttgccagagagcggttgaggacttcgacgtctgatttgtcaagaggtgaaataggcgaccctcagaccgaaaatcctagtacacgagaaattgccacgacagacacaccactgagcctgcactgtaatactggctcttcttcttcaacgcttgcgtccactaatagacctcttctgtccatcccaccacagtccccggatcagattaatggcgagtctttccagaatgtcagcaaaaacgccagcagtgctgcaaatgctcagcctcataagttaagcgagactcctgggagcaaggcagaattccacccgtgtctgtag

SEQ ID NO: 271923 - DNA, 3396 bp, Artificial Sequence
  derived and/or modified sequence
atgatggccacccggcggaccggcctgagcgagggcgacggcgacaagctgaaggcttgtgaggtcagcaagaacaaggatgggaaggagcagtccgagactgtttccctgtcagaggatgaaacgttcagttggcccggcccaaagaccgtgactctgaagaggacctcccagggctttggattcaccctgcgccatttcatcgtataccccccagagtccgcaattcagtttagctacaaagacgaggaaaacggaaatcgtggtgggaagcagcgtaacaggctggagcccatggacaccatttttgttaagcaggtcaaggagggaggtccagcctttgaggcaggactctgtacgggggacagaattatcaaggtaaatggtgagagcgtgatcggcaagacttacagccaggttattgcactgattcagaacagtgacactacactcgaactatctgtgatgcccaaggatgaggatatactccaagtactgcagttcacaaaggatgttactgccctcgcttactctcaggatgcttacctgaaaggaaatgaggcctattccggtaacgcgcgtaatatacccgaaccccctccaatttgctacccttggttaccatctgcccccagcgccatggcccagccagtggagatcagtcctcctgattcttctctaagtaaacagcaaacaagcacacctgttcttacccagcccggccgggcataccgaatggaaattcaggtccctccttcacccacagatgtcgccaaatccaacacagccgtgtgcgtgtgcaatgaatcagtcaggacagtgatcgtaccttctgagaaggtcgtagatctcctttccaaccggaataaccacacaggacccagtcaccgcacagaagaagtcaggtatggcgtctctgaacagaccagcctgaaaaccgtgtcacgcactaccagcccaccattgtccatcccaactacccacctcatccaccaacccgccggaagccgtagtctggaaccatctgggatactgctcaaatctggtaactattctggtcattcagatgggatctcctcctcccggagccaggctgtcgaagccccatcagttagcgttaaccactactcccccaactcccaccagcacatcgactggaaaaactataaaacatacaaggagtatattgacaacaggcgcttacacatcggctgtaggacaatccaggaacgtctcgacagtctgcgagcagcaagccaaagtaccacggattataaccaggtcgtgccgaatcgcacgaccctgcagggcagaagacgctctacatcgcacgaccgggtgccacagagcgtgcagattcggcagaggtcagtgtctcaagagcgcctggaggactcggtgctgatgaaatattgccctcgtagcgcctctcagggcgcactcacctctccctctgttagcttctccaaccatcgcacccgctcctgggattatatagagggccaggatgaaactcttgagaacgtaaacagtggcaccccgatccccgactcaaatggtgagaagaaacaaacttataagtggtcagggttcaccgaacaggatgaccgtcgaggcatttgcgagaggcctcgacagcaggagatccataagtcttttcgggggtctaattttactgtggcgccttccgtggtgaatagtgacaatagaaggatgtctgggcgtggcgtaggtagcgtttcacagttcaaaaagatcccgcctgaccttaagactctacagagcaatcgaaattttcaaaccacctgtgggatgtcccttcctcgcgggatttctcaggatcgaagtcccttagtcaaggtgcgctctaattccctcaaggcacctagcacgcacgttacaaaacccagcttctcccagaaatccttcgtgtcgattaaggaccagcggcccgtgaaccatcttcatcagaatagcctgctgaatcagcagacctgggtacgcactgactctgcacccgaccagcaagttgaaaccggtaagtcaccgagccttagcggggctagcgcgaagcctgctcctcaatcttcagaaaatgctggaacctccgacctcgaattgccagtgtctcagaggaatcaagatctctccctccaggaggccgagactgaacagagtgataccctggataacaaggaggccgtgatcctcagagaaaagcctccatctggacggcagacaccacagcctctgaggcaccagtcatatattcttgcagtgaacgaccaggaaactggaagcgataccacctgctggctcccaaacgatgcgaggcgggaagtccacatcaagaggatggaagagcgaaaggcgtcctccacctcacctcccggagacagtttagcttcaattccattcatagacgagccaacttctccgtccatagatcatgatatcgcgcatatcccagcctctgcggtcatctctgcatccacgagtcaggtgccctcaatagccacagtcccaccttgtctgaccacctcggctcccctgataagaaggcagctatcgcatgatcacgaatctgtcggccctcctagcctcgacgcgcagccaaatagcaaaactgaacggtccaaaagttatgacgagggcttagacgactaccgcgaggatgccaagttgtctttcaagcatgtgtctagtcttaaaggtatcaagatagcagattcccaaaaatcgagcgaggatagcggatccaggaaagattcttcttccgaggttttctccgacgctgcaaaggagggctggttgcatttccgccctttggttaccgataaaggcaaacgtgtgggcggcagtattcgcccatggaaacagatgtacgtggttctgcggggccacagcctctatttgtataaggacaaaagagagcagaccactccaagtgaggaggagcagccaatatcagtcaatgcctgtctgatcgacatttcttattctgaaaccaagcgaaagaacgtgttcaggctgacgacaagcgattgcgagtgtctctttcaggccgaggatagagacgacatgttggcctggatcaaaaccatccaggaatcctcgaatttgaatgaggaggacactggagtgaccaaccgtgacttgattagccgccggatcaaagagtacaataatctaatgtcaaaagctgaacagctacccaaaacaccacgccagtctctaagcattcgccagaccctccttggagcgaagagtgagcccaagactcagtccccccacagtcccaaggaggagtctgagcgcaaactcctgtctaaagacgacacctctcctcccaaggacaagggaacttggaggaaaggaattccctccattatgtag

SEQ ID NO: 271924 - DNA, 5876 bp, Artificial Sequence
  derived and/or modified sequence
atgatggccacacgacgcaccggcctttccgagggggacggagacaaactgaaagcctgtgaggtgtccaaaaacaaggatggcaaggaacagtctgagactgtgtctctcagcgaagatgagacattctcttggccaggccctaagacagtcacactcaagagaaccagtcaaggcttcgggtttactctgcgtcatttcatcgtttacccgcctgagagcgctatccagttttcttataaggatgaggaaaacgggaataggggcggtaaacaacggaatcgcctcgagcctatggacactattttcgttaagcaggtaaaggagggcggtcctgcttttgaagccggtctctgtaccggtgatcggatcatcaaagttaatggtgaaagcgtgatcggaaaaacgtactcccaggtgattgcgcttatacaaaactccgacacgacactcgagctgagcgtgatgccaaaggacgaggatattcttcaggtacttcagttcaccaaagatgtaacagctttggcctacagtcaggatgcgtatctgaaaggcaacgaagcctattctgggaacgcacgaaacatacctgagccgccaccgatttgctacccatggctgccctctgccccatccgcgatggcccaacccgtggagatctcacccccagattcatcactgagcaaacagcagacctctacccctgtcctgacacaacctggcagagcatacaggatggaaatacaggtcccaccctctccaaccgatgtagcaaaaagtaacaccgccgtctgtgtgtgcaacgaatcggtgcgcacagttatcgtgccttcagagaaggtggtggacctgctgtccaaccgcaataaccacaccggcccatcacatcgcaccgaggaggttcgatacggtgtgtccgagcagacttcattgaagaccgtatcaagaacgacatcaccccctctgagcatacctacaacccacctcatccatcaaccagcaggttcaaggagtctggagccaagcggaattcttcttaaatcaggcaattactctgggcattcagacgggattagttcatcccgatctcaggcagttgaggcccctagcgttagcgttaaccactactccccgaattcccaccagcatatcgactggaaaaattacaagacctataaagagtacattgacaatcgcagacttcacatagggtgtaggaccatccaggaacgccttgacagtttacgcgctgctagtcaaagtaccaccgactacaatcaagtcgtgcctaacagaaccaccctgcagggtcggaggcggagtacatcacacgatcgggttccacagtccgttcagatccgccaaaggagcgtatcacaggaacgactggaggatagcgttctgatgaagtactgccctaggtccgctagtcaaggcgctttaacgagcccttcagtgtcgttcagcaaccatcggactcgcagctgggattacattgagggacaagacgaaactcttgagaacgtgaattccggcaccccaatccctgattctaacggggaaaaaaagcagacttacaagtggtctggcttcacagagcaggatgataggaggggcatatgtgaacggcctaggcagcaagaaattcataagtctttccgtgggagtaattttaccgtggcaccctcagtcgtcaactctgacaacaggagaatgtccgggaggggtgttggaagtgtgtctcagtttaagaagatccccccagacctgaaaacactgcagagtaatagaaattttcaaactacctgcggcatgtcacttccaagaggcatcagccaggatcgtagtccgctggtaaaggtcagatctaattcgttaaaggcaccaagcactcacgtgactaagcccagtttttcccagaaatcttttgtttcaattaaggatcagagacccgtgaatcacctccaccaaaatagtctcctgaatcagcagacttgggttaggaccgacagcgcccctgaccagcaggttgaaacagggaagtccccttcgctcagtggggcaagcgctaaacctgctccgcagtcctcagagaatgccggtaccagtgacctggagcttccagtgagccagcgaaaccaggacttaagcctccaagaggccgaaacagagcaatccgacacacttgataataaggaagctgtgatcctgcgcgagaagcccccaagcggaaggcagactccacaaccccttcggcaccagtcttatatactcgccgtgaacgatcaagagacaggatctgacacgacttgttggcttccaaatgacgctcggagggaggtgcacattaagcggatggaagaacgaaaagctagctcaacctcaccgcctggcgacagtctggcatcaatcccatttattgatgaacccacatctcctagcatagatcatgatatcgcccatatccctgcctctgccgtgatttcagcaagcactagccaggtaccatctatcgcaactgtccccccttgtctgacaacatctgctccgctgattcggaggcagctatcacacgatcacgagagcgtgggtcctccctcccttgacgcacagcctaattcaaagaccgaaaggagcaaaagctacgatgagggactggatgactatcgtgaggatgccaaactgtctttcaaacacgtttcatctctgaaaggcatcaagatcgccgacagccaaaaaagttccgaggacagcggatcgcgaaaagactccagctcagaggtcttctccgacgccgctaaggaagggtggctgcatttccggccactggtgactgacaagggcaaacgggtaggcggaagtatcagaccctggaagcagatgtacgttgtactgagagggcactcgctgtatctgtataaagacaaaagagaacagaccactcccagcgaagaagagcagccaattagcgttaatgcctgtctaattgatatatcatactccgaaacgaaaagaaaaaacgtgttcaggttgacaacctcagattgcgaatgcctgttccaggctgaggatagggatgatatgctggcttggatcaaaacaatccaggaaagctcgaacctgaatgaagaagatacaggcgtgacaaacagagacttgatctcacgcagaattaaggaatataacaatttgatgagcaaggctgagcaactccctaagacaccaaggcaatctctgtctatcaggcagacgcttttaggcgcaaaatccgagccaaaaacacagtccccccactcaccaaaggaggagtcggagcgcaaactgttgtccaaggacgacacttcacctcccaaggacaaggggacctggaggaaaggaatcccctcaattatgaggaagacttttgagaagaaacctaccgccacagggacattcggcgttcggctggacgattgtcctccagcccatacaaatcggtatatccctctcattgtcgatatatgctgcaaactcgtggaagagcggggactcgagtatacaggcatatatcgggtgccaggaaacaatgctgctatctcatccatgcaagaagagcttaataagggcatggcggatattgatatccaggacgataagtggagggatctgaatgtgatctccagtctgctgaagtcctttttcaggaaactgcccgagcccctgtttaccaacgacaagtatgcagactttatcgaggccaatcgtaaggaggatccattggacagactcaaaacactaaagagacttatccacgacctccctgaacatcactatgagaccctgaaattccttagtgcccacctgaaaaccgtcgccgaaaattccgaaaagaacaaaatggagccaaggaatctagccatagtgtttggcccaactttggtgaggacaagtgaggacaatatgacacacatggtgactcacatgcccgatcagtacaagatcgtcgagacacttatccaacaccatgattggtttttcactgaggagggcgctgaagaaccacttacaacagtgcaggaagaaagcacagtcgacagtcaacccgttccaaatattgaccacctcctgaccaacattggccgtaccggggtcagtccaggcgacgttagcgacagtgcaactagtgactctacaaagtccaagggttcctggggctctgggaaagaccagtacagtcgcgaattgctggtgtcctctatatttgccgcagcctccaggaaacggaaaaagcctaaggagaaagctcaaccatccagttcggaagatgagctggacaatgtgttcttcaaaaaagagaacgtagaacaatgtcacaatgacaccaaggaggagtctaagaaggagagcgaaaccctggggagaaaacagaagattattattgcaaaggaaaacagcacacgtaaggatccatccacgaccaaggacgagaagatctccctgggaaaggagtcaacccctagtgaagaaccttccccaccccacaactctaaacacaacaaatcccccaccctcagttgccgctttgcaattctgaaagagagtcctcgttctctgctagcacagaagtctagccacctggaagagaccggaagtgactccggaacactgctctccacctccagtcaggccagcctcgcccgatttagtatgaagaaatcgaccagtcccgagactaaacactctgagtttttagccaatgtgagcaccattacttctgattatagtacaacaagctcagccacctacctaacttctctcgacagttcccgactcagtcctgaggtgcaaagtgtggctgagtctaaaggggatgaagccgacgatgagaggtctgaactcataagcgagggcaggccggtggagacggatagtgaaagtgaatttcctgtgttccctaccgcgcttacaagcgaacgattgttccgcggaaaattgcaagaagtgactaaaagctccagaagaaattctgaaggttctgaactgtcatgtacagaaggctctctcaccagtagcctagattctcgcaggcagctgttctcctcacacaagctgattgagtgtgacactctttcacgcaagaagtccgcgaggtttaaaagcgactctggtagtcttggagacgcgaagaatgagaaggaggccccttcactcaccaaagtgttcgacgtgatgaagaagggtaagtcgaccggtagcctacttacacctacaagaggggagtctgagaagcaggagccgacctggaaaaccaaaattgctgatcggctgaagttgagaccccgtgcacccgcagatgacatgttcggcgtaggtaaccacaaggtgaacgccgagaccgccaagaggaagagtattcgtaggagacacaccttaggaggacacagagacgcgacggagatctcagtgctgaatttctggaaggtgcacgagcagtcaggcgagagagaaagcgagttaagtgcagtgaacagactcaagcctaagtgtagcgctcaggacctcagcattagtgactggctggccagggagcggttaaggacgagcacaagcgacctgtctcggggtgagatcggggatccacagaccgaaaatccctctacccgggaaatagccacaaccgacacaccactaagcctacattgtaatacaggttccagctcctctactctggcctccacaaatcgtcccttgttgtccatcccgcctcagtcacctgatcagatcaacggcgagtcctttcaaaatgtgtcgaagaacgcctcatctgccgcaaacgctcagccgcataaactttccgaaacgccgggaagtaaagcagagtttcacccatgtctgta

SEQ ID NO: 271925 - DNA, 3396 bp, Artificial Sequence
  derived and/or modified sequence
atgatggccaccagaagaaccggtctttccgagggagacggtgataaactgaaggcctgtgaggtgtcaaagaacaaagatggaaaggaacagagtgaaactgtttcactctccgaggatgagacattttcttggcccggtccgaagactgtaaccctgaaacgaacttcgcagggctttggttttacgttgcgtcacttcattgtgtaccctcctgagagtgcaatccagttttcctacaaggatgaagaaaacgggaatcggggaggcaagcagagaaatcgcctcgaacccatggacacgatcttcgtgaagcaggtgaaggaaggcggtccagcgtttgaagcgggattgtgcactggagataggattatcaaagtaaacggcgagtctgtaatcggtaaaacatattctcaggtgatcgccctcatccagaatagtgatacaaccttggagctgagcgtcatgcctaaggatgaagacatcctacaggtcctgcagttcactaaagatgtaacagccctcgcctacagccaggatgcatacctcaaaggaaacgaggcatacagtgggaacgctcgtaacattcccgagccccctccaatctgctacccatggctcccttctgcaccttcagccatggcccagccggtggagatctccccacccgattcctctctgtccaaacagcaaacatctactccagtgctgacgcagccgggacgcgcataccgaatggagattcaggtgcctccctcgcccacagacgtagccaagagcaacaccgccgtttgcgtgtgtaatgagtctgtgcgcacagtgattgtcccttccgaaaaagtcgtcgatctactcagcaatagaaacaaccatactgggccttcccataggaccgaggaggttagatatggtgttagtgagcagacatctctgaaaacggtgtctagaacaacatctcctcctctgagcattccaacaacgcacttgatccatcagcccgcaggctctagaagtcttgaaccttctggaatcctactaaaaagcggtaattactctggtcatagcgatggaatctcatcaagccgctctcaagccgttgaggcgccttccgtgtcggtgaatcactatagcccaaacagccaccagcacatagattggaaaaactacaagacttacaaggaatatatagataatcggcgtttgcacatcggctgcagaacaatccaggaacggcttgactccctgagagccgctagtcagagcaccactgactataatcaggtcgtgcccaatcggaccactctgcagggtcggaggagaagcacctcccatgaccgggttccgcagtccgtccaaatccgacagaggagcgttagtcaggagcgactggaagacagcgtcttgatgaaatactgcccacgctctgccagccagggcgcacttaccagcccttcagttagtttctcaaatcatagaacccgatcatgggactacatcgaaggtcaagatgaaaccctcgagaacgtcaacagtgggacccccattcctgattccaatggcgaaaagaagcaaacctataaatggagtggatttaccgaacaagacgatcgcaggggaatttgcgaacgaccacgacagcaggaaatccataaatctttccgcggatctaacttcacagtggccccttccgtcgtcaactctgacaacagacgcatgagtggacgaggagttggatctgtgtcccagtttaaaaagataccacctgatctgaagaccctccagtctaacagaaatttccaaaccacatgcgggatgtctcttcccaggggcatcagccaggacaggagcccactggtgaaggtgcgcagtaatagcctcaaggctccaagtacacacgtcaccaagcctagcttctcccaaaagtctttcgttagtattaaagaccagcggccagttaaccacctccaccagaacagcttgctgaaccaacaaacctgggtcaggacggactccgcgccagaccagcaggtggaaacaggaaagtctccaagtctctccggggctagcgcaaaacccgctccccaatcatccgagaacgcgggtaccagtgaccttgaactgccagtgtcacagaggaaccaggacctctccctgcaggaagccgaaacagaacagtccgacactctggacaacaaagaagccgtgatccttagagagaagcctccctctggcagacagactccacagcctctgagacaccagtcatacattctagctgttaatgaccaagagaccggctctgacaccacatgctggctgccgaacgatgcgcgtcgtgaggtgcatattaagcgcatggaagaacggaaggccagctccacgtcccccccaggagacagtctcgcatctatcccatttatcgatgaacccacatctccttccatcgatcacgacattgctcacattcccgcatcagctgtaatcagcgccagtacatcgcaggtcccgagcattgctacagtgcccccttgtctgacgaccagtgctccactaatacgaaggcagctgtctcatgaccacgagtctgtggggcctccctcattggatgcccagcccaactcaaagaccgagcgaagcaaatcctatgacgaaggtctggacgattatagggaagacgcgaagctgtcattcaaacatgtgtcctcattaaagggcatcaagatcgctgattcccagaaatcatctgaggatagcggctccagaaaagattccagttctgaagtgttttccgatgccgctaaggaaggttggctccacttccggccactcgtcacagataagggaaaaagggtggggggtagcatcagaccgtggaagcagatgtacgtggtcctgcggggtcactctctctacttgtataaggacaagagggaacaaaccacgccttccgaggaagagcagcctatctccgtaaatgcatgcctgatagacatctcctattcagaaacgaagcgcaagaacgtgttccgcctaaccaccagcgattgcgagtgcctgtttcaggcagaagaccgcgacgatatgctggcctggatcaagaccatacaagaatccagcaatcttaatgaggaggataccggagttactaatcgagatcttattagtcgcaggattaaagaatataacaacctcatgtcgaaagcagagcagctcccgaaaacacccagacagagcctctctattcggcaaacgctgctgggcgctaaatcagagcctaaaacccagagccctcattccccaaaggaggaatcagagcggaaacttctgagtaaagacgatactagtccaccgaaggataaagggacctggcggaaaggaataccatcgatcatgtag

SEQ ID NO: 271926 - DNA, 4210 bp, Artificial Sequence
  derived and/or modified sequence
atcaatatgacaacatgattttgtctttatatcagtaagcagcttctactatgttttcctattttctgctagctacagtttacaaaggatgtcacagcactggcatattctcaagatgcctacctgaaaggcaacgaagcttatagcggcaatgcccgcaatatacctgaacctccaccaatctgctatccctggctgccatctgccccatcagccatggcacagccagttgaaatatctcctcctgactcatcattgagcaaacagcaaaccagtacaccagtactgacacaacctggtagggcctatagaatggaaatacaagtgcctccatcaccaacagatgttgcaaaatcaaacacagcagtgtgtgtttgcaatgaaagtgtaaggactgtcattgtgccttctgagaaggttgtagatttgttatccaatagaaacaaccatacaggtccttcacatagaactgaagaagtgaggtatggcgtgagtgagcagacctctttaaaaacagtgtcaagaaccacatcaccaccattatcaattcccaccactcatctaattcatcagcctgcaggctccagatcactggaaccttctggaattttacttaagtctggaaattacagtggacattctgatggaatctcaagcagcagatctcaagctgtggaggctccctctgtatctgttaatcactattcgccaaattcccatcagcacatagactggaaaaactataaaacttacaaagagtatattgataacagacgattgcacataggttgtcggacaatacaagaaagattagatagtttaagagcagcatctcaaagcacgacagattataaccaggtcgtccccaaccgcactactttgcagggacgacgtcgaagcacctctcatgatcgagtgccccagtctgtccagatacggcaacgcagtgtgtcccaagaaagactggaagattctgtgctaatgaagtattgtccaagaagtgcatctcaaggagcactgacgtctccatctgttagttttagtaatcatagaactcgttcatgggattatattgagggacaggatgaaaccttagaaaatgtcaattctggaactccaatacctgattccaatggagagaaaaaacagacttacaagtggagtgggtttactgaacaggatgatagacgaggtatttgtgaaagacctaggcagcaagaaattcataaatcttttcgaggttccaattttactgtggctccaagcgttgttaattctgataacaggcgaatgagtggtagaggagtgggatctgtgtcgcagtttaaaaaaattccaccagatctaaaaacattgcagtcaaacagaaattttcagactacttgtggaatgtcactgcctcggggtatttcacaagacaggtcacctcttgtgaaagtccgaagtaattctctgaaagctccttccacgcatgtcacaaaaccatcatttagccagaaatcatttgtttctatcaaagaccaaagaccagtaaatcacttgcatcagaacagtctgttgaatcagcagacatgggtaaggactgacagtgcccccgatcagcaagtggagactgggaaatccccctctttatctggagcctctgccaagcctgcccctcagtcgagtgaaaacgctggtacttcagatttagaactacctgtcagtcaaaggaatcaagatttaagtttacaagaggctgaaactgagcaatcagatactttagataataaagaagctgtcatcctaagggaaaaacctccatctggacgccagacaccgcagcctttaaggcatcagtcttacatcttggcagtaaatgaccaggagaccgggtcagacactacctgctggctgcccaatgatgcacgtcgagaggtccacataaaaagaatggaggaaagaaaagcctcgagtaccagtccgcctggcgattctttggcttccatcccatttatagatgaaccaactagccctagcattgatcatgatattgcacatatccctgcctctgctgttatatcagcctctacctctcaggtcccctccatagcaacagttcctccttgcctcacaacttcagctccattaattcgccgtcagctctcacatgaccacgaatctgttggccctcctagcctggatgctcagcccaactcaaagacagaaagatcaaaatcatatgatgagggtctggatgattacagagaagatgcaaaattgtcctttaagcacgtatctagtctgaagggaatcaagatcgcagacagccaaaagtcatcagaagactctgggtccagaaaagattcttcctcagaggtcttcagtgatgctgccaaggaagggtggcttcatttccgaccccttgtcaccgataagggcaagcgagttggtggaagtattcggccatggaaacagatgtatgttgtccttcggggtcattcactttacctgtacaaagataaaagagagcagacgactccgtctgaggaagagcagcccatcagtgttaatgcttgcttgatagacatctcttacagtgagaccaagaggaaaaatgtgtttcgactcaccacgtccgactgtgaatgcctgtttcaggctgaagacagagatgatatgctagcttggatcaagacgatccaggagagcagcaacctaaacgaagaggacactggagtcactaacagggatctaattagtcgaagaataaaagaatacaacaatctgatgagcaaagcagaacagttgccaaaaacacctcgccagagtctcagcatcaggcaaactttgcttggtgctaaatcagagccaaagactcaaagcccacactctccgaaggaagagtcggaaaggaaacttctcagtaaagatgataccagtcccccaaaagacaaaggcacatggagaaaaggcattccaagtatcatgagaaagacatttgagaaaaagccaactgctacaggaactttcggcgtccgactagatgactgcccaccagctcatactaatcggtatattccattaatagttgacatatgttgcaaattagttgaagaaagaggtcttgaatatacaggtatttatagagttcctggaaataatgcagccatctcaagtatgcaagaagaactcaacaagggaatggctgatattgatatacaagatgataaatggcgagatttgaatgtgataagcagtttactaaaatccttcttcagaaaactccctgagcctctcttcacaaatgataaatatgctgattttattgaagccaatcgtaaagaagatcctctagatcgtctgaaaacattaaaaagactaattcacgatttgcctgaacatcattatgaaacacttaagttcctttcagctcatctgaagacagtggcagaaaattcagaaaaaaataagatggaaccaagaaacctagcaatagtgtttggtcccacccttgttcgaacatcagaagacaacatgacccacatggtcacccacatgcctgaccagtacaagattgtagaaacgctcatccagcaccatgactggtttttcacagaagaaggtgctgaagagcctcttacaacagtgcaggaggaaagcacagtagactcccagccagtgccaaacatagatcatttactcaccaacattggaaggacaggagtctccccaggagatgtatcaggcgaagtgggaggagtctatcacacggtaatgtcactagtggattctgtgatgtccctgatggacagctggaactgtaggaagaaggaggactgttgtccacactgtagctgccttgtctgcagaaatccccgattcttgtaaatgcaaacatagttgatctgtggtgtaaagtttctcataagattattgtaaacagatcaatactactttcttaaaagtttttctgctgtttcttgttatttctgaagcagaccctgaggagaaatagcatgattcagctactagtgactcaacaaaatctaagggttcttggggatctggaaaggatcagtatagcagggaactgcttgtgtcctccatctttgcagctgctagtcgcaagaggaagaagccgaaagaaaaagcacagcctagcagctcagaagatgaactggacaatgtattttttaagaaagaaaatgtggaacagtgtcacaatgat

SEQ ID NO: 271927 - DNA, 7167 bp, Artificial Sequence
  derived and/or modified sequence
gcgggatcgtccggctgcggggtccggctcacgccgggcgggcgggcggggcgcgctgtcccggagccggccagccccgtgcggatccactcgtcccgcttcctctggatctctctaggagctgacactcgaaccttcacgacccattcggatttttccaggactcaggagtggcactgggaagaaggggaccgctttctgcaattggcctcgacactggctgccaagaagacctgtcgcctttgtttttaagtctccagaaatggaagaagaaggcgaagtcagttgaagtcacgagaaatcagcgaggcatttgaaggcgcttcctgaaaacctttattccctggcacgttgtctgtttcaacagccctgcccctcctcggagcctgcttgtggaattcttccccttcgggtgtgtggtggcattccccgccacgtccaatgtggactccaaaggatttgtcccttctttgtcatttgaaatgaaatgatggccacgcgtcggactggtctgtctgagggagatggtgacaagctcaaggcctgcgaggtctcaaaaaataaagatggaaaagaacaaagtgaaactgtatcactgtctgaagatgaaacattctcctggccaggtcccaaaacagttacgttgaaaagaacatctcaaggctttggttttacattaagacattttattgtttatcccccagagtctgcaattcaattttcatataaggatgaagaaaatggaaacagaggaggaaaacaaagaaaccgcttggaaccaatggataccatatttgttaagcaagttaaagaaggaggacctgcttttgaagctggattatgtacaggtgaccgaattataaaagtcaatggagaaagtgttattggcaaaacctattcccaagtaattgctttaattcaaaacagtgatacaacattggaacttagtgttatgccaaaagatgaagacattctccaagtgctacagtttacaaaggatgtcacagcactggcatattctcaagatgcctacctgaaaggcaacgaagcttatagcggcaatgcccgcaatatacctgaacctccaccaatctgctatccctggctgccatctgccccatcagccatggcacagccagttgaaatatctcctcctgactcatcattgagcaaacagcaaaccagtacaccagtactgacacaacctggtagggcctatagaatggaaatacaagtgcctccatcaccaacagatgttgcaaaatcaaacacagcagtgtgtgtttgcaatgaaagtgtaaggactgtcattgtgccttctgagaaggttgtagatttgttatccaatagaaacaaccatacaggtccttcacatagaactgaagaagtgaggtatggcgtgagtgagcagacctctttaaaaacagtgtcaagaaccacatcaccaccattatcaattcccaccactcatctaattcatcagcctgcaggctccagatcactggaaccttctggaattttacttaagtctggaaattacagtggacattctgatggaatctcaagcagcagatctcaagctgtggaggctccctctgtatctgttaatcactattcgccaaattcccatcagcacatagactggaaaaactataaaacttacaaagagtatattgataacagacgattgcacataggttgtcggacaatacaagaaagattagatagtttaagagcagcatctcaaagcacgacagattataaccaggtcgtccccaaccgcactactttgcagggacgacgtcgaagcacctctcatgatcgagtgccccagtctgtccagatacggcaacgcagtgtgtcccaagaaagactggaagattctgtgctaatgaagtattgtccaagaagtgcatctcaaggagcactgacgtctccatctgttagttttagtaatcatagaactcgttcatgggattatattgagggacaggatgaaaccttagaaaatgtcaattctggaactccaatacctgattccaatggagagaaaaaacagacttacaagtggagtgggtttactgaacaggatgatagacgaggtatttgtgaaagacctaggcagcaagaaattcataaatcttttcgaggttccaattttactgtggctccaagcgttgttaattctgataacaggcgaatgagtggtagaggagtgggatctgtgtcgcagtttaaaaaaattccaccagatctaaaaacattgcagtcaaacagaaattttcagactacttgtggaatgtcactgcctcggggtatttcacaagacaggtcacctcttgtgaaagtccgaagtaattctctgaaagctccttccacgcatgtcacaaaaccatcatttagccagaaatcatttgtttctatcaaagaccaaagaccagtaaatcacttgcatcagaacagtctgttgaatcagcagacatgggtaaggactgacagtgcccccgatcagcaagtggagactgggaaatccccctctttatctggagcctctgccaagcctgcccctcagtcgagtgaaaacgctggtacttcagatttagaactacctgtcagtcaaaggaatcaagatttaagtttacaagaggctgaaactgagcaatcagatactttagataataaagaagctgtcatcctaagggaaaaacctccatctggacgccagacaccgcagcctttaaggcatcagtcttacatcttggcagtaaatgaccaggagaccgggtcagacactacctgctggctgcccaatgatgcacgtcgagaggtccacataaaaagaatggaggaaagaaaagcctcgagtaccagtccgcctggcgattctttggcttccatcccatttatagatgaaccaactagccctagcattgatcatgatattgcacatatccctgcctctgctgttatatcagcctctacctctcaggtcccctccatagcaacagttcctccttgcctcacaacttcagctccattaattcgccgtcagctctcacatgaccacgaatctgttggccctcctagcctggatgctcagcccaactcaaagacagaaagatcaaaatcatatgatgagggtctggatgattacagagaagatgcaaaattgtcctttaagcacgtatctagtctgaagggaatcaagatcgcagacagccaaaagtcatcagaagactctgggtccagaaaagattcttcctcagaggtcttcagtgatgctgccaaggaagggtggcttcatttccgaccccttgtcaccgataagggcaagcgagttggtggaagtattcggccatggaaacagatgtatgttgtccttcggggtcattcactttacctgtacaaagataaaagagagcagacgactccgtctgaggaagagcagcccatcagtgttaatgcttgcttgatagacatctcttacagtgagaccaagaggaaaaatgtgtttcgactcaccacgtccgactgtgaatgcctgtttcaggctgaagacagagatgatatgctagcttggatcaagacgatccaggagagcagcaacctaaacgaagaggacactggagtcactaacagggatctaattagtcgaagaataaaagaatacaacaatctgatgagcaaagcagaacagttgccaaaaacacctcgccagagtctcagcatcaggcaaactttgcttggtgctaaatcagagccaaagactcaaagcccacactctccgaaggaagagtcggaaaggaaacttctcagtaaagatgataccagtcccccaaaagacaaaggcacatggagaaaaggcattccaagtatcatgagaaagacatttgagaaaaagccaactgctacaggaactttcggcgtccgactagatgactgcccaccagctcatactaatcggtatattccattaatagttgacatatgttgcaaattagttgaagaaagaggtcttgaatatacaggtatttatagagttcctggaaataatgcagccatctcaagtatgcaagaagaactcaacaagggaatggctgatattgatatacaagatgataaatggcgagatttgaatgtgataagcagtttactaaaatccttcttcagaaaactccctgagcctctcttcacaaatgataaatatgctgattttattgaagccaatcgtaaagaagatcctctagatcgtctgaaaacattaaaaagactaattcacgatttgcctgaacatcattatgaaacacttaagttcctttcagctcatctgaagacagtggcagaaaattcagaaaaaaataagatggaaccaagaaacctagcaatagtgtttggtcccacccttgttcgaacatcagaagacaacatgacccacatggtcacccacatgcctgaccagtacaagattgtagaaacgctcatccagcaccatgactggtttttcacagaagaaggtgctgaagagcctcttacaacagtgcaggaggaaagcacagtagactcccagccagtgccaaacatagatcatttactcaccaacattggaaggacaggagtctccccaggagatgtatcagattcagctactagtgactcaacaaaatctaagggttcttggggatctggaaaggatcagtatagcagggaactgcttgtgtcctccatctttgcagctgctagtcgcaagaggaagaagccgaaagaaaaagcacagcctagcagctcagaagatgaactggacaatgtattttttaagaaagaaaatgtggaacagtgtcacaatgatactaaagaggagtccaaaaaagaaagtgagacactgggcagaaaacagaagatcatcattgccaaagaaaacagcactaggaaagaccccagcacgacaaaagatgaaaagatatcactaggaaaagagagcacgccttctgaagaaccctcaccaccacacaactcaaaacacaacaagtcaccaactctcagctgtcgctttgccatcctgaaagagagccccaggtcacttctggcacagaagtcctcccaccttgaagagacaggctctgactctggcactttgctcagcacgtcttcccaggcctccctggcaaggttttccatgaagaaatcaaccagtccagaaacgaaacatagcgagtttttggccaacgtcagcaccatcacctcagattattccaccacatcgtctgctacatacttgactagcctggactccagtcgactgagccctgaggtgcaatccgtggcagagagcaagggggacgaggcagatgacgagagaagcgaactcatcagtgaagggcggcctgtggaaaccgacagcgagagcgagtttcccgtgttccccacagccttgacttcagagaggcttttccgaggaaaactgcaagaagtgactaagagcagccggagaaattctgaaggaagtgaattaagttgcaccgagggaagtttaacatcaagtttagatagccggagacagctcttcagttcccataaactcatcgaatgtgatactctttccaggaaaaaatcagctagattcaagtcagatagtggaagtctaggagatgccaagaatgagaaagaagcaccttcgttaactaaagtgtttgatgttatgaaaaaaggaaagtcaactgggagtttactgacacccaccagaggcgaatccgaaaaacaggaacccacatggaaaacgaaaatagcagatcggttaaaactgagacccagagcccctgcggatgacatgtttggagtagggaatcacaaagtgaatgccgagactgctaaaaggaaaagcatccggcgcagacatacactaggagggcacagagatgctaccgaaatcagcgttttgaatttttggaaagtgcatgagcagagcggggagagagaatctgaactttcagctgtaaaccggttaaaaccaaaatgctcagcccaggacctttccatctcagactggctggccagggaacgcctacgcaccagtacctctgaccttagcagaggagaaatcggagatccccagacagagaacccaagcacacgagaaatagccacgaccgacacacctttgtctcttcattgcaacacaggcagttcttccagcaccttggcttcaacaaacaggccccttctttccataccaccacagtcacctgaccaaataaacggagaaagcttccagaacgtgagcaaaaatgctagttctgcagcgaatgcccaacctcataaactgtctgaaaccccaggcagtaaagcagagtttcatccctgtctttaaactgggggtatgtccactctagcaagtaaaaaaactactgttacacgttccagtaactctgtcaatattttcttgtatcagaattgttattatgcagccttcatttgggctggtttcatcattttgcactgtgaaatagctttacagtgcattactacagccagaagaacatatatatatatatatatatttaaaaatatatcggatagttgtatacaaatgagcaaggtatttgttgcaacttactacatagcatatacccaaaatcactgaagaaaatcgctggcatcagtgtgcagcaaatttgttcttttggtttcatcactaacaaaagtgcctcatcataaaaatacagttggtttttagggtgccatattgttaaaattagataacttacttacattgaataaacgaatgcgttttattggtaacagatatcattacatttaccagttttaacacaggtggatacagaacttccattctttagtcattccaggtggatctgagttttatattcaaacttttaatacagtttttgagttttgtgtgacttgaatttttaatctttctgtaaaatacgtaacttaaatgaacatattaaatgtgtatcttttcttcagataccagatttgatataatgttgtaacataggtgtgtagatagtggatcctggatggaactggcttctttatcgagaagaatataattctgcatgaggacttaatgaatccaaacctgtgtcatgcctgtgtgcatacccaattaaacactggaaataaaaattgttttggtgaattttg

SEQ ID NO: 271928 - DNA, 3859 bp, Artificial Sequence
  derived and/or modified sequence
cccggccgggcccggcgcccggccagcgtctccgcttcagctcgccgccgcgcttcggccgccgggcccgagcgggcgggaagggatctctctaggagctgacactcgaaccttcacgacccattcggatttttccaggactcaggagtggcactgggaagaaggggaccgctttctgcaattggcctcgacactggctgccaagaagacctgtcgcctttgtttttaagtctccagaaatggaagaagaaggcgaagtcagttgaagtcacgagaaatcagcgaggcatttgaaggcgcttcctgaaaacctttattccctggcacgttgtctgtttcaacagccctgcccctcctcggagcctgcttgtggaattcttccccttcgggtgtgtggtggcattccccgccacgtccaatgtggactccaaaggatttgtcccttctttgtcatttgaaatgaaatgatggccacgcgtcggactggtctgtctgagggagatggtgacaagctcaaggcctgcgaggtctcaaaaaataaagatggaaaagaacaaagtgaaactgtatcactgtctgaagatgaaacattctcctggccaggtcccaaaacagttacgttgaaaagaacatctcaaggctttggttttacattaagacattttattgtttatcccccagagtctgcaattcaattttcatataaggatgaagaaaatggaaacagaggaggaaaacaaagaaaccgcttggaaccaatggataccatatttgttaagcaagttaaagaaggaggacctgcttttgaagctggattatgtacaggtgaccgaattataaaagtcaatggagaaagtgttattggcaaaacctattcccaagtaattgctttaattcaaaacagtgatacaacattggaacttagtgttatgccaaaagatgaagacattctccaagtgctacagtttacaaaggatgtcacagcactggcatattctcaagatgcctacctgaaaggcaacgaagcttatagcggcaatgcccgcaatatacctgaacctccaccaatctgctatccctggctgccatctgccccatcagccatggcacagccagttgaaatatctcctcctgactcatcattgagcaaacagcaaaccagtacaccagtactgacacaacctggtagggcctatagaatggaaatacaagtgcctccatcaccaacagatgttgcaaaatcaaacacagcagtgtgtgtttgcaatgaaagtgtaaggactgtcattgtgccttctgagaaggttgtagatttgttatccaatagaaacaaccatacaggtccttcacatagaactgaagaagtgaggtatggcgtgagtgagcagacctctttaaaaacagtgtcaagaaccacatcaccaccattatcaattcccaccactcatctaattcatcagcctgcaggctccagatcactggaaccttctggaattttacttaagtctggaaattacagtggacattctgatggaatctcaagcagcagatctcaagctgtggaggctccctctgtatctgttaatcactattcgccaaattcccatcagcacatagactggaaaaactataaaacttacaaagagtatattgataacagacgattgcacataggttgtcggacaatacaagaaagattagatagtttaagagcagcatctcaaagcacgacagattataaccaggtcgtccccaaccgcactactttgcagggacgacgtcgaagcacctctcatgatcgagtgccccagtctgtccagatacggcaacgcagtgtgtcccaagaaagactggaagattctgtgctaatgaagtattgtccaagaagtgcatctcaaggagcactgacgtctccatctgttagttttagtaatcatagaactcgttcatgggattatattgagggacaggatgaaaccttagaaaatgtcaattctggaactccaatacctgattccaatggagagaaaaaacagacttacaagtggagtgggtttactgaacaggatgatagacgaggtatttgtgaaagacctaggcagcaagaaattcataaatcttttcgaggttccaattttactgtggctccaagcgttgttaattctgataacaggcgaatgagtggtagaggagtgggatctgtgtcgcagtttaaaaaaattccaccagatctaaaaacattgcagtcaaacagaaattttcagactacttgtggaatgtcactgcctcggggtatttcacaagacaggtcacctcttgtgaaagtccgaagtaattctctgaaagctccttccacgcatgtcacaaaaccatcatttagccagaaatcatttgtttctatcaaagaccaaagaccagtaaatcacttgcatcagaacagtctgttgaatcagcagacatgggtaaggactgacagtgcccccgatcagcaagtggagactgggaaatccccctctttatctggagcctctgccaagcctgcccctcagtcgagtgaaaacgctggtacttcagatttagaactacctgtcagtcaaaggaatcaagatttaagtttacaagaggctgaaactgagcaatcagatactttagataataaagaagctgtcatcctaagggaaaaacctccatctggacgccagacaccgcagcctttaaggcatcagtcttacatcttggcagtaaatgaccaggagaccgggtcagacactacctgctggctgcccaatgatgcacgtcgagaggtccacataaaaagaatggaggaaagaaaagcctcgagtaccagtccgcctggcgattctttggcttccatcccatttatagatgaaccaactagccctagcattgatcatgatattgcacatatccctgcctctgctgttatatcagcctctacctctcaggtcccctccatagcaacagttcctccttgcctcacaacttcagctccattaattcgccgtcagctctcacatgaccacgaatctgttggccctcctagcctggatgctcagcccaactcaaagacagaaagatcaaaatcatatgatgagggtctggatgattacagagaagatgcaaaattgtcctttaagcacgtatctagtctgaagggaatcaagatcgcagacagccaaaagtcatcagaagactctgggtccagaaaagattcttcctcagaggtcttcagtgatgctgccaaggaagggtggcttcatttccgaccccttgtcaccgataagggcaagcgagttggtggaagtattcggccatggaaacagatgtatgttgtccttcggggtcattcactttacctgtacaaagataaaagagagcagacgactccgtctgaggaagagcagcccatcagtgttaatgcttgcttgatagacatctcttacagtgagaccaagaggaaaaatgtgtttcgactcaccacgtccgactgtgaatgcctgtttcaggctgaagacagagatgatatgctagcttggatcaagacgatccaggagagcagcaacctaaacgaagaggacactggagtcactaacagggatctaattagtcgaagaataaaagaatacaacaatctgatgagcaaagcagaacagttgccaaaaacacctcgccagagtctcagcatcaggcaaactttgcttggtgctaaatcagagccaaagactcaaagcccacactctccgaaggaagagtcggaaaggaaacttctcagtaaagatgataccagtcccccaaaagacaaaggcacatggagaaaaggcattccaagtatcatgag
